United States Patent Application Publication US 2017/0114356 A1 - sequence listing, part 41

SEQ ID NO: 54846 - DNA, 2912 bp, Zea Mays
cacggaggtcgccttccgcatggacaacattcgcgacgagatgctacaactacactcatgacagcttcaatagcatatctgcattttttcctcgtcctcagaatcttctctctcgcaagatctatgggaggaatacattgatctgatcatgtagtgcatgtgcaatgatacctgtgaaatagaagtcgttttctggggggagctccatcgtcgggaagaggggtcatggctcaccacggacaaaaggtagtttatgatcaagctggtgtgggaggctcaccacggacaaaagacggcacactgagcttgcacagtcaggattttgacagctgttgtcaacgaaggcgagaatggtgtactctaagctcagcaatttccagaaaaaatcgttaacttgcaagttagtttcaatatttctagcatattccaatcacagcatcgtccagcgcacacccatccaatttaggggcttcttgttgtgctctcaggccccagtaagaactccaatccctagatctcttttcgtgtgttaagttgtgcttaagaactgctgatgcagacattaggttagggcaaggattttggttaattggaataaggcagcgctttaaccttagttcctcagtttcagctttaacatgtgttgtctccatagtatatgctctgattaacatggcggagaggatttgtgaggtgaattacttgtaagatgttatctaagtggggggacagggaaagggaactgtggctccattgaggatgatagtgttatgaatttcttctcctactttagagctctgttctatattgttcttcggtaaatcggttgttgcattacttataaggtatgcctaatttactgttcttggttaggcaccatagatcctgtcattgtttgagtgcagtaaaccatgtaaattctctcttataagttgtccttttaattatactaataatcgattgtccaaatttgtttagacaccatattattttgtcattatttgagtacagaaagaagtaaactctcttacttataaatgtgctaataattctctatctaaatttaggcacttgaaatataccaactcgcatataagatataaattatattaacgatgccacgccaaatgtgtacttccctaggtcgaaaagcaaggtcctgtcatcacaaactcctagcaaatttagcgatatgtcatgagaacaagacaggacaacattacagcctcagaggtaataaccttcgttttctatttgcttcagccaacttgatttaccagcttatcttcttccactttctgcccatttcctattgattcagtccttctactcagctttggaggttgtctgtttacaaatacggaattgtccccaatactgtttttatgatgttaacaccatgaaccgagtagcagtttatgcccatgagaatgcttcaatgccccatttgggtcttgtgggcaaatgatcggatggtgcataacttcgatgtagcttatttgatcagcttataatggaacgatgggaagactttgatccaccacagcgcttgggatgttgagctgcaatttgaattgacaattatttgacaacaactaaaatacattttttcttgcttctgctcttgcagtctttgtaaattcaggtgtcagtgttggattcaaattacttttaaaaaaatagaggttagcattccactagaatatatggtcacatgtggctacttatttcctgcattcaaaatgtagtcacatgagtagtggtgaactgatgatgccatatgtggctacttatttcttgcattgaaaatgtggagctaaagtgtgtatgttttgttacacaaacgttggtgttgttgtgctccttttgctgaagcactgccttttacggttagcgacactcaatgttcgatcacttgtacaaaacaagatatgtattttcttttgagcaattcttttaaaatatatggggcaatgaagagcttcatattgtgttgaacctcagtctataatatttagttgcaagtgagagttttatacttacgacatgctacattttgttatccttatagttggttagcctattgtagaaggtggttgaacttgtactttgagaccaaatatatattgcatacttgatattatactattatttgagcttgtcttattgtactcttatctgttcttatgaaggttagaggaatgtgtttggggtgagtaatttttttgtgttgtttcctctatccatggccatggaggagcaaaggaggccacctagctcgaagatagcgccagtgtccatgaaggcgtcctctgcaaatgcgacgcttcaaggcatgaagaacagaagccattttcgaagggacaggaaaactgcgctgcaacaagacgtgtggacaagctgaggaagaagttgtggcacgagaagaacgtccactaagctctaaagcaggcgttctcgaggccgctctgcctcgcctccctattgtctcaagtcaatgtccttctttgcttttcgatcaatttcacaagcaagaagcaacctaaccaataatctattgcccttccgaaggactcgatacactttctgatttctgcctcttctgaattgttcctagacattggagcttctggccccgttgtaagtggaaaatccttgtacttaaaggttgcaatgtagtggccccgttgtaacgcacgggcactcacctagtgtcaataagaagtacaagctcttgtctgctggtaaaagaaaaacatcttgactggacagtgacattaatataataaaaacggtgtttggctgctatggaaaaatgccagccgactttcttttaaaaaaaatatgctagccgatgtatttttgttggactctatggaaagatgtttttcttttaccagcagacaagagct

SEQ ID NO: 54847 - DNA, 2740 bp, Zea Mays
ccacggaggtcgccttccgcatggacaacattcgcgacgagatgctacaactacactcatgacagcttcaatagcatatctgcattttttcctcgtcctcagaatcttctctctcgcaagatctatgggaggaatacattgatctgatcatgtagtgcatgtgcaatgatacctgtgaaatagaagtcgttttctggggggagctccatcgtcgggaagaggggtcatggctcaccacggacaaaaggattttgacagctgttgtcaacgaaggcgagaatggtgtactctaagctcagcaatttccagaaaaaatcgttaacttgcaagttagtttcaatatttctagcatattccaatcacagcatcgtccagcgcacacccatccaatttaggggcttcttgttgtgctctcaggccccagtaagaactccaatccctagatctcttttcgtgtgttaagttgtgcttaagaactgctgatgcagacattaggttagggcaaggattttggttaattggaataaggcagcgctttaaccttagttcctcagtttcagctttaacatgtgttgtctccatagtatatgctctgattaacatggcggagaggatttgtgaggtgaattacttgtaagatgttatctaagtggggggacagggaaagggaactgtggctccattgaggatgatagtgttatgaatttcttctcctactttagagctctgttctatattgttcttcggtaaatcggttgttgcattacttataaggtatgcctaatttactgttcttggttaggcaccatagatcctgtcattgtttgagtgcagtaaaccatgtaaattctctcttataagttgtccttttaattatactaataatcgattgtccaaatttgtttagacaccatattattttgtcattatttgagtacagaaagaagtaaactctcttacttataaatgtgctaataattctctatctaaatttaggcacttgaaatataccaactcgcatataagatataaattatattaacgatgccacgccaaatgtgtacttccctaggtcgaaaagcaaggtcctgtcatcacaaactcctagcaaatttagcgatatgtcatgagaacaagacaggacaacattacagcctcagagctttggaggttgtctgtttacaaatacggaattgtccccaatactgtttttatgatgttaacaccatgaaccgagtagcagtttatgcccatgagaatgcttcaatgccccatttgggtcttgtgggcaaatgatcggatggtgcataacttcgatgtagcttatttgatcagcttataatggaacgatgggaagactttgatccaccacagcgcttgggatgttgagctgcaatttgaattgacaattatttgacaacaactaaaatacattttttcttgcttctgctcttgcagtctttgtaaattcaggtgtcagtgttggattcaaattacttttaaaaaaatagaggttagcattccactagaatatatggtcacatgtggctacttatttcctgcattcaaaatgtagtcacatgagtagtggtgaactgatgatgccatatgtggctacttatttcttgcattgaaaatgtggagctaaagtgtgtatgttttgttacacaaacgttggtgttgttgtgctccttttgctgaagcactgccttttacggttagcgacactcaatgttcgatcacttgtacaaaacaagatatgtattttcttttgagcaattcttttaaaatatatggggcaatgaagagcttcatattgtgttgaacctcagtctataatatttagttgcaagtgagagttttatacttacgacatgctacattttgttatccttatagttggttagcctattgtagaaggtggttgaacttgtactttgagaccaaatatatattgcatacttgatattatactattatttgagcttgtcttattgtactcttatctgttcttatgaaggttagaggaatgtgtttggggtgagtaatttttttgtgttgtttcctctatccatggccatggaggagcaaaggaggccacctagctcgaagatagcgccagtgtccatgaaggcgtcctctgcaaatgcgacgcttcaaggcatgaagaacagaagccattttcgaagggacaggaaaactgcgctgcaacaagacgtgtggacaagctgaggaagaagttgtggcacgagaagaacgtccactaagctctaaagcaggcgttctcgaggccgctctgcctcgcctccctattgtctcaagtcaatgtccttctttgcttttcgatcaatttcacaagcaagaagcaacctaaccaataatctattgcccttccgaaggactcgatacactttctgatttctgcctcttctgaattgttcctagacattggagcttctggccccgttgtaagtggaaaatccttgtacttaaaggttgcaatgtagtggccccgttgtaacgcacgggcactcacctagtgtcaataagaagtacaagctcttgtctgctggtaaaagaaaaacatcttgactggacagtgacattaatataataaaaacggtgtttggctgctatggaaaaatgccagccgactttcttttaaaaaaaatatgctagccgatgtatttttgttggactctatggaaagatgtttttcttttaccagcagacaagagct

SEQ ID NO: 54848 - DNA, 2137 bp, Zea Mays
ccacggaggtcgccttccgcatggacaacattcgcgacgagatgctacaactacactcatgacagcttcaatagcatatctgcattttttcctcgtcctcagaatcttctctctcgcaagatctatgggaggaatacattgatctgatcatgtagtgcatgtgcaatgatacctgtgaaatagaagtcgttttctggggggagctccatcgtcgggaagaggggtcatggctcaccacggacaaaaggtagtttatgatcaagctggtgtgggaggctcaccacggacaaaaggattttgacagctgttgtcaacgaaggcgagaatggtgtactctaagctcagcaatttccagaaaaaatcgttaacttgcaagttagtttcaatatttctagcatattccaatcacagcatcgtccagcgcacacccatccaatttaggggcttcttgttgtgctctcaggccccagtcgaaaagcaaggtcctgtcatcacaaactcctagcaaatttagcgatatgtcatgagaacaagacaggacaacattacagcctcagagctttggaggttgtctgtttacaaatacggaattgtccccaatactgtttttatgatgttaacaccatgaaccgagtagcagtttatgcccatgagaatgcttcaatgccccatttgggtcttgtgggcaaatgatcggatggtgcataacttcgatgtagcttatttgatcagcttataatggaacgatgggaagactttgatccaccacagcgcttgggatgttgagctgcaatttgaattgacaattatttgacaacaactaaaatacattttttcttgcttctgctcttgcagtctttgtaaattcaggtgtcagtgttggattcaaattacttttaaaaaaatagaggttagcattccactagaatatatggtcacatgtggctacttatttcctgcattcaaaatgtagtcacatgagtagtggtgaactgatgatgccatatgtggctacttatttcttgcattgaaaatgtggagctaaagtgtgtatgttttgttacacaaacgttggtgttgttgtgctccttttgctgaagcactgccttttacggttagcgacactcaatgttcgatcacttgtacaaaacaagatatgtattttcttttgagcaattcttttaaaatatatggggcaatgaagagcttcatattgtgttgaacctcagtctataatatttagttgcaagtgagagttttatacttacgacatgctacattttgttatccttatagttggttagcctattgtagaaggtggttgaacttgtactttgagaccaaatatatattgcatacttgatattatactattatttgagcttgtcttattgtactcttatctgttcttatgaaggttagaggaatgtgtttggggtgagtaatttttttgtgttgtttcctctatccatggccatggaggagcaaaggaggccacctagctcgaagatagcgccagtgtccatgaaggcgtcctctgcaaatgcgacgcttcaaggcatgaagaacagaagccattttcgaagggacaggaaaactgcgctgcaacaagacgtgtggacaagctgaggaagaagttgtggcacgagaagaacgtccactaagctctaaagcaggcgttctcgaggccgctctgcctcgcctccctattgtctcaagtcaatgtccttctttgcttttcgatcaatttcacaagcaagaagcaacctaaccaataatctattgcccttccgaaggactcgatacactttctgatttctgcctcttctgaattgttcctagacattggagcttctggccccgttgtaagtggaaaatccttgtacttaaaggttgcaatgtagtggccccgttgtaacgcacgggcactcacctagtgtcaataagaagtacaagctcttgtctgctggtaaaagaaaaacatcttgactggacagtgacattaatataataaaaacggtgtttggctgctatggaaaaatgccagccgactttcttttaaaaaaaatatgctagccgatgtatttttgttggactctatggaaagatgtttttcttttaccagcagacaagagct

SEQ ID NO: 54849 - DNA, 3253 bp, Zea Mays
ctccacggaggtcgccttccgcatggacaacattcgcgacgagatgctacaactacactcatgacagcttcaatagcatatctgcattttttcctcgtcctcagaatcttctctctcgcaagatctatgggaggaatacattgatctgatcatgtagtgcatgtgcaatgatacctgtgaaatagaagtcgttttctggggggagctccatcgtcgggaagaggggtcatggctcaccacggacaaaaggtagtttatgatcaagctggtgtgggaggctcaccacggacaaaaggttcgtgatttccatcaccacgctcccacaggttacaattattttcttgaattttccattcgattatatcactttctaaatcccactggttatgtacatgagcaagatttttatacttaaataaatattgcttgctgtttccttggattgtaagagatgctaataacgaagctgtcccaattagacggcacactgagcttgcacagtcaggtacatgatcccttgtcactgtaccagtttctgtgcttctctctcatgaaaacaactgttgggattatttgtttctgaagatcagtgcatttattagttctctcatgaaacacaacactatgatttaaatgctcacattttgattactgtgtaaacaatgggacatacaagatttttttaggtttttgtagctcattattatagtatgtgttattaatatgatgtagcaggcaacatagtatcctgcgattcctaattagttgatgcctaagggtttttgtagcttatgcaactaagaaaacttcttcaggctagaaaaaaactttgaagtgtgggacatggtgcttagaaagtgtggcaagcatcgaatttacattgatgtagtccatggtgtaggatttttagatggcaaacacatcataatttgtgtttacaattgtttattaggaggcacattgaccattgcttccttccaaaatttatatgttgcagtttacttccttaagaaactaactgaagcattatgaggagctgtagcaaatcgacaatccatctgctattgctaataatcatgctattttggcaatggcaaaatttatatgttgtagactacaacaaacaatgtctatgaagtcgttgacatctggattatattctattagtgctgatctggatcaattcttgtttattaggagacttcaaatgttttctctcccctataaaaacactttgtttcatttgcttataattaactgctgcactgtccatggattgctctctcattctacttcctatgattttaggattttgacagctgttgtcaacgaaggcgagaatggtgtactctaagctcagcaatttccagaaaaaatcgttaacttgcaagttagtttcaatatttctagcatattccaatcacagcatcgtccagcgcacacccatccaatttaggggcttcttgttgtgctctcaggccccagtcgaaaagcaaggtcctgtcatcacaaactcctagcaaatttagcgatatgtcatgagaacaagacaggacaacattacagcctcagaggtaataaccttcgttttctatttgcttcagccaacttgatttaccagcttatcttcttccactttctgcccatttcctattgattcagtccttctactcagctttggaggttgtctgtttacaaatacggaattgtccccaatactgtttttatgatgttaacaccatgaaccgagtagcagtttatgcccatgagaatgcttcaatgccccatttgggtcttgtgggcaaatgatcggatggtgcataacttcgatgtagcttatttgatcagcttataatggaacgatgggaagactttgatccaccacagcgcttgggatgttgagctgcaatttgaattgacaattatttgacaacaactaaaatacattttttcttgcttctgctcttgcagtctttgtaaattcaggtgtcagtgttggattcaaattacttttaaaaaaatagaggttagcattccactagaatatatggtcacatgtggctacttatttcctgcattcaaaatgtagtcacatgagtagtggtgaactgatgatgccatatgtggctacttatttcttgcattgaaaatgtggagctaaagtgtgtatgttttgttacacaaacgttggtgttgttgtgctccttttgctgaagcactgccttttacggttagcgacactcaatgttcgatcacttgtacaaaacaagatatgtattttcttttgagcaattcttttaaaatatatggggcaatgaagagcttcatattgtgttgaacctcagtctataatatttagttgcaagtgagagttttatacttacgacatgctacattttgttatccttatagttggttagcctattgtagaaggtggttgaacttgtactttgagaccaaatatatattgcatacttgatattatactattatttgagcttgtcttattgtactcttatctgttcttatgaaggttagaggaatgtgtttggggtgagtaatttttttgtgttgtttcctctatccatggccatggaggagcaaaggaggccacctagctcgaagatagcgccagtgtccatgaaggcgtcctctgcaaatgcgacgcttcaaggcatgaagaacagaagccattttcgaagggacaggaaaactgcgctgcaacaagacgtgtggacaagctgaggaagaagttgtggcacgagaagaacgtccactaagctctaaagcaggcgttctcgaggccgctctgcctcgcctccctattgtctcaagtcaatgtccttctttgcttttcgatcaatttcacaagcaagaagcaacctaaccaataatctattgcccttccgaaggactcgatacactttctgatttctgcctcttctgaattgttcctagacattggagcttctggccccgttgtaagtggaaaatccttgtacttaaaggttgcaatgtagtggccccgttgtaacgcacgggcactcacctagtgtcaataagaagtacaagctcttgtctgctggtaaaagaaaaacatcttgactggacagtgacattaatataataaaaacggtgtttggctgctatggaaaaatgccagccgactttcttttaaaaaaaatatgctagccgatgtatttttgttggactctatggaaagatgtttttcttttaccagcagacaagagct

SEQ ID NO: 54850 - DNA, 4274 bp, Zea Mays
gcgctccacggaggtcgccttccgcatggacaacattcgcgacgagatgctacaactacactcatgacagcttcaatagcatatctgcattttttcctcgtcctcagaatcttctctctcgcaagatctatgggaggaatacattgatctgatcatgtagtgcatgtgcaatgatacctgtgaaatagaagtcgttttctggggggagctccatcgtcgggaagaggggtcatggctcaccacggacaaaaggttcgtgatttccatcaccacgctcccacaggttacaattattttcttgaattttccattcgactatatcactttctaaatcccactggttatgtacatgagcaagatttttatacttaaataaatattgcttgctgtttccttggattgtaagagatgctaataacgaagctgtcccaattagacggcacactgagcttgcacagtcaggtacagttttggatttatgccttaagtcaaacagttttggagggcaacacaacgctcaaagctaacttttcatgattagttatgctgaatcacgagcgtccttcgatagaaaaatggggggaatcatagaaatttatacagaactgactgaaaagcttactgtcttcaagtattccatagcagcagcccagtcagattctaccaacaattcaccaagctccacaaatgcctgcaaaataatctcattaaaataggttatatgcaaacatgaaataatcgatcggtaaagttaatgtgtggcctcataacggagagtaagaatgcaactaggagtctaggactaaacacaaacaggaagtaatttgaatagacatcatactcatcatctgatattgaacagcttccacactttgttttattcattttttggttaatcactctgaaactatcgtccagtaacttcataatacatgacactgtagtaagtcccaaaaatgtagtactgtgacacataaattagtcaaaagaaaaaacagctaaacaacaaatgtccttttttttgcaatcatgaagcttggtatgggtgtcttatccttttctaaaacaaatatagcagacgtgagagaaactatgaagataaagaatgtttctcattatagattaataattaaggtaacaatagaaaatctgtataccaatcaaaactacacattagggcaaatgtagtgtgttcctttcatggaccaaatacagatcaaatcgacaacaaaaaactgactgtaagatgctagcattccaagttttcaatcaacttcatcctagatcagcatcttcattgttgcaaatcatcagcattcaaagatccagagatggaccaaaattcagtgttcaaaaatatatattttttgccatgttcatatggagtaatttatgttcagattgagcatttgaaaatttcatcagtacattcatcctggaaagcagttgtactatttatgtattgacatgttagaaacaaattagtggcagaattatattttgggaccatgttacagcacttcttttgacccgaatacatgaagccatgaaagtaatggttgaggggagggggaagcaagtacctgatgatcttttgggtcaatacgggtagtttatgatcaagctggtgtgggaggctcaccacggacaaaagacggcacactgagcttgcacagtcaggattttgacagctgttgtcaacgaaggcgagaatggtgtactctaagctcagcaatttccagaaaaaatcgttaacttgcaagttagtttcaatatttctagcatattccaatcacagcatcgtccagcgcacacccatccaatttaggggcttcttgttgtgctctcaggccccagtaagaactccaatccctagatctcttttcgtgtgttaagttgtgcttaagaactgctgatgcagacattaggttagggcaaggattttggttaattggaataaggcagcgctttaaccttagttcctcagtttcagctttaacatgtgttgtctccatagtatatgctctgattaacatggcggagaggatttgtgaggtgaattacttgtaagatgttatctaagtggggggacagggaaagggaactgtggctccattgaggatgatagtgttatgaatttcttctcctactttagagctctgttctatattgttcttcggtaaatcggttgttgcattacttataaggtatgcctaatttactgttcttggttaggcaccatagatcctgtcattgtttgagtgcagtaaaccatgtaaattctctcttataagttgtccttttaattatactaataatcgattgtccaaatttgtttagacaccatattattttgtcattatttgagtacagaaagaagtaaactctcttacttataaatgtgctaataattctctatctaaatttaggcacttgaaatataccaactcgcatataagatataaattatattaacgatgccacgccaaatgtgtacttccctaggtcgaaaagcaaggtcctgtcatcacaaactcctagcaaatttagcgatatgtcatgagaacaagacaggacaacattacagcctcagaggtaataaccttcgttttctatttgcttcagccaacttgatttaccagcttatcttcttccactttctgcccatttcctattgattcagtccttctactcagctttggaggttgtctgtttacaaatacggaattgtccccaatactgtttttatgatgttaacaccatgaaccgagtagcagtttatgcccatgagaatgcttcaatgccccatttgggtcttgtgggcaaatgatcggatggtgcataacttcgatgtagcttatttgatcagcttataatggaacgatgggaagactttgatccaccacagcgcttgggatgttgagctgcaatttgaattgacaattatttgacaacaactaaaatacattttttcttgcttctgctcttgcagtctttgtaaattcaggtgtcagtgttggattcaaattacttttaaaaaaatagaggttagcattccactagaatatatggtcacatgtggctacttatttcctgcattcaaaatgtagtcacatgagtagtggtgaactgatgatgccatatgtggctacttatttcttgcattgaaaatgtggagctaaagtgtgtatgttttgttacacaaacgttggtgttgttgtgctccttttgctgaagcactgccttttacggttagcgacactcaatgttcgatcacttgtacaaaacaagatatgtattttcttttgagcaattcttttaaaatatatggggcaatgaagagcttcatattgtgttgaacctcagtctataatatttagttgcaagtgagagttttatacttacgacatgctacattttgttatccttatagttggttagcctattgtagaaggtggttgaacttgtactttgagaccaaatatatattgcatacttgatattatactattatttgagcttgtcttattgtactcttatctgttcttatgaaggttagaggaatgtgtttggggtgagtaatttttttgtgttgtttcctctatccatggccatggaggagcaaaggaggccacctagctcgaagatagcgccagtgtccatgaaggcgtcctctgcaaatgcgacgcttcaaggcatgaagaacagaagccattttcgaagggacaggaaaactgcgctgcaacaagacgtgtggacaagctgaggaagaagttgtggcacgagaagaacgtccactaagctctaaagcaggcgttctcgaggccgctctgcctcgcctccctattgtctcaagtcaatgtccttctttgcttttcgatcaatttcacaagcaagaagcaacctaaccaataatctattgcccttccgaaggactcgatacactttctgatttctgcctcttctgaattgttcctagacattggagcttctggccccgttgtaagtggaaaatccttgtacttaaaggttgcaatgtagtggccccgttgtaacgcacgggcactcacctagtgtcaataagaagtacaagctcttgtctgctggtaaaagaaaaacatcttgactggacagtgacattaatataataaaaacggtgtttggctgctatggaaaaatgccagccgactttcttttaaaaaaaatatgctagccgatgtatttttgttggactctatggaaagatgtttttcttttaccagcagacaagagct

SEQ ID NO: 54851 - DNA, 5582 bp, Zea Mays
ccgcgctccacggaggtcgccttccgcatggacaacattcgcgacgagatgctacaactacactcatgacagcttcaatagcatatctgcattttttcctcgtcctcagaatcttctctctcgcaagatctatgggaggaatacattgatctgatcatgtagtgcatgtgcaatgatacctgtgaaatagaagtcgttttctggggggagctccatcgtcgggaagaggggtcatggctcaccacggacaaaaggttcgtgatttccatcaccacgctcccacaggttacaattattttcttgaattttccattcgactatatcactttctaaatcccactggttatgtacatgagcaagatttttatacttaaataaatattgcttgctgtttccttggattgtaagagatgctaataacgaagctgtcccaattagacggcacactgagcttgcacagtcaggtacagttttggatttatgccttaagtcaaacagttttggagggcaacacaacgctcaaagctaacttttcatgattagttatgctgaatcacgagcgtccttcgatagaaaaatggggggaatcatagaaatttatacagaactgactgaaaagcttactgtcttcaagtattccatagcagcagcccagtcagattctaccaacaattcaccaagctccacaaatgcctgcaaaataatctcattaaaataggttatatgcaaacatgaaataatcgatcggtaaagttaatgtgtggcctcataacggagagtaagaatgcaactaggagtctaggactaaacacaaacaggaagtaatttgaatagacatcatactcatcatctgatattgaacagcttccacactttgttttattcattttttggttaatcactctgaaactatcgtccagtaacttcataatacatgacactgtagtaagtcccaaaaatgtagtactgtgacacataaattagtcaaaagaaaaaacagctaaacaacaaatgtccttttttttgcaatcatgaagcttggtatgggtgtcttatccttttctaaaacaaatatagcagacgtgagagaaactatgaagataaagaatgtttctcattatagattaataattaaggtaacaatagaaaatctgtataccaatcaaaactacacattagggcaaatgtagtgtgttcctttcatggaccaaatacagatcaaatcgacaacaaaaaactgactgtaagatgctagcattccaagttttcaatcaacttcatcctagatcagcatcttcattgttgcaaatcatcagcattcaaagatccagagatggaccaaaattcagtgttcaaaaatatatattttttgccatgttcatatggagtaatttatgttcagattgagcatttgaaaatttcatcagtacattcatcctggaaagcagttgtactatttatgtattgacatgttagaaacaaattagtggcagaattatattttgggaccatgttacagcacttcttttgacccgaatacatgaagccatgaaagtaatggttgaggggagggggaagcaagtacctgatgatcttttgggtcaatacgggtaacttccttgaaggtttctatagctttttcagtttccccagattttgcatgtatgtgaccaatagcctagaagaaacataaaaatcatttcacaaatacaacgctatgttgcaaatacatgaactgagaataagcgtttgattagatatatgtcttaccttcaaactttcacaattttcagggtgcacctccaaaactttctcaaagctacctaatgaacttttgaagtctccaaattttaactgaatttgaccaagtcctggttcagatcaaattgtgttataaatatcaacttaatatacagtggagtgctccaaatgaccaatcatgctaatctaggctgcatgcatcatgtgcaaacctaaggaagaagattgaaaagaaaattagaactattaattttggatgtcatatataggtagtttatgatcaagctggtgtgggaggctcaccacggacaaaaggttcgtgatttccatcaccacgctcccacaggttacaattattttcttgaattttccattcgattatatcactttctaaatcccactggttatgtacatgagcaagatttttatacttaaataaatattgcttgctgtttccttggattgtaagagatgctaataacgaagctgtcccaattagacggcacactgagcttgcacagtcaggtacatgatcccttgtcactgtaccagtttctgtgcttctctctcatgaaaacaactgttgggattatttgtttctgaagatcagtgcatttattagttctctcatgaaacacaacactatgatttaaatgctcacattttgattactgtgtaaacaatgggacatacaagatttttttaggtttttgtagctcattattatagtatgtgttattaatatgatgtagcaggcaacatagtatcctgcgattcctaattagttgatgcctaagggtttttgtagcttatgcaactaagaaaacttcttcaggctagaaaaaaactttgaagtgtgggacatggtgcttagaaagtgtggcaagcatcgaatttacattgatgtagtccatggtgtaggatttttagatggcaaacacatcataatttgtgtttacaattgtttattaggaggcacattgaccattgcttccttccaaaatttatatgttgcagtttacttccttaagaaactaactgaagcattatgaggagctgtagcaaatcgacaatccatctgctattgctaataatcatgctattttggcaatggcaaaatttatatgttgtagactacaacaaacaatgtctatgaagtcgttgacatctggattatattctattagtgctgatctggatcaattcttgtttattaggagacttcaaatgttttctctcccctataaaaacactttgtttcatttgcttataattaactgctgcactgtccatggattgctctctcattctacttcctatgattttaggattttgacagctgttgtcaacgaaggcgagaatggtgtactctaagctcagcaatttccagaaaaaatcgttaacttgcaagttagtttcaatatttctagcatattccaatcacagcatcgtccagcgcacacccatccaatttaggggcttcttgttgtgctctcaggccccagtaagaactccaatccctagatctcttttcgtgtgttaagttgtgcttaagaactgctgatgcagacattaggttagggcaaggattttggttaattggaataaggcagcgctttaaccttagttcctcagtttcagctttaacatgtgttgtctccatagtatatgctctgattaacatggcggagaggatttgtgaggtgaattacttgtaagatgttatctaagtggggggacagggaaagggaactgtggctccattgaggatgatagtgttatgaatttcttctcctactttagagctctgttctatattgttcttcggtaaatcggttgttgcattacttataaggtatgcctaatttactgttcttggttaggcaccatagatcctgtcattgtttgagtgcagtaaaccatgtaaattctctcttataagttgtccttttaattatactaataatcgattgtccaaatttgtttagacaccatattattttgtcattatttgagtacagaaagaagtaaactctcttacttataaatgtgctaataattctctatctaaatttaggcacttgaaatataccaactcgcatataagatataaattatattaacgatgccacgccaaatgtgtacttccctaggtcgaaaagcaaggtcctgtcatcacaaactcctagcaaatttagcgatatgtcatgagaacaagacaggacaacattacagcctcagagctttggaggttgtctgtttacaaatacggaattgtccccaatactgtttttatgatgttaacaccatgaaccgagtagcagtttatgcccatgagaatgcttcaatgccccatttgggtcttgtgggcaaatgatcggatggtgcataacttcgatgtagcttatttgatcagcttataatggaacgatgggaagactttgatccaccacagcgcttgggatgttgagctgcaatttgaattgacaattatttgacaacaactaaaatacattttttcttgcttctgctcttgcagtctttgtaaattcaggtgtcagtgttggattcaaattacttttaaaaaaatagaggttagcattccactagaatatatggtcacatgtggctacttatttcctgcattcaaaatgtagtcacatgagtagtggtgaactgatgatgccatatgtggctacttatttcttgcattgaaaatgtggagctaaagtgtgtatgttttgttacacaaacgttggtgttgttgtgctccttttgctgaagcactgccttttacggttagcgacactcaatgttcgatcacttgtacaaaacaagatatgtattttcttttgagcaattcttttaaaatatatggggcaatgaagagcttcatattgtgttgaacctcagtctataatatttagttgcaagtgagagttttatacttacgacatgctacattttgttatccttatagttggttagcctattgtagaaggtggttgaacttgtactttgagaccaaatatatattgcatacttgatattatactattatttgagcttgtcttattgtactcttatctgttcttatgaaggttagaggaatgtgtttggggtgagtaatttttttgtgttgtttcctctatccatggccatggaggagcaaaggaggccacctagctcgaagatagcgccagtgtccatgaaggcgtcctctgcaaatgcgacgcttcaaggcatgaagaacagaagccattttcgaagggacaggaaaactgcgctgcaacaagacgtgtggacaagctgaggaagaagttgtggcacgagaagaacgtccactaagctctaaagcaggcgttctcgaggccgctctgcctcgcctccctattgtctcaagtcaatgtccttctttgcttttcgatcaatttcacaagcaagaagcaacctaaccaataatctattgcccttccgaaggactcgatacactttctgatttctgcctcttctgaattgttcctagacattggagcttctggccccgttgtaagtggaaaatccttgtacttaaaggttgcaatgtagtggccccgttgtaacgcacgggcactcacctagtgtcaataagaagtacaagctcttgtctgctggtaaaagaaaaacatcttgactggacagtgacattaatataataaaaacggtgtttggctgctatggaaaaatgccagccgactttcttttaaaaaaaatatgctagccgatgtatttttgttggactctatggaaagatgtttttcttttaccagcagacaagagct

SEQ ID NO: 54852 - DNA, 2983 bp, Zea Mays
ctccgcgctccacggaggtcgccttccgcatggacaacattcgcgacgagatgctacaactacactcatgacagcttcaatagcatatctgcattttttcctcgtcctcagaatcttctctctcgcaagatctatgggaggaatacattgatctgatcatgtagtgcatgtgcaatgatacctgtgaaatagaagtcgttttctggggggagctccatcgtcgggaagaggggtcatggctcaccacggacaaaaggtagtttatgatcaagctggtgtgggaggctcaccacggacaaaaggttcgtgatttccatcaccacgctcccacagagatgctaataacgaagctgtcccaattagacggcacactgagcttgcacagtcaggattttgacagctgttgtcaacgaaggcgagaatggtgtactctaagctcagcaatttccagaaaaaatcgttaacttgcaagttagtttcaatatttctagcatattccaatcacagcatcgtccagcgcacacccatccaatttaggggcttcttgttgtgctctcaggccccagtaagaactccaatccctagatctcttttcgtgtgttaagttgtgcttaagaactgctgatgcagacattaggttagggcaaggattttggttaattggaataaggcagcgctttaaccttagttcctcagtttcagctttaacatgtgttgtctccatagtatatgctctgattaacatggcggagaggatttgtgaggtgaattacttgtaagatgttatctaagtggggggacagggaaagggaactgtggctccattgaggatgatagtgttatgaatttcttctcctactttagagctctgttctatattgttcttcggtaaatcggttgttgcattacttataaggtatgcctaatttactgttcttggttaggcaccatagatcctgtcattgtttgagtgcagtaaaccatgtaaattctctcttataagttgtccttttaattatactaataatcgattgtccaaatttgtttagacaccatattattttgtcattatttgagtacagaaagaagtaaactctcttacttataaatgtgctaataattctctatctaaatttaggcacttgaaatataccaactcgcatataagatataaattatattaacgatgccacgccaaatgtgtacttccctaggtcgaaaagcaaggtcctgtcatcacaaactcctagcaaatttagcgatatgtcatgagaacaagacaggacaacattacagcctcagaggtaataaccttcgttttctatttgcttcagccaacttgatttaccagcttatcttcttccactttctgcccatttcctattgattcagtccttctactcagctttggaggttgtctgtttacaaatacggaattgtccccaatactgtttttatgatgttaacaccatgaaccgagtagcagtttatgcccatgagaatgcttcaatgccccatttgggtcttgtgggcaaatgatcggatggtgcataacttcgatgtagcttatttgatcagcttataatggaacgatgggaagactttgatccaccacagcgcttgggatgttgagctgcaatttgaattgacaattatttgacaacaactaaaatacattttttcttgcttctgctcttgcagtctttgtaaattcaggtgtcagtgttggattcaaattacttttaaaaaaatagaggttagcattccactagaatatatggtcacatgtggctacttatttcctgcattcaaaatgtagtcacatgagtagtggtgaactgatgatgccatatgtggctacttatttcttgcattgaaaatgtggagctaaagtgtgtatgttttgttacacaaacgttggtgttgttgtgctccttttgctgaagcactgccttttacggttagcgacactcaatgttcgatcacttgtacaaaacaagatatgtattttcttttgagcaattcttttaaaatatatggggcaatgaagagcttcatattgtgttgaacctcagtctataatatttagttgcaagtgagagttttatacttacgacatgctacattttgttatccttatagttggttagcctattgtagaaggtggttgaacttgtactttgagaccaaatatatattgcatacttgatattatactattatttgagcttgtcttattgtactcttatctgttcttatgaaggttagaggaatgtgtttggggtgagtaatttttttgtgttgtttcctctatccatggccatggaggagcaaaggaggccacctagctcgaagatagcgccagtgtccatgaaggcgtcctctgcaaatgcgacgcttcaaggcatgaagaacagaagccattttcgaagggacaggaaaactgcgctgcaacaagacgtgtggacaagctgaggaagaagttgtggcacgagaagaacgtccactaagctctaaagcaggcgttctcgaggccgctctgcctcgcctccctattgtctcaagtcaatgtccttctttgcttttcgatcaatttcacaagcaagaagcaacctaaccaataatctattgcccttccgaaggactcgatacactttctgatttctgcctcttctgaattgttcctagacattggagcttctggccccgttgtaagtggaaaatccttgtacttaaaggttgcaatgtagtggccccgttgtaacgcacgggcactcacctagtgtcaataagaagtacaagctcttgtctgctggtaaaagaaaaacatcttgactggacagtgacattaatataataaaaacggtgtttggctgctatggaaaaatgccagccgactttcttttaaaaaaaatatgctagccgatgtatttttgttggactctatggaaagatgtttttcttttaccagcagacaagagct

SEQ ID NO: 54853 - DNA, 2057 bp, Zea Mays
agagcctccgcgctccacggaggtcgccttccgcatggacaacattcgcgacgagatgctacaactacactcatgacagcttcaatagcatatctgcattttttcctcgtcctcagaatcttctctctcgcaagatctatgggaggaatacattgatctgatcatgtagtgcatgtgcaatgatacctgtgaaatagaagtcgttttctggggggagctccatcgtcgggaagaggggtcatggctcaccacggacaaaaggtagtttatgatcaagctggtgtgggaggctcaccacggacaaaaggattttgacagctgttgtcaacgaaggcgagaatggtgtactctaagctcagcaatttccagaaaaaatcgttaacttgcaagtcgaaaagcaaggtcctgtcatcacaaactcctagcaaatttagcgatatgtcatgagaacaagacaggacaacattacagcctcagagctttggaggttgtctgtttacaaatacggaattgtccccaatactgtttttatgatgttaacaccatgaaccgagtagcagtttatgcccatgagaatgcttcaatgccccatttgggtcttgtgggcaaatgatcggatggtgcataacttcgatgtagcttatttgatcagcttataatggaacgatgggaagactttgatccaccacagcgcttgggatgttgagctgcaatttgaattgacaattatttgacaacaactaaaatacattttttcttgcttctgctcttgcagtctttgtaaattcaggtgtcagtgttggattcaaattacttttaaaaaaatagaggttagcattccactagaatatatggtcacatgtggctacttatttcctgcattcaaaatgtagtcacatgagtagtggtgaactgatgatgccatatgtggctacttatttcttgcattgaaaatgtggagctaaagtgtgtatgttttgttacacaaacgttggtgttgttgtgctccttttgctgaagcactgccttttacggttagcgacactcaatgttcgatcacttgtacaaaacaagatatgtattttcttttgagcaattcttttaaaatatatggggcaatgaagagcttcatattgtgttgaacctcagtctataatatttagttgcaagtgagagttttatacttacgacatgctacattttgttatccttatagttggttagcctattgtagaaggtggttgaacttgtactttgagaccaaatatatattgcatacttgatattatactattatttgagcttgtcttattgtactcttatctgttcttatgaaggttagaggaatgtgtttggggtgagtaatttttttgtgttgtttcctctatccatggccatggaggagcaaaggaggccacctagctcgaagatagcgccagtgtccatgaaggcgtcctctgcaaatgcgacgcttcaaggcatgaagaacagaagccattttcgaagggacaggaaaactgcgctgcaacaagacgtgtggacaagctgaggaagaagttgtggcacgagaagaacgtccactaagctctaaagcaggcgttctcgaggccgctctgcctcgcctccctattgtctcaagtcaatgtccttctttgcttttcgatcaatttcacaagcaagaagcaacctaaccaataatctattgcccttccgaaggactcgatacactttctgatttctgcctcttctgaattgttcctagacattggagcttctggccccgttgtaagtggaaaatccttgtacttaaaggttgcaatgtagtggccccgttgtaacgcacgggcactcacctagtgtcaataagaagtacaagctcttgtctgctggtaaaagaaaaacatcttgactggacagtgacattaatataataaaaacggtgtttggctgctatggaaaaatgccagccgactttcttttaaaaaaaatatgctagccgatgtatttttgttggactctatggaaagatgtttttcttttaccagcagacaagagct

SEQ ID NO: 54854 - DNA, 2819 bp, Zea Mays
agaagcagagcctccgcgctccacggaggtcgccttccgcatggacaacattcgcgacgagatgctacaactacactcatgacagcttcaatagcatatctgcattttttcctcgtcctcagaatcttctctctcgcaagatctatgggaggaatacattgatctgatcatgtagtgcatgtgcaatgatacctgtgaaatagaagtcgttttctggggggagctccatcgtcgggaagaggggtcatggctcaccacggacaaaaggtagtttatgatcaagctggtgtgggaggctcaccacggacaaaaggattttgacagctgttgtcaacgaaggcgagaatggtgtactctaagctcagcaatttccagaaaaaatcgttaacttgcaagttagtttcaatatttctagcatattccaatcacagcatcgtccagcgcacacccatccaatttaggggcttcttgttgtgctctcaggccccagtaagaactccaatccctagatctcttttcgtgtgttaagttgtgcttaagaactgctgatgcagacattaggttagggcaaggattttggttaattggaataaggcagcgctttaaccttagttcctcagtttcagctttaacatgtgttgtctccatagtatatgctctgattaacatggcggagaggatttgtgaggtgaattacttgtaagatgttatctaagtggggggacagggaaagggaactgtggctccattgaggatgatagtgttatgaatttcttctcctactttagagctctgttctatattgttcttcggtaaatcggttgttgcattacttataaggtatgcctaatttactgttcttggttaggcaccatagatcctgtcattgtttgagtgcagtaaaccatgtaaattctctcttataagttgtccttttaattatactaataatcgattgtccaaatttgtttagacaccatattattttgtcattatttgagtacagaaagaagtaaactctcttacttataaatgtgctaataattctctatctaaatttaggcacttgaaatataccaactcgcatataagatataaattatattaacgatgccacgccaaatgtgtacttccctaggtcgaaaagcaaggtcctgtcatcacaaactcctagcaaatttagcgatatgtcatgagaacaagacaggacaacattacagcctcagagtccttctactcagctttggaggttgtctgtttacaaatacggaattgtccccaatactgtttttatgatgttaacaccatgaaccgagtagcagtttatgcccatgagaatgcttcaatgccccatttgggtcttgtgggcaaatgatcggatggtgcataacttcgatgtagcttatttgatcagcttataatggaacgatgggaagactttgatccaccacagcgcttgggatgttgagctgcaatttgaattgacaattatttgacaacaactaaaatacattttttcttgcttctgctcttgcagtctttgtaaattcaggtgtcagtgttggattcaaattacttttaaaaaaatagaggttagcattccactagaatatatggtcacatgtggctacttatttcctgcattcaaaatgtagtcacatgagtagtggtgaactgatgatgccatatgtggctacttatttcttgcattgaaaatgtggagctaaagtgtgtatgttttgttacacaaacgttggtgttgttgtgctccttttgctgaagcactgccttttacggttagcgacactcaatgttcgatcacttgtacaaaacaagatatgtattttcttttgagcaattcttttaaaatatatggggcaatgaagagcttcatattgtgttgaacctcagtctataatatttagttgcaagtgagagttttatacttacgacatgctacattttgttatccttatagttggttagcctattgtagaaggtggttgaacttgtactttgagaccaaatatatattgcatacttgatattatactattatttgagcttgtcttattgtactcttatctgttcttatgaaggttagaggaatgtgtttggggtgagtaatttttttgtgttgtttcctctatccatggccatggaggagcaaaggaggccacctagctcgaagatagcgccagtgtccatgaaggcgtcctctgcaaatgcgacgcttcaaggcatgaagaacagaagccattttcgaagggacaggaaaactgcgctgcaacaagacgtgtggacaagctgaggaagaagttgtggcacgagaagaacgtccactaagctctaaagcaggcgttctcgaggccgctctgcctcgcctccctattgtctcaagtcaatgtccttctttgcttttcgatcaatttcacaagcaagaagcaacctaaccaataatctattgcccttccgaaggactcgatacactttctgatttctgcctcttctgaattgttcctagacattggagcttctggccccgttgtaagtggaaaatccttgtacttaaaggttgcaatgtagtggccccgttgtaacgcacgggcactcacctagtgtcaataagaagtacaagctcttgtctgctggtaaaagaaaaacatcttgactggacagtgacattaatataataaaaacggtgtttggctgctatggaaaaatgccagccgactttcttttaaaaaaaatatgctagccgatgtatttttgttggactctatggaaagatgtttttcttttaccagcagacaagagct

SEQ ID NO: 54855 - DNA, 795 bp, Zea Mays
gaggagctaaaaactaaacaacttcccacaggcgcggcagacgcagagggcagagcacactcgccgtcgccgtcgccgtcgccatgcctgcccctatcagcgtctattcctcctcgtcctcctgctctttaactaccctggtacgacgggtcgggatgcggagcggataacgcgcgtcggccgtgcaggcaggcaggcagccaaggaggcgaagcggccgccgtgccgaggaaacagacgcccagccacccagattccaagggcggcgccggcggcatgggcatgaacatggtgaccacggtgatggccttctcggtcagcgccttcttcgtgctcttcgtcttcaccaggctgctctgcgcgcgcctccacctgtccagggccgccgccgccgcccagggctacaacgtgcaccgtgtgcctggaggagtacgaggccaaggacgtggtgcgcgtgctgcccgcctgcggccacgccttccacgcgacctgcatcgacgcctggctgaggcagcaccccacctgccccgtctgccgcgcctccctgcgcgccaggaacggctgccgcgccacgccggtcgactacagcctcctcgtcgccggcgccgacgccgcagccaccgtccagcatgttcccgcgtcctcgtccggcgcgtcaccgcaggcagtcggacgccagcgacagaccgacgacactgggcgggcggatggcttgctggagatcgtctccgaagagcccgcctcctcgcgagatccgagccctgctgttgctgctgctggttggtaaccattctc

SEQ ID NO: 54856 - DNA, 899 bp, Zea Mays
atgattatcgccgtgtccccagcggtcgacaacaagcgagcatagattattagtaatcgcgattaggaggagctaaaaactaaacaacttcccacaggcgcggcagacgcagagggcagagcacactcgccgtcgccgtcgccgtcgccatgcctgcccctatcagcgtctattcctcctcgtcctcctgctctttaactaccctggtacgacgggtcgggatgcggagcggataacgcgcgtcggccgtgcaggcaggcaggcagccaaggaggcgaagcggccgccgtgccgaggaaacagacgcccagccacccagacggccgcgccggttctgagatgctggagcgatgtcagattccaagggcggcgccggcggcatgggcatgaacatggtgaccacggtgatggccttctcggtcagcgccttcttcgtgctcttcgtcttcaccaggctgctctgcgcgcgcctccacctgtccagggccgccgccgccgcccagggctacaacgtgcaccgtgtgcctggaggagtacgaggccaaggacgtggtgcgcgtgctgcccgcctgcggccacgccttccacgcgacctgcatcgacgcctggctgaggcagcaccccacctgccccgtctgccgcgcctccctgcgcgccaggaacggctgccgcgccacgccggtcgactacagcctcctcgtcgccggcgccgacgccgcagccaccgtccagcatgttcccgcgtcctcgtccggcgcgtcaccgcaggcagtcggacgccagcgacagaccgacgacactgggcgggcggatggcttgctggagatcgtctccgaagagcccgcctcctcgcgagatccgagccctgctgttgctgctgctggttggtaaccattctc

SEQ ID NO: 54857 - DNA, 1083 bp, Zea Mays
tcatgattgacttgctaatccgacgacgacgacgagcgagcgcattaacaacgggaatagattccctgcctccggatatgattatcgccgtgtccccagcggtcgacaacaagcgagcatagattattagtaatcgcgattaggaggagctaaaaactaaacaacttcccacaggcgcggcagacgcagagggcagagcacactcgccgtcgccgtcgccgtcgccatgcctgcccctatcagcgtctattcctcctcgtcctcctgctctttaactaccctggtacgacgggtcgggatgcggagcggataacgcgcgtcggccgtgcaggcaggcaggcagccaaggaggcgaagcggccgccgtgccgaggaaacagacgcccagccacccagacggccgcgccggttctgagatgctggagcgatgtcagattccaagggcggcgccggcggcatgggcatgaacatggtgaccacggtgatggccttctcggtcagcgccttcttcgtgctcttcgtcttcaccaggctgctctgcgcgcgcctccacctgtccagggccgccgccgccgcccagggctacaacgtggagcgcgggacccacggcctggagccgtccgtggtgacgaccttccccaccgtcaagctcggcgacggcggccagcaaccgccgccggtgcaggaggaatcgcagtgcaccgtgtgcctggaggagtacgaggccaaggacgtggtgcgcgtgctgcccgcctgcggccacgccttccacgcgacctgcatcgacgcctggctgaggcagcaccccacctgccccgtctgccgcgcctccctgcgcgccaggaacggctgccgcgccacgccggtcgactacagcctcctcgtcgccggcgccgacgccgcagccaccgtccagcatgttcccgcgtcctcgtccggcgcgtcaccgcaggcagtcggacgccagcgacagaccgacgacactgggcgggcggatggcttgctggagatcgtctccgaagagcccgcctcctcgcgagatccgagccctgctgttgctgctgctggttggtaaccattctc

SEQ ID NO: 54858 - DNA, 843 bp, Zea Mays
atgattatcgccgtgtccccagcggtcgacaacaagcgagcatagattattagtaatcgcgattaggaggagctaaaaactaaacaacttcccacaggcgcggcagacgcagagggcagagcacactcgccgtcgccgtcgccgtcgccatgcctgcccctatcagcgtctattcctcctcgtcctcctgctctttaactaccctggtacgacgggtcgggatgcggagcggataacgcgcgtcggccgtgcaggcaggcaggcagccaaggaggcgaagcggccgccgtgccgaggaaacagacgcccagccacccagacggccgcgccggttctgagatgctggagcgatgtcagattccaagggcggcgccggcggcatgggcatgaacatggtgaccacggtgatggccttctcggtcagcgccttcttcgtgctcttcgtcttcaccaggctgctctgcgcgcgcctccacctgtccagggccgccgccgccgcccagggctacaacgtggagcgcgggacccacggcctggagccgtccgtggtgacgaccttccccaccgtcaagctcggcgacggcggccagcaaccgccgccggtgcaggaggaatcgcagttaagatatccatttgccttagcttttgctcttctctgctcgtcttgtttctcgtgaacttgtctgatacatgcgcagctgcacatgtttcctgcttcttgcttgcaaagctgaaagccaataggagtaggcgatagaccatggaccaagcaaaagttgcattttgcagcgattacccttcggtgtgctaaccattgcgaccattcatattcgttattttctt

SEQ ID NO: 54859 - DNA, 920 bp, Zea Mays
aatacttcattgagtttgtagaacaagatatgtatgatttcatggccctcgatagaccttcaactcctaccattgatcgtgggatagcattacataagatgattagacttatcacaatgggtttaggaggagagggctatcttaatttcatgggaaatgagtttggacatcctgaatggatagattttccaagaggtccgcaaagacttccaagtggtaagtttattccagggaataacaacagttatgacaaatgtcgtcgaagatttgacctgggtgatgcagactatcttaggtatcatggtatgcaagagtttgatcaggcaatgcaacatcttgagcaaaaatatgaattcatgacatctgatcaccagtatatttcccggaaacatgaggaggataaggtgattgtgttcgaaaagggagatttggtatttgtgttcaacttccactgcaacaacagctattttgactaccgtattggttgtcgaaagcctggggtgtataaggtggtcttggactccgacgctggactatttggtggatttagcaggatccatcacgcagccgagcacttcaccgccgactgttcgcatgataataggccatattcattctcggtttatacaccaagcagaacatgtgtcgtctatgctccagtggagtgatagcggggtactcgttgctgcgcggcatgtgtggggctgtcgatgtgaggaaaaaccttcttccaaaaccggcagatgcatgcatgcatgctacaataaggttctgatactttaatcgatgctggaaagcccatgcatctcgctgcgttgtcctctctatatatttaagaccttcaaggtgtcaattaaacatagagttttcgtttttcgctttcctaatgcttgatggctgattgtttgcacttgtttcat

SEQ ID NO: 54860 - DNA, 1161 bp, Zea Mays
gtagcgtgccctgcctcggttagtggaatgcctacatttgcccttcctgttcacgatggtggggtaggttttgactatcggatgcatatggctgtggctgacaaatggattgaccttctcaagcaaagtgatgaaacttggaagatgggtgatattgtgcacacactgacaaataggaggtggttagagaagtgtgtaacttatgctgaaagtcatgatcaagcattagtcggcgacaagactattgcgttttggttgatggacaaggatatgtatgatttcatggccctcgatagaccttcaactcctaccattgatcgtgggatagcattacataagatgattagacttatcacaatgggtttaggaggagagggctatcttaatttcatgggaaatgagtttggacatcctgaatggatagattttccaagaggtccgcaaagacttccaagtggtaagtttattccagggaataacaacagttatgacaaatgtcgtcgaagatttgacctgggtgatgcagactatcttaggtatcatggtatgcaagagtttgatcaggcaatgcaacatcttgagcaaaaatatgaattcatgacatctgatcaccagtatatttcccggaaacatgaggaggataaggtgattgtgttcgaaaagggagatttggtatttgtgttcaacttccactgcaacaacagctattttgactaccgtattggttgtcgaaagcctggggtgtataaggtggtcttggactccgacgctggactatttggtggatttagcaggatccatcacgcagccgagcacttcaccgccgactgttcgcatgataataggccatattcattctcggtttatacaccaagcagaacatgtgtcgtctatgctccagtggagtgatagcggggtactcgttgctgcgcggcatgtgtggggctgtcgatgtgaggaaaaaccttcttccaaaaccggcagatgcatgcatgcatgctacaataaggttctgatactttaatcgatgctggaaagcccatgcatctcgctgcgttgtcctctctatatatttaagaccttcaaggtgtcaattaaacatagagttttcgtttttcgctttcctaatgcttgatggctgattgtttgcacttgtttcat

SEQ ID NO: 54861 - DNA, 1269 bp, Zea Mays
agaactttcgggtttatactgagcctggactataaagaagatttctcttgaagttcaatgagttctcgacttaaatattctttctaaactactggatggataccaaagacacaaaaaattgaaattgttagtggaatgcctacatttgcccttcctgttcacgatggtggggtaggttttgactatcggatgcatatggctgtggctgacaaatggattgaccttctcaagcaaagtgatgaaacttggaagatgggtgatattgtgcacacactgacaaataggaggtggttagagaagtgtgtaacttatgctgaaagtcatgatcaagcattagtcggcgacaagactattgcgttttggttgatggacaaggatatgtatgatttcatggccctcgatagaccttcaactcctaccattgatcgtgggatagcattacataagatgattagacttatcacaatgggtttaggaggagagggctatcttaatttcatgggaaatgagtttggacatcctgaatggatagattttccaagaggtccgcaaagacttccaagtggtaagtttattccagggaataacaacagttatgacaaatgtcgtcgaagatttgacctgggtgatgcagactatcttaggtatcatggtatgcaagagtttgatcaggcaatgcaacatcttgagcaaaaatatgaattcatgacatctgatcaccagtatatttcccggaaacatgaggaggataaggtgattgtgttcgaaaagggagatttggtatttgtgttcaacttccactgcaacaacagctattttgactaccgtattggttgtcgaaagcctggggtgtataaggtggtcttggactccgacgctggactatttggtggatttagcaggatccatcacgcagccgagcacttcaccgccgactgttcgcatgataataggccatattcattctcggtttatacaccaagcagaacatgtgtcgtctatgctccagtggagtgatagcggggtactcgttgctgcgcggcatgtgtggggctgtcgatgtgaggaaaaaccttcttccaaaaccggcagatgcatgcatgcatgctacaataaggttctgatactttaatcgatgctggaaagcccatgcatctcgctgcgttgtcctctctatatatttaagaccttcaaggtgtcaattaaacatagagttttcgtttttcgctttcctaatgcttgatggctgattgtttgcacttgtttcat

SEQ ID NO: 54862 - DNA, 2897 bp, Zea Mays
cgcgtgtgcgcttggaccgacgcgcaacggcctgcctcgaccgcccgtgcacgccactgctcatgcagccgtccgcctcgcccccgccccgaactgccgaggtcgcgtgaacgcccactcccctcaccgctcgtctccgtgctatataggcagcccgcgcccctcctaattgtagccctgcagtcacccagagcagacccggatttcgctcttgcggtcgctggggttttagcattggctgatcagttcgatccgatccggctgcgaaggcgagatggcgttcgcggtttctggggcggtgctcggtggggccgtaagggctccccgactcaccggcggcggggagggtagtctagtcttccggcacaccggcctcttcttaactcggggtgctcgagttggatgttcggggacgcacggggccatgcgcgcggcggccgcggccaggaaggcggtcatggttcctgagggcgagaatgatggcctcgcatcaagggctgactcggctcaattccagtcggatgaactggaggtaccagacatttctgaagagacaacgtgcggtgctggtgtggctgatgctcaagccttgaacagagttcgagtggtccccccaccaagcgatggacaaaaaatattccagattgaccccatgttgcaaggctataagtaccatcttgagtatcggtacagcctctatagaagaatccgttcagacattgatgaacatgaaggaggcttggaagccttctcccgtagttatgagaagtttggatttaatcgcagcgcggaaggtatcacatatcgagaatgggctcctggagcattttctgcagcattggtgggtgacttcaacaactgggatccaaatgcagatcgtatgagcaaaaatgagtttggtgtttgggaaatttttctgcctaacaatgcagatggtacatcacctattcctcatggatctcgtgtaaaggtgagaatggatactccatcagggataaaggattcaattccagcctggatcaagtactcagtgcaggccccaggagaaataccatatgatgggatttattatgatcctcctgaagaggtaaagtatgtgttcaggcatgcgcaacctaaacgaccaaaatcattgcggatatatgaaacacatgtcggaatgagtagcccggaaccgaagataaacacatatgtaaactttagggatgaagtcctcccaagaataaaaaaacttggatacaatgcagtgcaaataatggcaatccaagagcactcatattatggaagctttggataccatgtaactaatttttttgcgccaagtagtcgttttggtaccccagaagaattgaagtctttgattgatagagcacatgagcttggtttgctagttctcatggatgtggttcatagtcatgcgtcaagtaatactctggatgggttgaatggttttgatggtacagatacacattactttcacagtggtccacgtggccatcactggatgtgggattctcgcctatttaactatgggaactgggaaatggtggctcgaggaatataagtttgatggtttccgttttgatggtgtgacctccatgatgtacactcatcacggattacaagtaacatttacggggaacttcaatgagtattttggctttgccaccgatgtagatgcagtggtttacttgatgctggtaaatgatctaattcatggactttatcctgaggctgtaaccattggtgaagatgttagtggaatgcctacatttgcccttcctgttcacgatggtggggtaggttttgactatcggatgcatatggctgtggctgacaaatggattgaccttctcaagcaaagtgatgaaacttggaagatgggtgatattgtgcacacactgacaaataggaggtggttagagaagtgtgtaacttatgctgaaagtcatgatcaagcattagtcggcgacaagactattgcgttttggttgatggacaaggatatgtatgatttcatggccctcgatagaccttcaactcctaccattgatcgtgggatagcattacataagatgattagacttatcacaatgggtttaggaggagagggctatcttaatttcatgggaaatgagtttggacatcctgaatggatagattttccaagaggtccgcaaagacttccaagtggtaagtttattccagggaataacaacagttatgacaaatgtcgtcgaagatttgacctgggtgatgcagactatcttaggtatcatggtatgcaagagtttgatcaggcaatgcaacatcttgagcaaaaatatgaattcatgacatctgatcaccagtatatttcccggaaacatgaggaggataaggtgattgtgttcgaaaagggagatttggtatttgtgttcaacttccactgcaacaacagctattttgactaccgtattggttgtcgaaagcctggggtgtataaggtggtcttggactccgacgctggactatttggtggatttagcaggatccatcacgcagccgagcacttcaccgccgactgttcgcatgataataggccatattcattctcggtttatacaccaagcagaacatgtgtcgtctatgctccagtggagtgatagcggggtactcgttgctgcgcggcatgtgtggggctgtcgatgtgaggaaaaaccttcttccaaaaccggcagatgcatgcatgcatgctacaataaggttctgatactttaatcgatgctggaaagcccatgcatctcgctgcgttgtcctctctatatatttaagaccttcaaggtgtcaattaaacatagagttttcgtttttcgctttcctaatgcttgatggctgattgtttgcacttgtttcat

SEQ ID NO: 54863 - DNA, 3152 bp, Zea Mays
cgcgtgtgcgcttggaccgacgcgcaacggcctgcctcgaccgcccgtgcacgccactgctcatgcagccgtccgcctcgcccccgccccgaactgccgaggtcgcgtgaacgcccactcccctcaccgctcgtctccgtgctatataggcagcccgcgcccctcctaattgtagccctgcagtcacccagagcagacccggatttcgctcttgcggtcgctggggttttagcattggctgatcagttcgatccgatccggctgcgaaggcgagatggcgttcgcggtttctggggcggtgctcggtggggccgtaagggctccccgactcaccggcggcggggagggtagtctagtcttccggcacaccggcctcttcttaactcggggtgctcgagttggatgttcggggacgcacggggccatgcgcgcggcggccgcggccaggaaggcggtcatggttcctgagggcgagaatgatggcctcgcatcaagggctgactcggctcaattccagtcggatgaactggaggtaccagacatttctgaagagacaacgtgcggtgctggtgtggctgatgctcaagccttgaacagagttcgagtggtccccccaccaagcgatggacaaaaaatattccagattgaccccatgttgcaaggctataagtaccatcttgagtatcggtacagcctctatagaagaatccgttcagacattgatgaacatgaaggaggcttggaagccttctcccgtagttatgagaagtttggatttaatcgcagcgcggaaggtatcacatatcgagaatgggctcctggagcattttctgcagcattggtgggtgacttcaacaactgggatccaaatgcagatcgtatgagcaaaaatgagtttggtgtttgggaaatttttctgcctaacaatgcagatggtacatcacctattcctcatggatctcgtgtaaaggtgagaatggatactccatcagggataaaggattcaattccagcctggatcaagtactcagtgcaggccccaggagaaataccatatgatgggatttattatgatcctcctgaagaggtaaagtatgtgttcaggcatgcgcaacctaaacgaccaaaatcattgcggatatatgaaacacatgtcggaatgagtagcccggaaccgaagataaacacatatgtaaactttagggatgaagtcctcccaagaataaaaaaacttggatacaatgcagtgcaaataatggcaatccaagagcactcatattatggaagctttggataccatgtaactaatttttttgcgccaagtagtcgttttggtaccccagaagaattgaagtctttgattgatagagcacatgagcttggtttgctagttctcatggatgtggttcatagtcatgcgtcaagtaatactctggatgggttgaatggttttgatggtacagatacacattactttcacagtggtccacgtggccatcactggatgtgggattctcgcctatttaactatgggaactgggaagttttaagatttcttctctccaatgctagatggtggctcgaggaatataagtttgatggtttccgttttgatggtgtgacctccatgatgtacactcatcacggattacaagtaacatttacggggaacttcaatgagtattttggctttgccaccgatgtagatgcagtggtttacttgatgctggtaaatgatctaattcatggactttatcctgaggctgtaaccattggtgaagatgttagtggaatgcctacatttgcccttcctgttcacgatggtggggtaggttttgactatcggatgcatatggctgtggctgacaaatggattgaccttctcaagcaaagtgatgaaacttggaagatgggtgatattgtgcacacactgacaaataggaggtggttagagaagtgtgtaacttatgctgaaagtcatgatcaagcattagtcggcgacaagactattgcgttttggttgatggacaaggatatgtatgatttcatggccctcgatagaccttcaactcctaccattgatcgtgggatagcattacataagatgattagacttatcacaatgggtttaggaggagagggctatcttaatttcatgggaaatgagtttggacatcctgaatggatagattttccaagaggtccgcaaagacttccaagtggtaagtttattccagggaataacaacagttatgacaaatgtcgtcgaagatttgacctggtaaactttctttgattgtgcaaaagtccaagtttgtatttacttttaccactgatccagtgctttaatcagcaaggtgccattataatagttccttctttattcatattagcatgttccagaagtaaaaatattactacctttgtaaaagttttctttaatatatgtcgctttgtttggtcaataattcgtcattatcggaattgtgttatttttacattgtcagggtgatgcagactatcttaggtatcatggtatgcaagagtttgatcaggcaatgcaacatcttgagcaaaaatatgaattcatgacatctgatcaccagtatatttcccggaaacatgaggaggataaggtgattgtgttcgaaaagggagatttggtatttgtgttcaacttccactgcaacaacagctattttgactaccgtattggttgtcgaaagcctggggtgtataaggtggtcttggactccgacgctggactatttggtggatttagcaggatccatcacgcagccgagcacttcaccgccgactgttcgcatgataataggccatattcattctcggtttatacaccaagcagaacatgtgtcgtctatgctccagtggagtgatagcggggtactcgttgctgcgcggcatgtgtggggctgtcgatgtgaggaaaaaccttcttccaaaaccggcagatgcatgcatgcatgctacaataaggttctgatactttaatcgatgctggaaagcccatgcatctcgctgcgttgtcctctctatatatttaagaccttcaaggtgtcaattaaacatagagttttcgtttttcgctttcctaatgcttgatggctgattgtttgcacttgtttcat

SEQ ID NO: 54864 - DNA, 3212 bp, Zea Mays
aaaaaagcctcgcccgtgaagcgaactccctctccttcgaccttcgttcttccactgcggcctgcgcgacccgtgcagctgcgcgctccacctggccgcgcctggggcccacaccgcctggcatctggagcattgcccccggacttcgcgcggccgcccgcagccccgctccccaccgaaaagcgaagcgcgattgccatccccacgccaccgcgaagcacaaggtccccgccctgcacgatcagcaggacctcgccacgccgccgctggagctgcgcgtgcgcgtgtgcgcttggaccgacgcgcaacggcctgcctcgaccgcccgtgcacgccactgctcatgcagccgtccgcctcgcccccgccccgaactgccgaggtcgcgtgaacgcccactcccctcaccgctcgtctccgtgctatataggcagcccgcgcccctcctaattgtagccctgcagtcacccagagcagacccggatttcgctcttgcggtcgctggggttttagcattggctgatcagttcgatccgatccggctgcgaaggcgagatggcgttcgcggtttctggggcggtgctcggtggggccgtaagggctccccgactcaccggcggcggggagggtagtctagtcttccggcacaccggcctcttcttaactcggggtgctcgagttggatgttcggggacgcacggggccatgcgcgcggcggccgcggccaggaaggcggtcatggttcctgagggcgagaatgatggcctcgcatcaagggctgactcggctcaattccagtcggatgaactggaggtaccagacatttctgaagagacaacgtgcggtgctggtgtggctgatgctcaagccttgaacagagttcgagtggtccccccaccaagcgatggacaaaaaatattccagattgaccccatgttgcaaggctataagtaccatcttgagtatcgaacaggtacagcctctatagaagaatccgttcagacattgatgaacatgaaggaggcttggaagccttctcccgtagttatgagaagtttggatttaatcgcagcgcggaaggtatcacatatcgagaatgggctcctggagcattttctgcagcattggtgggtgacttcaacaactgggatccaaatgcagatcgtatgagcaaaaatgagtttggtgtttgggaaatttttctgcctaacaatgcagatggtacatcacctattcctcatggatctcgtgtaaaggtgagaatggatactccatcagggataaaggattcaattccagcctggatcaagtactcagtgcaggccccaggagaaataccatatgatgggatttattatgatcctcctgaagaggtaaagtatgtgttcaggcatgcgcaacctaaacgaccaaaatcattgcggatatatgaaacacatgtcggaatgagtagcccggaaccgaagataaacacatatgtaaactttagggatgaagtcctcccaagaataaaaaaacttggatacaatgcagtgcaaataatggcaatccaagagcactcatattatggaagctttggataccatgtaactaatttttttgcgccaagtagtcgttttggtaccccagaagaattgaagtctttgattgatagagcacatgagcttggtttgctagttctcatggatgtggttcatagtcatgcgtcaagtaatactctggatgggttgaatggttttgatggtacagatacacattactttcacagtggtccacgtggccatcactggatgtgggattctcgcctatttaactatgggaactgggaagttttaagatttcttctctccaatgctagatggtggctcgaggaatataagtttgatggtttccgttttgatggtgtgacctccatgatgtacactcatcacggattacaagtaacatttacggggaacttcaatgagtattttggctttgccaccgatgtagatgcagtggtttacttgatgctggtaaatgatctaattcatggactttatcctgaggctgtaaccattggtgaagatgttagtggaatgcctacatttgcccttcctgttcacgatggtggggtaggttttgactatcggatgcatatggctgtggctgacaaatggattgaccttctcaagcaaagtgatgaaacttggaagatgggtgatattgtgcacacactgacaaataggaggtggttagagaagtgtgtaacttatgctgaaagtcatgatcaagcattagtcggcgacaagactattgcgttttggttgatggacaaggatatgtatgatttcatggccctcgatagaccttcaactcctaccattgatcgtgggatagcattacataagatgattagacttatcacaatgggtttaggaggagagggctatcttaatttcatgggaaatgagtttggacatcctgaatggatagattttccaagaggtccgcaaagacttccaagtggtaagtttattccagggaataacaacagttatgacaaatgtcgtcgaagatttgacctgggtgatgcagactatcttaggtatcatggtatgcaagagtttgatcaggcaatgcaacatcttgagcaaaaatatgaattcatgacatctgatcaccagtatatttcccggaaacatgaggaggataaggtgattgtgttcgaaaagggagatttggtatttgtgttcaacttccactgcaacaacagctattttgactaccgtattggttgtcgaaagcctggggtgtataaggtggtcttggactccgacgctggactatttggtggatttagcaggatccatcacgcagccgagcacttcaccgccgactgttcgcatgataataggccatattcattctcggtttatacaccaagcagaacatgtgtcgtctatgctccagtggagtgatagcggggtactcgttgctgcgcggcatgtgtggggctgtcgatgtgaggaaaaaccttcttccaaaaccggcagatgcatgcatgcatgctacaataaggttctgatactttaatcgatgctggaaagcccatgcatctcgctgcgttgtcctctctatatatttaagaccttcaaggtgtcaattaaacatagagttttcgtttttcgctttcctaatgcttgatggctgattgtttgcacttgtttcat

SEQ ID NO: 54865 - DNA, 1912 bp, Zea Mays
tcaacagccgacagcccattgtccagactcataagagagacgaagcccataaagaaaagggattcaccggctcaccgctcacataaacacacaccccgcttcctctttcccctattcccgacaccactcacacggtcacaccctcgcatcctgcgatcccatatcaattcccgtccccactcgccgtcgacgcaggtcgcactccagctccagcgcgccgcgcggtgctgctctccccgcccatgtgacgcgagtcgcgccccgccccccacagtcagcagtccgagaccccaatccgcggcgccgggcggggggaaccaggagtgggcaataaaaaaccgaggattccgtcctctgtggcggggatgggccaggaggggatggggtacaacagcaaggggggaggaggaggcggcggcggcgggggagggctgccgatgacggcgccgcggccgcggggcgcgtcgccgctccaccacagccggtcgcgcaagatccaccgcactttcaacaacctcaagattaccgtgctctgcggcctcgtcaccatcctcgtcctccggggcaccatcggcctcaacctctccctcccctcgcagccctccgacgccgaagcgctcgcggacgccaaggccgtcgaggacatcgaccgcatcctccgcgagatccgctccgactccggccccgaccccgacgacgagggcgacttcggcgccgcctctggcttcaacgccaccgcgctcagcgccaccgaggccgccgccgcgtacgcggccgcggtcggcaaatacgcgctcgggcccaagatctccgactgggacgcgcagcgccgacggtggctggcccagaaccctggcttcccggccacccttgccgggggcaagcccaggattatgctcgtaaccggctcgcagccggggccctgcgacaacccgctcggcgaccactacctgctcaagactaccaagaataagatcgattactgccgcctccatggcatcgagatcgtccacaacctcgcgcaccttgacaacgagctcgccggatactgggccaaattgccgctgctccgccgcctcatgctctcccacccggaggtcgagtggatctggtggatggacagcgacgcgctcttcaccgacatgtcgttcgagctgcccctgtcacgctacgacggccacaacctcatcatccacggctaccaggacctcctcttcgagaagcactcctggattgcactcaacaccggcagcttcctcttcaggaattgccagtggtcgcttgacctcctggacgcgtgggcgcccatgggacccaaggggttcatccgcgatcaggcgggcaaggtactcacggcaaacctcaagggccggccagcatttgaggccgacgaccagtcggcactgatttacctcttgctctcgcaaaaggacaagtggatggacaaggtgttcattgagaattcctactacttgcatggcttctgggctgggttggtggataagtatgaggagatgatggagaatcaccacccaggcctcggcgacgagcggtggcctttcgtgactcactttgttgggtgcaagccatgtgggagctatggggattacccagtggagcgctgcctcaggagcatggagcgagcgtttaattttgccgacaaccaggtgcttcggctatatggtttctcacacaaggggctggaaagccccaagatcaagagattcagggatcagacaactagaccaattaatgatgtggagaacttagatatgaaggccaaaatatctacaatttcctgaaagttcagatgagagttggtggtttggcaattgcatacttgctttggctatcaacaagacattcaacctaatatttggaagcatgctatgtcttcttccaagggtctaat

SEQ ID NO: 54866 - DNA, 3093 bp, Zea Mays
agccgcggcgacacccaggcaccttcttgcggccttgcctttcctcccgcctccgcctccaattccccaacgggaactgttcccgctcccgcgtctatttatccccggcgatagaggatggtcgagagactggtgcttcttgctggcggtttcttctcgtccggtcgccatggtgcacgagacgagatcacgggtgcacgcagctgcccaggaagaaggcaagctcgcctcaaaaaagcagaaaccagataatgaaaccaaggaaaggggccagaatgtgccctccaagaacaagaagtctgccgacaacgaagggaaagacggggagccggaggcgccaacaaagagcaagaagctcaaagctgaggaatctgagccaaatgggagggaagctgctgcaagagagtttgcagagttttgcaaggccataggagaacgcctctccctcgaggacatgcgcaagatccttcaagccaatgagcaagatgcttctggatcggaggatgcggtcgttccaagatgtgaggatatgatgttctatgggcctctcgagaagtgcccagtatgtgagggtcagcttgaatttaaggagtggaaatacaagtgcactgggaactacagcgagtgggcacgctgtactttcagtactaacgacccttcaaggagaagcggttctatagaagttcctgatgacataaaagatgattttatccgcaagtggctgaagcaacaagaaggaaaggagttccctaaacgtgatcttgatgaagaggctcatatcttctctggcatgatgattgcattgtctggacggatgtcacgctcacatggttacttcaaggagcagatcatgaagcatggagggaaggtcaagaattctgtgcttggtgctacctgtgtcgtggcttctccggctgagagagacaaaggtggctctggaggatttgctgaagcattggagcgtggaactcctgttgttagtgagaattggataatcgatagcattgagaaaaaggaagctcagccttttgctgcctatgatattgttactgatgttgttccggaaggccgaggactcccgctaggccaacttgatccaagtgaggaggccattgagaccttagctgcagaggttaaacttgctggcaagagatctgtccacaaggattccaaactcgataaagacggtggatgtgtctttgagaaggatggcataatctacaactgcgcttttgctgtttgcgatctcggatgccagatgaacgagctatgcatcatgcagctggttatggtccctggaaatcgtttgcacctgttctacaagaaaggcccaattggtcatgaccagatggcggaggaacgggtggaggattttggtagccgtgtcaatgatgctattaaagaatttgttcggctatttgaggaggtcactggaaatgagtttgagccttgggaaaggcagaagaagttcgagaagaagagtatgaagatgtatcccttggacatggatgttggggttgatgtgcgtcacggaggtgcagcacttcgtcagctgggttctgcagcagcacattgcaagcttgatccttctgtttctttcctgctgaaacagttatgtggacaagagatctacaggtatgctctgatggagatggcccaggacctacctgaccttcccatagggatgcttaccgatctccatctgaagagaggggaggaaatgctgcttcagatgaggcgagacgcggagacggtggcagagtccggcccagaagcagacgcgttctggaccgacgccagcagcaaatggttcactctgttccccacaactcggccgtacacgatgaggggcttcgagcagatcgccgacaacgtttcgagacagtgcgcgatataaacgacgcgtctcgtctcatcggggatgcgttccgctcgacactactggatgacccactctctgaatgctacaagaagctcggttgttgtatcagtgctgtcgccgagggctcggaagactacaagatggttctcaagtacctggagaagacgtacgagcctgtcgaggtggaggatgtggtctatggtgtgtctgtcgagaggatatatgctgttgaatccagcgcattccctttgtacgaggaaatcaggaacctgccaaacaaaatccttctctggtgtgggactagaagctcgaacttgcttaggcacctccacaaagggttcctgcctgccgtctgccatctgcctgtgccagggtacatgttcggcaaagccatagtgtgttccgacgcagcggcggaggcggctcgctacggcttcactgcagtggaccgtccggaagggtacctggtcctggcggtggcctctctgggagaagagatcgaggaagtcaccggaacaccaggggcagaggaggcacgagtcctggaagagaagaaggtgggcgtgaaaggcgtcgggaggaagacgaccgacgagtcggagcacttcagctggagggacggcgtcaaggtcccctgcggcaagctggtgccgtcggcgaacaaggacggcccgctcgagtacaacgagtacgccgtgtacgaccccaagcaggtgagcatctgcttcctggtcggggtgaagtacgaggagcagaacatggaggtggtgccgccggacgaccagtgaaggagtcgtctcgtggagtgtcctagggcagggcagggcaggccaggccaggaggtggtgggacccattttggttagtggagccggtagcggcgacgcgttggccgtcgggtggaatggaaacgtgaggggtgccagaacatcctgggctgcctgccgcctcctggttttgtgtcaattgccgtgtctgtggctgtgtgtactacttggtagttggtagcgtactttattagtagcgaaggtgctagtgaccctggctaggtacaagcccttgggaggctgcttgctttgtatgctaacagttcgttccgttccgttccagcggcccttttgggtgctgacagttcgttagcacggctctgagagagaacgtgttccgctctggtttagcactaaatgaaaaaaaaaacatgtttcctttcga

SEQ ID NO: 54867 - DNA, 3055 bp, Zea Mays
agccgcggcgacacccaggcaccttcttgcggccttgcctttcctcccgcctccgcctccaattccccaacgggaactgttcccgctcccgcgtctatttatccccggcgatagaggatggtcgagagactggtgcttcttgctggcggtttcttctcgtccggtcgccatggtgcacgagacgagatcacgggtgcacgcagctgcccaggaagaaggcaagctcgcctcaaaaaagcagaaaccagataatgaaaccaaggaaaggggccagaatgtgccctccaagaacaagaagtctgccgacaacgaagggaaagacggggagccggaggcgccaacaaagagcaagaagctcaaagctgaggaatctgagccaaatgggagggaagctgctgcaagagagtttgcagagttttgcaaggccataggagaacgcctctccctcgaggacatgcgcaagatccttcaagccaatgagcaagatgcttctggatcggaggatgcggtcgttccaagatgtgaggatatgatgttctatgggcctctcgagaagtgcccagtatgtgagggtcagcttgaatttaaggagtggaaatacaagtgcactgggaactacagcgagtgggcacgctgtactttcagtactaacgacccttcaaggagaagcggttctatagaagttcctgatgacataaaagatgattttatccgcaagtggctgaagcaacaagaaggaaaggagttccctaaacgtgatcttgatgaagaggctcatatcttctctggcatgatgattgcattgtctggacggatgtcacgctcacatggttacttcaaggagcagatcatgaagcatggagggaaggtcaagaattctgtgcttggtgctacctgtgtcgtggcttctccggctgagagagacaaaggtggctctggaggatttgctgaagcattggagcgtggaactcctgttgttagtgagaattggataatcgatagcattgagaaaaaggaagctcagccttttgctgcctatgatattgttactgatgttgttccggaaggccgaggactcccgctaggccaacttgatccaagttaaacttgctggcaagagatctgtccacaaggattccaaactcgataaagacggtggatgtgtctttgagaaggatggcataatctacaactgcgcttttgctgtttgcgatctcggatgccagatgaacgactggttatggtccctggaaatcgtttgcacctgttctacaagaaaggcccaattggtcatgaccagatggcggaggaacgggtggaggattttggtagccgtgtcaatgatgctattaaagaatttgttcggctatttgaggaggtcactggaaatgagtttgagccttgggaaaggcagaagaagttcgagaagaagagtatgaagatgtatcccttggacatggatgttggggttgatgtgcgtcacggaggtgcagcacttcgtcagctgggttctgcagcagcacattgcaagcttgatccttctgtttctttcctgctgaaacagttatgtggacaagagatctacaggtatgctctgatggagatggcccaggacctacctgaccttcccatagggatgcttaccgatctccatctgaagagaggggaggaaatgctgcttcagatgaggcgagacgcggagacggtggcagagtccggcccagaagcagacgcgttctggaccgacgccagcagcaaatggttcactctgttccccacaactcggccgtacacgatgaggggcttcgagcagatcgccgacaacgtagcatcaggtttcgagacagtgcgcgatataaacgacgcgtctcgtctcatcggggatgcgttccgctcgacactactggatgacccactctctgaatgctacaagaagctcggttgttgtatcagtgctgtcgccgagggctcggaagactacaagatggttctcaagtacctggagaagacgtacgagcctgtcgaggtggaggatgtggtctatggtgtgtctgtcgagaggatatatgctgttgaatccagcgcattccctttgtacgaggaaatcaggaacctgccaaacaaaatccttctctggtgtgggactagaagctcgaacttgcttaggcacctccacaaagggttcctgcctgccgtctgccatctgcctgtgccagggtacatgttcggcaaagccatagtgtgttccgacgcagcggcggaggcggctcgctacggcttcactgcagtggaccgtccggaagggtacctggtcctggcggtggcctctctgggagaagagatcgaggaagtcaccggaacaccaggggcagaggaggcacgagtcctggaagagaagaaggtgggcgtgaaaggcgtcgggaggaagacgaccgacgagtcggagcacttcagctggagggacggcgtcaaggtcccctgcggcaagctggtgccgtcggcgaacaaggacggcccgctcgagtacaacgagtacgccgtgtacgaccccaagcaggtgagcatctgcttcctggtcggggtgaagtacgaggagcagaacatggaggtggtgccgccggacgaccagtgaaggagtcgtctcgtggagtgtcctagggcagggcagggcaggccaggccaggaggtggtgggacccattttggttagtggagccggtagcggcgacgcgttggccgtcgggtggaatggaaacgtgaggggtgccagaacatcctgggctgcctgccgcctcctggttttgtgtcaattgccgtgtctgtggctgtgtgtactacttggtagttggtagcgtactttattagtagcgaaggtgctagtgaccctggctaggtacaagcccttgggaggctgcttgctttgtatgctaacagttcgttccgttccgttccagcggcccttttgggtgctgacagttcgttagcacggctctgagagagaacgtgttccgctctggtttagcactaaatgaaaaaaaaaacatgtttcctttcga

SEQ ID NO: 54868 - DNA, 3087 bp, Zea Mays
agccgcggcgacacccaggcaccttcttgcggccttgcctttcctcccgcctccgcctccaattccccaacgggaactgttcccgctcccgcgtctatttatccccggcgatagaggatggtcgagagactggtgcttcttgctggcggtttcttctcgtccggtcgccatggtgcacgagacgagatcacgggtgcacgcagctgcccaggaagaaggcaagctcgcctcaaaaaagcagaaaccagataatgaaaccaaggaaaggggccagaatgtgccctccaagaacaagaagtctgccgacaacgaagggaaagacggggagccggaggcgccaacaaagagcaagaagctcaaagctgaggaatctgagccaaatgggagggaagctgctgcaagagagtttgcagagttttgcaaggccataggagaacgcctctccctcgaggacatgcgcaagatccttcaagccaatgagcaagatgcttctggatcggaggatgcggtcgttccaagatgtgaggatatgatgttctatgggcctctcgagaagtgcccagtatgtgagggtcagcttgaatttaaggagtggaaatacaagtgcactgggaactacagcgagtgggcacgctgtactttcagtactaacgacccttcaaggagaagcggttctatagaagttcctgatgacataaaagatgattttatccgcaagtggctgaagcaacaagaaggaaaggagttccctaaacgtgatcttgatgaagaggctcatatcttctctggcatgatgattgcattgtctggacggatgtcacgctcacatggttacttcaaggagcagatcatgaagcatggagggaaggtcaagaattctgtgcttggtgctacctgtgtcgtggcttctccggctgagagagacaaaggtggctctggaggatttgctgaagcattggagcgtggaactcctgttgttagtgagaattggataatcgatagcattgagaaaaaggaagctcagccttttgctgcctatgatattgttactgatgttgttccggaaggccgaggactcccgctaggccaacttgatccaagtgaggaggccattgagaccttagctgcagaggttaaacttgctggcaagagatctgtccacaaggattccaaactcgataaagacggtggatgtgtctttgagaaggatggcataatctacaactgcgcttttgctgtttgcgatctcggatgccagatgaacgactggttatggtccctggaaatcgtttgcacctgttctacaagaaaggcccaattggtcatgaccagatggcggaggaacgggtggaggattttggtagccgtgtcaatgatgctattaaagaatttgttcggctatttgaggaggtcactggaaatgagtttgagccttgggaaaggcagaagaagttcgagaagaagagtatgaagatgtatcccttggacatggatgttggggttgatgtgcgtcacggaggtgcagcacttcgtcagctgggttctgcagcagcacattgcaagcttgatccttctgtttctttcctgctgaaacagttatgtggacaagagatctacaggtatgctctgatggagatggcccaggacctacctgaccttcccatagggatgcttaccgatctccatctgaagagaggggaggaaatgctgcttcagatgaggcgagacgcggagacggtggcagagtccggcccagaagcagacgcgttctggaccgacgccagcagcaaatggttcactctgttccccacaactcggccgtacacgatgaggggcttcgagcagatcgccgacaacgtagcatcaggtttcgagacagtgcgcgatataaacgacgcgtctcgtctcatcggggatgcgttccgctcgacactactggatgacccactctctgaatgctacaagaagctcggttgttgtatcagtgctgtcgccgagggctcggaagactacaagatggttctcaagtacctggagaagacgtacgagcctgtcgaggtggaggatgtggtctatggtgtgtctgtcgagaggatatatgctgttgaatccagcgcattccctttgtacgaggaaatcaggaacctgccaaacaaaatccttctctggtgtgggactagaagctcgaacttgcttaggcacctccacaaagggttcctgcctgccgtctgccatctgcctgtgccagggtacatgttcggcaaagccatagtgtgttccgacgcagcggcggaggcggctcgctacggcttcactgcagtggaccgtccggaagggtacctggtcctggcggtggcctctctgggagaagagatcgaggaagtcaccggaacaccaggggcagaggaggcacgagtcctggaagagaagaaggtgggcgtgaaaggcgtcgggaggaagacgaccgacgagtcggagcacttcagctggagggacggcgtcaaggtcccctgcggcaagctggtgccgtcggcgaacaaggacggcccgctcgagtacaacgagtacgccgtgtacgaccccaagcaggtgagcatctgcttcctggtcggggtgaagtacgaggagcagaacatggaggtggtgccgccggacgaccagtgaaggagtcgtctcgtggagtgtcctagggcagggcagggcaggccaggccaggaggtggtgggacccattttggttagtggagccggtagcggcgacgcgttggccgtcgggtggaatggaaacgtgaggggtgccagaacatcctgggctgcctgccgcctcctggttttgtgtcaattgccgtgtctgtggctgtgtgtactacttggtagttggtagcgtactttattagtagcgaaggtgctagtgaccctggctaggtacaagcccttgggaggctgcttgctttgtatgctaacagttcgttccgttccgttccagcggcccttttgggtgctgacagttcgttagcacggctctgagagagaacgtgttccgctctggtttagcactaaatgaaaaaaaaaacatgtttcctttcga

SEQ ID NO: 54869 - DNA, 3078 bp, Zea Mays
gcgacgtgtcacggaggcaggcgggcatggccgcatggccacagctggagcgcagccgcggcgacacccaggcaccttcttgcggccttgcctttcctcccgcctccgcctccaattccccaacgggaactgttcccgctcccgcgtctatttatccccggcgatagaggatggtcgagagactggtgcttcttgctggcggtttcttctcgtccggtcgccatggtgcacgagacgagatcacgggtgcacgcagctgcccaggaagaaggcaagctcgcctcaaaaaagcagaaaccagataatgaaaccaaggaaaggggccagaatgtgccctccaagaacaagaagtctgccgacaacgaagggaaagacggggagccggaggcgccaacaaagagcaagaagctcaaagctgaggaatctgagccaaatgggagggaagctgctgcaagagagtttgcagagttttgcaaggccataggagaacgcctctccctcgaggacatgcgcaagatccttcaagccaatgagcaagatgcttctggatcggaggatgcggtcgttccaagatgtgaggatatgatgttctatgggcctctcgagaagtgcccagtatgtgagggtcagcttgaatttaaggagtggaaatacaagtgcactgggaactacagcgagtgggcacgctgtactttcagtactaacgacccttcaaggagaagcggttctatagaagttcctgatgacataaaagatgattttatccgcaagtggctgaagcaacaagaaggaaaggagttccctaaacgtgatcttgatgaagaggctcatatcttctctggcatgatgattgcattgtctggacggatgtcacgctcacatggttacttcaaggagcagatcatgaagcatggagggaaggtcaagaattctgtgcttggtgctacctgtgtcgtggcttctccggctgagagagacaaaggtggctctggaggatttgctgaagcattggagcgtggaactcctgttgttagtgagaattggataatcgatagcattgagaaaaaggaagctcagccttttgctgcctatgatattgttactgatgttgttccggaaggccgaggactcccgctaggccaacttgatccaagtgaggaggccattgagaccttagctgcagaggttaaacttgctggcaagagatctgtccacaaggattccaaactcgataaagacggtggatgtgtctttgagaaggatggcataatctacaactgcgcttttgctgtttgcgatctcggatgccagatgaacgagctatgcatcatgcagctggttatggtccctggaaatcgtttgcacctgttctacaagaaaggcccaattggtcatgaccagatggcggaggaacgggtggaggattttggtagccgtgtcaatgatgctattaaagaatttgttcggctatttgaggaggtcactggaaatgagtttgagccttgggaaaggcagaagaagttcgagaagaagagtatgaagatgtatcccttggacatggatgttggggttgatgtgcgtcacggaggtgcagcacttcgtcagctgggttctgcagcagcacattgcaagcttgatccttctgtttctttcctgctgaaacagttatgtggacaagagatctacaggtatgctctgatggagatggcccaggacctacctgaccttcccatagggatgcttaccgatctccatctgaagagaggggaggaaatgctgcttcagatgaggcgagacgcggagacggtggcagagtccggcccagaagcagacgcgttctggaccgacgccagcagcaaatggttcactctgttccccacaactcggccgtacacgatgaggggcttcgagcagatcgccgacaacgtagcatcaggtttcgagacagtgcgcgatataaacgacgcgtctcgtctcatcggggatgcgttccgctcgacactactggatgacccactctctgaatgctacaagaagctcggttgttgtatcagtgctgtcgccgagggctcggaagactacaagatggttctcaagtacctggagaagacgtacgagcctgtcgaggtggaggatgtggtctatggtgtgtctgtcgagaggatatatgctgttgaatccagcgcattccctttgtacgaggaaatcaggaacctgccaaacaaaatccttctctggtgtgggactagaagctcgaacttgcttaggcacctccacaaagggttcctgcctgccgtctgccatctgcctgtgccagggtacatgttcggcaaagccatagtgtgttccgacgcagcggcggaggcggctcgctacggcttcactgcagtggaccgtccggaagggtacctggtcctggcggtggcctctctgggagaagagatcgaggaagtcaccggaacaccaggggcagaggaggcacgagtcctggaagagaagaaggtgggcgtgaaaggcgtcgggaggaagacgaccgacgagtcggagcacttcagctggagggacggcgtcaaggtcccctgcggcaagctggtgccgtcggcgaacaaggacggcccgctcgagtacaacgagtacgccgtgtacgaccccaagcaggtgagcatctgcttcctggtcggggtgaagtacgaggagcagaacatggaggtggtgggacccattttggttagtggagccggtagcggcgacgcgttggccgtcgggtggaatggaaacgtgaggggtgccagaacatcctgggctgcctgccgcctcctggttttgtgtcaattgccgtgtctgtggctgtgtgtactacttggtagttggtagcgtactttattagtagcgaaggtgctagtgaccctggctaggtacaagcccttgggaggctgcttgctttgtatgctaacagttcgttccgttccgttccagcggcccttttgggtgctgacagttcgttagcacggctctgagagagaacgtgttccgctctggtttagcactaaatgaaaaaaaaaacatgtttcctttcga

SEQ ID NO: 54870 - DNA, 3259 bp, Zea Mays
gtctgactaggcactcgatagtcgagactgccggtgccggtgccgccaccgcttccactcgccgccctcccacacggccacacggcaaggcggccagccggccacataccccgcttcgtgtccctcccggttcacggagcccgaagcgctctgcatgtgagcggaggcggcaggcgacgtgtcacggaggcaggcgggcatggccgcatggccacagctggagcgcagccgcggcgacacccaggtgcacgagacgagatcacgggtgcacgcagctgcccaggaagaaggcaagctcgcctcaaaaaagcagaaaccagataatgaaaccaaggaaaggggccagaatgtgccctccaagaacaagaagtctgccgacaacgaagggaaagacggggagccggaggcgccaacaaagagcaagaagctcaaagctgaggaatctgagccaaatgggagggaagctgctgcaagagagtttgcagagttttgcaaggccataggagaacgcctctccctcgaggacatgcgcaagatccttcaagccaatgagcaagatgcttctggatcggaggatgcggtcgttccaagatgtgaggatatgatgttctatgggcctctcgagaagtgcccagtatgtgagggtcagcttgaatttaaggagtggaaatacaagtgcactgggaactacagcgagtgggcacgctgtactttcagtactaacgacccttcaaggagaagcggttctatagaagttcctgatgacataaaagatgattttatccgcaagtggctgaagcaacaagaaggaaaggagttccctaaacgtgatcttgatgaagaggctcatatcttctctggcatgatgattgcattgtctggacggatgtcacgctcacatggttacttcaaggagcagatcatgaagcatggagggaaggtcaagaattctgtgcttggtgctacctgtgtcgtggcttctccggctgagagagacaaaggtggctctggaggatttgctgaagcattggagcgtggaactcctgttgttagtgagaattggataatcgatagcattgagaaaaaggaagctcagccttttgctgcctatgatattgttactgatgttgttccggaaggccgaggactcccgctaggccaacttgatccaagtgaggaggccattgagaccttagctgcagaggtgttttgccttgatctagttcattttgcatgtgccagtcacaaatttatttagttgctcaatagcaatgattggattgagtaggttaaacttgctggcaagagatctgtccacaaggattccaaactcgataaagacggtggatgtgtctttgagaaggatggcataatctacaactgcgcttttgctgtttgcgatctcggatgccagatgaacgagctatgcatcatgcagctggttatggtccctggaaatcgtttgcacctgttctacaagaaaggcccaattggtcatgaccagatggcggaggaacgggtggaggattttggtagccgtgtcaatgatgctattaaagaatttgttcggctatttgaggaggtcactggaaatgagtttgagccttgggaaaggcagaagaagttcgagaagaagagtatgaagatgtatcccttggacatggatgttggggttgatgtgcgtcacggaggtgcagcacttcgtcagctgggttctgcagcagcacattgcaagcttgatccttctgtttctttcctgctgaaacagttatgtggacaagagatctacaggtatgctctgatggagatggcccaggacctacctgaccttcccatagggatgcttaccgatctccatctgaagagaggggaggaaatgctgcttcagatgaggcgagacgcggagacggtggcagagtccggcccagaagcagacgcgttctggaccgacgccagcagcaaatggttcactctgttccccacaactcggccgtacacgatgaggggcttcgagcagatcgccgacaacgtagcatcaggtttcgagacagtgcgcgatataaacgacgcgtctcgtctcatcggggatgcgttccgctcgacactactggatgacccactctctgaatgctacaagaagctcggttgttgtatcagtgctgtcgccgagggctcggaagactacaagatggttctcaagtacctggagaagacgtacgagcctgtcgaggtggaggatgtggtctatggtgtgtctgtcgagaggatatatgctgttgaatccagcgcattccctttgtacgaggaaatcaggaacctgccaaacaaaatccttctctggtgtgggactagaagctcgaacttgcttaggcacctccacaaagggttcctgcctgccgtctgccatctgcctgtgccagggtacatgttcggcaaagccatagtgtgttccgacgcagcggcggaggcggctcgctacggcttcactgcagtggaccgtccggaagggtacctggtcctggcggtggcctctctgggagaagagatcgaggaagtcaccggaacaccaggggcagaggaggcacgagtcctggaagagaagaaggtgggcgtgaaaggcgtcgggaggaagacgaccgacgagtcggagcacttcagctggagggacggcgtcaaggtcccctgcggcaagctggtgccgtcggcgaacaaggacggcccgctcgagtacaacgagtacgccgtgtacgaccccaagcaggtgagcatctgcttcctggtcggggtgaagtacgaggagcagaacatggaggtggtgccgccggacgaccagtgaaggagtcgtctcgtggagtgtcctagggcagggcagggcaggccaggccaggaggtggtgggacccattttggttagtggagccggtagcggcgacgcgttggccgtcgggtggaatggaaacgtgaggggtgccagaacatcctgggctgcctgccgcctcctggttttgtgtcaattgccgtgtctgtggctgtgtgtactacttggtagttggtagcgtactttattagtagcgaaggtgctagtgaccctggctaggtacaagcccttgggaggctgcttgctttgtatgctaacagttcgttccgttccgttccagcggcccttttgggtgctgacagttcgttagcacggctctgagagagaacgtgttccgctctggtttagcactaaatgaaaaaaaaaacatgtttcctttcga

SEQ ID NO: 54871 - DNA, 2956 bp, Zea Mays
cggggcctggcatgacatgattcaggtgcacgagacgagatcacgggtgcacgcagctgcccaggaagaaggcaagctcgcctcaaaaaagcagaaaccagataatgaaaccaaggaaaggggccagaatgtgccctccaagaacaagaagtctgccgacaacgaagggaaagacggggagccggaggcgccaacaaagagcaagaagctcaaagctgaggaatctgagccaaatgggagggaagctgctgcaagagagtttgcagagttttgcaaggccataggagaacgcctctccctcgaggacatgcgcaagatccttcaagccaatgagcaagatgcttctggatcggaggatgcggtcgttccaagatgtgaggatatgatgttctatgggcctctcgagaagtgcccagtatgtgagggtcagcttgaatttaaggagtggaaatacaagtgcactgggaactacagcgagtgggcacgctgtactttcagtactaacgacccttcaaggagaagcggttctatagaagttcctgatgacataaaagatgattttatccgcaagtggctgaagcaacaagaaggaaaggagttccctaaacgtgatcttgatgaagaggctcatatcttctctggcatgatgattgcattgtctggacggatgtcacgctcacatggttacttcaaggagcagatcatgaagcatggagggaaggtcaagaattctgtgcttggtgctacctgtgtcgtggcttctccggctgagagagacaaaggtggctctggaggatttgctgaagcattggagcgtggaactcctgttgttagtgagaattggataatcgatagcattgagaaaaaggaagctcagccttttgctgcctatgatattgttactgatgttgttccggaaggccgaggactcccgctaggccaacttgatccaagtgaggaggccattgagaccttagctgcagaggttaaacttgctggcaagagatctgtccacaaggattccaaactcgataaagacggtggatgtgtctttgagaaggatggcataatctacaactgcgcttttgctgtttgcgatctcggatgccagatgaacgagctatgcatcatgcagctggttatggtccctggaaatcgtttgcacctgttctacaagaaaggcccaattggtcatgaccagatggcggaggaacgggtggaggattttggtagccgtgtcaatgatgctattaaagaatttgttcggctatttgaggaggtcactggaaatgagtttgagccttgggaaaggcagaagaagttcgagaagaagagtatgaagatgtatcccttggacatggatgttggggttgatgtgcgtcacggaggtgcagcacttcgtcagctgggttctgcagcagcacattgcaagcttgatccttctgtttctttcctgctgaaacagttatgtggacaagagatctacaggtatgctctgatggagatggcccaggacctacctgaccttcccatagggatgcttaccgatctccatctgaagagaggggaggaaatgctgcttcagatgaggcgagacgcggagacggtggcagagtccggcccagaagcagacgcgttctggaccgacgccagcagcaaatggttcactctgttccccacaactcggccgtacacgatgaggggcttcgagcagatcgccgacaacgtagcatcaggtttcgagacagtgcgcgatataaacgacgcgtctcgtctcatcggggatgcgttccgctcgacactactggatgacccactctctgaatgctacaagaagctcggttgttgtatcagtgctgtcgccgagggctcggaagactacaagatggttctcaagtacctggagaagacgtacgagcctgtcgaggtggaggatgtggtctatggtgtgtctgtcgagaggatatatgctgttgaatccagcgcattccctttgtacgaggaaatcaggaacctgccaaacaaaatccttctctggtgtgggactagaagctcgaacttgcttaggcacctccacaaagggttcctgcctgccgtctgccatctgcctgtgccagggtacatgttcggcaaagccatagtgtgttccgacgcagcggcggaggcggctcgctacggcttcactgcagtggaccgtccggaagggtacctggtcctggcggtggcctctctgggagaagagatcgaggaagtcaccggaacaccaggggcagaggaggcacgagtcctggaagagaagaaggtgggcgtgaaaggcgtcgggaggaagacgaccgacgagtcggagcacttcagctggagggacggcgtcaaggtcccctgcggcaagctggtgccgtcggcgaacaaggacggcccgctcgagtacaacgagtacgccgtgtacgaccccaagcaggtgagcatctgcttcctggtcggggtgaagtacgaggagcagaacatggaggtggtgccgccggacgaccagtgaaggagtcgtctcgtggagtgtcctagggcagggcagggcaggccaggccaggaggtggtgggacccattttggttagtggagccggtagcggcgacgcgttggccgtcgggtggaatggaaacgtgaggggtgccagaacatcctgggctgcctgccgcctcctggttttgtgtcaattgccgtgtctgtggctgtgtgtactacttggtagttggtagcgtactttattagtagcgaaggtgctagtgaccctggctaggtacaagcccttgggaggctgcttgctttgtatgctaacagttcgttccgttccgttccagcggcccttttgggtgctgacagttcgttagcacggctctgagagagaacgtgttccgctctggtttagcactaaatgaaaaaaaaaacatgtttcctttcga

SEQ ID NO: 54872 - DNA, 1395 bp, Zea Mays
gaaaaataaaggctaaaacgattaaatagtaggcccaatcagaggaaatagcccacagtgtctagccagactgaaaacagcccatttggcccacctaagcgagcacataagaactgtcggttagggttaggaaaccctaaccgaccacctgcaatctccaggcggtggtggcggctagccatggcgcgcgcgggcgcggtggcgaggcaccaacggtcccgacggcgcgggtgccagccaaggcacggcggcctcgggcgcggcggcggcggcccggccgcatcctcggcgcgcgggctcgggtgcggccccggccccagcctcggcgcgcgggcgcaagcgcggcggcactgctacacgcggctgcccgacgcgggcgcgtcccctggcggtcttggctcaggcgcgtcgccccgggtgcggccatgacgtggcggcactggccccggcggcggtccggccacagcgcacggcgcgacgctgtcacctggccatggcgcgggcggcagggcacctggtgtcccagcccctgccaggcgctcgacctcggcgtggctccggccacccggcgcgggcggtccggctacggcggctcagcggcccctgcacgggcgcagtccctcggcggcgtgcggctccctggtcgtgcgcgggcccggcaagacgggcggccaccgacggcgcactgctgtcccggcggtgcaggcgagccccccggtgcgcgcgggcgcgggcgcgaggcacgcgggggcgcaaggcgcgacggctcagcgcggtctcgactgcccgtctacggcgcagccaccccgtggcgggcggctcccgacctcaacggctcgggcgcgggtccggctgctcggccatggcggcacaagtgcgcggccccctgagcgggcgagcgcgcagtcccgcggctctggcagtgcgggcgctaaccaggcgcagccagtgtgggttcgtcccggcgggcgcatggtaccggccatggtgccccgttgaggcgcgtgcgcgcacatggtattctcacggaggcaaccagacggtcgaacggatcatcatggtacagaacactccatgcataggagtgggcagaaagactgccagactccagcgagatcatctccttccagtggtgtcgggttgttgtccagcgtccagccattagacatacgccggatgcacggatgcatggacattgctgtcgacggtaaccgctcggtggagagcaaagtgctgataacgtgttgaatctcagtggagagagacagataatgacaaatgactgaactcattattgcagggaacatcctgatatatatacaggtgaagggttgcgttctcaagggggtgtcccttggaaataatctgtcgcaccccttggattgatcacaaata

SEQ ID NO: 54873 - DNA, 2795 bp, Zea Mays
ggaccaaatccgatctcgtggccacggccagaacacacctcctcacgtccacctgacctcttgctcctccccaataatgcccagtgcggcagtgcctgccaccgtctaagcccaccccaagtctccgccgtcaacccgtcctcccccatggccgccgccgccgccatctctctatccttccactttcgtttccgcccgccctttccatctccacgtacccccacgcgccacgctcccttttccttgttctccccttcccttcttgccccctgccgcctccgcgtcgctcccggccgcccctcaccgtccccgtggcgccccgacgtgcgggcgcgcgctggaagcaccatcggggcgccgcctgcgcttgtgcgcccaggcggagccgtggagacggaccgcctcccctccgacgtgcgggaccgggccatggaggcggtcgaccacttcggcggtcgcgtcaccataggagacgtcgcttctcgcgctgggctgcagctcgcgcaggcggagcgcgcgctccaagcactcgccgccgacactgaaggcttcctggaggtatcggaggacggggaggtgctatacgtcttcccaaaggactacagggcaaagctggctggcaaatcgtttaggatgcgggtcgagcctctggttgacaaagccaagcaagtgggtgcttatctggtacgtgtttcatttggcactgcgctcattgcctcaattgtgctggtgtacactacaatcattgccattctctcaagctcaagtagtgatgaagatggtcgtgggaggcggaggagatcttatggttctactatcatcattccgacggatatgttttggtacttggatgcagattattatagaagacgtcgagtagaaaacgaaaatgggatgaactttattgaatctgtattttcatttgtgtttggggatggtgatccaaacgatgggcttgaagaaaagcggtggaagatgattggacagtatatttcatcaaatggtggagttgttacagctgaagaactggcaccatttcttgatgtgccacctccatcagaagagtccaaggacgatgaatcatttgttcttccagttcttttacgctttcagggacatccagaaattgatgagcagctacatactaagggtgtgtttggccgcgctccggctctggctctgcggcagctctggcagcagagtcgcaccaaacggcgacggagggaaatatcctgtatcgattcccatcgctgcaacgtactgcttcatcaaaaagtggtaggagcagggaatatgtgggtaccaaatggtctgcaatgtttagcggagttgaaaagtacttagaggagaaaccgtggaaattcaggtcagtatatatcatcaccatccttagtgaagttgaactaatccaggatgcaatttgtcctttgcgggggaaggtttgccttggtttttccccttccttgacccaattcatatgggagcctccggcactgggtctaccctatgccctttatacacctacctgttgattttgcagtaaagcgaatgcaacagagaaggcgatggttgctggtttgggaggactcaatctctttggtgtcatcattcttggaaacttgttgaagcaaatgacagtgacacctggtggactaatctcatttgccgcacagttatatcctttgcttcaggtatggctgggcttgatatgcctgtttagtactctataatgtggtcattactctagtcattccatttatacatatttggcctgacagaaatcacgagcccttctctttgttaaggggatttccagatgttttgaatgttgcaaaatcgatgattgctgaattacctgtgaattaataagattgtcaatgatatgtactgatacaatgtggtcatttctagatatacgctggctccttttttgcaatacctttgtttagatggtttctgctacgcaagaccaacaatggcattaaaaagaggaataaggccagagaacagagagctcaggagctcgtgtcaccagattcttctctaagaagaaagttgctcagtgcacgtgatatggctgaacggaaagtaatcacgccagaggagattgtctatactactgaaaaggatctattggagcaggattatgaagtcaaggagtgggagaggagatttaaggagctcgagtcagagtgatggacatgaccgatatacttgacacttgcagtagctctacatggtcctcaccatacttgtcggtgatttttatccgcatccaacggagtggaagatggatctgactgaaccactcgagcaagcgaaactggatggtactggacctcactaattgtcgtgtcaccaccagcccaccactgaccacttcgctatggaagttttgtggaagctgttggtttaattggaaccgaccattatttgcaagatgatgttcgtatctgtgccattgacctgcatatatgtatagttccaatcacggatcaaattcagaatttgacacgaaaaagaaaaaaaacagggaatatggctaggatgctactcggtttgaatggagtccaatcaaaacatgtaaaaaggtcagcctgtgaacagggactcagactgtttgctgcggctttaatccactggctcctaacagtgctaggaatagacgtactgttataaaaacttccaggtggaccaattcacgatgggaacctaacattttcttgcattaagctgaaacgtgtatctcctgcctgcgtttgtcattgcgaacgagacacgatcgaaagaactga

SEQ ID NO: 54874 - DNA, 2548 bp, Zea Mays
ggaccaaatccgatctcgtggccacggccagaacacacctcctcacgtccacctgacctcttgctcctccccaataatgcccagtgcggcagtgcctgccaccgtctaagcccaccccaagtctccgccgtcaacccgtcctcccccatggccgccgccgccgccatctctctatccttccactttcgtttccgcccgccctttccatctccacgtacccccacgcgccacgctcccttttccttgttctccccttcccttcttgccccctgccgcctccgcgtcgctcccggccgcccctcaccgtccccgtggcgccccgacgtgcgggcgcgcgctggaagcaccatcggggcgccgcctgcgcttgtgcgcccaggcggagccgtggagacggaccgcctcccctccgacgtgcgggaccgggccatggaggcggtcgaccacttcggcggtcgcgtcaccataggagacgtcgcttctcgcgctgggctgcagctcgcgcaggcggagcgcgcgctccaagcactcgccgccgacactgaaggcttcctggaggtatcggaggacggggaggtgctatacgtcttcccaaaggactacagggcaaagctggctggcaaatcgtttaggatgcgggtcgagcctctggttgacaaagccaagcaagtgggtgcttatctggtacgtgtttcatttggcactgcgctcattgcctcaattgtgctggtgtacactacaatcattgccattctctcaagctcaagtagtgatgaagatggtcgtgggaggcggaggagatcttatggttctactatcatcattccgacggatatgttttggtacttggatgcagattattatagaagacgtcgagtagaaaacgaaaatgggatgaactttattgaatctgtaatttaaaagggtattttcatttgtgtttggggatggtgatccaaacgatgggcttgaagaaaagcggtggaagatgattggacagtatatttcatcaaatggtggagttgttacagctgaagaactggcaccatttcttgatgtgccacctccatcagaagagtccaaggacgatgaatcatttgttcttccagttcttttacgctttcagggacatccagaaattgatgagcagggaaatatcctgtatcgattcccatcgctgcaacgtactgcttcatcaaaaagtggtaggagcagggaatatgtgggtaccaaatggtctgcaatgtttagcggagttgaaaagtacttagaggagaaaccgtggaaattcagtaaagcgaatgcaacagagaaggcgatggttgctggtttgggaggactcaatctctttggtgtcatcattcttggaaacttgttgaagcaaatgacagtgacacctggtggactaatctcatttgccgcacagttatatcctttgcttcaggtatggctgggcttgatatgcctgtttagtactctataatgtggtcattactctagtcattccatttatacatatttggcctgacagaaatcacgagcccttctctttgttaaggggatttccagatgttttgaatgttgcaaaatcgatgattgctgaattacctgtgaattaataagattgtcaatgatatgtactgatacaatgtggtcatttctagatatacgctggctccttttttgcaatacctttgtttagatggtttctgctacgcaagaccaacaatggcattaaaaagaggaataaggccagagaacagagagctcaggagctcgtgtcaccagattcttctctaagaagaaagttgctcagtgcacgtgatatggctgaacggaaagtaatcacgccagaggagattgtctatactactgaaaaggatctattggagcaggattatgaagtcaaggagtgggagaggagatttaaggagctcgagtcagagtgatggacatgaccgatatacttgacacttgcagtagctctacatggtcctcaccatacttgtcggtgatttttatccgcatccaacggagtggaagatggatctgactgaaccactcgagcaagcgaaactggatggtactggacctcactaattgtcgtgtcaccaccagcccaccactgaccacttcgctatggaagttttgtggaagctgttggtttaattggaaccgaccattatttgcaagatgatgttcgtatctgtgccattgacctgcatatatgtatagttccaatcacggatcaaattcagaatttgacacgaaaaagaaaaaaaacagggaatatggctaggatgctactcggtttgaatggagtccaatcaaaacatgtaaaaaggtcagcctgtgaacagggactcagactgtttgctgcggctttaatccactggctcctaacagtgctaggaatagacgtactgttataaaaacttccaggtggaccaattcacgatgggaacctaacattttcttgcattaagctgaaacgtgtatctcctgcctgcgtttgtcattgcgaacgagacacgatcgaaagaactga

SEQ ID NO: 54875 - DNA, 2346 bp, Zea Mays
ggaccaaatccgatctcgtggccacggccagaacacacctcctcacgtccacctgacctcttgctcctccccaataatgcccagtgcggcagtgcctgccaccgtctaagcccaccccaagtctccgccgtcaacccgtcctcccccatggccgccgccgccgccatctctctatccttccactttcgtttccgcccgccctttccatctccacgtacccccacgcgccacgctcccttttccttgttctccccttcccttcttgccccctgccgcctccgcgtcgctcccggccgcccctcaccgtccccgtggcgccccgacgtgcgggcgcgcgctggaagcaccatcggggcgccgcctgcgcttgtgcgcccaggcggagccgtggagacggaccgcctcccctccgacgtgcgggaccgggccatggaggcggtcgaccacttcggcggtcgcgtcaccataggagacgtcgcttctcgcgctgggctgcagctcgcgcaggcggagcgcgcgctccaagcactcgccgccgacactgaaggcttcctggaggtatcggaggacggggaggtgctatacgtcttcccaaaggactacagggcaaagctggctggcaaatcgtttaggatgcgggtcgagcctctggttgacaaagccaagcaagtgggtgcttatctggtacgtgtttcatttggcactgcgctcattgcctcaattgtgctggtgtacactacaatcattgccattctctcaagctcaagcacttcctcttctactagtagtgatgaagatggtcgtgggaggcggaggagatcttatggttctactatcatcattccgacggatatgttttggtacttggatgcagattattatagaagacgtcgagtagaaaacgaaaatgggatgaactttattgaatctgtaatttaaaagggtattttcatttgtgtttggggatggtgatccaaacgatgggcttgaagaaaagcggtggaagatgattggacagtatatttcatcaaatggtggagttgttacagctgaagaactggcaccatttcttgatgtgccacctccatcagaagagtccaaggacgatgaatcatttgttcttccagttcttttacgctttcagggacatccagaaattgatgagcagggaaatatcctgtatcgattcccatcgctgcaacgtactgcttcatcaaaaagtggtaggagcagggaatatgtgggtaccaaatggtctgcaatgtttagcggagttgaaaagtacttagaggagaaaccgtggaaattcagtaaagcgaatgcaacagagaaggcgatggttgctggtttgggaggactcaatctctttggtgtcatcattcttggaaacttgttgaagcaaatgacagtgacacctggtggactaatctcatttgccgcacagttatatcctttgcttcagatatacgctggctccttttttgcaatacctttgtttagatggtttctgctacgcaagaccaacaatggcattaaaaagaggaataaggccagagaacagagagctcaggagctcgtgtcaccagattcttctctaagaagaaagttgctcagtgcacgtgatatggctgaacggaaagtaatcacgccagaggagattgtctatactactgaaaaggatctattggagcaggattatgaagtcaaggagtgggagaggagatttaaggagctcgagtcagagtgatggacatgaccgatatacttgacacttgcagtagctctacatggtcctcaccatacttgtcggtgatttttatccgcatccaacggagtggaagatggatctgactgaaccactcgagcaagcgaaactggatggtactggacctcactaattgtcgtgtcaccaccagcccaccactgaccacttcgctatggaagttttgtggaagctgttggtttaattggaaccgaccattatttgcaagatgatgttcgtatctgtgccattgacctgcatatatgtatagttccaatcacggatcaaattcagaatttgacacgaaaaagaaaaaaaacagggaatatggctaggatgctactcggtttgaatggagtccaatcaaaacatgtaaaaaggtcagcctgtgaacagggactcagactgtttgctgcggctttaatccactggctcctaacagtgctaggaatagacgtactgttataaaaacttccaggtggaccaattcacgatgggaacctaacattttcttgcattaagctgaaacgtgtatctcctgcctgcgtttgtcattgcgaacgagacacgatcgaaagaactga

SEQ ID NO: 54876 - DNA, 3019 bp, Zea Mays
ctcacgtcctcaccgtgccggacaccggtgtctgcttggaccaaatccgatctcgtggccacggccagaacacacctcctcacgtccacctgacctcttgctcctccccaataatgcccagtgcggcagtgcctgccaccgtctaagcccaccccaagtctccgccgtcaacccgtcctcccccatggccgccgccgccgccatctctctatccttccactttcgtttccgcccgccctttccatctccacgtacccccacgcgccacgctcccttttccttgttctccccttcccttcttgccccctgccgcctccgcgtcgctcccggccgcccctcaccgtccccgtggcgccccgacgtgcgggcgcgcgctggaagcaccatcggggcgccgcctgcgcttgtgcgcccaggcggagccgtggagacggaccgcctcccctccgacgtgcgggaccgggccatggaggcggtcgaccacttcggcggtcgcgtcaccataggagacgtcgcttctcgcgctgggctgcagctcgcgcaggcggagcgcgcgctccaagcactcgccgccgacactgaaggcttcctggaggtatcggaggacggggaggtgctatacgtcttcccaaaggactacagggcaaagctggctggcaaatcgtttaggatgcgggtcgagcctctggttgacaaagccaagcaagtgggtgcttatctggtacgtgtttcatttggcactgcgctcattgcctcaattgtgctggtgtacactacaatcattgccattctctcaagctcaagtgatgaagatggtcgtgggaggcggaggagatcttatggttctactatcatcattccgacggatatgttttggtacttggatgcagattattatagaagacgtcgagtagaaaacgaaaatgggatgaactttattgaatctgtaatttaaaagggtattttcatttgtgtttggggatggtgatccaaacgatgggcttgaagaaaagcggtggaagatgattggacagtatatttcatcaaatggtggagttgttacagctgaagaactggcaccatttcttgatgtgccacctccatcagaagagtccaaggacgatgaatcatttgttcttccagttcttttacgctttcagggacatccagaaattgatgagcaggtgcaatcttcttttctctagcagttcagacttgtactgagaactaccgttgtcaaatatgacctacattttcaacccacccagctaacactggcagagcggggcgggatgggggataactgttttctttccctacattaggtaccagtgtaccaccaaaaaataggaataaacaaacaaccccaatcatgtcaggttctctactaaaaaatagtaacatgctatatcattggattgctgacttgcatgcctaagtatgtaatcttcagatctattggaagtttccaacaaagaaaaatgataaaggaacatgcaatgtgtgagtagatgcaagaaaaaggtgctgggaaatgccatgtcctggatgatgaagggaggagtgggttgtttcagatgctagggaggcgtcagccaaagcaaaaacacccttacattacatgcactagtttcttcacttgaagttgaggaggaagaagggaatacaggcatacgggtgctaccatcacacagcagttacacatcgagttaactgttgtccaccttggctgacagatagctctgtctgtgccagctacatactaagggtgtgtttggccgcgctccggctctggctctgcggcagctctggcagcagagtcgcaccaaacggcgacggagggaaatatcctgtatcgattcccatcgctgcaacgtactgcttcatcaaaaagtggtaggagcagggaatatgtgggtaccaaatggtctgcaatgtttagcggagttgaaaagtacttagaggagaaaccgtggaaattcagtaaagcgaatgcaacagagaaggcgatggttgctggtttgggaggactcaatctctttggtgtcatcattcttggaaacttgttgaagcaaatgacagtgacacctggtggactaatctcatttgccgcacagttatatcctttgcttcagatatacgctggctccttttttgcaatacctttgtttagatggtttctgctacgcaagaccaacaatggcattaaaaagaggaataaggccagagaacagagagctcaggagctcgtgtcaccagattcttctctaagaagaaagttgctcagtgcacgtgatatggctgaacggaaagtaatcacgccagaggagattgtctatactactgaaaaggatctattggagcaggattatgaagtcaaggagtgggagaggagatttaaggagctcgagtcagagtgatggacatgaccgatatacttgacacttgcagtagctctacatggtcctcaccatacttgtcggtgatttttatccgcatccaacggagtggaagatggatctgactgaaccactcgagcaagcgaaactggatggtactggacctcactaattgtcgtgtcaccaccagcccaccactgaccacttcgctatggaagttttgtggaagctgttggtttaattggaaccgaccattatttgcaagatgatgttcgtatctgtgccattgacctgcatatatgtatagttccaatcacggatcaaattcagaatttgacacgaaaaagaaaaaaaacagggaatatggctaggatgctactcggtttgaatggagtccaatcaaaacatgtaaaaaggtcagcctgtgaacagggactcagactgtttgctgcggctttaatccactggctcctaacagtgctaggaatagacgtactgttataaaaacttccaggtggaccaattcacgatgggaacctaacattttcttgcattaagctgaaacgtgtatctcctgcctgcgtttgtcattgcgaacgagacacgatcgaaagaactga

SEQ ID NO: 54877 - DNA, 3026 bp, Zea Mays
gaatctcacgtcctcaccgtgccggacaccggtgtctgcttggaccaaatccgatctcgtggccacggccagaacacacctcctcacgtccacctgacctcttgctcctccccaataatgcccagtgcggcagtgcctgccaccgtctaagcccaccccaagtctccgccgtcaacccgtcctcccccatggccgccgccgccgccatctctctatccttccactttcgtttccgcccgccctttccatctccacgtacccccacgcgccacgctcccttttccttgttctccccttcccttcttgccccctgccgcctccgcgtcgctcccggccgcccctcaccgtccccgtggcgccccgacgtgcgggcgcgcgctggaagcaccatcggggcgccgcctgcgcttgtgcgcccaggcggagccgtggagacggaccgcctcccctccgacgtgcgggaccgggccatggaggcggtcgaccacttcggcggtcgcgtcaccataggagacgtcgcttctcgcgctgggctgcagctcgcgcaggcggagcgcgcgctccaagcactcgccgccgacactgaaggcttcctggaggtatcggaggacggggaggtgctatacgtcttcccaaaggactacagggcaaagctggctggcaaatcgtttaggatgcgggtcgagcctctggttgacaaagccaagcaagtgggtgcttatctggtacgtgtttcatttggcactgcgctcattgcctcaattgtgctggtgtacactacaatcattgccattctctcaagctcaagtagtgatgaagatggtcgtgggaggcggaggagatcttatggttctactatcatcattccgacggatatgttttggtacttggatgcagattattatagaagacgtcgagtagaaaacgaaaatgggatgaactttattgaatctgtaatttaaaagggtattttcatttgtgtttggggatggtgatccaaacgatgggcttgaagaaaagcggtggaagatgattggacagtatatttcatcaaatggtggagttgttacagctgaagaactggcaccatttcttgatgtgccacctccatcagaagagtccaaggacgatgaatcatttgttcttccagttcttttacgctttcagggacatccagaaattgatgagcaggtgcaatcttcttttctctagcagttcagacttgtactgagaactaccgttgtcaaatatgacctacattttcaacccacccagctaacactggcagagcggggcgggatgggggataactgttttctttccctacattaggtaccagtgtaccaccaaaaaataggaataaacaaacaaccccaatcatgtcaggttctctactaaaaaatagtaacatgctatatcattggattgctgacttgcatgcctaagtatgtaatcttcagatctattggaagtttccaacaaagaaaaatgataaaggaacatgcaatgtgtgagtagatgcaagaaaaaggtgctgggaaatgccatgtcctggatgatgaagggaggagtgggttgtttcagatgctagggaggcgtcagccaaagcaaaaacacccttacattacatgcactagtttcttcacttgaagttgaggaggaagaagggaatacaggcatacgggtgctaccatcacacagcagttacacatcgagttaactgttgtccaccttggctgacagatagctctgtctgtgccagctacatactaagggtgtgtttggccgcgctccggctctggctctgcggcagctctggcagcagagtcgcaccaaacggcgacggagggaaatatcctgtatcgattcccatcgctgcaacgtactgcttcatcaaaaagtggtaggagcagggaatatgtgggtaccaaatggtctgcaatgtttagcggagttgaaaagtacttagaggagaaaccgtggaaattcagtaaagcgaatgcaacagagaaggcgatggttgctggtttgggaggactcaatctctttggtgtcatcattcttggaaacttgttgaagcaaatgacagtgacacctggtggactaatctcatttgccgcacagttatatcctttgcttcagatatacgctggctccttttttgcaatacctttgtttagatggtttctgctacgcaagaccaacaatggcattaaaaagaggaataaggccagagaacagagagctcaggagctcgtgtcaccagattcttctctaagaagaaagttgctcagtgcacgtgatatggctgaacggaaagtaatcacgccagaggagattgtctatactactgaaaaggatctattggagcaggattatgaagtcaaggagtgggagaggagatttaaggagctcgagtcagagtgatggacatgaccgatatacttgacacttgcagtagctctacatggtcctcaccatacttgtcggtgatttttatccgcatccaacggagtggaagatggatctgactgaaccactcgagcaagcgaaactggatggtactggacctcactaattgtcgtgtcaccaccagcccaccactgaccacttcgctatggaagttttgtggaagctgttggtttaattggaaccgaccattatttgcaagatgatgttcgtatctgtgccattgacctgcatatatgtatagttccaatcacggatcaaattcagaatttgacacgaaaaagaaaaaaaacagggaatatggctaggatgctactcggtttgaatggagtccaatcaaaacatgtaaaaaggtcagcctgtgaacagggactcagactgtttgctgcggctttaatccactggctcctaacagtgctaggaatagacgtactgttataaaaacttccaggtggaccaattcacgatgggaacctaacattttcttgcattaagctgaaacgtgtatctcctgcctgcgtttgtcattgcgaacgagacacgatcgaaagaactga

SEQ ID NO: 54878 - DNA, 2896 bp, Zea Mays
ctgaatctcacgtcctcaccgtgccggacaccggtgtctgcttggaccaaatccgatctcgtggccacggccagaacacacctcctcacgtccacctgacctcttgctcctccccaataatgcccagtgcggcagtgcctgccaccgtctaagcccaccccaagtctccgccgtcaacccgtcctcccccatggccgccgccgccgccatctctctatccttccactttcgtttccgcccgccctttccatctccacgtacccccacgcgccacgctcccttttccttgttctccccttcccttcttgccccctgccgcctccgcgtcgctcccggccgcccctcaccgtccccgtggcgccccgacgtgcgggcgcgcgctggaagcaccatcggggcgccgcctgcgcttgtgcgcccaggcggagccgtggagacggaccgcctcccctccgacgtgcgggaccgggccatggaggcggtcgaccacttcggcggtcgcgtcaccataggagacgtcgcttctcgcgctgggctgcagctcgcgcaggcggagcgcgcgctccaagcactcgccgccgacactgaaggcttcctggaggtatcggaggacggggaggtgctatacgtcttcccaaaggactacagggcaaagctggctggcaaatcgtttaggatgcgggtcgagcctctggttgacaaagccaagcaagtgggtgcttatctggtacgtgtttcatttggcactgcgctcattgcctcaattgtgctggtgtacactacaatcattgccattctctcaagctcaaggtatgtttagtgcagcacgaaagagtttgtgtgctaattattatatgttcactgcctaaaggtctgttctggaacgatatcttcatctttgtcatatggttcagttcccttaaatgacattctgtctctgtaatttgatccgtgaattctataaaaatgaagcacacatagatttcatgagtggttttttggactttagttgtaggttttgtcatttaactcaacacccctttgattggtagcacttcctcttctactagtagtgatgaagatggtcgtgggaggcggaggagatcttatggttctactatcatcattccgacggatatgttttggtacttggatgcagattattatagaagacgtcgagtagaaaacgaaaatgggatgaactttattgaatctgtaatttaaaagggtttgacttgattgttcattgtcactttgttttgatggaatgtgtaggtagtttgaaactgtatgtaatgtttattaaataaatgccacaggtattttcatttgtgtttggggatggtgatccaaacgatgggcttgaagaaaagcggtggaagatgattggacagtatatttcatcaaatggtggagttgttacagctgaagaactggcaccatttcttgatgtgccacctccatcagaagagtccaaggacgatgaatcatttgttcttccagttcttttacgctttcagggacatccagaaattgatgagcagggaaatatcctgtatcgattcccatcgctgcaacgtactgcttcatcaaaaagtggtaggagcagggaatatgtgggtaccaaatggtctgcaatgtttagcggagttgaaaagtacttagaggagaaaccgtggaaattcaggtcagtatatatcatcaccatccttagtgaagttgaactaatccaggatgcaatttgtcctttgcgggggaaggtttgccttggtttttccccttccttgacccaattcatatgggagcctccggcactgggtctaccctatgccctttatacacctacctgttgattttgcagtaaagcgaatgcaacagagaaggcgatggttgctggtttgggaggactcaatctctttggtgtcatcattcttggaaacttgttgaagcaaatgacagtgacacctggtggactaatctcatttgccgcacagttatatcctttgcttcagatatacgctggctccttttttgcaatacctttgtttagatggtttctgctacgcaagaccaacaatggcattaaaaagaggaataaggccagagaacagagagctcaggagctcgtgtcaccagattcttctctaagaagaaagttgctcagtgcacgtgatatggctgaacggaaagtaatcacgccagaggagattgtctatactactgaaaaggatctattggagcaggattatgaagtcaaggagtgggagaggagatttaaggagctcgagtcagagtgatggacatgaccgatatacttgacacttgcagtagctctacatggtcctcaccatacttgtcggtgatttttatccgcatccaacggagtggaagatggatctgactgaaccactcgagcaagcgaaactggatggtactggacctcactaattgtcgtgtcaccaccagcccaccactgaccacttcgctatggaagttttgtggaagctgttggtttaattggaaccgaccattatttgcaagatgatgttcgtatctgtgccattgacctgcatatatgtatagttccaatcacggatcaaattcagaatttgacacgaaaaagaaaaaaaacagggaatatggctaggatgctactcggtttgaatggagtccaatcaaaacatgtaaaaaggtcagcctgtgaacagggactcagactgtttgctgcggctttaatccactggctcctaacagtgctaggaatagacgtactgttataaaaacttccaggtggaccaattcacgatgggaacctaacattttcttgcattaagctgaaacgtgtatctcctgcctgcgtttgtcattgcgaacgagacacgatcgaaagaactga

SEQ ID NO: 54879 - DNA, 2753 bp, Zea Mays
gctgaatctcacgtcctcaccgtgccggacaccggtgtctgcttggaccaaatccgatctcgtggccacggccagaacacacctcctcacgtccacctgacctcttgctcctccccaataatgcccagtgcggcagtgcctgccaccgtctaagcccaccccaagtctccgccgtcaacccgtcctcccccatggccgccgccgccgccatctctctatccttccactttcgtttccgcccgccctttccatctccacgtacccccacgcgccacgctcccttttccttgttctccccttcccttcttgccccctgccgcctccgcgtcgctcccggccgcccctcaccgtccccgtggcgccccgacgtgcgggcgcgcgctggaagcaccatcggggcgccgcctgcgcttgtgcgcccaggcggagccgtggagacggaccgcctcccctccgacgtgcgggaccgggccatggaggcggtcgaccacttcggcggtcgcgtcaccataggagacgtcgcttctcgcgctgggctgcagctcgcgcaggcggagcgcgcgctccaagcactcgccgccgacactgaaggcttcctggaggtatcggaggacggggaggtgctatacgtcttcccaaaggactacagggcaaagctggctggcaaatcgtttaggatgcgggtcgagcctctggttgacaaagccaagcaagtgggtgcttatctggtacgtgtttcatttggcactgcgctcattgcctcaattgtgctggtgtacactacaatcattgccattctctcaagctcaagtagtgatgaagatggtcgtgggaggcggaggagatcttatggttctactatcatcattccgacggatatgttttggtacttggatgcagattattatagaagacgtcgagtagaaaacgaaaatgggatgaactttattgaatctgtattttcatttgtgtttggggatggtgatccaaacgatgggcttgaagaaaagcggtggaagatgattggacagtatatttcatcaaatggtggagttgttacagctgaagaactggcaccatttcttgatgtgccacctccatcagaagagtccaaggacgatgaatcatttgttcttccagttcttttacgctttcagggacatccagaaattgatgagcagggaaatatcctgtatcgattcccatcgctgcaacgtactgcttcatcaaaaagtggtaggagcagggaatatgtgggtaccaaatggtctgcaatgtttagcggagttgaaaagtacttagaggagaaaccgtggaaattcaggtcagtatatatcatcaccatccttagtgaagttgaactaatccaggatgcaatttgtcctttgcgggggaaggtttgccttggtttttccccttccttgacccaattcatatgggagcctccggcactgggtctaccctatgccctttatacacctacctgttgattttgcagtaaagcgaatgcaacagagaaggcgatggttgctggtttgggaggactcaatctctttggtgtcatcattcttggaaacttgttgaagcaaatgacagtgacacctggtggactaatctcatttgccgcacagttatatcctttgcttcaggtatggctgggcttgatatgcctgtttagtactctataatgtggtcattactctagtcattccatttatacatatttggcctgacagaaatcacgagcccttctctttgttaaggggatttccagatgttttgaatgttgcaaaatcgatgattgctgaattacctgtgaattaataagattgtcaatgatatgtactgatacaatgtggtcatttctagatatacgctggctccttttttgcaatacctttgtttagatggtttctgctacgcaagaccaacaatggcattaaaaagaggaataaggccagagaacagagagctcaggagctcgtgtcaccagattcttctctaagaagaaagttgctcagtgcacgtgatatggctgaacggaaagtaatcacgccagaggagattgtctatactactgaaaaggatctattggagcaggattatgaagtcaaggagtgggagaggagatttaaggagctcgagtcagagtgatggacatgaccgatatacttgacacttgcagtagctctacatggtcctcaccatacttgtcggtgatttttatccgcatccaacggagtggaagatggatctgactgaaccactcgagcaagcgaaactggatggtactggacctcactaattgtcgtgtcaccaccagcccaccactgaccacttcgctatggaagttttgtggaagctgttggtttaattggaaccgaccattatttgcaagatgatgttcgtatctgtgccattgacctgcatatatgtatagttccaatcacggatcaaattcagaatttgacacgaaaaagaaaaaaaacagggaatatggctaggatgctactcggtttgaatggagtccaatcaaaacatgtaaaaaggtcagcctgtgaacagggactcagactgtttgctgcggctttaatccactggctcctaacagtgctaggaatagacgtactgttataaaaacttccaggtggaccaattcacgatgggaacctaacattttcttgcattaagctgaaacgtgtatctcctgcctgcgtttgtcattgcgaacgagacacgatcgaaagaactga

SEQ ID NO: 54880 - DNA, 2424 bp, Zea Mays
cgctttttcccactgaccaaacgccaccttgaggaaagggggcggggaagttgctgaatctcacgtcctcaccgtgccggacaccggtgtctgcttggaccaaatccgatctcgtggccacggccagaacacacctcctcacgtccacctgacctcttgctcctccccaataatgcccagtgcggcagtgcctgccaccgtctaagcccaccccaagtctccgccgtcaacccgtcctcccccatggccgccgccgccgccatctctctatccttccactttcgtttccgcccgccctttccatctccacgtacccccacgcgccacgctcccttttccttgttctccccttcccttcttgccccctgccgcctccgcgtcgctcccggccgcccctcaccgtccccgtggcgccccgacgtgcgggcgcgcgctggaagcaccatcggggcgccgcctgcgcttgtgcgcccaggcggagccgtggagacggaccgcctcccctccgacgtgcgggaccgggccatggaggcggtcgaccacttcggcggtcgcgtcaccataggagacgtcgcttctcgcgctgggctgcagctcgcgcaggcggagcgcgcgctccaagcactcgccgccgacactgaaggcttcctggaggtatcggaggacggggaggtgctatacgtcttcccaaaggactacagggcaaagctggctggcaaatcgtttaggatgcgggtcgagcctctggttgacaaagccaagcaagtgggtgcttatctggtacgtgtttcatttggcactgcgctcattgcctcaattgtgctggtgtacactacaatcattgccattctctcaagctcaagtagtgatgaagatggtcgtgggaggcggaggagatcttatggttctactatcatcattccgacggatatgttttggtacttggatgcagattattatagaagacgtcgagtagaaaacgaaaatgggatgaactttattgaatctgtaatttaaaagggtattttcatttgtgtttggggatggtgatccaaacgatgggcttgaagaaaagcggtggaagatgattggacagtatatttcatcaaatggtggagttgttacagctgaagaactggcaccatttcttgatgtgccacctccatcagaagagtccaaggacgatgaatcatttgttcttccagttcttttacgctttcagggacatccagaaattgatgagcagggaaatatcctgtatcgattcccatcgctgcaacgtactgcttcatcaaaaagtggtaggagcagggaatatgtgggtaccaaatggtctgcaatgtttagcggagttgaaaagtacttagaggagaaaccgtggaaattcagtaaagcgaatgcaacagagaaggcgatggttgctggtttgggaggactcaatctctttggtgtcatcattcttggaaacttgttgaagcaaatgacagtgacacctggtggactaatctcatttgccgcacagttatatcctttgcttcagatatacgctggctccttttttgcaatacctttgtttagatggtttctgctacgcaagaccaacaatggcattaaaaagaggaataaggccagagaacagagagctcaggagctcgtgtcaccagattcttctctaagaagaaagttgctcagtgcacgtgatatggctgaacggaaagtaatcacgccagaggagattgtctatactactgaaaaggatctattggagcaggattatgaagtcaaggagtgggagaggagatttaaggagctcgagtcagagtgatggacatgaccgatatacttgacacttgcagtagctctacatggtcctcaccatacttgtcggtgatttttatccgcatccaacggagtggaagatggatctgactgaaccactcgagcaagcgaaactggatggtactggacctcactaattgtcgtgtcaccaccagcccaccactgaccacttcgctatggaagttttgtggaagctgttggtttaattggaaccgaccattatttgcaagatgatgttcgtatctgtgccattgacctgcatatatgtatagttccaatcacggatcaaattcagaatttgacacgaaaaagaaaaaaaacagggaatatggctaggatgctactcggtttgaatggagtccaatcaaaacatgtaaaaaggtcagcctgtgaacagggactcagactgtttgctgcggctttaatccactggctcctaacagtgctaggaatagacgtactgttataaaaacttccaggtggaccaattcacgatgggaacctaacattttcttgcattaagctgaaacgtgtatctcctgcctgcgtttgtcattgcgaacgagacacgatcgaaagaactga

SEQ ID NO: 54881 - DNA, 2694 bp, Zea Mays
tttttacccaatttttaatttatcaaacatttggtatgacaaattttagttgcaaacacagcagaccgctttttcccactgaccaaacgccaccttgaggaaagggggcggggaagttgctgaatctcacgtcctcaccgtgccggacaccggtgtctgcttggaccaaatccgatctcgtggccacggccagaacacacctcctcacgtccacctgacctcttgctcctccccaataatgcccagtgcggcagtgcctgccaccgtctaagcccaccccaagtctccgccgtcaacccgtcctcccccatggccgccgccgccgccatctctctatccttccactttcgtttccgcccgccctttccatctccacgtacccccacgcgccacgctcccttttccttgttctccccttcccttcttgccccctgccgcctccgcgtcgctcccggccgcccctcaccgtccccgtggcgccccgacgtgcgggcgcgcgctggaagcaccatcggggcgccgcctgcgcttgtgcgcccaggcggagccgtggagacggaccgcctcccctccgacgtgcgggaccgggccatggaggcggtcgaccacttcggcggtcgcgtcaccataggagacgtcgcttctcgcgctgggctgcagctcgcgcaggcggagcgcgcgctccaagcactcgccgccgacactgaaggcttcctggaggtatcggaggacggggaggtgctatacgtcttcccaaaggactacagggcaaagctggctggcaaatcgtttaggatgcgggtcgagcctctggttgacaaagccaagcaagtgggtgcttatctggtacgtgtttcatttggcactgcgctcattgcctcaattgtgctggtgtacactacaatcattgccattctctcaagctcaagtgatgaagatggtcgtgggaggcggaggagatcttatggttctactatcatcattccgacggatatgttttggtacttggatgcagattattatagaagacgtcgagtagaaaacgaaaatgggatgaactttattgaatctgtattttcatttgtgtttggggatggtgatccaaacgatgggcttgaagaaaagcggtggaagatgattggacagtatatttcatcaaatggtggagttgttacagctgaagaactggcaccatttcttgatgtgccacctccatcagaagagtccaaggacgatgaatcatttgttcttccagttcttttacgctttcagggacatccagaaattgatgagcagggaaatatcctgtatcgattcccatcgctgcaacgtactgcttcatcaaaaagtggtaggagcagggaatatgtgggtaccaaatggtctgcaatgtttagcggagttgaaaagtacttagaggagaaaccgtggaaattcagtaaagcgaatgcaacagagaaggcgatggttgctggtttgggaggactcaatctctttggtgtcatcattcttggaaacttgttgaagcaaatgacagtgacacctggtggactaatctcatttgccgcacagttatatcctttgcttcaggtatggctgggcttgatatgcctgtttagtactctataatgtggtcattactctagtcattccatttatacatatttggcctgacagaaatcacgagcccttctctttgttaaggggatttccagatgttttgaatgttgcaaaatcgatgattgctgaattacctgtgaattaataagattgtcaatgatatgtactgatacaatgtggtcatttctagatatacgctggctccttttttgcaatacctttgtttagatggtttctgctacgcaagaccaacaatggcattaaaaagaggaataaggccagagaacagagagctcaggagctcgtgtcaccagattcttctctaagaagaaagttgctcagtgcacgtgatatggctgaacggaaagtaatcacgccagaggagattgtctatactactgaaaaggatctattggagcaggattatgaagtcaaggagtgggagaggagatttaaggagctcgagtcagagtgatggacatgaccgatatacttgacacttgcagtagctctacatggtcctcaccatacttgtcggtgatttttatccgcatccaacggagtggaagatggatctgactgaaccactcgagcaagcgaaactggatggtactggacctcactaattgtcgtgtcaccaccagcccaccactgaccacttcgctatggaagttttgtggaagctgttggtttaattggaaccgaccattatttgcaagatgatgttcgtatctgtgccattgacctgcatatatgtatagttccaatcacggatcaaattcagaatttgacacgaaaaagaaaaaaaacagggaatatggctaggatgctactcggtttgaatggagtccaatcaaaacatgtaaaaaggtcagcctgtgaacagggactcagactgtttgctgcggctttaatccactggctcctaacagtgctaggaatagacgtactgttataaaaacttccaggtggaccaattcacgatgggaacctaacattttcttgcattaagctgaaacgtgtatctcctgcctgcgtttgtcattgcgaacgagacacgatcgaaagaactga

SEQ ID NO: 54882 - DNA, 1377 bp, Zea Mays
ggaccaaatccgatctcgtggccacggccagaacacacctcctcacgtccacctgacctcttgctcctccccaataatgcccagtgcggcagtgcctgccaccgtctaagcccaccccaagtctccgccgtcaacccgtcctcccccatggccgccgccgccgccatctctctatccttccactttcgtttccgcccgccctttccatctccacgtacccccacgcgccacgctcccttttccttgttctccccttcccttcttgccccctgccgcctccgcgtcgctcccggccgcccctcaccgtccccgtggcgccccgacgtgcgggcgcgcgctggaagcaccatcggggcgccgcctgcgcttgtgcgcccaggcggagccgtggagacggaccgcctcccctccgacgtgcgggaccgggccatggaggcggtcgaccacttcggcggtcgcgtcaccataggagacgtcgcttctcgcgctgggctgcagctcgcgcaggcggagcgcgcgctccaagcactcgccgccgacactgaaggcttcctggaggtatcggaggacggggaggtgctatacgtcttcccaaaggactacagggcaaagctggctggcaaatcgtttaggatgcgggtcgagcctctggttgacaaagccaagcaagtgggtgcttatctggtacgtgtttcatttggcactgcgctcattgcctcaattgtgctggtgtacactacaatcattgccattctctcaagctcaagtgatgaagatggtcgtgggaggcggaggagatcttatggttctactatcatcattccgacggatatgttttggtacttggatgcagattattatagaagacgtcgagtagaaaacgaaaatgggatgaactttattgaatctgtaatttaaaagggtttgacttgattgttcattgtcactttgttttgatggaatgtgtaggtagtttgaaactgtatgtaatgtttattaaataaatgccacaggtattttcatttgtgtttggggatggtgatccaaacgatgggcttgaagaaaagcggtggaagatgattggacagtatatttcatcaaatggtggagttgttacagctgaagaactggcaccatttcttgatgtgccacctccatcagaagagtccaaggacgatgaatcatttgttcttccagttcttttacgctttcagggacatccagaaattgatgagcagatgcaagaaaaaggtgctgggaaatgccatgtcctggatgatgaagggaggagtgggttgtttcagatgctagggaggcgtcagccaaagcaaaaacacccttacattacatgcactagtttcttcacttgaagttgag

SEQ ID NO: 54883 - DNA, 485 bp, Zea Mays
agaagctggagaaactgaggaggaaggaggacaaggccaaggccgaggcggccaagagggccgccgccgccgccagaggcgacacgaagaatggtgaggaggctcatccgagctgattgatcatcgcaaaatcagaccggtgctcccgtgaatcctgtgatgctgtactactgatgacacgtagatgcaaatagacgccgtcgtactaggtactactctgcatggagaggaacgtttgctctcttttgcaactctgctcgtcgtgtcgtgtgtaatcccatccctgtcacggttgtgaacttcgcttgtagctagcgacggttttgccttgccttgtcccttgtcggtgcaactggagtggagtggaggcgtccttgagcctcttccatgtacataggttgtcaataataataatgaataaatgtagtcccctcgtcgaaaacaataaaaaaaggtcccagaagagtggatatctcgctttggca

SEQ ID NO: 54884 - DNA, 999 bp, Zea Mays
ctcaagcccaccacaccgaccacaaagacgagggcgactttgcctcaccacgcgcgcgaggcgtgcatggccgcgacggcgtgcgcctacgcctaccagggggcccgcccgccgcaggttctgctgccggccacgttcatcgacgtcgacggcgccgtccagcagtccgcaccaccgccgccgcccccactgccacgaccgtccttcctgtcgcaccacctcgacatctgcaccgagggcctcggctcagagagctccggcgacatcgatctcaccgacgacgtcgacgacaacgctgccgcctgcgtcgacgtcgggcaggcaccgacgtgcaagaggcagcatcgtgacggaggccacgaggaaacggggagggcgaggaacgccaggccagcgttcccgccgccgatctcgctgatcggggccggcgggaagccgtggctctacctccggccgctgcgggaggacggccgtctcgtgctgagggaggtcaggataccgttgcgggagctgctccaggcgcgccgggaggacggccggttcaagctccagttcgcccagccccagccggacgacaggtgccagtaggccgaggagggccaagatccagcagatgcaacttgcgccagataaaacggagagaaaacacgacagggcaacgagaagtgtagttcagggttttagacttcggctccaaccaattccacacgcctactgtttgtttttggccacttgcagagagatgtaaatacagcggaatttatgttcaatgccgcctcatcagtgtttaatcacacagtccattgcccagggttttgcagtaagctagtgaagcagttcagttactctagtggctggaatcaacaaggaaaaacactcaggtccagaaccttaaaccaagtacaaaaaccaatactatgctagtatttgcgtggcacttgtaccgacctggcatcacatttttcctgctgcagagcactttagggtttcacagacgac

SEQ ID NO: 54885 - DNA, 1179 bp, Zea Mays
cgcgtcaacgaaggaaatcccgatgccgctgcccgctgtcgcgagatgcttcggctttccacatttgtcatgtacccgcggtaacgcagtaacggcgtagggcgtaacgtcccctcccccgtgaacggtgtacccgaccctcttcgccggccgtcgcctatccaaatccgtcacggacgcttccacgcgaccaagcagccacgcggcgctggtctggccggccatgtcctgcctcgcggcgccgccggctgcaccgccaaaggcgggggagcgcatgctccgcgccgccgctcctttgcgctcgccttcgccgtgccggggcctgcattacgcggtgcgggggactggagggcgagaagccgggtgcggccggcggcagctggcgctgctgcggtgctccccagctggcgagtccagggcgtccggggacggcggcctttccagcttctgtataattgaaggtccagagacgatcgaggactttgctcaaatgcaatcgcaggagattgaagacaacatcatgagccgacgcaacaaaattttccttctgatggaagaggttagacggttgcgagtgcagcagcgtatccgaacttctgaaagcaaagatgccaacactgaaggaaatgaaatgcctgagattccatcaactattccatttatgcctgatgcgtcaccaaagactatgaagcaactctatatgacatcgttctctgtcatatctgggataatcatttttggaggcttgatagccccagtacttgaactgaaactagggctgggtggcacatcttatgaagattttataaggaccttgcacttacctcttcaattgagtcaggtagatcctatagtggcatcattttcaggtggcgcagttggtgttatctcagctttaatgttggtcgaagtgagaaatgtcaggcagcaagagaagaaaagatgcacatattgccatgggactgggtacttgccatgtgctcgctgttctgctagtgggatgttattgaacacaaagcagttttcattattggggcataatatgtggtcaatgaaaggaaggtgtcagaattgttctggagctggaaaggtgatgtgtccgacgtgcttgtgcacaggaatggcgatggcaagctaccaacaataacgccaccttgatgggcaataggtcaatggttg

SEQ ID NO: 54886 - DNA, 1482 bp, Zea Mays
cgcgtcaacgaaggaaatcccgatgccgctgcccgctgtcgcgagatgcttcggctttccacatttgtcatgtacccgcggtaacgcagtaacggcgtagggcgtaacgtcccctcccccgtgaacggtgtacccgaccctcttcgccggccgtcgcctatccaaatccgtcacggacgcttccacgcgaccaagcagccacgcggcgctggtctggccggccatgtcctgcctcgcggcgccgccggctgcaccgccaaaggcgggggagcgcatgctccgcgccgccgctcctttgcgctcgccttcgccgtgccggggcctgcattacgcggtgcgggggactggagggcgagaagccgggtgcggccggcggcagctggcgctgctgcggtgctccccagctggcgagtccagggcgtccggggacggcggcctttccagcttctgtataattgaaggtccagagacgatcgaggactttgctcaaatgcaatcgcaggagattgaagacaacatcatgagccgacgcaacaaaattttccttctgatggaagaggttagacggttgcgagtgcagcagcgtatccgaacttctgaaagcaaagatgccaacactgaaggaaatgaaatgcctgagattccatcaactattccatttatgcctgatgcgtcaccaaagactatgaagcaactctatatgacatcgttctctgtcatatctgggataatcatttttggaggcttgatagccccagtacttgaactgaaactagggctgggtggcacatcttatgaagattttataaggaccttgcacttacctcttcaattgaggtagatcctatagtggcatcattttcaggtggcgcagttggtgttatctcagctttaatgttggtcgaagtgagaaatgtcaggcagcaagagaagaaaagatgcacatattgccatgggactgggtacttgccatgtgctcgctgttctgctagtgggatgttattgaacacaaagcagttttcattattggggcataatatgtggtcaatgaaaggaaggtgtcagaattgttctggagctggaaaggtgatgtgtccgacgtgcttgtgcacaggaatggcgatggcaagtgagcatgatccacggattgacccttttgattagtttgatatgacaatacgctttttgtctgtttcgtggaaaatatgttgccgataacagcaataaactcatgtttgtatgtacgttatgtttgttactacgtgatcacttgagaggagttgagtgcaacccttgtccaaaagaggacactacaaatgtaggcttgtctgaaccacagaataaaaatcgtctgtctcacccgtatttttactttcttatgattttctctcctcctaagttctatctattcacttgtgatattactcaaagtataattcacatcttaaaagagcaattaagtgaagaggaccttttctctgt

SEQ ID NO: 54887 - DNA, 1862 bp, Zea Mays
gcgggcgattgggtttcgggaagagggcaccggcaatgtcaacgacgacggaggcggcaaagagcggctcagccgcaccggtgcggtgccagcggatcggctgcgacgccatattcaccaacgatgacaaccgcgagggctcctgccaataccacccctccgtacctatgtttcatgacggcatgaaagaatggagctgctgcaagcaaagaagccatgatttcagcttatttttgcagatacctgggtaaggacccttcttcctcccttgatgcacaacaggaaagcatacaaccgaaaaaccaatcacaaaagctgtttcatctaaccgtacaaaggcaacaccgatccagtcctctaagcagggtgtgggagttgatgtgtgtgcaaggtgtcgtcaaggtttcttttgctccgatcatggatcacagcccaagccacaaaagccagctgctaccgacgatacaaacaaggaacctgttgagaaatcagctgttccaccgcccaagaaaaggatcgatgtaaatgagctgaggacatgtaaaaataaaggatgtggtaaatcctacaaggagaaggataaccatgattctgcatgtgactaccatccaggtcctgccgttttccatgacaggatgagagggtggaaatgctgtgatgttcatgtcaaggagtttgacgagtttatggagatacctacatgcacaaagggttggcataatgctgatgcggtgtgaattcacgccatgcttaaggctgttttcatgttgtatcgtcacctgccatgtaaacaccatttctgcagtttattgaggatttcatttggaagtgtgacaagagctttgaggatgggctccgggctgcgggctgcctaagctttgcgcacggtagctgtctggaaatcttacgtgattctccttgtactctggaccacatttggtgtctggattcaaattggggttttgtctgtttgaagccgaaggatgccaatattttaaccatgtctaagccagagaagttagcgcatgctgtggagcggtagaggtgccgtgtttcttgtgtgtgttccatggctgctggagaagtcctgtccgtgtactggtttgctcggtttgagcaggcaaaagcctggaccatgcatcactagtttgttctaccgctcctcactccccagaccagaaagttgttgccaatctacaatataatgaaaacttagctgcactcttggaaagagaaaagcacaatctcttgatttattggatgctgttttggcgtgcatacactagcattatcattatgtcatggatacatggacatgggattcaaatgtaagtagtactggtagtgctttggacacggcagcgttcaggttcaagggatgccgatgatcgggatgaacgggaagaagaagaagaagggaggcagtcctccaaaactgaagggcggcctgttgcctccacgggacggtggagtccacgccggcgtccgtgccgccggtggcgtcggccttagcgctggctccatcggggcgttaccaccctggtgttcacggtcggccatggtcgcagcgacagcggagccgccgctagccgcagcgcacctcgtgaagaaggcgaggcgggagcccagaacataggaggcggggtaggaggcggagccaggcccccgggccgggacgacgcgcgcgaccgtgagtccccacggcgcgcagagctgctccgtggcgccgaggaccctggccgcgcacggcgcgcccgaggctgacgcttctgctggcacggccacgtcgaagttgccgcgcccgtcggtctgcgctgcgtggaggcccgcgctgccgtcgccgtcgccggcgcatttcaccg

SEQ ID NO: 54888 - DNA, 2376 bp, Zea Mays
gcgggcgattgggtttcgggaagagggcaccggcaatgtcaacgacgacggaggcggcaaagagcggctcagccgcaccggtgcggtgccagcggatcggctgcgacgccatattcaccaacgatgacaaccgcgagggctcctgccaataccacccctccgtacctatgtttcatgacggcatgaaagaatggagctgctgcaagcaaagaagccatgatttcagcttatttttgcagatacctgggttccgacgatgtgacgccaggatcagcaccacccatcacctccaccgttgtcacatctattgatgtgacgactgctgccaccaaccaatttcataggtggacttcatggcattccagcagctgatggtgcagcagttcgccgccatctatggcatgtccaacaggacactgccaccactgccgcctccatcttctaccaccaccagtgctgctgcttcccctatggcatgccaagctatggtggcaccccccttcccaccaccaccacgccatccaccaccatcgttcccttcccatctgccacggcaccccttccattgccgatctccgccttggtgccatcgggacaaccatacctgtacccatccaccagattgccttcccacactccccatccccgattcccagcttccccaaggatgctcttcctgcacaccatcaccctgctgcaggcgccatcaccaccaccctcacttccacaaattatccttccctaccaccagcataaccctaggaggacggcgcccaaacgccgggatgcacaacaggaaagcatacaaccgaaaaaccaatcacaaaagctgtttcatctaaccgtacaaaggcaacaccgatccagtcctctaagcagggtgtgggagttgatgtgtgtgcaaggtgtcgtcaaggtttcttttgctccgatcatggatcacagcccaagccacaaaagccagctgctaccgacgatacaaacaaggaacctgttgagaaatcagctgttccaccgcccaagaaaaggatcgatgtaaatgagctgaggacatgtaaaaataaaggatgtggtaaatcctacaaggagaaggataaccatgattctgcatgtgactaccatccaggtcctgccgttttccatgacaggatgagagggtggaaatgctgtgatgttcatgtcaaggagtttgacgagtttatggagatacctacatgcacaaagggttggcataatgctgatgcggtgtgaattcacgccatgcttaaggctgttttcatgttgtatcgtcacctgccatgtaaacaccatttctgcagtttattgaggatttcatttggaagtgtgacaagagctttgaggatgggctccgggctgcgggctgcctaagctttgcgcacggtagctgtctggaaatcttacgtgattctccttgtactctggaccacatttggtgtctggattcaaattggggttttgtctgtttgaagccgaaggatgccaatattttaaccatgtctaagccagagaagttagcgcatgctgtggagcggtagaggtgccgtgtttcttgtgtgtgttccatggctgctggagaagtcctgtccgtgtactggtttgctcggtttgagcaggcaaaagcctggaccatgcatcactagtttgttctaccgctcctcactccccagaccagaaagttgttgccaatctacaatataatgaaaacttagctgcactcttggaaagagaaaagcacaatctcttgatttattggatgctgttttggcgtgcatacactagcattatcattatgtcatggatacatggacatgggattcaaatgtaagtagtactggtagtgctttggacacggcagcgttcaggttcaagggatgccgatgatcgggatgaacgggaagaagaagaagaagggaggcagtcctccaaaactgaagggcggcctgttgcctccacgggacggtggagtccacgccggcgtccgtgccgccggtggcgtcggccttagcgctggctccatcggggcgttaccaccctggtgttcacggtcggccatggtcgcagcgacagcggagccgccgctagccgcagcgcacctcgtgaagaaggcgaggcgggagcccagaacataggaggcggggtaggaggcggagccaggcccccgggccgggacgacgcgcgcgaccgtgagtccccacggcgcgcagagctgctccgtggcgccgaggaccctggccgcgcacggcgcgcccgaggctgacgcttctgctggcacggccacgtcgaagttgccgcgcccgtcggtctgcgctgcgtggaggcccgcgctgccgtcgccgtcgccggcgcatttcaccg

SEQ ID NO: 54889 - DNA, 1837 bp, Zea Mays
gcgggcgattgggtttcgggaagagggcaccggcaatgtcaacgacgacggaggcggcaaagagcggctcagccgcaccggtgcggtgccagcggatcggctgcgacgccatattcaccaacgatgacaaccgcgagggctcctgccaataccacccctccgtacctatgtttcatgacggcatgaaagaatggagctgctgcaagcaaagaagccatgatttcagcttatttttgcagatacctggatgcacaacaggaaagcatacaaccgaaaaaccaatcacaaaagctgtttcatctaaccgtacaaaggcaacaccgatccagtcctctaagcagggtgtgggagttgatgtgtgtgcaaggtgtcgtcaaggtttcttttgctccgatcatggatcacagcccaagccacaaaagccagctgctaccgacgatacaaacaaggaacctgttgagaaatcagctgttccaccgcccaagaaaaggatcgatgtaaatgagctgaggacatgtaaaaataaaggatgtggtaaatcctacaaggagaaggataaccatgattctgcatgtgactaccatccaggtcctgccgttttccatgacaggatgagaggtggaaatgctgtgatgttcatgtcaaggagtttgacgagtttatggagatacctacatgcacaaagggttggcataatgctgatgcggtgtgaattcacgccatgcttaaggctgttttcatgttgtatcgtcacctgccatgtaaacaccatttctgcagtttattgaggatttcatttggaagtgtgacaagagctttgaggatgggctccgggctgcgggctgcctaagctttgcgcacggtagctgtctggaaatcttacgtgattctccttgtactctggaccacatttggtgtctggattcaaattggggttttgtctgtttgaagccgaaggatgccaatattttaaccatgtctaagccagagaagttagcgcatgctgtggagcggtagaggtgccgtgtttcttgtgtgtgttccatggctgctggagaagtcctgtccgtgtactggtttgctcggtttgagcaggcaaaagcctggaccatgcatcactagtttgttctaccgctcctcactccccagaccagaaagttgttgccaatctacaatataatgaaaacttagctgcactcttggaaagagaaaagcacaatctcttgatttattggatgctgttttggcgtgcatacactagcattatcattatgtcatggatacatggacatgggattcaaatgtaagtagtactggtagtgctttggacacggcagcgttcaggttcaagggatgccgatgatcgggatgaacgggaagaagaagaagaagggaggcagtcctccaaaactgaagggcggcctgttgcctccacgggacggtggagtccacgccggcgtccgtgccgccggtggcgtcggccttagcgctggctccatcggggcgttaccaccctggtgttcacggtcggccatggtcgcagcgacagcggagccgccgctagccgcagcgcacctcgtgaagaaggcgaggcgggagcccagaacataggaggcggggtaggaggcggagccaggcccccgggccgggacgacgcgcgcgaccgtgagtccccacggcgcgcagagctgctccgtggcgccgaggaccctggccgcgcacggcgcgcccgaggctgacgcttctgctggcacggccacgtcgaagttgccgcgcccgtcggtctgcgctgcgtggaggcccgcgctgccgtcgccgtcgccggcgcatttcaccg

SEQ ID NO: 54890 - DNA, 1756 bp, Zea Mays
gcgggcgattgggtttcgggaagagggcaccggcaatgtcaacgacgacggaggcggcaaagagcggctcagccgcaccggtgcggtgccagcggatcggctgcgacgccatattcaccaacgatgacaaccgcgagggctcctgccaataccacccctccgtacctatgtttcatgacggcatgaaagaatggagctgctgcaagcaaagaagccatgatttcagcttatttttgcagatacctggtcctctaagcagggtgtgggagttgatgtgtgtgcaaggtgtcgtcaaggtttcttttgctccgatcatggatcacagcccaagccacaaaagccagctgctaccgacgatacaaacaaggaacctgttgagaaatcagctgttccaccgcccaagaaaaggatcgatgtaaatgagctgaggacatgtaaaaataaaggatgtggtaaatcctacaaggagaaggataaccatgattctgcatgtgactaccatccaggtcctgccgttttccatgacaggatgagagggtggaaatgctgtgatgttcatgtcaaggagtttgacgagtttatggagatacctacatgcacaaagggttggcataatgctgatgcggtgtgaattcacgccatgcttaaggctgttttcatgttgtatcgtcacctgccatgtaaacaccatttctgcagtttattgaggatttcatttggaagtgtgacaagagctttgaggatgggctccgggctgcgggctgcctaagctttgcgcacggtagctgtctggaaatcttacgtgattctccttgtactctggaccacatttggtgtctggattcaaattggggttttgtctgtttgaagccgaaggatgccaatattttaaccatgtctaagccagagaagttagcgcatgctgtggagcggtagaggtgccgtgtttcttgtgtgtgttccatggctgctggagaagtcctgtccgtgtactggtttgctcggtttgagcaggcaaaagcctggaccatgcatcactagtttgttctaccgctcctcactccccagaccagaaagttgttgccaatctacaatataatgaaaacttagctgcactcttggaaagagaaaagcacaatctcttgatttattggatgctgttttggcgtgcatacactagcattatcattatgtcatggatacatggacatgggattcaaatgtaagtagtactggtagtgctttggacacggcagcgttcaggttcaagggatgccgatgatcgggatgaacgggaagaagaagaagaagggaggcagtcctccaaaactgaagggcggcctgttgcctccacgggacggtggagtccacgccggcgtccgtgccgccggtggcgtcggccttagcgctggctccatcggggcgttaccaccctggtgttcacggtcggccatggtcgcagcgacagcggagccgccgctagccgcagcgcacctcgtgaagaaggcgaggcgggagcccagaacataggaggcggggtaggaggcggagccaggcccccgggccgggacgacgcgcgcgaccgtgagtccccacggcgcgcagagctgctccgtggcgccgaggaccctggccgcgcacggcgcgcccgaggctgacgcttctgctggcacggccacgtcgaagttgccgcgcccgtcggtctgcgctgcgtggaggcccgcgctgccgtcgccgtcgccggcgcatttcaccg

SEQ ID NO: 54891 - DNA, 2407 bp, Zea Mays
gcgggcgattgggtttcgggaagagggcaccggcaatgtcaacgacgacggaggcggcaaagagcggctcagccgcaccggtgcggtgccagcggatcggctgcgacgccatattcaccaacgatgacaaccgcgagggctcctgccaataccacccctccgtacctatgtttcatgacggcatgaaagaatggagctgctgcaagcaaagaagccatgatttcagcttatttttgcagatacctgggttccgacgatgtgacgccaggatcagcaccacccatcacctccaccgttgtcacatctattgatgtgacgactgctgccaccaaccaatttcataggtggacttcatggcattccagcagctgatggtgcagcagttcgccgccatctatggcatgtccaacaggacactgccaccactgccgcctccatcttctaccaccaccagtgctgctgcttcccctatggcatgccaagctatggtggcaccccccttcccaccaccaccacgccatccaccaccatcgttcccttcccatctgccacggcaccccttccattgccgatctccgccttggtgccatcgggacaaccatacctgtacccatccaccagattgccttcccacactccccatccccgattcccagcttccccaaggatgctcttcctgcacaccatcaccctgctgcaggcgccatcaccaccaccctcacttccacaaattatccttccctaccaccagcataaccctaggaggacggcgcccaaacgccggggtactggtcctagacttcaaacctatcactcatgcacaacaggaaagcatacaaccgaaaaaccaatcacaaaagctgtttcatctaaccgtacaaaggcaacaccgatccagtcctctaagcagggtgtgggagttgatgtgtgtgcaaggtgtcgtcaaggtttcttttgctccgatcatggatcacagcccaagccacaaaagccagctgctaccgacgatacaaacaaggaacctgttgagaaatcagctgttccaccgcccaagaaaaggatcgatgtaaatgagctgaggacatgtaaaaataaaggatgtggtaaatcctacaaggagaaggataaccatgattctgcatgtgactaccatccaggtcctgccgttttccatgacaggatgagagggtggaaatgctgtgatgttcatgtcaaggagtttgacgagtttatggagatacctacatgcacaaagggttggcataatgctgatgcggtgtgaattcacgccatgcttaaggctgttttcatgttgtatcgtcacctgccatgtaaacaccatttctgcagtttattgaggatttcatttggaagtgtgacaagagctttgaggatgggctccgggctgcgggctgcctaagctttgcgcacggtagctgtctggaaatcttacgtgattctccttgtactctggaccacatttggtgtctggattcaaattggggttttgtctgtttgaagccgaaggatgccaatattttaaccatgtctaagccagagaagttagcgcatgctgtggagcggtagaggtgccgtgtttcttgtgtgtgttccatggctgctggagaagtcctgtccgtgtactggtttgctcggtttgagcaggcaaaagcctggaccatgcatcactagtttgttctaccgctcctcactccccagaccagaaagttgttgccaatctacaatataatgaaaacttagctgcactcttggaaagagaaaagcacaatctcttgatttattggatgctgttttggcgtgcatacactagcattatcattatgtcatggatacatggacatgggattcaaatgtaagtagtactggtagtgctttggacacggcagcgttcaggttcaagggatgccgatgatcgggatgaacgggaagaagaagaagaagggaggcagtcctccaaaactgaagggcggcctgttgcctccacgggacggtggagtccacgccggcgtccgtgccgccggtggcgtcggccttagcgctggctccatcggggcgttaccaccctggtgttcacggtcggccatggtcgcagcgacagcggagccgccgctagccgcagcgcacctcgtgaagaaggcgaggcgggagcccagaacataggaggcggggtaggaggcggagccaggcccccgggccgggacgacgcgcgcgaccgtgagtccccacggcgcgcagagctgctccgtggcgccgaggaccctggccgcgcacggcgcgcccgaggctgacgcttctgctggcacggccacgtcgaagttgccgcgcccgtcggtctgcgctgcgtggaggcccgcgctgccgtcgccgtcgccggcgcatttcaccg

SEQ ID NO: 54892 - DNA, 1574 bp, Zea Mays
ccgacgctcagcaagagcgtcgcgacgagggccgcggcggccagagcgccagccgtggaaggtctcattggtctcgtacctctgctagtgctagataatcggcgctgttccggcgatacagctcggtggctggtggctggtggctggcggtgctgtcttgagccgagtgcctggtggtgtggactgtggagtgaccgagtgaggatgaatccctacgatgccagcagagttatctagatctcccgtggggccgtcctgttcgtttgggcctactaaaaaaaagcgcggccgatgcttatccgtgcctctggcccattaaggttcggttgggccataattttctttaagctgaaggacgatccagcccaggtgcaggggcgaacccctcttctttccggttgccttgcccgacgcttggatgaggagaccaagcaactgcgggtctgcaatcgaagcgaaagcaccgaaacaatcgaccaatcctgctctcgcatctgaatccaacgcaggcgaagcgtcgcgagtccaggtaagtagccgcaactaggatcaacgcatctgcattctcgtccgaataccgcagtagattcatgcacgcacaccgtcttgatccgagaaccatgggattgaggcgcaagaggggggagattcatcagatcaatctgtggagaagtacttcagtgctgctcgcccgtggccctgggaaaccatttacctatcgcgggcgtaaggaaggtccaatatctagtgagaattatgctaagccacttgagcagaacagagaatttggtatcgtggatcagtgtgtcagaagcagcagtgtggctggtacggtgggaacgaacttgatatcgtgcatttggatggaagtgaacttgatatcgtgcatcctttttcaaagctcaatgaaacaaccggttacaagccacataatccttctgggctatcttctgctgccgcgcgcagcaaaagtcgcctgacgctggcacaccctgcattagtttgcattggtgaattctggtcgattgtgactactggtgactggtgacgggcaacagctcgttctgactctctgccctgccatatgctcatcagctcatggcgcagcaaagcacgtgttttagtttaattttgtcatacattacatacattcgactgggatcatctcatacggacgcatcatcatcaatggccggtgacatcagaggtttggtagacgttgcatccatttcttcctgccccggccggccgtcgagggttttggtttctcgtgccggcttccgcttcagcccattagtacgtcccattattcatgccgacgctgaagggcgtgccatcccgttggccctccttccgtacgtgggcttcgctatttttacaaccagaagcaagcaccggagcgttgtctggcactgggagagaaagtgaagctgcctgctagctagatgtgggaacgttcggttcttgaaaggtcactcttcaagcgcagttagggcgtgtttgcgaccctgtatctatctggtcggctcggctcgttcaactggtctagctactgtaacttaatttgtttgcac

SEQ ID NO: 54893 - DNA, 2060 bp, Zea Mays
atgtcgggggtcggcagcggcaggccgccggccgcccagaagatcctgcagtcgctgcgaccgccgctgtccttcgccacgccgtcgcggtcgcccttcgccgcgcccgacgactaccaccgctttccgacaccggctgcggccacggcacccgccgccacctcaggcggcgtcggtgcgggggctcctcctcgtgatactatcgaggaggggctgttcatacggactccgctgaaaaggaaagctacatctgaagaaaatgatgctgctgctgagccaagcgattgtatcattaccagtccaatgcccacttcggtctctggtaaaactgttaaagcttctaaggcaaaagctaagaacagtaaaactgggcctcagacacctacatcaaatgttggttcaccactcaatccaccaactcctgttggcacgtgccgctatgacagttcactaggacttctgacaaaaaagttcattaacttgctcaagcaagcgccagatggcattctagatttgaacaatgctgcagaaacactagaggttcaaaagcgacgcatatatgacattactaatgtccttgaaggcattggactaatagagaagacacttaagaatagaatccgttggaaggccctggatgattcaagtgttcaattagataatggtatttccgctttgcaggcagaagttgaaaatcttagtctgcaggagcaagcactagatgagcgtataagtgctttgtatcccattcagtgacatgcgtgaaaaactaagggggttaactgaagatgaaaataataaaaggtggctctatgtgactgaagacgacatcaagggattacccagctttcagaatgaaacactaattgctattaaagcacctcatggtactacacttgaagtacctgatccagatgaggcgggtgattatctccaaaggagatatagaattgtattaagaagtacgatgggaccaatagatgtttacttagttagtcaatttgatgagaaatttgaggaactgggtggtgttgcgacacccgtcaagcattccagtgtgcccagacatcaacccgcggaagatttcaatacttatgctggacaaagtagcacaccaatggacgtggcacatgatgtacagcatggccagaagattccccaggatcctagtgctttgcatgactttggagggatgacaaggattagtccttccgacgtccatacggattctgattactggctcctaacagagggggatgttagcatgactgatatgtggaaaacaggacgtatccttgatgatcatgcattaagatgcttgaatttcttaacatggaaaatagaagaagtgcagtgggaccagatggatttcctgtcagaagatgttgtcacccctcgagcccataatcagcagccggtcacagttgacgggccacatatggaggttccaagcatggacccataagacattaatggctcaacaaaactgacatctggagcggtgagttctcgtgtgacagcaaatgtttattgcaacagaagggccagacggtttcatgagcgtatgtcatctggagtgtagtcagggcagagcagtccacaacttcagattggtgcacgcccggcacctctgttgtgaagactgacgagctcaactgactaagttaacagtctactgcctgattagtaagcgcagcactttagcttagcagacactgaagcgccagtttcttcgtgactggtgctgtgcacttgctctcatattcaccaccgctccattcgcttaccaagctaacattatcataccagatcagtggacctccactgaaaaatgctgcaaaatgtataaaacatcaggacaaaacagtgcacagtgcaaggggtgttggcgttacaggatgagctatcgattgaaggcaggaaattctttgtacaattgtttgatgccccaaaacagaacaaagcagagctgttcgcttgtaaacaaatgtttctatgcatgtatttaagaggagactccatttttttacatcaatttgatccatacagtcaaacgtata

SEQ ID NO: 54894 - DNA, 2064 bp, Zea Mays
atgtcgggggtcggcagcggcaggccgccggccgcccagaagatcctgcagtcgctgcgaccgccgctgtccttcgccacgccgtcgcggtcgcccttcgccgcgcccgacgactaccaccgctttccgacaccggctgcggccacggcacccgccgccacctcaggcggcgtcggtgcgggggctcctcctcgtgatactatcgaggaggggctgttcatacggactccgctgaaaaggaaagctacatctgaagaaaatgatgctgctgctgagccaagcgattgtatcattaccagtccaatgcccacttcggtctctggtaaaactgttaaagcttctaaggcaaaagctaagaacagtaaaactgggcctcagacacctacatcaaatgttggttcaccactcaatccaccaactcctgttggcacgtgccgctatgacagttcactaggacttctgacaaaaaagttcattaacttgctcaagcaagcgccagatggcattctagatttgaacaatgctgcagaaacactagaggttcaaaagcgacgcatatatgacattactaatgtccttgaaggcattggactaatagagaagacacttaagaatagaatccgttggaaggccctggatgattcaagtgttcaattagataatggcagaagttgaaaatcttagtctgcaggagcaagcactagatgagcgtataagtgacatgcgtgaaaaactaagggggttaactgaagatgaaaataataaaaggtggctctatgtgactgaagacgacatcaagggattacccagctttcagaatgaaacactaattgctattaaagcacctcatggtactacacttgaagtacctgatccagatgaggcgggtgattatctccaaaggagatatagaattgtattaagaagtacgatgggaccaatagatgtttacttagttagtcaatttgatgagaaatttgaggaactgggtggtgttgcgacacccgtcaagcattccagtgtgcccagacatcaacccgcggaagatttcaatacttatgctggacaaagtagcacaccaatggacgtggcacatgatgtacagcatggccagaagattccccaggatcctagtgctttgcatgactttggagggatgacaaggattagtccttccgacgtccatacggattctgattactggctcctaacagagggggatgttagcatgactgatatgtggaaaacaggacgtatccttgatgatcatgcattaagatggtttaaaatcatctgttctgttacataattgttgttacagcttgaatttcttaacatggaaaatagaagaagtgcagtgggaccagatggatttcctgtcagaagatgttgtcacccctcgagcccataatcagcagccggtcacagttgacgggccacatatggaggttccaagcatggacccataagacattaatggctcaacaaaactgacatctggagcggtgagttctcgtgtgacagcaaatgtttattgcaacagaagggccagacggtttcatgagcgtatgtcatctggagtgtagtcagggcagagcagtccacaacttcagattggtgcacgcccggcacctctgttgtgaagactgacgagctcaactgactaagttaacagtctactgcctgattagtaagcgcagcactttagcttagcagacactgaagcgccagtttcttcgtgactggtgctgtgcacttgctctcatattcaccaccgctccattcgcttaccaagctaacattatcataccagatcagtggacctccactgaaaaatgctgcaaaatgtataaaacatcaggacaaaacagtgcacagtgcaaggggtgttggcgttacaggatgagctatcgattgaaggcaggaaattctttgtacaattgtttgatgccccaaaacagaacaaagcagagctgttcgcttgtaaacaaatgtttctatgcatgtatttaagaggagactccatttttttacatcaatttgatccatacagtcaaacgtata

SEQ ID NO: 54895 - DNA, 2113 bp, Zea Mays
atgtcgggggtcggcagcggcaggccgccggccgcccagaagatcctgcagtcgctgcgaccgccgctgtccttcgccacgccgtcgcggtcgcccttcgccgcgcccgacgactaccaccgctttccgacaccggctgcggccacggcacccgccgccacctcaggcggcgtcggtgcgggggctcctcctcgtgatactatcgaggaggggctgttcatacggactccgctgaaaaggaaagctacatctgaagaaaatgatgctgctgctgagccaagcgattgtatcattaccagtccaatgcccacttcggtctctggtaaaactgttaaagcttctaaggcaaaagctaagaacagtaaaactgggcctcagacacctacatcaaatgttggttcaccactcaatccaccaactcctgttggcacgtgccgctatgacagttcactaggacttctgacaaaaaagttcattaacttgctcaagcaagcgccagatggcattctagatttgaacaatgctgcagaaacactagaggttcaaaagcgacgcatatatgacattactaatgtccttgaaggcattggactaatagagaagacacttaagaatagaatccgttggaagtaccttttgtgatttttttcatattgaaattgacataccagtcctaagtgcaagacttcttttttcccctgagaggtatgataataactagacctaagctcagttttgtgtaacacgttgcaggcagaagttgaaaatcttagtctgcaggagcaagcactagatgagcgtataagtgacatgcgtgaaaaactaagggggttaactgaagatgaaaataataaaaggtggctctatgtgactgaagacgacatcaagggattacccagctttcagaatgaaacactaattgctattaaagcacctcatggtactacacttgaagtacctgatccagatgaggcgggtgattatctccaaaggagatatagaattgtattaagaagtacgatgggaccaatagatgtttacttagttagtcaatttgatgagaaatttgaggaactgggtggtgttgcgacacccgtcaagcattccagtgtgcccagacatcaacccgcggaagatttcaatacttatgctggacaaagtagcacaccaatggacgtggcacatgatgtacagcatggccagaagattccccaggatcctagtgctttgcatgactttggagggatgacaaggattagtccttccgacgtccatacggattctgattactggctcctaacagagggggatgttagcatgactgatatgtggaaaacaggacgtatccttgatgatcatgcattaagatgcttgaatttcttaacatggaaaatagaagaagtgcagtgggaccagatggatttcctgtcagaagatgttgtcacccctcgagcccataatcagcagccggtcacagttgacgggccacatatggaggttccaagcatggacccataagacattaatggctcaacaaaactgacatctggagcggtgagttctcgtgtgacagcaaatgtttattgcaacagaagggccagacggtttcatgagcgtatgtcatctggagtgtagtcagggcagagcagtccacaacttcagattggtgcacgcccggcacctctgttgtgaagactgacgagctcaactgactaagttaacagtctactgcctgattagtaagcgcagcactttagcttagcagacactgaagcgccagtttcttcgtgactggtgctgtgcacttgctctcatattcaccaccgctccattcgcttaccaagctaacattatcataccagatcagtggacctccactgaaaaatgctgcaaaatgtataaaacatcaggacaaaacagtgcacagtgcaaggggtgttggcgttacaggatgagctatcgattgaaggcaggaaattctttgtacaattgtttgatgccccaaaacagaacaaagcagagctgttcgcttgtaaacaaatgtttctatgcatgtatttaagaggagactccatttttttacatcaatttgatccatacagtcaaacgtata

SEQ ID NO: 54896 - DNA, 1988 bp, Zea Mays
atgtcgggggtcggcagcggcaggccgccggccgcccagaagatcctgcagtcgctgcgaccgccgctgtccttcgccacgccgtcgcggtcgcccttcgccgcgcccgacgactaccaccgctttccgacaccggctgcggccacggcacccgccgccacctcaggcggcgtcggtgcgggggctcctcctcgtgatactatcgaggaggggctgttcatacggactccgctgaaaaggaaagctacatctgaagaaaatgatgctgctgctgagccaagcgattgtatcattaccagtccaatgcccacttcggtctctggtaaaactgttaaagcttctaaggcaaaagctaagaacagtaaaactgggcctcagacacctacatcaaatgttggttcaccactcaatccaccaactcctgttggcacgtgccgctatgacagttcactaggacttctgacaaaaaagttcattaacttgctcaagcaagcgccagatggcattctagatttgaacaatgctgcagaaacactagaggttcaaaagcgacgcatatatgacattactaatgtccttgaaggcattggactaatagagaagacacttaagaatagaatccgttggaaggccctggatgattcaagtgttcaattagataatggtatttccgctttgcaggcagaagttgaaaatcttagtctgcaggagcaagcactagatgagcgtataaggtgacatgcgtgaaaaactaagggggttaactgaagatgaaaataataaaaggtggctctatgtgactgaagacgacatcaagggattacccagctttcagaatgaaacactaattgctattaaagcacctcatggtactacacttgaagtacctgatccagatgaggcgggtgattatctccaaaggagatatagaattgtattaagaagtacgatgggaccaatagatgtttacttagttagtcaatttgatgagaaatttgaggaactgggtggtgttgcgacacccgtcaagcattccagtgtgcccagacatcaacccgcggaagatttcaatacttatgctggacaaagtagcacaccaatggacgtggcacatgatgtacagcatggccagaagattccccaggatcctagtgctttgcatgactttggagggatgacaaggattagtccttccgacgtccatacggattctgattactggctcctaacagagggggatgttagcatgactgatatgtggaaaacaggacaagaagtgcagtgggaccagatggatttcctgtcagaagatgttgtcacccctcgagcccataatcagcagccggtcacagttgacgggccacatatggaggttccaagcatggacccataagacattaatggctcaacaaaactgacatctggagcggtgagttctcgtgtgacagcaaatgtttattgcaacagaagggccagacggtttcatgagcgtatgtcatctggagtgtagtcagggcagagcagtccacaacttcagattggtgcacgcccggcacctctgttgtgaagactgacgagctcaactgactaagttaacagtctactgcctgattagtaagcgcagcactttagcttagcagacactgaagcgccagtttcttcgtgactggtgctgtgcacttgctctcatattcaccaccgctccattcgcttaccaagctaacattatcataccagatcagtggacctccactgaaaaatgctgcaaaatgtataaaacatcaggacaaaacagtgcacagtgcaaggggtgttggcgttacaggatgagctatcgattgaaggcaggaaattctttgtacaattgtttgatgccccaaaacagaacaaagcagagctgttcgcttgtaaacaaatgtttctatgcatgtatttaagaggagactccatttttttacatcaatttgatccatacagtcaaacgtata

SEQ ID NO: 54897 - DNA, 2173 bp, Zea Mays
gctaaccccacccaccggccaccgcccgcctccagcctcgccggtcctcgccgcccaccccgccggaaccctagctccggagagtgccccggcctccccagccgccgattggttccgggggcccggcgcccctccgcacgatcgcgcgagatccggggtcgccgccggccggggagcagaagccatatgtcgggggtcggcagcggcaggccgccggccgcccagaagatcctgcagtcgctgcgaccgccgctgtccttcgccacgccgtcgcggtcgcccttcgccgcgcccgacgactaccaccgctttccgacaccggctgcggccacggcacccgccgccacctcaggcggcgtcggtgcgggggctcctcctcgtgatactatcgaggaggggctgttcatacggactccgctgaaaaggaaagctacatctgaagaaaatgatgctgctgctgagccaagcgattgtatcattaccagtccaatgcccacttcggtctctggtaaaactgttaaagcttctaaggcaaaagctaagaacagtaaaactgggcctcagacacctacatcaaatgttggttcaccactcaatccaccaactcctgttggcacgtgccgctatgacagttcactaggacttctgacaaaaaagttcattaacttgctcaagcaagcgccagatggcattctagatttgaacaatgctgcagaaacactagaggttcaaaagcgacgcatatatgacattactaatgtccttgaaggcattggactaatagagaagacacttaagaatagaatccgttggaaggccctggatgattcaagtgttcaattagataatggtatttccgctttgcaggcagaagttgaaaatcttagtctgcaggagcaagcactagatgagcgtataagtgacatgcgtgaaaaactaagggggttaactgaagatgaaaataataaaaggtggctctatgtgactgaagacgacatcaagggattacccagctttcagaatgaaacactaattgctattaaagcacctcatggtactacacttgaagtacctgatccagatgaggcgggtgattatctccaaaggagatatagaattgtattaagaagtacgatgggaccaatagatgtttacttagttagtcaatttgatgagaaatttgaggaactgggtggtgttgcgacacccgtcaagcattccagtgtgcccagacatcaacccgcggaagatttcaatacttatgctggacaaagtagcacaccaatggacgtggcacatgatgtacagcatggccagaagattccccaggatcctagtgctttgcatgactttggagggatgacaaggattagtccttccgacgtccatacggattctgattactggctcctaacagagggggatgttagcatgactgatatgtggaaaacaggacaagaagtgcagtgggaccagatggatttcctgtcagaagatgttgtcacccctcgagcccataatcagcagccggtcacagttgacgggccacatatggaggttccaagcatggacccataagacattaatggctcaacaaaactgacatctggagcggtgagttctcgtgtgacagcaaatgtttattgcaacagaagggccagacggtttcatgagcgtatgtcatctggagtgtagtcagggcagagcagtccacaacttcagattggtgcacgcccggcacctctgttgtgaagactgacgagctcaactgactaagttaacagtctactgcctgattagtaagcgcagcactttagcttagcagacactgaagcgccagtttcttcgtgactggtgctgtgcacttgctctcatattcaccaccgctccattcgcttaccaagctaacattatcataccagatcagtggacctccactgaaaaatgctgcaaaatgtataaaacatcaggacaaaacagtgcacagtgcaaggggtgttggcgttacaggatgagctatcgattgaaggcaggaaattctttgtacaattgtttgatgccccaaaacagaacaaagcagagctgttcgcttgtaaacaaatgtttctatgcatgtatttaagaggagactccatttttttacatcaatttgatccatacagtcaaacgtata

SEQ ID NO: 54898 - DNA, 2199 bp, Zea Mays
ctgttcccccctttccacctccctccctcctcgctaaccccacccaccggccaccgcccgcctccagcctcgccggtcctcgccgcccaccccgccggaaccctagctccggagagtgccccggcctccccagccgccgattggttccgggggcccggcgcccctccgcacgatcgcgcgagatccggggtcgccgccggccggggagcagaagccatatgtcgggggtcggcagcggcaggccgccggccgcccagaagatcctgcagtcgctgcgaccgccgctgtccttcgccacgccgtcgcggtcgcccttcgccgcgcccgacgactaccaccgctttccgacaccggctgcggccacggcacccgccgccacctcaggcggcgtcggtgcgggggctcctcctcgtgatactatcgaggaggggctgttcatacggactccgctgaaaaggaaagctacatctgaagaaaatgatgctgctgctgagccaagcgattgtatcattaccagtccaatgcccacttcggtctctggtaaaactgttaaagcttctaaggcaaaagctaagaacagtaaaactgggcctcagacacctacatcaaatgttggttcaccactcaatccaccaactcctgttggcacgtgccgctatgacagttcactaggacttctgacaaaaaagttcattaacttgctcaagcaagcgccagatggcattctagatttgaacaatgctgcagaaacactagaggttcaaaagcgacgcatatatgacattactaatgtccttgaaggcattggactaatagagaagacacttaagaatagaatccgttggaaggccctggatgattcaagtgttcaattagataatggtatttccgctttgcaggtcttaacaaaaatattatctaatcaagtgctttgtatcccattcagtgacatgcgtgaaaaactaagggggttaactgaagatgaaaataataaaaggtggctctatgtgactgaagacgacatcaagggattacccagctttcagaatgaaacactaattgctattaaagcacctcatggtactacacttgaagtacctgatccagatgaggcgggtgattatctccaaaggagatatagaattgtattaagaagtacgatgggaccaatagatgtttacttagttagtcaatttgatgagaaatttgaggaactgggtggtgttgcgacacccgtcaagcattccagtgtgcccagacatcaacccgcggaagatttcaatacttatgctggacaaagtagcacaccaatggacgtggcacatgatgtacagcatggccagaagattccccaggatcctagtgctttgcatgactttggagggatgacaaggattagtccttccgacgtccatacggattctgattactggctcctaacagagggggatgttagcatgactgatatgtggaaaacaggacaagaagtgcagtgggaccagatggatttcctgtcagaagatgttgtcacccctcgagcccataatcagcagccggtcacagttgacgggccacatatggaggttccaagcatggacccataagacattaatggctcaacaaaactgacatctggagcggtgagttctcgtgtgacagcaaatgtttattgcaacagaagggccagacggtttcatgagcgtatgtcatctggagtgtagtcagggcagagcagtccacaacttcagattggtgcacgcccggcacctctgttgtgaagactgacgagctcaactgactaagttaacagtctactgcctgattagtaagcgcagcactttagcttagcagacactgaagcgccagtttcttcgtgactggtgctgtgcacttgctctcatattcaccaccgctccattcgcttaccaagctaacattatcataccagatcagtggacctccactgaaaaatgctgcaaaatgtataaaacatcaggacaaaacagtgcacagtgcaaggggtgttggcgttacaggatgagctatcgattgaaggcaggaaattctttgtacaattgtttgatgccccaaaacagaacaaagcagagctgttcgcttgtaaacaaatgtttctatgcatgtatttaagaggagactccatttttttacatcaatttgatccatacagtcaaacgtata

SEQ ID NO: 54899 - DNA, 2266 bp, Zea Mays
ctctattctgttcccccctttccacctccctccctcctcgctaaccccacccaccggccaccgcccgcctccagcctcgccggtcctcgccgcccaccccgccggaaccctagctccggagagtgccccggcctccccagccgccgattggttccgggggcccggcgcccctccgcacgatcgcgcgagatccggggtcgccgccggccggggagcagaagccatatgtcgggggtcggcagcggcaggccgccggccgcccagaagatcctgcagtcgctgcgaccgccgctgtccttcgccacgccgtcgcggtcgcccttcgccgcgcccgacgactaccaccgctttccgacaccggctgcggccacggcacccgccgccacctcaggcggcgtcggtgcgggggctcctcctcgtgatactatcgaggaggggctgttcatacggactccgctgaaaaggaaagctacatctgaagaaaatgatgctgctgctgagccaagcgattgtatcattaccagtccaatgcccacttcggtctctggtaaaactgttaaagcttctaaggcaaaagctaagaacagtaaaactgggcctcagacacctacatcaaatgttggttcaccactcaatccaccaactcctgttggcacgtgccgctatgacagttcactaggacttctgacaaaaaagttcattaacttgctcaagcaagcgccagatggcattctagatttgaacaatgctgcagaaacactagaggttcaaaagcgacgcatatatgacattactaatgtccttgaaggcattggactaatagagaagacacttaagaatagaatccgttggaaggccctggatgattcaagtgttcaattagataatggtatttccgctttgcaggcagaagttgaaaatcttagtctgcaggagcaagcactagatgagcgtataagtgacatgcgtgaaaaactaagggggttaactgaagatgaaaataataaaaggtggctctatgtgactgaagacgacatcaagggattacccagctttcagaatgaaacactaattgctattaaagcacctcatggtactacacttgaagtacctgatccagatgaggcgggtgattatctccaaaggagatatagaattgtattaagaagtacgatgggaccaatagatgtttacttagttagtcaatttgatgagaaatttgaggaactgggtggtgttgcgacacccgtcaagcattccagtgtgcccagacatcaacccgcggaagatttcaatacttatgctggacaaagtagcacaccaatggacgtggcacatgatgtacagcatggccagaagattccccaggatcctagtgctttgcatgactttggagggatgacaaggattagtccttccgacgtccatacggattctgattactggctcctaacagagggggatgttagcatgactgatatgtggaaaacaggacgtatccttgatgatcatgcattaagatgcttgaatttcttaacatggaaaatagaagaagtgcagtgggaccagatggatttcctgtcagaagatgttgtcacccctcgagcccataatcagcagccggtcacagttgacgggccacatatggaggttccaagcatggacccataagacattaatggctcaacaaaactgacatctggagcggtgagttctcgtgtgacagcaaatgtttattgcaacagaagggccagacggtttcatgagcgtatgtcatctggagtgtagtcagggcagagcagtccacaacttcagattggtgcacgcccggcacctctgttgtgaagactgacgagctcaactgactaagttaacagtctactgcctgattagtaagcgcagcactttagcttagcagacactgaagcgccagtttcttcgtgactggtgctgtgcacttgctctcatattcaccaccgctccattcgcttaccaagctaacattatcataccagatcagtggacctccactgaaaaatgctgcaaaatgtataaaacatcaggacaaaacagtgcacagtgcaaggggtgttggcgttacaggatgagctatcgattgaaggcaggaaattctttgtacaattgtttgatgccccaaaacagaacaaagcagagctgttcgcttgtaaacaaatgtttctatgcatgtatttaagaggagactccatttttttacatcaatttgatccatacagtcaaacgtata

SEQ ID NO: 54900 - DNA, 1220 bp, Zea Mays
catccgtgccaccatcaacggacgcctccgccccatccgcgccccttccaatccgagccaaatctgtgggggagcatcttcggtgccgagaggggagcgttcttcaatcccatccattggcaaatccgttgggagtatacccaatgcacccacccttgtgggagcatccgagccaaatccgtgggggagcatacccaatgcacccacccgtggctgctctacgctgatatgagtccgcgccaaatcctacaaatccgagccaaatctgcccttccaccttcagtgtctcccttccttacgccgcgaggtgaacgagatcccctaccatcgagaaaccccctatatatcaaggccaccacaccagcgtgatcctccttgggtgcatcaggcgcaacaaggcattgaggtgtgtttcagggcaaggcgcaacaagtgacgccctcgctggagttcctctccttcccgctactcctctgcaggaggatgttgttgatgggatgacttcctttatggctgcatgcttggtgtcaattaaaaagaccaaggacctgctccctgatcaacttcaaaaagctcttaggaaggcgatttcagttgaaaagaagaaaagtaaaatctggaaggcatgggatgaaactaaagtcatttataatgttgcttcatgggggcgccactgctgttggggtctacaataatcgagcattacctacggtcgcaactataacgtttcagacttcctgccgtgtgataaccaaattcctttgaatattgtgtcaactactagggcatgttagaattgcttgcgtgtgtgcttttccattgtttaggcaacataaagcttgagaccatttgtttagtctatgctgatgagtttgactgctaattagcagcgcctcccagtcaaaagcagcatgtgtattgtataactgtaaatattgccttgatttgaataaacttgttttttgagctagaactttatttcacgaacttcatatgatagaccctactgtagagtatttctttctcttctcatttcccattattgttatcacttctctttcaacaagaattttctttcttattttattttattttatgtagaagtgtagaaccatatagtctctttggctaatttaatgtggttttgttatctggaaatctggactaatatatttatcccatctttaaaagttgatattttgatatttctagatatatat

SEQ ID NO: 54901 - DNA, 2299 bp, Zea Mays
catccgtgccaccatcaacggacgcctccgccccatccgcgccccttccaatccgagccaaatctgtgggggagcatcttcggtgccgagaggggagcgttcttcaatcccatccattggcaaatccgttgggagtatacccaatgcacccacccttgtgggagcatccgagccaaatccgtgggggagcatacccaatgcacccacccgtggctgctctacgctgatatgagtccgcgccaaatcctacaaatccgagccaaatctgcccttccaccttcagtgtctcccttccttacgccgcgaggtgaacgagatcccctaccatcgagaaaccccctatatatcaaggccaccacaccagcgtgatcctccttgggtgcatcaggcgcaacaaggcattgaggtgtgtttcagggcaaggcgcaacaagtgacgccctcgctggagttcctctccttcccgctactcctctggcgtccacaccccaatggtgcacgttctgccgctgccgcggccgcaccccgccccgcatcccgcaattcttggtcaggtgaggtacaaacagcggttgtcgtggaccagatttggagatctcttgaaagaaagaagatccacttcctgcttctttggtatgttgggtgttatttctcagttttggacataatcctttacaagaagtagcaattcttctgattttcgattttgatggagtaaggattctgcgtctgcagaatgaaagccgatctgatgctgagaaggtatggcataagttatgtggaagctggttatatgcgcttcacttgatcttcaatgagttcaatgcacgaaaacccgaggaaaagaatgtcttcaaaggggtcacgaagaatcacctgttcatgggaataatcggtataacgatagtatttcaggtaacagacgaaattgtgagttattatttgtacaatcatgtcgcagtgttgcctggataaaaatgttagaagtgcaggtcctgcgtattttgctaatgttgctattaagatcaatgccaagtttggaggaagaaacttagaatttgctaatcccaaagaaagcttgccgggtgttacaattgaaccaacaattatatttggtgctgatgttactcaccctgccgctctagatgataccgccccttccattgcttctgttgttgcctcccaagactggcccaaggtggctaactataatgggattgtccgtgcacaaggtcatcgtaaagagctcatcaatggcctggaagacattgtcaaggaactcctacttgcattcgaggagaggtctaagcggagacccaagcagctgatcttccaattgcacccatatatacatgcaattgttttcatgtttcaatgaaaaatcaaacattaattcgtgttcgtgcttcctggttgtaatgtttctttctttttcttcttcttgcaaccttaatttcaacttcttatagttagaacttttctgtcatgttcctcttgtcggaaactctgaatgatgtggcatgtaaatcctcaacgttaaccacgagaagttattatattacccctatttgaatgcaattcgtatttgcagcactaaaattttatcttccaaacattcaactttgattaaatatacaatacgtaattagtattattcaatatatctttggatctattttcaataaatttatttaaaaatataaatatcactaatatttcttataggatgaggtcctttataccatcgtccctgctagcgagacaggaggtcccagtggagcggctaaagccgagggtcgaggcacaggagagagggaactaggctctcaagtaaaagtacccgatcggactaaacccccaagagaaggtgaagctggagaaggagcacatgtggctattcatggacgacagcatcaaggacctcgccaacatttccatggagtagatcaacgccaccgagctcaccaagaacgatgtcgacatccggttcaagtgtacatccactctgcgcctgctgcaatgctgatttaattgttgctcttaacacaaccatttgcgattcagattttgacaactctgatatttagtccttgatgcactattagatgactgtgccgtggtatttgagatatgtgagcctcatgatgcagtatagttgcaggaacctactaacacagcttcacttctaactccctctcactgtatttccctttctttgtagctatagccttttaccaaacttgtcactcattggaaatttggcctacaacatgaataacttgggttcaagtgaggccttg

SEQ ID NO: 54902 - DNA, 2171 bp, Zea Mays
ctccatccgtgccaccatcaacggacgcctccgccccatccgcgccccttccaatccgagccaaatctgtgggggagcatcttcggtgccgagaggggagcgttcttcaatcccatccattggcaaatccgttgggagtatacccaatgcacccacccttgtgggagcatccgagccaaatccgtgggggagcatacccaatgcacccacccgtggctgctctacgctgatatgagtccgcgccaaatcctacaaatccgagccaaatctgcccttccaccttcagtgtctcccttccttacgccgcgaggtgaacgagatcccctaccatcgagaaaccccctatatatcaaggccaccacaccagcgtgatcctccttgggtgcatcaggcgcaacaaggcattgaggtgtgtttcagggcaaggcgcaacaagtgacgccctcgctggagttcctctccttcccgctactcctctggcgtccacaccccaatggtgcacgttctgccgctgccgcggccgcaccccgccccgcatcccgcaattcttggtcaggtgaggtacaaacagcggttgtcgtggaccagatttggagatctcttgaaagaaagaagatccacttcctgcttctttggattctgcgtctgcagaatgaaagccgatctgatgctgagaagatcttcaatgagttcaatgcacgaaaacccgaggaaaagaatgtcttcaaaggggtcacgaagaatcacctgttcatgggaataatcggtataacgatagtatttcaggtaacagacgaaattgtgagttattatttgtacaatcatgtcgcagtgttgcctggataaaaatgttagaagtgcaggtcctgcgtattttgctaatgttgctattaagatcaatgccaagtttggaggaagaaacttagaatttgctaatcccaaagaaagcttgccgggtgttacaattgaaccaacaattatatttggtgctgatgttactcaccctgccgctctagatgataccgccccttccattgcttctgttgttgcctcccaagactggcccaaggtggctaactataatgggattgtccgtgcacaaggtcatcgtaaagagctcatcaatggcctggaagacattgtcaaggaactcctacttgcattcgaggagaggtctaagcggagacccaagcagctgatcttccaattgcacccatatatacatgcaattgttttcatgtttcaatgaaaaatcaaacattaattcgtgttcgtgcttcctggttgtaatgtttctttctttttcttcttcttgcaaccttaatttcaacttcttatagttagaacttttctgtcatgttcctcttgtcggaaactctgaatgatgtggcatgtaaatcctcaacgttaaccacgagaagttattatattacccctatttgaatgcaattcgtatttgcagcactaaaattttatcttccaaacattcaactttgattaaatatacaatacgtaattagtattattcaatatatctttggatctattttcaataaatttatttaaaaatataaatatcactaatatttcttataggatgaggtcctttataccatcgtccctgctagcgagacaggaggtcccagtggagcggctaaagccgagggtcgaggcacaggagagagggaactaggctctcaagtaaaagtacccgatcggactaaacccccaagagaaggtgaagctggagaaggagcacatgtggctattcatggacgacagcatcaaggacctcgccaacatttccatggagtagatcaacgccaccgagctcaccaagaacgatgtcgacatccggttcaagtgtacatccactctgcgcctgctgcaatgctgatttaattgttgctcttaacacaaccatttgcgattcagattttgacaactctgatatttagtccttgatgcactattagatgactgtgccgtggtatttgagatatgtgagcctcatgatgcagtatagttgcaggaacctactaacacagcttcacttctaactccctctcactgtatttccctttctttgtagctatagccttttaccaaacttgtcactcattggaaatttggcctacaacatgaataacttgggttcaagtgaggccttg

SEQ ID NO: 54903 - DNA, 2094 bp, Zea Mays
ctccatccgtgccaccatcaacggacgcctccgccccatccgcgccccttccaatccgagccaaatctgtgggggagcatcttcggtgccgagaggggagcgttcttcaatcccatccattggcaaatccgttgggagtatacccaatgcacccacccttgtgggagcatccgagccaaatccgtgggggagcatacccaatgcacccacccgtggctgctctacgctgatatgagtccgcgccaaatcctacaaatccgagccaaatctgcccttccaccttcagtgtctcccttccttacgccgcgaggtgaacgagatcccctaccatcgagaaaccccctatatatcaaggccaccacaccagcgtgatcctccttgggtgcatcaggcgcaacaaggcattgaggtgtgtttcagggcaaggcgcaacaagtgacgccctcgctggagttcctctccttcccgctactcctctggcgtccacaccccaatggtgcacgttctgccgctgccgcggccgcaccccgccccgcatcccgcaattcttggtcaggtgaggtacaaacagcggttgtcgtggaccagatttggagatctcttgaaagaaagaagatccacttcctgcttctttggattctgcgtctgcagaatgaaagccgatctgatgctgagaagatcttcaatgagttcaatgcacgaaaacccgaggaaaagaatgtcttcaaaggggtcacgaagaatcacctgttcatgggaataatcggtataacgatagtatttcaggtcctgcgtattttgctaatgttgctattaagatcaatgccaagtttggaggaagaaacttagaatttgctaatcccaaagaaagcttgccgggtgttacaattgaaccaacaattatatttggtgctgatgttactcaccctgccgctctagatgataccgccccttccattgcttctgttgttgcctcccaagactggcccaaggtggctaactataatgggattgtccgtgcacaaggtcatcgtaaagagctcatcaatggcctggaagacattgtcaaggaactcctacttgcattcgaggagaggtctaagcggagacccaagcagctgatcttccaattgcacccatatatacatgcaattgttttcatgtttcaatgaaaaatcaaacattaattcgtgttcgtgcttcctggttgtaatgtttctttctttttcttcttcttgcaaccttaatttcaacttcttatagttagaacttttctgtcatgttcctcttgtcggaaactctgaatgatgtggcatgtaaatcctcaacgttaaccacgagaagttattatattacccctatttgaatgcaattcgtatttgcagcactaaaattttatcttccaaacattcaactttgattaaatatacaatacgtaattagtattattcaatatatctttggatctattttcaataaatttatttaaaaatataaatatcactaatatttcttataggatgaggtcctttataccatcgtccctgctagcgagacaggaggtcccagtggagcggctaaagccgagggtcgaggcacaggagagagggaactaggctctcaagtaaaagtacccgatcggactaaacccccaagagaaggtgaagctggagaaggagcacatgtggctattcatggacgacagcatcaaggacctcgccaacatttccatggagtagatcaacgccaccgagctcaccaagaacgatgtcgacatccggttcaagtgtacatccactctgcgcctgctgcaatgctgatttaattgttgctcttaacacaaccatttgcgattcagattttgacaactctgatatttagtccttgatgcactattagatgactgtgccgtggtatttgagatatgtgagcctcatgatgcagtatagttgcaggaacctactaacacagcttcacttctaactccctctcactgtatttccctttctttgtagctatagccttttaccaaacttgtcactcattggaaatttggcctacaacatgaataacttgggttcaagtgaggccttg

SEQ ID NO: 54904 - DNA, 1909 bp, Zea Mays
aattctccataaaaaatcacggatcgaagacgcgagacggctcgcgagccggacccgtcaggccgtcactgcaccacatgacaaacccggaccgaacacggacgcctcccagcaagtggtgacccgtttctccattctcgccgtccgattataaatgcgtccgcaaatgccgccagtccgctctctctcgctgcgcctccgcccccaaatctgcgcaaaggcctcccactcaaattcctcgcggcgaccgatatggttgggagcgtgggcaacgggctggccgatctgggtgcaagagccgtctccatgaacggggcggggaaggcgctgcgtcctgccgaagcggcggcggcggccgccgccgcggagacgctcccgatggagctggatccgtcggaggccttagtggccgctgcggtggaggcgaagggcgagaaggctgccaacgggaggagggagatcgtgatggggaggaacgtacacacctcctgcttcgccgtgaaggagcccgacgcggacgacgaggaaaccggcgagcgggaggcaaccatggctagcgttctcgcgctctaccgccgctcgctcgtcgaacgcaccaagcaccacctcggttacccatacaatctggactttgattatggtgcactgacccagctgcagcacttctcgattaacaaccttggtgatcccttcatcgagagcaactatggtgttcattcccggcagtttgaggttggagtgctggattggtttgctcgtctctgggagttagaaaaggatgagtactggggatatattactaactgtggtacagaaggaaatctgcatgggattcttgttgggagggaggtgttccctgatggaatattgtatgcgtctcgtgagtcccattattcagtattcaaagcagcaagaatgtacagaatggattgtgtcaaagttgacacccttatgtctggggaaatagattgtgctgatttccagagaaagttattgcagaaccgagacaaacctgccatcattaatgttaacattggaacaactgtgaagggggctgttgatgatctagacttggttatcaaaacccttgaggaaaacggctttaaaggcacctcaagtgacatttaaaaagcctattgggagtgtcagcgtctctgggcacaagtttgtcggatgccccatgccatgtggtgtccagataacaaggttggagcacataaatgccctttctagcaatgtggagtatctggcgtcaagggatgcaacaatcatgggaagcaggaatggccatgcccctatcttcctctggtacaccctcaacaggaagggctacagaggcttccagaaagaagtccaaaagtgcttgagaaacgcacactacctaaaagatcgcctcaaggaagcaggaatcggagcgatgcttaacgagctcagtagcacggtcgtgtttgaaaggccaaaggatgaagaatttgtccgaaggtggcagctggcttgtgaagggaatatagctcacgttgtggtgatgcccagtgtcaacattgacaagctagactatttcctgaatgagttagttgagaaacgggcgacttggtaccaggacgggataagccagccaccctgcattgccagagacgtaggtgttgagagctgtctctgtggccttcacaagtagcgagccttttgctttgcaagtgggttcattcttgagtcgagttaaaagtgttatgttgtactgtgttcattcttgagttgagttaaaaagtgttatgttgtactgtgttcgtgcgttctgcttctgtgtttctccacagtgtagcttatttgttgccatgggaataaaattccttctattaaattgattgatggaagttgcatcacggttggctttatccttctgccatgcttc

SEQ ID NO: 54905 - DNA, 1923 bp, Zea Mays
tcggccggtctcctccctccaccgcacctgcagtcagcagcagcctcctctccacccaccaagggcaccaacccaccaccaccactcactcaaccacctctcgtctctctccagcgcgagctagctgctagtgctagttcgctcgtcggccaagatccaagacagcagcagggcttgtaatgccggggagcgtgccgctgggtctgtgcctggacacggcgggggtgcaggtgccgtggtacttcaggtgccccatctccctggagctgatgcgcgaccccgtgacggtgtcgacggggcagacctacgaccgcgccagcatcgagtcctgggtagccacgggcaacaccacctgccccgtgacccgcacggcgctcgccgacttcacgctcatccccaaccacaccctccgccggctgatccaggagtggtgcgtggcgcaccggtccatgggcgtggagcgcatccccacaccgaagcagcccgccgacccggacctggtgcggtccctcgtggcgcagggcccggggctccccgcgctgcggaggctcagggcgctggccagggagtcggacaagaacaggctggtgatggccacgcacgagacgagggccgcgctggtggaggccgccttcgggtccgggtccgggtccggggcggcgagcgaggagctcgagaccgaggccatggcggtgctcgcgctggtggggctcggggaggccgaggccgcggaggtggtcgggagggaggagcgggtggccaggctcggcaaggtcctcggcggcggcgggccgctggaggcgagggtgaacgcgggcgccgtggtggaggccgtggcgtcggcgtcgggggccgaggcccgggctgcgctgggcggcgccgagggcgtgatggacgggctggtggcgctggcggaggaggagaaggccaacaacgcccgcgccgtgcgcgtcggggtccgggccctgttcgcgctgtgcctggcgaaggagaaccgcgcgcgcgcggtggcggcgggggccgcggcggcgctggcgcggcgcgtggcggagggcggcgccggggagcccgagcgcgcgctggcggccgtggagcggctgtgccgcgccgagggcgggcgcgacgccgtggtggccggcgcgggcggcgggcccgcggccgtggcggcgctagtgcgcgccatgtccgggcgcggcgcggagcacgcggcgggcgcgctggcggccgtggtggtgggcgcgggcgggtcggaggcgctgcaggcggaggcggtccgggcgggggccatggggcggctgctgctgatggtgcagggcgggtgctcggagcgcgccaagcgcaaggcgcagcacctgctgaagctgctccgctccgcctggccgagcgccgactgcgtcgccaactccgacgacttcctccaacactaccactactgatcgggggcaagtgcaaaggctgccggcggcgtgtatgtatgccgggtccgggaccgggacggcagcaggacggagaaaatctctaatgttttgtacgtaacgtaacgttggcagggaggaggaggaggatggatggattcgtggttctggatcaatgaacagtactagcagtaatagctgctaagcagcaggcaggcaggcagcaccgattctcacatggatggcattcgctggttttcctttcctccgttggttagtttgtttttttaggcccccatgaccaggcgcgcgtgtgcgcgttttgggtcagtgaaagtacaggcgaagcagcgagaggactggggagattgcgcattgaaagctgggcagagggctcttgggcggtgccccttgttctggggtgtgtggggctgccccgtcctgcagcctgcaggatgcttctgcagaatggaatgttgttgccgtgaaattatcacatccccctcac

SEQ ID NO: 54906 - DNA, 82 bp, Zea Mays
taataaaaaggaggggggaactaatggtcgctgcttttggtgggtcggagtaccagtttccggttgcgcgcgtgaatccgca

SEQ ID NO: 54907 - DNA, 1331 bp, Zea Mays
ctgcaacacagttcatttccagcccactacacctgtcgaaggtcgaccacgcttccgtcttccagatctcggcaatctccatccccgctacgccatggctgctgcctcctccccaaccttcccgccgccggcgaccgacgtcgccgctccaggcgtccccgatctctcgatcccctacgacctggccacccgcgggcagtggcaggcgctcttctcccacctctcccatccggcccacacgccccatccgcaccaccgcctcctcctctccgctctctccgccctctgcctggccaagctccgacgcttccccgacgccgctgcgcttctagcttccctccacccggatccggcctgcccgccgccacccttcctcatccgcctcctccatgctctcctcccactcttcctccccgaccgccccctcgcgctcgaccgcctctacacgctcctctcctccgtccgcgcacgccccaacgccgggcaccccgagtggcgccgccgcgacgcgctcgtcgcgtccgtcctcgccgccgaccacctcgcccaccgcgagttcgacgtcgcactcgcgctcctcgccgacatcgccggccgctacccgggcgacccggtgctcctctcgcgcctcgcctacgcgcacctccagatcggcaacctcggcgcggcctcggctgccttccgccacgtggagtccgtggccgccgcgtccgaggacccgacgcggcatgccaacctcctggcccgcaaccgcgcgctggagtgcatcgtgggcaaggactacgcggcggcggtgcgggagtacgagcgctgcatcgaggcggaccccgcggacgccgtggccctcaacaacaaggcgctgtgcctcatgtactcgcgggacctcggcgacgccatcaaggtgctggagggtgccctcgagagggtccccacggcggcgctcaacgagacggtggtggtcaacctgtgcagcatgtacgagctcgccttcgtcaaccacggcgaggtcaagaggagccttgctgagtggatcgccagggttgcgcccgacgacttcgacacctcctgcacgcgcatgtaggaggtactctgcctttttgcaattcagcattgtagccagccatgtgtatggctgttatgtcaacatgctgaaatgtgattatctctgtttagatagcattccaattcaaccaatttctgtttatgtgcatggaaattgtgacatgattggtatacatgattgaaaacaagagtgaattggagacagacatgctgttgtgatcatacatgcgaagaatgatgaatcccagtttttctcctcttgtcataac

SEQ ID NO: 54908 - DNA, 1532 bp, Zea Mays
cgtggtccggtataaaaacgtcgtggtgccgcacggctccggcgccggcgacgcctccgctcggtttactataaatacgccttcacaaccagctgatctttttttcccctctttccgcgttcccaccctgccgtcgttgctactcgcatcgagatttgcgcggccgtgtcttgctcgcgcctgctgctctgttgccccccttccttccaaggtcgcgtcagcgcccagatctctcgctcgctcgccggcgccccggctagatctgggcggagctcggaggcggagccgtgcgccagtgtccaagtttggtaagacccaaagcgggaaggagtttgtagagaagattgctactcgccttcacgctttaagttatcacatgcggagttatttttggctcgatttccaacagctaaatgacatctatcgttacaagacagaagaatattcccacactgctgtcaacaaattcaatgtcattcctgattcaattccggattggctatttgactttatgccttgtcagggtgggtttttcattggtaatgtcagtcctgccaggatggacttccgatggttcgcacttggaaacatgattgctatactttcttcccttgcaacacctgagcaatctgttgctataatggatcttattgaggagcgttgggaagagctcattggtgaaatgcctctgaagatatgttatcctgctattgagaaccatgaatggcgaattgtgacgggctgtgatccaaaaaacactagatggagttatcataatggaggatcgtggccagtacttctgtggctgctgactgcagcctgcatcaaaactggacggccacaaatcgcaagaagggcaattgacctagcagaaaggaggctgttgaaggatggatggcctgagtactatgatgggaagcttggtcggtatgttggcaagcaggcgaggaaattccagacctggtccatcgcggggtatttggtcgccaagatgatgttggaagatccttcacatctcggcatgatctccctggaagaggatagggcaatgttgaagcctgttttgaagcggtctgcgtcatggacaaactgagatggccacaaaaatttttagggaagcaaaggctgctgaaaacacgagttcttgggggtagcatctccttgtctgctgatccgtttcctttgacttccaaacatggatggtttgtgtcttctggattttccttggttgtacaatatatcagctcgttttctgagttgaaagaaaaagaagcaactgcagaaatgggcattttgttttcttctttcgcaatctctgtaagaagatactctgattcttgcttgggtcatcctataagttgtggatccttttggttagagtcaactttgttgtgccagtggattatacggatgagtaagctgattccagcttccctgtgaagcataagtgctctttctaacgaatgaataaagctcctttctctgtgttgctggatgcctgtgtttctattgcgtttacttgactgcctgtc

SEQ ID NO: 54909 - DNA, 1216 bp, Zea Mays
attttttcttagaaaatataaattattcggaaaatggagttaacaaattagttataaatagtgtaaaacagtacaatatatataactatatatatggagcaacgccaaacaagttcttggataaaagccaaatctttgactgcagctaaaactacttttgatacacagtttctaaagctgttcccttttttaggtagatgtaccaagcaggaaggtccgcccaaagagctgcgtgaaacatgcctcttaccgagcatttttccccttccgttgacaaaaaaaacaagaaattgccaccgcctttctcacatatgttcaaccatatttccacgttgatatgcgtgactgtttgattcagttttttctgagaagtttttttttcaaaaatctagctataaagagaatctgagtatcataaagatcacatataaattaaggtaaaagagttcataagatttaggattgagaaagtgacagttttctactatcgcaacgactcagccaattctatgtttacgttgattttggatgattttgactaaagtgattctcatataagcgggcttaaaagcttgacgtttgaaagtccgcagcaacttatagtggccagaagctaaaaaaaagctgaactttgataacatgactatgctatataatataaataagccattaaatatttcttaataataatttatattaacatgactatgatataatttatattccttaacatttcctaaataacacttaatgttataactttttataattctctcaacagttgtagttaaacttgaaatagcttaactctcaaaagctaaaatgttcaataatttagaatgaagcgaatatataaataaaatgtctgtatagtcgtcgatattcttagaaaaaaatgttgcttatccgaataagttctaaaagaaagattcaatgacgaacagtacgcctacctccaaggaaacgatagacttgccatcgcggccacgcatatataccaccgaataacacttcaaagtattaagcatatccataggcacatcaatctatcaatcaatgtctcaatcaggttgaggatgcacaaggagccatagattaagacgatcactagccaaaaataagccaagcagatcccacgagatccgacggcggctgccgcgcggccccgccggcttcccccaaatcgccgggcagctcgccacaccgttggccagtc

SEQ ID NO: 54910 - DNA, 861 bp, Zea Mays
caaactaccaaagcatttaatgtgaaggttgacgctccagaaaaggacacaaattactttatgattaactggtagactcatacaccaccgagaaagccctaaagaaagtaaaacgtttgccaacctcggttcctcagaaaattaatgtcactaatgtaactatggacggcaaaggtgatggtgaattggaaaagcaatctgtgcagatgcatagtgatgttcagcagataagcaaagatccaccaactatggtcaaggccagcagccgtgaggatgcccaaccaatgactgaatcatctaatgctgaggtgaacacatcaagtgctgtggctgctggagagtctgagtcccatgaaattggatcgccgaagagtctaaaagatgctatcaaaccaaaacataaaagaaagaagaagaaaagtgacaggagttagtttagttgcaagcctgtaattttgtatgccccagataaatcaacgacagtctacaacacctcaaactcctgattgattaggtttcatccggggtgccatacatgggttttttgtgtgttttcaatcgtgactggtgctagtagtgacaggcaaattttgtacaagctgtagaattgtattttaggaatggttcagttaagctttcagtcaactttgcagctagttctgtgatgcgtgatgtcccagcactcttacatttcattgtactgctcaccgttaatcttccattgtccaaacggtcgtaaggattgccatatttgttccaacagtcttcagttgtggtctactggtcttagcttgaaaacaacattaaatcttgtctttgctacttctttcagtctgttttcgtgaggagagtaaattaaaa

SEQ ID NO: 54911 - DNA, 2693 bp, Zea Mays
cgctaacacgggtgcccagccgccgcagtctttcgaactgaggaaccctaggcccagcactcggcgacggcggcgcgccaccggcgacgggatcagcggcatcactcccctccttccccggcgcggcggcgccccgcacctaggccctagcactgcagcactcgacaacaggatcagcggtcgcgcccccctcctccttccccggcgcggcggcgccctgtagctgcagatctgccactgtccgcctgccggtcatggagcacctccggtggcgccccacagtgaacgagcgcgacttcattgagtgtgcgctccagtctgacctccgtgttgacggccgccactcctttgacttccgcaagctcaagatcaccttcggcagggaggatggctcgtcagaggtgcagctcggggagacacacgtgatgggctacgtgaccgtgcagctggtgcagccataccgtgacaggccgaatgaggggacgctggccatattcaccgagttctcacccatggccgacccctcctttgagcctgggcgtcctggggaattagcaattgagcttggccgagttattgaccgtggcctcagggagagtcgagctgttgacatggagtccttgtgtgttgttgctgggaagcatgtctggtctgtgcgtgtggaccttcacatcttggataacggagggaatctcattgatgcagctaatatcgctgcattggcagctttatctactttccggaggcctgaatgcacggttggtggggacgatggtcagcaagttacagtgcatgatcctgaggttagggatccacttcctcttacgatacaccatatgcccatagctgtaacatttgcatattttggtgaaggtaacatcgtggttcttgatcccacatacaaggaagaagcagtaatgggagggaggatgactgctatagttaactcaaatggggatgtttgtgccattcagaaagctggtggagagggtgtcatgtcaagtgttatcatgcagtgtttaagaattgcttcggtaaaggctgctgatataacaagcaaaataaagaaagcagtagactcatacaccaccgagaaagccctaaagaaagtaaaacgtttgccaacctcggttcctcagaaaattaatgtcactaatgtaactatggacggcaaaggtgatggtgaattggaaaagcaatctgtgcagatgcatagtgatgttcagcagataagcaaaggtgatgagaaccagcaaagtataaaaaggaattcacccttgactagggaccgaattgcaaaacacaaacaaacatccacattcattggtggcccatcaaattggtagtgattggtctgatgttttgtttcccaatttctagatatttagcataaacatttgctcgacacaagttttttttgccaactggtccttttttttttgccatgtagggacccatattctaaaggagttacattaagatccctcaaaatttctgatttgccgggtactgttaacattgtttacatgttatgggttttcttcttgcatgctaactctcagtaacacctctgtgatgtacttgcagtcatttttttggttggcatttttggtgctcattgatgattaaaatatggcatgccattctccactgtttctgctttatagccatgtttttaggagggcagacctagtgccggagaggctcccacatgaagtgggtctggagaagggataaaccatggcaagccttcgtccacaaatgtggagaggctgtttcgaacaagctctcgccactgcactatgcctgcccttcaaattctgttgtctataaattgtgattcccttttatacttatttttttagggctggtagaaatactacataaatctgtgttcctttaaattttgatgtctataattctgcctcctgccagtctagagtaatccttcagatttcagtcattttgatttgacatgtgtaacctgatgtaatcgttcttgaggaatactttgccaagatttgttctctcttgagtctggaatcacttatttgcttcgcatgatgtagatccaccaactatggtcaaggccagcagccgtgaggatgcccaaccaatgactgaatcatctaatgctgaggtgaacacatcaagtgctgtggctgctggagagtctgagtcccatgaaattggatcgccgaagagtctaaaagatgctatcaaaccaaaacataaaagaaagaagaagaaaagtgacaggagttagtttagttgcaagcctgtaattttgtatgccccagataaatcaacgacagtctacaacacctcaaactcctgattgattaggtttcatccggggtgccatacatgggttttttgtgtgttttcaatcgtgactggtgctagtagtgacaggcaaattttgtacaagctgtagaattgtattttaggaatggttcagttaagctttcagtcaactttgcagctagttctgtgatgcgtgatgtcccagcactcttacatttcattgtactgctcaccgttaatcttccattgtccaaacggtcgtaaggattgccatatttgttccaacagtcttcagttgtggtctactggtcttagcttgaaaacaacattaaatcttgtctttgctacttctttcagtctgttttcgtgaggagagtaaattaaaa

SEQ ID NO: 54912 - DNA, 2119 bp, Zea Mays
cgctaacacgggtgcccagccgccgcagtctttcgaactgaggaaccctaggcccagcactcggcgacggcggcgcgccaccggcgacgggatcagcggcatcactcccctccttccccggcgcggcggcgccccgcacctaggccctagcactgcagcactcgacaacaggatcagcggtcgcgcccccctcctccttccccggcgcggcggcgccctgtagctgcagatctgccactgtccgcctgccggtcatggagcacctccggtggcgccccacagtgaacgagcgcgacttcattgagtgtgcgctccagtctgacctccgtgttgacggccgccactcctttgacttccgcaagctcaagatcaccttcggcagggaggatggctcgtcagaggtgcagctcggggagacacacgtgatgggctacgtgaccgtgcagctggtgcagccataccgtgacaggccgaatgaggggacgctggccatattcaccgagttctcacccatggccgacccctcctttgagcctgggcgtcctggggaattagcaattgagcttggccgagttattgaccgtggcctcagggagagtcgagctgttgacatggagtccttgtgtgttgttgctgggaagcatgtctggtctgtgcgtgtggaccttcacatcttggataacggagggaatctcattgatgcagctaatatcgctgcattggcagctttatctactttccggaggcctgaatgcacggttggtggggacgatggtcagcaagttacagtgcatgatcctgaggttagggatccacttcctcttacgatacaccatatgcccatagctgtaacatttgcatattttggtgaaggttcttgatcccacatacaaggaagaagcagtaatgggagggaggatgactgctatagttaactcaaatggggatgtttgtgccattcagaaagctggtggagagggtgtcatgtcaagtgttatcatgcagtgtttaagaattgcttcggtaaaggctgctgatataacaagcaaaataaagaaagcagtagactcatacaccaccgagaaagccctaaagaaagtaaaacgtttgccaacctcggttcctcagaaaattaatgtcactaatgtaactatggacggcaaaggtgatggtgaattggaaaagcaatctgtgcagatgcatagtgatgttcagcagataagcaaaggtgatgagaaccagcaaagtataaaaaggaattcacccttgactagggaccgaattgcaaaacacaaacaaacatccacattcattggtggcccatcaaattggtagtgattggtctgatgttttgtttcccaatttctagatatttagcataaacatttgctcgacacaagttttttttgccaactggtccttttttttttgccatgtagggacccatattctaaaggagttacattaagatccctcaaaatttctgatttgccggatccaccaactatggtcaaggccagcagccgtgaggatgcccaaccaatgactgaatcatctaatgctgaggtgaacacatcaagtgctgtggctgctggagagtctgagtcccatgaaattggatcgccgaagagtctaaaagatgctatcaaaccaaaacataaaagaaagaagaagaaaagtgacaggagttagtttagttgcaagcctgtaattttgtatgccccagataaatcaacgacagtctacaacacctcaaactcctgattgattaggtttcatccggggtgccatacatgggttttttgtgtgttttcaatcgtgactggtgctagtagtgacaggcaaattttgtacaagctgtagaattgtattttaggaatggttcagttaagctttcagtcaactttgcagctagttctgtgatgcgtgatgtcccagcactcttacatttcattgtactgctcaccgttaatcttccattgtccaaacggtcgtaaggattgccatatttgttccaacagtcttcagttgtggtctactggtcttagcttgaaaacaacattaaatcttgtctttgctacttctttcagtctgttttcgtgaggagagtaaattaaaa

SEQ ID NO: 54913 - DNA, 1852 bp, Zea Mays
cgctaacacgggtgcccagccgccgcagtctttcgaactgaggaaccctaggcccagcactcggcgacggcggcgcgccaccggcgacgggatcagcggcatcactcccctccttccccggcgcggcggcgccccgcacctaggccctagcactgcagcactcgacaacaggatcagcggtcgcgcccccctcctccttccccggcgcggcggcgccctgtagctgcagatctgccactgtccgcctgccggtcatggagcacctccggtggcgccccacagtgaacgagcgcgacttcattgagtgtgcgctccagtctgacctccgtgttgacggccgccactcctttgacttccgcaagctcaagatcaccttcggcagggaggatggctcgtcagaggtgcagctcggggagacacacgtgatgggctacgtgaccgtgcagctggtgcagccataccgtgacaggccgaatgaggggacgctggccatattcaccgagttctcacccatggccgacccctcctttgagcctgggcgtcctggggaattagcaattgagcttggccgagttattgaccgtggcctcagggagagtcgagctgttgacatggagtccttgtgtgttgttgctgggaagcatgtctggtctgtgcgtgtggaccttcacatcttggataacggagggaatctcattgatgcagctaatatcgctgcattggcagctttatctactttccggaggcctgaatgcacggttggtggggacgatggtcagcaagttacagtgcatgatcctgaggttagggatccacttcctcttacgatacaccatatgcccatagctgtaacatttgcatattttggtgaaggttcttgatcccacatacaaggaagaagcagtaatgggagggaggatgactgctatagttaactcaaatggggatgtttgtgccattcagaaagctggtggagagggtgtcatgtcaagtgttatcatgcagtgtttaagaattgcttcggtaaaggctgctgatataacaagcaaaataaagaaagcagtagactcatacaccaccgagaaagccctaaagaaagtaaaacgtttgccaacctcggttcctcagaaaattaatgtcactaatgtaactatggacggcaaaggtgatggtgaattggaaaagcaatctgtgcagatgcatagtgatgttcagcagataagcaaagatccaccaactatggtcaaggccagcagccgtgaggatgcccaaccaatgactgaatcatctaatgctgaggtgaacacatcaagtgctgtggctgctggagagtctgagtcccatgaaattggatcgccgaagagtctaaaagatgctatcaaaccaaaacataaaagaaagaagaagaaaagtgacaggagttagtttagttgcaagcctgtaattttgtatgccccagataaatcaacgacagtctacaacacctcaaactcctgattgattaggtttcatccggggtgccatacatgggttttttgtgtgttttcaatcgtgactggtgctagtagtgacaggcaaattttgtacaagctgtagaattgtattttaggaatggttcagttaagctttcagtcaactttgcagctagttctgtgatgcgtgatgtcccagcactcttacatttcattgtactgctcaccgttaatcttccattgtccaaacggtcgtaaggattgccatatttgttccaacagtcttcagttgtggtctactggtcttagcttgaaaacaacattaaatcttgtctttgctacttctttcagtctgttttcgtgaggagagtaaattaaaa

SEQ ID NO: 54914 - DNA, 2655 bp, Zea Mays
cgctaacacgggtgcccagccgccgcagtctttcgaactgaggaaccctaggcccagcactcggcgacggcggcgcgccaccggcgacgggatcagcggcatcactcccctccttccccggcgcggcggcgccccgcacctaggccctagcactgcagcactcgacaacaggatcagcggtcgcgcccccctcctccttccccggcgcggcggcgccctgtagctgcagatctgccactgtccgcctgccggtcatggagcacctccggtggcgccccacagtgaacgagcgcgacttcattgagtgtgcgctccagtctgacctccgtgttgacggccgccactcctttgacttccgcaagctcaagatcaccttcggcagggaggatggctcgtcagaggtgcagctcggggagacacacgtgatgggctacgtgaccgtgcagctggtgcagccataccgtgacaggccgaatgaggggacgctggccatattcaccgagttctcacccatggccgacccctcctttgagcctgggcgtcctggggaattagcaattgagcttggccgagttattgaccgtggcctcagggagagtcgagctgttgacatggagtccttgtgtgttgttgctgggaagcatgtctggtctgtgcgtgtggaccttcacatcttggataacggaggctttatctactttccggaggcctgaatgcacggttggtggggacgatggtcagcaagttacagtgcatgatcctgaggttagggatccacttcctcttacgatacaccatatgcccatagctgtaacatttgcatattttggtgaaggtaacatcgtggttcttgatcccacatacaaggaagaagcagtaatgggagggaggatgactgctatagttaactcaaatggggatgtttgtgccattcagaaagctggtggagagggtgtcatgtcaagtgttatcatgcagtgtttaagaattgcttcggtaaaggctgctgatataacaagcaaaataaagaaagcagtagactcatacaccaccgagaaagccctaaagaaagtaaaacgtttgccaacctcggttcctcagaaaattaatgtcactaatgtaactatggacggcaaaggtgatggtgaattggaaaagcaatctgtgcagatgcatagtgatgttcagcagataagcaaaggtgatgagaaccagcaaagtataaaaaggaattcacccttgactagggaccgaattgcaaaacacaaacaaacatccacattcattggtggcccatcaaattggtagtgattggtctgatgttttgtttcccaatttctagatatttagcataaacatttgctcgacacaagttttttttgccaactggtccttttttttttgccatgtagggacccatattctaaaggagttacattaagatccctcaaaatttctgatttgccgggtactgttaacattgtttacatgttatgggttttcttcttgcatgctaactctcagtaacacctctgtgatgtacttgcagtcatttttttggttggcatttttggtgctcattgatgattaaaatatggcatgccattctccactgtttctgctttatagccatgtttttaggagggcagacctagtgccggagaggctcccacatgaagtgggtctggagaagggataaaccatggcaagccttcgtccacaaatgtggagaggctgtttcgaacaagctctcgccactgcactatgcctgcccttcaaattctgttgtctataaattgtgattcccttttatacttatttttttagggctggtagaaatactacataaatctgtgttcctttaaattttgatgtctataattctgcctcctgccagtctagagtaatccttcagatttcagtcattttgatttgacatgtgtaacctgatgtaatcgttcttgaggaatactttgccaagatttgttctctcttgagtctggaatcacttatttgcttcgcatgatgtagatccaccaactatggtcaaggccagcagccgtgaggatgcccaaccaatgactgaatcatctaatgctgaggtgaacacatcaagtgctgtggctgctggagagtctgagtcccatgaaattggatcgccgaagagtctaaaagatgctatcaaaccaaaacataaaagaaagaagaagaaaagtgacaggagttagtttagttgcaagcctgtaattttgtatgccccagataaatcaacgacagtctacaacacctcaaactcctgattgattaggtttcatccggggtgccatacatgggttttttgtgtgttttcaatcgtgactggtgctagtagtgacaggcaaattttgtacaagctgtagaattgtattttaggaatggttcagttaagctttcagtcaactttgcagctagttctgtgatgcgtgatgtcccagcactcttacatttcattgtactgctcaccgttaatcttccattgtccaaacggtcgtaaggattgccatatttgttccaacagtcttcagttgtggtctactggtcttagcttgaaaacaacattaaatcttgtctttgctacttctttcagtctgttttcgtgaggagagtaaattaaaa

SEQ ID NO: 54915 - DNA, 1966 bp, Zea Mays
cgctaacacgggtgcccagccgccgcagtctttcgaactgaggaaccctaggcccagcactcggcgacggcggcgcgccaccggcgacgggatcagcggcatcactcccctccttccccggcgcggcggcgccccgcacctaggccctagcactgcagcactcgacaacaggatcagcggtcgcgcccccctcctccttccccggcgcggcggcgccctgtagctgcagatctgccactgtccgcctgccggtcatggagcacctccggtggcgccccacagtgaacgagcgcgacttcattgagtgtgcgctccagtctgacctccgtgttgacggccgccactcctttgacttccgcaagctcaagatcaccttcggcagggaggatggctcgtcagaggtgcagctcggggagacacacgtgatgggctacgtgaccgtgcagctggtgcagccataccgtgacaggccgaatgaggggacgctggccatattcaccgagttctcacccatggccgacccctcctttgagcctgggcgtcctggggaattagcaattgagcttggccgagttattgaccgtggcctcagggagagtcgagctgttgacatggagtccttgtgtgttgttgctgggaagcatgtctggtctgtgcgtgtggaccttcacatcttggataacggagggaatctcattgatgcagctaatatcgctgcattggcagctttatctactttccggaggcctgaatgcacggttggtggggacgatggtcagcaagttacagtgcatgatcctgaggttagggatccacttcctcttacgatacaccatatgcccatagctgtaacatttgcatattttggtgaaggtaacatcgtggttcttgatcccacatacaaggaagaagcagtaatgggagggaggatgactgctatagttaactcaaatggggatgtttgtgccattcagaaagctggtggagagggtgtcatgtcaagtgttatcatgcagtgtttaagaattgcttcggtaaaggctgctgatataacaagcaaaataaagaaagcagtagactcatacaccaccgagaaagccctaaagaaagtaaaacgtttgccaacctcggttcctcagaaaattaatgtcactaatgtaactatggacggcaaaggtgatggtgaattggaaaagcaatctgtgcagatgcatagtgatgttcagcagataagcaaaggtgatgagaaccagcaaagtataaaaaggaattcacccttgactagggaccgaattgcaaaacacaaacaaacatccacattcattggtggcccatcaaattgatccaccaactatggtcaaggccagcagccgtgaggatgcccaaccaatgactgaatcatctaatgctgaggtgaacacatcaagtgctgtggctgctggagagtctgagtcccatgaaattggatcgccgaagagtctaaaagatgctatcaaaccaaaacataaaagaaagaagaagaaaagtgacaggagttagtttagttgcaagcctgtaattttgtatgccccagataaatcaacgacagtctacaacacctcaaactcctgattgattaggtttcatccggggtgccatacatgggttttttgtgtgttttcaatcgtgactggtgctagtagtgacaggcaaattttgtacaagctgtagaattgtattttaggaatggttcagttaagctttcagtcaactttgcagctagttctgtgatgcgtgatgtcccagcactcttacatttcattgtactgctcaccgttaatcttccattgtccaaacggtcgtaaggattgccatatttgttccaacagtcttcagttgtggtctactggtcttagcttgaaaacaacattaaatcttgtctttgctacttctttcagtctgttttcgtgaggagagtaaattaaaa

SEQ ID NO: 54916 - DNA, 2542 bp, Zea Mays
ctcgtttcgaatgaagtgattcaaacaacccctttgaaaaccagtgcccactgtcctatacgctaacacgggtgcccagccgccgcagtctttcgaactgaggaaccctaggcccagcactcggcgacggcggcgcgccaccggcgacgggatcagcggcatcactcccctccttccccggcgcggcggcgccccgcacctaggccctagcactgcagcactcgacaacaggatcagcggtcgcgcccccctcctccttccccggcgcggcggcgccctgtagctgcagatctgccactgtccgcctgccggtcatggagcacctccggtggcgccccacagtgaacgagcgcgacttcattgagtgtgcgctccagtctgacctccgtgttgacggccgccactcctttgacttccgcaagctcaagatcaccttcggcagggaggatggctcgtcagaggtgcagctcggggagacacacgtgatgggctacgtgaccgtgcagctggtgcagccataccgtgacaggccgaatgaggggacgctggccatattcaccgagttctcacccatggccgacccctcctttgagcctgggcgtcctggggaattagcaattgagcttggccgagttattgaccgtggcctcagggagagtcgagctgttgacatggagtccttgtgtgttgttgctgggaagcatgtctggtctgtgcgtgtggaccttcacatcttggataacggagggaatctcattgatgcagctaatatcgctgcattggcagctttatctactttccggaggcctgaatgcacggttggtggggacgatggtcagcaagttacagtgcatgatcctgaggttagggatccacttcctcttacgatacaccatatgcccatagctgtaacatttgcatattttggtgaaggtaacatcgtggttcttgatcccacatacaaggaagaagcagtaatgggagggaggatgactgctatagttaactcaaatggggatgtttgtgccattcagaaagctggtggagagggtgtcatgtcaagtgttatcatgcagtgtttaagaattgcttcggtaaaggctgctgatataacaagcaaaataaagaaagcagtagactcatacaccaccgagaaagccctaaagaaagtaaaacgtttgccaacctcggttcctcagaaaattaatgtcactaatgtaactatggacggcaaaggtgatggtgaattggaaaagcaatctgtgcagatgcatagtgatgttcagcagataagcaaagggacccatattctaaaggagttacattaagatccctcaaaatttctgatttgccgggtactgttaacattgtttacatgttatgggttttcttcttgcatgctaactctcagtaacacctctgtgatgtacttgcagtcatttttttggttggcatttttggtgctcattgatgattaaaatatggcatgccattctccactgtttctgctttatagccatgtttttaggagggcagacctagtgccggagaggctcccacatgaagtgggtctggagaagggataaaccatggcaagccttcgtccacaaatgtggagaggctgtttcgaacaagctctcgccactgcactatgcctgcccttcaaattctgttgtctataaattgtgattcccttttatacttatttttttagggctggtagaaatactacataaatctgtgttcctttaaattttgatgtctataattctgcctcctgccagtctagagtaatccttcagatttcagtcattttgatttgacatgtgtaacctgatgtaatcgttcttgaggaatactttgccaagatttgttctctcttgagtctggaatcacttatttgcttcgcatgatgtagatccaccaactatggtcaaggccagcagccgtgaggatgcccaaccaatgactgaatcatctaatgctgaggtgaacacatcaagtgctgtggctgctggagagtctgagtcccatgaaattggatcgccgaagagtctaaaagatgctatcaaaccaaaacataaaagaaagaagaagaaaagtgacaggagttagtttagttgcaagcctgtaattttgtatgccccagataaatcaacgacagtctacaacacctcaaactcctgattgattaggtttcatccggggtgccatacatgggttttttgtgtgttttcaatcgtgactggtgctagtagtgacaggcaaattttgtacaagctgtagaattgtattttaggaatggttcagttaagctttcagtcaactttgcagctagttctgtgatgcgtgatgtcccagcactcttacatttcattgtactgctcaccgttaatcttccattgtccaaacggtcgtaaggattgccatatttgttccaacagtcttcagttgtggtctactggtcttagcttgaaaacaacattaaatcttgtctttgctacttctttcagtctgttttcgtgaggagagtaaattaaaa

SEQ ID NO: 54917 - DNA, 2738 bp, Zea Mays
gagaaatgctaatgaccattaatgcagtgcgatgctaattcttcaaaacgggtgagattataataccacggattcaattacgacgataatgatgccaatagtctgaagtccgccgaacggagtggcacggttgcgaaattctcctccccaacccatttcgttcgccgccagcgacgccggcacacaacaagtgagaccccggtttccttccgccgtagttttcccttcatcgtcctcctcctccgttccactagcaacaccggagcggagcggagatccactctccggacttagaccggtttccttctccgtgtggcgagttcaatacctgactcgggtgccccttccccatgtcgcacgtcgagcccgccgccgccggagtggaccaagtcggcgaggggacggtcgtgccgcacgacaacggtgtcagcggcaccgggggtgacgtggccaccacggaagcgcaagtggctgttgccgtttccacctccggcgacgagaggcggggggattacggcgatgatgcagagaacgaggaggaggaggaggccgcaacggtgcagggcagcaaggagggcactgacgagctgctccggaaggtggtgtgcagcgaagaggccgcctacaagctctactgcgattacggccaccgcatggggttcagcatccggaaagggaagcagtcctacttcaccggcaccaagcggatacgcaccaaggactacttctgctccaaggaggggctcaaggaaggggagaagctcactgatgcaaatttcaacgacccccacaccaggaccaattgcagggccatggtgcggttcagggtgaatgatcagggggagtggaaggttatccgactggtatctgatcataaccacaacctggcaaggcctgaggaacgacatcttttgcggtctgcaaggtcgcttatagcagggcggtcaagttctgtggaggtgatgttgtatgggggttatcaggtgcaaggtggggctccacaattgcctacagggagtactagtgcaaccaacaatgtggagaatcagaagcaagatttgctcctcggctacggtgctgcgacaaagacactgactataggaactggggatgtgcagagccttgtgagccatctgaaaagcagggcaaatgaagatggtatgttttactgggatgttcaattggaccgaggtggtcggatgactaatttcttttggcgtgatgggaggagcaggactgactatgactgtttctgtgatgtggtcgtgtttgattcaacttaccgcttgagcaaacataacctgatatgtgcaccgtttgttggcgtcaatcatcattggcagaccactatgtatggttgcgcacttttagctgacgagtctacgtcagcttttgtgtggctgttcaagtctttcttggagtccatggggaaccgacatccacaatctattttcacaaatctagatcaagttgtgacaaaagcggttgaggaggtcttcccaaatgcacgccatcgcattgctcattggcacatccaaaagaatgcccactctcgtctgggtgctcttaatgtctcaaaaacattcaataagatgttcaccaagtgcatacagggatgtgactccgaagcagagtttgaggaaacatgggctcaaatgctctgtgaatttaagttgcaagataacaagtggcttaaaaaattgtataagctcaaacagaagtggtgtagtgctcttaacaactgcacctttgatggtgggatcgagtatgaaccacaatgtgacagtatgagcaacatgtttaataatgtttctgataagttgacttctctttgtgcaattgctgttgctgtggataaacagactgaagattggagggaaaaagaattagatgaggatgcacggtgtttccaaaggccacctgcttgcatcataaaatacagtgatattttgaatcatgcagcaaaggtttatacacatagaatctacaaactgtttgagacagattttcttgatgggtgtggagccacaaaattcaaagagcttccgtgtcaagataacaatacatatcaatttgagatgactatgcaagggcgaggatcaagagtttgcacagttcatttcaatatgtctatgatgcaattaagttgcagctgcagtaagtttgagacaatgggtttactttgcccacatgctttgaaagctcttagtataaaaaatatatgcaaaattccagaaagctacatactgaagcggtggaccaaggatgcgaagaaatgggtttttaatccaaaacaatatgaatcatcatatcaggaatgtatgaatgatgaagctgcatactgcaactatgttatgagatatgcttatgatcttgtcacgaagagccaagggcaggatgcattaaggaaagcactgtgggagactcttgaaagtggtgagaaagaattggagagatacctagaaaacgttacccaacatgcaccttatgccacttgaaaggatcactaattaacctcctagacttatctgctaaggatgaacaagatacttccttgttctttcaagatgcattcagaacttctctcaaattgtacatttatagagatgaaacggatgcttgtcaaagatacaggcttgacgacgctgccatgcctgctttcatcttggcgggttacatcgttgagctcgccttctgcccatatagcatacgcctcctcaccatgtacagcatcatcc

SEQ ID NO: 54918 - DNA, 2538 bp, Zea Mays
gtctgaagtccgccgaacggagtggcacggttgcgaaattctcctccccaacccatttcgttcgccgccagcgacgccggcacacaacaagtgagaccccggtttccttccgccgtagttttcccttcatcgtcctcctcctccgttccactagcaacaccggagcggagcggagatccactctccggacttagaccggtttccttctccgtgtggcgagttcaatacctgactcgggtgccccttccccatgtcgcacgtcgagcccgccgccgccggagtggaccaagtcggcgaggggacggtcgtgccgcacgacaacggtgtcagcggcaccgggggtgacgtggccaccacggaagcgcaagtggctgttgccgtttccacctccggcgacgagaggcggggggattacggcgatgatgcagagaacgaggaggaggaggaggccgcaacggtgcagggcagcaaggagggcactgacgagctgctccggaaggtggtgtgcagcgaagaggccgcctacaagctctactgcgattacggccaccgcatggggttcagcatccggaaagggaagcagtcctacttcaccggcaccaagcggatacgcaccaaggactacttctgctccaaggaggggctcaaggaaggggagaagctcactgatgcaaatttcaacgacccccacaccaggaccaattgcagggccatggtgcggttcagggtgaatgatcagggggagtggaaggttatccgactggtatctgatcataaccacaacctggcaaggcctgaggaacgacatcttttgcggtctgcaaggtcgcttatagcagggcggtcaagttctgtggagaatcagaagcaagatttgctcctcggctacggtgctgcgacaaagacactgactataggaactggggatgtgcagagccttgtgagccatctgaaaagcagggcaaatgaagatggtatgttttactgggatgttcaattggaccgaggtggtcggatgactaatttcttttggcgtgatgggaggagcaggactgactatgactgtttctgtgatgtggtcgtgtttgattcaacttaccgcttgagcaaacataacctgatatgtgcaccgtttgttggcgtcaatcatcattggcagaccactatgtatggttgcgcacttttagctgacgagtctacgtcagcttttgtgtggctgttcaagtctttcttggagtccatggggaaccgacatccacaatctattttcacaaatctagatcaagttgtgacaaaagcggttgaggaggtcttcccaaatgcacgccatcgcattgctcattggcacatccaaaagaatgcccactctcgtctgggtgctcttaatgtctcaaaaacattcaataagatgttcaccaagtgcatacagggatgtgactccgaagcagagtttgaggaaacatgggctcaaatgctctgtgaatttaagttgcaagataacaagtggcttaaaaaattgtataagctcaaacagaagtggtgtagtgctcttaacaactgcacctttgatggtgggatcgagtatgaaccacaatgtgacagtatgagcaacatgtttaataatgtttctgataagttgacttctctttgtgcaattgctgttgctgtggataaacagactgaagattggagggaaaaagaattagatgaggatgcacggtgtttccaaaggccacctgcttgcatcataaaatacagtgatattttgaatcatgcagcaaaggtttatacacatagaatctacaaactgtttgagacagattttcttgatgggtgtggagccacaaaattcaaagagcttccgtgtcaagataacaatacatatcaatttgagatgactatgcaagggcgaggatcaagagtttgcacagttcatttcaatatgtctatgatgcaattaagttgcagctgcagtaagtttgagacaatgggtttactttgcccacatgctttgaaagctcttagtataaaaaatatatgcaaaattccagaaagctacatactgaagcggtggaccaaggatgcgaagaaatgggtttttaatccaaaacaatatgaatcatcatatcaggaatgtatgaatgatgaagctgcatactgcaactatgttatgagatatgcttatgatcttgtcacgaagagccaagggcaggatgcattaaggaaagcactgtgggagactcttgaaagtggtgagaaagaattggagagatacctagaaaacgttacccaacatgcaccttatgccacttgaaaggatcactaattaacctcctagacttatctgctaaggatgaacaagatacttccttgttctttcaagatgcattcagaacttctctcaaattgtacatttatagagatgaaacggatgcttgtcaaagatacaggcttgagtgttttgttgcatacaattgtgccatcagttaatagcaattagcaaacaaatgcacttgtatttttctttctttcaacctt

SEQ ID NO: 54919 - DNA, 611 bp, Zea Mays
agtccattccctgttgccgcatgcacaattgcacacacacacggcgtgccgcatcgtgtaaacaccagggacccgcgcgatcgcacgcctattctaggcgcaaacccaagcgcggagacaaagcacgcaagcaagggccccccgccgctgtaactaaccgaacgaggaggacaagaaagcctcctcgttaagattggaatccagccagagacagggccagtctccagtctccacccaccgttccctcccctcccctcccctcctctcccctcccctgtcgagtccggctgtccccacgacccccacgccacgcgctctctcccgctcctcgcaacggcaaaaccccagcgaattccccacgcgcccgccagctcggcggcggcccagggatccatggagaagtacgagctgctcaaggacatcggctccggcaacttcggcgtggcgcggctcatgcggaacaaggacaccaaggagctcgtcgccatgaagtacatcccgagggggctcaagattgacgagaatgtggcgagggagatcataaaccaccgctcgctgcggcaccacaacatcatccgcttcaaggagttagggcccccccttctttctct

SEQ ID NO: 54920 - DNA, 2168 bp, Zea Mays
cggaagtgtttagaacacatacacttattcgcgctaatatccagatcttcacgtgagcaagcctcgggtcatcgcattaatttggatgttcctgcgctgaacactcaaaatgaaaagatagtgcgggttccatctaagcagcttgctcagagtcatcgtgtaacaaatgttacatgtcctgtttccaatccaaaacagttatctcatatagtaccctctcctactcatttggatccaaatggagcttctaaaaagagaaaaaaggcaaaagcttggtctaaagaggaggatgcagacctagcagctggtgtgcagaagtatggtgaaggaaattgggaggtcattttgcataaatgtaactttgataatacaagaacgcctgatcagttatctcagagatgggcactaaaacgcccaggaggatcaaccaagcctgctagcactaaacacgcctctgttggctcagaagaaagatcagcaactatcaaggcacttcatttggctgtcggtcctatgcctgtatcatctgcactaagatcaggacgtgaacaaagcattcagcataagtctacagcgtttgctcctaagatgccacaagtaagatctgcagtaaccccttcactggcaccggcactggcgctgccagtccaacctctgcgtgtggcagctgaagttcagtctccgcttcgtcatgggcaacaagctcctggccaaggtgcgccaccaaaattgtcaaatgcttcaaataatacacggaagaagcaagcagctctgccaaattctactttcagtccttcctcaatacaagcagcagcaattgctgctggtgggcgacttgccacagcctcaactgccgcaaatcttttaaaagctgcacaatctaagaatgctgtgcacataagatctctaggagcaacatctttgaaatcttctgcaagctttgatcatgggacacaatctgggggctcccagcacctagaatctctaaatgctagcgcagttaatggtgtttcaggagtttctgcagttaatcaatcagggccacctgctggagcggaaactaagaaggcattgggtaccacactagcacctgtcccatgcgacagcgaggaaaatgaggatggctctgaattttgtgcgattacgttagatgacttattccctgaagatgcaaagcagccggaaactgtggataccaaggcaaagcaaccagaaaccacgggtcccaaggcaaagcagccagaaaatgcagatcccaaggcaatgcatcaagaaaccatggatcccaaatcaaagcagccagatacactaaaggttgggatattagatcccaaagataaagacatgctagagttcgatcaatatgttgcttctcaaggagcacacttaaacacggatgatctgaataaaagcaagtgtaccaacagtgcttcccaagcccaaggtcttgttggcagccagaagaacccactgaaactgactcctgtggacgggaaagctaaccctgtaactgcggctgggagaggtaagcctgtagctgctggagtggcatcaaccggaaagaaggctacaatccctatctcacatttggcagcagggaccccacgcggcatagttgacacagtcaatgccaacgccccaattagaagaacactaacaaggagggcagccgcccttgtccccgctggttgccaagctcctcccccgaagcatgccatagacgcgaaaggctgccaaatgacgaatagcattgccacgtttgtcagttctggagtaccagccagcagccaggctagcacgcccgcgaaagatgctaacaaagcaagcccaccgtccagcagctgccagcccaagccggatagtgtggcggtgaacggtgctatcagggccgtgaagagtgttgctaagaaggggaatctgccagcagcagcagccaggcaatagacaggaccctgaataacacggtaaattttgtagtaatacccgtaggacttttgcgcgtcgattgtaccttggaatgtgaatattagtcgttttgcgtgtcattcttttcaccttgcatttgggtgatttttgtctggtattcctgctgggcatcgctaacgtaacttgaaagacgttctcgtctagttcccttgtgaagtgtgatgcttgtgtgtgtgtgtcta

SEQ ID NO: 54921 - DNA, 1998 bp, Zea Mays
ttgctttcccttttggattggcttgcaaggcgccaaggcatcaagtagcttggacttctgtagtggtgattgtttggatcttaagggcgatgacagtgacctggaattggagcttgaacccaatcccagcgagaccaaggaagctttatctgaggcctctgcattggccaaggcgctaatatccagatcttcacgtgagcaagcctcgggtcatcgcattaatttggatgttcctgcgctgaacactcaaaatgaaaagatagtgcgggttccatctaagcagcttgctcagagtcatcgtgtaacaaatgttacatgtcctgtttccaatccaaaacagttatctcatatagtaccctctcctactcatttggatccaaatggagcttctaaaaagagaaaaaaggcaaaagcttggtctaaagaggaggatgcagacctagcagctggtgtgcagaagtatggtgaaggaaattgggaggtcattttgcataaatgtaactttgataatacaagaacgcctgatcagttatctcagagatgggcactaaaacgcccaggaggatcaaccaagcctgctagcactaaacacgcctctgttggctcagaagaaagatcagcaactatcaaggcacttcatttggctgtcggtcctatgcctgtatcatctgcactaagatcaggacgtgaacaaagcattcagcataagtctacagcgtttgctcctaagatgccacaagtaagatctgcagtaaccccttcactggcaccggcactggcgctgccagtccaacctctgcgtgtggcagctgaagttcagtctccgcttcgtcatgggcaacaagctcctggccaagttaatcaatcagggccacctgctggagcggaaactaagaaggcattgggtaccacactagcacctgtcccatgcgacagcgaggaaaatgaggatggctctgaattttgtgcgattacgttagatgacttattccctgaagatgcaaagcagccggaaactgtggataccaaggcaaagcaaccagaaaccacgggtcccaaggcaaagcagccagaaaatgcagatcccaaggcaatgcatcaagaaaccatggatcccaaatcaaagcagccagatacactaaaggttgggatattagatcccaaagataaagacatgctagagttcgatcaatatgttgcttctcaaggagcacacttaaacacggatgatctgaataaaagcaagtgtaccaacagtgcttcccaagcccaaggtcttgttggcagccagaagaacccactgaaactgactcctgtggacgggaaagctaaccctgtaactgcggctgggagaggtaagcctgtagctgctggagtggcatcaaccggaaagaaggctacaatccctatctcacatttggcagcagggaccccacgcggcatagttgacacagtcaatgccaacgccccaattagaagaacactaacaaggagggcagccgcccttgtccccgctggttgccaagctcctcccccgaagcatgccatagacgcgaaaggctgccaaatgacgaatagcattgccacgtttgtcagttctggagtaccagccagcagccaggctagcacgcccgcgaaagatgctaacaaagcaagcccaccgtccagcagctgccagcccaagccggatagtgtggcggtgaacggtgctatcagggccgtgaagagtgttgctaagaaggggaatctgccagcagcagcagccaggcaatagacaggaccctgaataacacggtaaattttgtagtaatacccgtaggacttttgcgcgtcgattgtaccttggaatgtgaatattagtcgttttgcgtgtcattcttttcaccttgcatttgggtgatttttgtctggtattcctgctgggcatcgctaacgtaacttgaaagacgttctcgtctagttcccttgtgaagtgtgatgcttgtgtgtgtgtgtcta

SEQ ID NO: 54922 - DNA, 2313 bp, Zea Mays
attttgctttcccttttggattggcttgcaaggcgccaaggcatcaagtagcttggacttctgtagtggtgattgtttggatcttaagggcgatgacagtgacctggaattggagcttgaacccaatcccagcgagaccaaggaagctttatctgaggcctctgcattggccaaggcgctaatatccagatcttcacgtgagcaagcctcgggtcatcgcattaatttggatgttcctgcgctgaacactcaaaatgaaaagatagtgcgggttccatctaagcagcttgctcagagtcatcgtgtaacaaatgttacatgtcctgtttccaatccaaaacagttatctcatatagtaccctctcctactcatttggatccaaatggagcttctaaaaagagaaaaaaggcaaaagcttggtctaaagaggaggatgcagacctagcagctggtgtgcagaagtatggtgaaggaaattgggaggtcattttgcataaatgtaactttgataatacaagaacgcctgatcagttatctcagagatgggcactaaaacgcccaggaggatcaaccaagcctgctagcactaaacacgcctctgttggctcagaagaaagatcagcaactatcaaggcacttcatttggctgtcggtcctatgcctgtatcatctgcactaagatcaggacgtgaacaaagcattcagcataagtctacagcgtttgctcctaagatgccacaagtaagatctgcagtaaccccttcactggcaccggcactggcgctgccagtccaacctctgcgtgtggcagctgaagttcagtctccgcttcgtcatgggcaacaagctcctggccaaggtgcgccaccaaaattgtcaaatgcttcaaataatacacggaagaagcaagcagctctgccaaattctactttcagtccttcctcaatacaagcagcagcaattgctgctggtgggcgacttgccacagcctcaactgccgcaaatcttttaaaagctgcacaatctaagaatgctgtgcacataagatctctaggagcaacatctttgaaatcttctgcaagctttgatcatgggacacaatctgggggctcccagcacctagaatctctaaatgctagcgcagttaatggtgtttcaggagtttctgcagttaatcaatcagggccacctgctggagcggaaactaagaaggcattgggtaccacactagcacctgtcccatgcgacagcgaggaaaatgaggatggctctgaattttgtgcgattacgttagatgacttattccctgaagatgcaaagcagccggaaactgtggataccaaggcaaagcaaccagaaaccacgggtcccaaggcaaagcagccagaaaatgcagatcccaaggcaatgcatcaagaaaccatggatcccaaatcaaagcagccagatacactaaaggttgggatattagatcccaaagataaagacatgctagagttcgatcaatatgttgcttctcaaggagcacacttaaacacggatgatctgaataaaagcaagtgtaccaacagtgcttcccaagcccaaggtcttgttggcagccagaagaacccactgaaactgactcctgtggacgggaaagctaaccctgtaactgcggctgggagaggtaagcctgtagctgctggagtggcatcaaccggaaagaaggctacaatccctatctcacatttggcagcagggaccccacgcggcatagttgacacagtcaatgccaacgccccaattagaagaacactaacaaggagggcagccgcccttgtccccgctggttgccaagctcctcccccgaagcatgccatagacgcgaaaggctgccaaatgacgaatagcattgccacgtttgtcagttctggagtaccagccagcagccaggctagcacgcccgcgaaagatgctaacaaagcaagcccaccgtccagcagctgccagcccaagccggatagtgtggcggtgaacggtgctatcagggccgtgaagagtgttgctaagaaggggaatctgccagcagcagcagccaggcaatagacaggaccctgaataacacggtaaattttgtagtaatacccgtaggacttttgcgcgtcgattgtaccttggaatgtgaatattagtcgttttgcgtgtcattcttttcaccttgcatttgggtgatttttgtctggtattcctgctgggcatcgctaacgtaacttgaaagacgttctcgtctagttcccttgtgaagtgtgatgcttgtgtgtgtgtgtcta

SEQ ID NO: 54923 - DNA, 2261 bp, Zea Mays
caaacaagtacgaggagtcgaggactgcagctgccccaccaaacgccgacctgccgggacatggcagctgcggcgccggccgcgggcaagggaaaacgaaagcgccacctctccgaggacgacgtctgcctcctccaaaggtacaatccggggacgatcctgacggcgctgcaggaggtggcgcagcatgcggagggccggatcatcgactggagggcggtggtggcgaagtcggccacggggatcacctccgcccgcgagtaccagatgctctggcgctacttagcatatcaccacgacctaaacgagagcatcgaagccggtgacctgcctctgggcgatgacagtgacctggaattggagcttgaacccaatcccagcgagaccaaggaagctttatctgaggcctctgcattggccaaggcgctaatatccagatcttcacgtgagcaagcctcgggtcatcgcattaatttggatgttcctgcgctgaacactcaaaatgaaaagatagtgcgggttccatctaagcagcttgctcagagtcatcgtgtaacaaatgttacatgtcctgtttccaatccaaaacagttatctcatatagtaccctctcctactcatttggatccaaatggagcttctaaaaagagaaaaaaggcaaaagcttggtctaaagaggaggatgcagacctagcagctggtgtgcagaagtatggtgaaggaaattgggaggtcattttgcataaatgtaactttgataatacaagaacgcctgatcagttatctcagagatgggcactaaaacgcccaggaggatcaaccaagcctgctagcactaaacacgcctctgttggctcagaagaaagatcagcaactatcaaggcacttcatttggctgtcggtcctatgcctgtatcatctgcactaagatcaggacgtgaacaaagcattcagcataagtctacagcgtttgctcctaagatgccacaagtaagatctgcagtaaccccttcactggcaccggcactggcgctgccagtccaacctctgcgtgtggcagctgaagttcagtctccgcttcgtcatgggcaacaagctcctggccaaggagtttctgcagttaatcaatcagggccacctgctggagcggaaactaagaaggcattgggtaccacactagcacctgtcccatgcgacagcgaggaaaatgaggatggctctgaattttgtgcgattacgttagatgacttattccctgaagatgcaaagcagccggaaactgtggataccaaggcaaagcaaccagaaaccacgggtcccaaggcaaagcagccagaaaatgcagatcccaaggcaatgcatcaagaaaccatggatcccaaatcaaagcagccagatacactaaaggttgggatattagatcccaaagataaagacatgctagagttcgatcaatatgttgcttctcaaggagcacacttaaacacggatgatctgaataaaagcaagtgtaccaacagtgcttcccaagcccaaggtcttgttggcagccagaagaacccactgaaactgactcctgtggacgggaaagctaaccctgtaactgcggctgggagaggtaagcctgtagctgctggagtggcatcaaccggaaagaaggctacaatccctatctcacatttggcagcagggaccccacgcggcatagttgacacagtcaatgccaacgccccaattagaagaacactaacaaggagggcagccgcccttgtccccgctggttgccaagctcctcccccgaagcatgccatagacgcgaaaggctgccaaatgacgaatagcattgccacgtttgtcagttctggagtaccagccagcagccaggctagcacgcccgcgaaagatgctaacaaagcaagcccaccgtccagcagctgccagcccaagccggatagtgtggcggtgaacggtgctatcagggccgtgaagagtgttgctaagaaggggaatctgccagcagcagcagccaggcaatagacaggaccctgaataacacggtaaattttgtagtaatacccgtaggacttttgcgcgtcgattgtaccttggaatgtgaatattagtcgttttgcgtgtcattcttttcaccttgcatttgggtgatttttgtctggtattcctgctgggcatcgctaacgtaacttgaaagacgttctcgtctagttcccttgtgaagtgtgatgcttgtgtgtgtgtgtcta

SEQ ID NO: 54924 - DNA, 2249 bp, Zea Mays
caaacaagtacgaggagtcgaggactgcagctgccccaccaaacgccgacctgccgggacatggcagctgcggcgccggccgcgggcaagggaaaacgaaagcgccacctctccgaggacgacgtctgcctcctccaaaggtacaatccggggacgatcctgacggcgctgcaggaggtggcgcagcatgcggagggccggatcatcgactggagggcggtggtggcgaagtcggccacggggatcacctccgcccgcgagtaccagatgctctggcgctacttagcatatcaccacgacctaaacgagagcatcgaagccggtgacctgcctctgggcgatgacagtgacctggaattggagcttgaacccaatcccagcgagaccaaggaagctttatctgaggcctctgcattggccaaggcgctaatatccagatcttcacgtgagcaagcctcgggtcatcgcattaatttggatgttcctgcgctgaacactcaaaatgaaaagatagtgcgggttccatctaagcagcttgctcagagtcatcgtgtaacaaatgttacatgtcctgtttccaatccaaaacagttatctcatatagtaccctctcctactcatttggatccaaatggagcttctaaaaagagaaaaaaggcaaaagcttggtctaaagaggaggatgcagacctagcagctggtgtgcagaagtatggtgaaggaaattgggaggtcattttgcataaatgtaactttgataatacaagaacgcctgatcagttatctcagagatgggcactaaaacgcccaggaggatcaaccaagcctgctagcactaaacacgcctctgttggctcagaagaaagatcagcaactatcaaggcacttcatttggctgtcggtcctatgcctgtatcatctgcactaagatcaggacgtgaacaaagcattcagcataagtctacagcgtttgctcctaagatgccacaagtaagatctgcagtaaccccttcactggcaccggcactggcgctgccagtccaacctctgcgtgtggcagctgaagttcagtctccgcttcgtcatgggcaacaagctcctggccaagttaatcaatcagggccacctgctggagcggaaactaagaaggcattgggtaccacactagcacctgtcccatgcgacagcgaggaaaatgaggatggctctgaattttgtgcgattacgttagatgacttattccctgaagatgcaaagcagccggaaactgtggataccaaggcaaagcaaccagaaaccacgggtcccaaggcaaagcagccagaaaatgcagatcccaaggcaatgcatcaagaaaccatggatcccaaatcaaagcagccagatacactaaaggttgggatattagatcccaaagataaagacatgctagagttcgatcaatatgttgcttctcaaggagcacacttaaacacggatgatctgaataaaagcaagtgtaccaacagtgcttcccaagcccaaggtcttgttggcagccagaagaacccactgaaactgactcctgtggacgggaaagctaaccctgtaactgcggctgggagaggtaagcctgtagctgctggagtggcatcaaccggaaagaaggctacaatccctatctcacatttggcagcagggaccccacgcggcatagttgacacagtcaatgccaacgccccaattagaagaacactaacaaggagggcagccgcccttgtccccgctggttgccaagctcctcccccgaagcatgccatagacgcgaaaggctgccaaatgacgaatagcattgccacgtttgtcagttctggagtaccagccagcagccaggctagcacgcccgcgaaagatgctaacaaagcaagcccaccgtccagcagctgccagcccaagccggatagtgtggcggtgaacggtgctatcagggccgtgaagagtgttgctaagaaggggaatctgccagcagcagcagccaggcaatagacaggaccctgaataacacggtaaattttgtagtaatacccgtaggacttttgcgcgtcgattgtaccttggaatgtgaatattagtcgttttgcgtgtcattcttttcaccttgcatttgggtgatttttgtctggtattcctgctgggcatcgctaacgtaacttgaaagacgttctcgtctagttcccttgtgaagtgtgatgcttgtgtgtgtgtgtcta

SEQ ID NO: 54925 - DNA, 2276 bp, Zea Mays
caaacaagtacgaggagtcgaggactgcagctgccccaccaaacgccgacctgccgggacatggcagctgcggcgccggccgcgggcaagggaaaacgaaagcgccacctctccgaggacgacgtctgcctcctccaaaggtacaatccggggacgatcctgacggcgctgcaggaggtggcgcagcatgcggagggccggatcatcgactggagggcggtggtggcgaagtcggccacggggatcacctccgcccgcgagtaccagatgctctggcgctacttagcatatcaccacgacctaaacgagagcatcgaagccggtgacctgcctctgggcgatgacagtgacctggaattggagcttgaacccaatcccagcgagaccaaggaagctttatctgaggcctctgcattggccaaggcgctaatatccagatcttcacgtgagcaagcctcgggtcatcgcattaatttggatgttcctgcgctgaacactcaaaatgaaaagatagtgcgggttccatctaagcagcttgctcagagtcatcgtgtaacaaatgttacatgtcctgtttccaatccaaaacagttatctcatatagtaccctctcctactcatttggatccaaatggagcttctaaaaagagaaaaaaggcaaaagcttggtctaaagaggaggatgcagacctagcagctggtgtgcagaagtatggtgaaggaaattgggaggtcattttgcataaatgtaactttgataatacaagaacgcctgatcagttatctcagagatgggcactaaaacgcccaggaggatcaaccaagcctgctagcactaaacacgcctctgttggctcagaagaaagatcagcaactatcaaggcacttcatttggctgtcggtcctatgcctgtatcatctgcactaagatcaggacgtgaacaaagcattcagcataagtctacagcgtttgctcctaagatgccacaagtaagatctgcagtaaccccttcactggcaccggcactggcgctgccagtccaacctctgcgtgtggcagctgaagttcagtctccgcttcgtcatgggcaacaagctcctggccaagttaatggtgtttcaggagtttctgcagttaatcaatcagggccacctgctggagcggaaactaagaaggcattgggtaccacactagcacctgtcccatgcgacagcgaggaaaatgaggatggctctgaattttgtgcgattacgttagatgacttattccctgaagatgcaaagcagccggaaactgtggataccaaggcaaagcaaccagaaaccacgggtcccaaggcaaagcagccagaaaatgcagatcccaaggcaatgcatcaagaaaccatggatcccaaatcaaagcagccagatacactaaaggttgggatattagatcccaaagataaagacatgctagagttcgatcaatatgttgcttctcaaggagcacacttaaacacggatgatctgaataaaagcaagtgtaccaacagtgcttcccaagcccaaggtcttgttggcagccagaagaacccactgaaactgactcctgtggacgggaaagctaaccctgtaactgcggctgggagaggtaagcctgtagctgctggagtggcatcaaccggaaagaaggctacaatccctatctcacatttggcagcagggaccccacgcggcatagttgacacagtcaatgccaacgccccaattagaagaacactaacaaggagggcagccgcccttgtccccgctggttgccaagctcctcccccgaagcatgccatagacgcgaaaggctgccaaatgacgaatagcattgccacgtttgtcagttctggagtaccagccagcagccaggctagcacgcccgcgaaagatgctaacaaagcaagcccaccgtccagcagctgccagcccaagccggatagtgtggcggtgaacggtgctatcagggccgtgaagagtgttgctaagaaggggaatctgccagcagcagcagccaggcaatagacaggaccctgaataacacggtaaattttgtagtaatacccgtaggacttttgcgcgtcgattgtaccttggaatgtgaatattagtcgttttgcgtgtcattcttttcaccttgcatttgggtgatttttgtctggtattcctgctgggcatcgctaacgtaacttgaaagacgttctcgtctagttcccttgtgaagtgtgatgcttgtgtgtgtgtgtcta

SEQ ID NO: 54926 - DNA, 1770 bp, Zea Mays
aagtaatgggtttagataggatcaaggtgaatttttgctccatactatcccaattcccaacccgaccattgccgtccttacagtcaactgtgttctagacagttgagttcaaaaaggtgaggcggcgagatcgaatcaagcggagcggagcctacacatggcgatggcgctgcgtcggctgctgcttcctctcctcctcctcgtactcttaggtctgcggccgcagagctgcgtcgccagtggcggaggtggaggggagccggcggagttcgagatacctcgggacgggagcgtgctggagcttgacgagagcaacttcgaggcggcggtgcgcgcagccgaattcctcttcgtcgacttctacgctccctggtgcggccactgcaagcgcctcgccccgcagttagatgaggctgctgcagtgctagctggactgagcacgcccgtccttgtggctaaagtaaatgctgacaaatacaagaagctcggctctaaatatggagtagatgggttccctactttgatgttttttgaccatggagtgccctcggagtacacgggttcaaggaaggctgatgtgctagttgagaaccttaagaagcttgttgcacctgatgtttctgtccttgagtcggactcgtcaattaacggctttgttcaagcagctggcatcaattttccattgtttattgggtttggaatggatgagtcattgattgttgaatatggagcgaagtacaagaagaaggcatggttttcaacagcaaaggatttctctgaggatgtgatggttgtgtatgattttgacaaggttccagcgttggtttctgttaacccaaaatataatgagcagagtgtattctatggcccgtttgaagttgttttggatgcaggaacttttctggaagattttataaggcaatccctactgcctgcaactgtgcccatcaatagagagacagtaaagctattgaaagatgatgggaggaaagttgttcttacaatcttggaggatgaatcagatgaaagctctctgcagctaataaaagtgttgaggtctgccgccaatgcaaaccatgatttagtgttcggatatgtgggagtcaaacagtgggaggagttcaccgagacttttgatgtgaaggtttcgcagctgccaaagattgttgtctgggacacaaaagaggagtacgaagtggttgagggttcagagagtttcatagaaggtgactatggatcccaagtcagtcgatttctagagggatatagggaaggaagaacaacaaagaagaaagtgggccgtggttccccaacactgctcggccttaacgcggtatacatcctcgtcctgttggtcgccgttctcgttgttttgatgtatttttccgcgcaaggcgaggaggatcatcagccaagaagagcccatgaggactgacagcaatctgagatggcttagattcaaggcgttgatccggaggctgccgagttatttttgaaggggggtaacatataacatctgatggacaaattttcctgatcttcatttcacgtgccctagggtcgagttttagatatttgttgcagagctatgcatgagctcccctgtgtttctcttgaacccttgaagtttttggacttgttacttgaggaccgggtttcctcaggtttatgtcattgtaattattcggcactttgtaacatagcattcatgtgttatatttgagacccttggagaaacgacttctatagattgaacagcttatatctggg

SEQ ID NO: 54927 - DNA, 2762 bp, Zea Mays
cacaagcaaagctagcaagcgcgactgtcacacctctccgatcaaatccacatcggaacaaccattgaaaagcacgcgattcctacccgtcctgtcgccgccatcaccaccgccggtcggaggtgcctgtcgccgctgctcggctccggcccggagcgtccctccctctcctcgttccgcagttttcaacggcggttgggccccgtcaaaaatctaatcctactgtctctctgaagccggcttccttgactaatcggcggcggaatctcgcggtcttggtttggcccccttgtctggttcctcccgatcggtacttgcctggtggttgataccttctattctcttcccttgtttggtgctcaaaagggcgcaatttccacttggttcttggtatgttggaggttgccaccttctttctgctttgattttttcttcggcgggagcgtcgtcaacgcgacgcctcgaacgggtgcttggctggtggatctattggatttcttggcccatcgacatttgtcaccatgggcggcgtgtgttcggcggggattgcaggggacaagtcgccaacggagctctcattccgagcgatggggttcgtggtggagcaggatttcaaggccttctcagccgccggcaagaacaggaccgcgcccgtcgaggaggcggtggatcctaaccaagtgagcgatcagtcttttcgtttctctgacaagggctcgccgccatcaacgagtggcaaggttcatcgctcggtctccaaggaggccaagactgggaagcctaggagaagcgcctccggcaaggctggtccaagcaaggtttcagacataggcacagtgcttggtagaaagagtacctctggacttgggaaagcagtagaggttctagataatctgagtagcagcatgtcaagtttgagccctggagggggttttgtcgcaggaccaacgacaaaggggaacaaaatatcaatccttgcatttgaggttgcaaacacaatagttaagggcatgagcctcatgcagtctttgtccaaagaaagcctgaactacttgcaggacatggtccttctatcggaaggtgtacaacgattagtttcaagcaacatgggttatctgatgagaattgctgcagctgacaagaggcaagagctgaggatattttcacaagaagtcataagatttgggaatcgttgcaaagatcctcagtggcacaacctagatcgttatttctccaagctagagtcagaaattacaccccaaccacaattaaaagaaacggcgaaagcagatatgcagcaactgatggcccttgttcgccacactgggatctctaccatgaattacacgcactagatagatttgagcaagattatcgccgaaagttggaggaagagaaaagatcagttacatctgaaaggggggacactgttcagatcatcagacaagagctgaagagccagaggaagcatgtacacaatttgaagaaaaagtctctttggtctaagcctcttgactctgtcatggagaagcttgtagatattgtccacttcttacatgtcgagatccaagatacttttgggccttgtgttggagagtcgagcgaatcacaagagagccgtcaaactttggggtctgctggtctctctcttcactacgctaatatcatttctcagattgacaatattgtttcccgaagctccgtcccccctcagagcaccagagatgcgctctatcaaagtctgcccccgaacgtcaagtctgctcttcgaacaaggctgataactccgacagagtctcaagaggttccgatcactagaaccaggagttcaatggagaagactttgcaatggattgtcccggttgccaataacacggccagggcacaccatgggttcggatgggttggcgagtgggcgaacacaggacaaggagaaggccgacgcatgcgtactggacctggtggtgtggctccacatcctgatcagctacagcaggccggcaaacaggtcgccgagccgatcccccgtccgttccccgacccacgcggccccgcgggtggtggtagcagcagcagccacttccgggcgccccgctgggctcacccgagaagagcgcgagatgctgcaggacgcctacacccggcggcggtcccccggggccgggaagagcaagagccaggagctggcggcggcccgcggcaacagggtggcgctgagcaggaacgacaggctgagcaagagcggcccgtcgtcgcgggagcacggcggcagggtcttcccgctggcgacgggcaggtcggccgccgcctcgtcgcccgtcgccgtcggcttcgacatcgaccggatcaaggcgctggaggacgtggtggacagagtggacgcgcagaagcagacgcggctgtgaagctgtggctgtgggttccagagaattcaggacggaggcagcagagagcaggtggccatgggttcaggaatggaatgggatgggaaacaaacaacggttctctctcgtgtggactgctagcagattagcatacataatgcctgcagaaacgctgcaggatggatgcatagaaagaacaagatactatacacataggcaagattccccccctccttttgttttgcctttctgtcgggcggtcagtatttgtacatgtaccgtgccaaatcatcaggctaaacaaactctgttgcttgtaagctgtaataactgtatatatttattattattatatacgtacataagtcacgaaaatgc

SEQ ID NO: 54928 - DNA, 617 bp, Zea Mays
ctgcaggcaggctttttgcttgcttccgcgggcctcgcatgccataggctcaataacctcgccagcggatcccttccttgcgaggccggaactgagctgccgccggcgctatggcgagcggcggcctggcggctgcgtcggaagtcgccgtcgttttcctcatccgccctgtccttgccatcgccttcgtcttcaccctcatcctcctcagctggtacgtggcgtggaggacggtgctggtgcacgtgccgctggtgcaggagatcgccggcctgcgcccgaaaaagccctctaaacccaagccagccaaccgcggccgcttcgccaagttctaccagaaccaggccgaagccgcacaaaggaacagcaaatcagaaggggcatcatcttaagagaaatccgtcaccaccttgagagaatgtataccagcatgtgatgggagcatccctgcctgcctgacgatacatcaggcttatgatagtagcgtatcaactgtttattgcatgaccttgtaaagttaaggaccttatgattgtacatatatatatacacctgtatacaagaaataaagagaagcacatgtcctttggaataatatcaacgtaccttctcctgcg

SEQ ID NO: 54929 - DNA, 795 bp, Zea Mays
cgcaaatgttattgccttgcgatatgagtatatgacactctgtttcctcctcccgaatccggttgcctgcattgccagcaaagtcaacggcgctacaactgcattactgcaggcaggctttttgcttgcttccgcgggcctcgcatgccataggctcaataacctcgccagcggatcccttccttgcgaggccggaactgagctgccgccggcgctatggcgagcggcggcctggcggctgcgtcggaagtcgccgtcgttttcctcatccgccctgtccttgccatcgccttcgtcttcaccctcatcctcctcagctggtacgtggcgtggaggacggtgctggtgcacgtgccgctggtgcaggagatcgccggcctgcgcccgaaaaagccctctaaacccaagccagccaaccgcggccgcttcgccaagttctaccagaaccaggccgaagccgcacaaagcaaatcagaaggggcatcatcttaagagaaatccgtcaccaccttgtaatgagtacctgccgcagactttattatgcagttctaattagaatgcaagtactaccagtgacggcgtctttttaggagagaatgtataccagcatgtgatgggagcatccctgcctgcctgacgatacatcaggcttatgatagtagcgtatcaactgtttattgcatgaccttgtaaagttaaggaccttatgattgtacatatatatatacacctgtatacaagaaataaagagaagcacatgtcctttggaataatatcaacgtaccttctcctgcg

SEQ ID NO: 54930 - DNA, 433 bp, Zea Mays
aatccggttgcctgcattgccagcaaagtcaacggcgctacaactgcattactgcaggcaggctttttgcttgcttccgcgggcctcgcatgccataggctcaataacctcgccagcggatcccttccttgcgaggccggaactgagctgccgccggcgctatggcgagcggcggcctggcggctgcgtcggaagtcgccgtcgttttcctcatccgccctgtccttgccatcgccttcgtcttcaccctcatcctcctcagctggtacgtggcgtggaggacggtgctggtgcacgtgccgctggtgcaggagatcgccggcctgcgcccgaaaaagccctctaaacccaagccagccaaccgcggccgcttcgccaagttctaccagaaccaggccgaagccgcacaaagtgatgggcaagtacatagaac

SEQ ID NO: 54931 - DNA, 1562 bp, Zea Mays
cgtaaagtacgatgcgcctcccgcttcttccacggtctcctcccctcgccgccgccgccgccgccgccgccatgcctcctcgccgccgtcgcgttgtcaaagcgacgccgctcaagccgtcttctccacaactctcctctaccccgccacctaccccgtctgtagaggtacccaaaaccgaaccccccgatcaccacgatcccactccctccgcccgtcgccgcctccccctcgctgccggggccgttgaggcgcaggaagagtggcatccgctcccgctctccacggccgacctttccctcccgctcaccctccccaccggccagaccttcctttggcgccgcacctccctctccccgctccgcttcaccggtgccgtggggtcccacctcgtctccctctcccacctgcccgactccgacgatggccgcctcgcattcctcctccacaacgacggcggttgccccgcctcctcgttgcccgccgcccgcgccgcgctcctcgactatctcaacgcggccgtctcgctcgccgacctctggcggcagttcgccgccgcagatgagcgcttcgctgatgtctccgcgcggctcgggggcggcggcgcgcgggtgcttaggcaggaccccgtcgagtgcgtcttccagtttctatgctcctccaacaacaacattgcccggatcgagaagatggtgtggacgctggcaggctacggggagcggctcggcgaggttggtggcttcgtgttccaccggttccccacgatcgagcggctcgcgcgcgtgtcggagcaggaacttcgtgaggccgggtttgggtacaggtgttggtccaaaggtcgctgcctgcattgctctgttctcccttgatcaaaatcatgctattcctgtcgacacacatgtttggaaggttgctacacagtatctattaccagagctagctggcaagagcttgaccccaaaacttagcgttgttgttgccgatgcttttgttactagatttggaagctatgctggttgggcacaaaacgttctcttcattggccagctaccaactcaaaaagttgttgtggctcaagttaccagtgacaatggtaccacaaagcctaccaaaaggaagcgcagggtgcaaccggaaccatgttgagggagcatggataccagcgatagtgggtttgccattcttctgtgttattctcgttcagtaagaatgtaagatgatgtaatatgaccatgacgaatgatcttttctgctgaacaggcattaggttgctcctgatcacactaacatatttgctgtcagcttgtaacatataggaatgcctgactcattacattatgagttctattttcatatgtgggcattgtgttgtttcttcgttagcctgcccgtgcatcttccacaaaaacatcaggatggaagcgggggcacatgtaaccgtgttgtgttgttatttaaacagcgatgagggattcagttgaaagtattgggtcaatagttctctgtaacctttgcacccagctataccatcccgtgctgccaggccggcttcttctgatgaa

SEQ ID NO: 54932 - DNA, 1766 bp, Zea Mays
tcgccgcgccacacgcgcacggcctcacccagtcctcgactagccgacgccgagaagcccctcgatggcgaggcgaaggcgcgcagcaatcctgcctcgcttccctccaaattcccaaagctctcgcgcgcggtgccatggcggagcgcctcgccgcctccctcctccctgccgcctcgccgtccccgtccgcccgccgcgcaacggtcgcagccgcagccgccgcctctttcccctccccatgctccgcccgcgcggggctgcgcctacgctcccgcccgcccctcttctcgcagaaggcggccgggcgcgggtgtggcctgcgggtggtgcggtgcatggcagcgtcggacgcggtgcagctcaaggccgcgcgggaggacatcaaggagctccttaagagcacatactgccaccccatcatggtccgtctggggtggcatgattctggtacctatgacaagaatattaaggactggccacagcgaggtggagctaatggaagtttaaggttcgatgctgagctgagtcatggagccaatgcgggcctgattaatgcattgaagcttatccagcctatcaaggacaaatacccaggaagctggtggtccaaaaattccaatgaaatatggacgtgttgatgtcacagcagctgaacagtgtccgcccgaggggaggcttcctgatgctggcccacgtgatcctgctgaacaccttagggaggtattttatagaatgggccttgatgacaaggaaattgttgcactatctggagcacacacacttggaagagcaaggcctgaccggagtggctggggaaagctagaaacaaaatatactaaggatgggcctggtgagcctggagggcaatcatggacagttgagtggttgaagtttgataatagttacttcaaggacatgaagtttttgagccagcttccctggaaagagcagaaggaacaggatcttctagttttgcctacagatgctgcattatttgaggacccatcgttcaaggtatacgcagaaaagtatgcagaggaccaggaagcgttctttaaagactatggtgaagctcatgctaagctgagcgatcttggtgcaaagtttgatcctcctgagggattctcactcgacgatgacacatgctcttcaccttccgacgagaagacggaagaacctacactggtagcggtaggagcggcagtagcaacagcgacagcggacgacaacaacggcgcagctccgcagccggagcccttcatcgctgccaattactcgtatggaaagagggagttgtcggatgcgatgaagcaaaagatcagggcggagtacgaggggtttggaggcagcccggacaagcccatgcagtccaactacttcctcaacatcatgatcctgattgcggggttggcgttcttgacgtctctgctcgggaactgagtgttatatcatcatatgatccgattcctgaagtctacgagtgtccatatctacgactagcattagagctacgtacgtgcaaacagtttttttcgcgaattttggagagaaacgagcaaaagaaatgtataacgagtgttggagaaatagcgacctgactatcaacactctacctgtatgatttatctactatgaagcagtggatgcatggatattcacaaatattctcggtgcacgatctgaccgtcacccacagctgaccgagtttttttttttgaactccataactgggcttcttaaaattattattcagaaacatacaa

SEQ ID NO: 54933 - DNA, 1800 bp, Zea Mays
tcgccgcgccacacgcgcacggcctcacccagtcctcgactagccgacgccgagaagcccctcgatggcgaggcgaaggcgcgcagcaatcctgcctcgcttccctccaaattcccaaagctctcgcgcgcggtgccatggcggagcgcctcgccgcctccctcctccctgccgcctcgccgtccccgtccgcccgccgcgcaacggtcgcagccgcagccgccgcctctttcccctccccatgctccgcccgcgcggggctgcgcctacgctcccgcccgcccctcttctcgcagcgtcggacgcggtgcagctcaaggccgcgcgggaggacatcaaggagctccttaagagcacatactgccaccccatcatggtccgtctggggtggcatgattctggtacctatgacaagaatattaaggactggccacagcgaggtggagctaatggaagtttaaggttcgatgctgagctgagtcatggagccaatgcgggcctgattaatgcattgaagcttatccagcctatcaaggacaaatacccaggtatcacttatgcagatttgttccagttagcaagtgctacggcgattgaggaagctggtggtccaaaaattccaatgaaatatggacgtgttgatgtcacagcagctgaacagtgtccgcccgaggggaggcttcctgatgctggcccacgtgatcctgctgaacaccttagggaggtattttatagaatgggccttgatgacaaggaaattgttgcactatctggagcacacacacttggaagagcaaggcctgaccggagtggctggggaaagctagaaacaaaatatactaaggatgggcctggtgagcctggagggcaatcatggacagttgagtggttgaagtttgataatagttacttcaaggagatgaagttattttttttgaacgaaattcaggacatgaagtttttgagccagcttccctggaaagagcagaaggaacaggatcttctagttttgcctacagatgctgcattatttgaggacccatcgttcaaggtatacgcagaaaagtatgcagaggaccaggaagcgttctttaaagactatggtgaagctcatgctaagctgagcgatcttggtgcaaagtttgatcctcctgagggattctcactcgacgatgacacatgctcttcaccttccgacgagaagacggaagaacctacactggtagcggtaggagcggcagtagcaacagcgacagcggacgacaacaacggcgcagctccgcagccggagcccttcatcgctgccaattactcgtatggaaagagggagttgtcggatgcgatgaagcaaaagatcagggcggagtacgaggggtttggaggcagcccggacaagcccatgcagtccaactacttcctcaacatcatgatcctgattgcggggttggcgttcttgacgtctctgctcgggaactgagtgttatatcatcatatgatccgattcctgaagtctacgagtgtccatatctacgactagcattagagctacgtacgtgcaaacagtttttttcgcgaattttggagagaaacgagcaaaagaaatgtataacgagtgttggagaaatagcgacctgactatcaacactctacctgtatgatttatctactatgaagcagtggatgcatggatattcacaaatattctcggtgcacgatctgaccgtcacccacagctgaccgagtttttttttttgaactccataactgggcttcttaaaattattattcagaaacatacaa

SEQ ID NO: 54934 - DNA, 1878 bp, Zea Mays
tcgccgcgccacacgcgcacggcctcacccagtcctcgactagccgacgccgagaagcccctcgatggcgaggcgaaggcgcgcagcaatcctgcctcgcttccctccaaattcccaaagctctcgcgcgcggtgccatggcggagcgcctcgccgcctccctcctccctgccgcctcgccgtccccgtccgcccgccgcgcaacggtcgcagccgcagccgccgcctctttcccctccccatgctccgcccgcgcggggctgcgcctacgctcccgcccgcccctcttctcgcaggttcccttttaatttgctcgcgccggtcgatatgaggttgtcgcttacataagatcgaatcgagctgctctgactgacctcgtagtggtggtggggttgcgtgcgcgcagaaggcggccgggcgcgggtgtggcctgcgggtggtgcggtgcatggcagcgtcggacgcggtgcagctcaaggccgcgcgggaggacatcaaggagctccttaagagcacatactgccaccccatcatggtccgtctggggtggcatgattctggtacctatgacaagaatattaaggactggccacagcgaggtggagctaatggaagtttaaggttcgatgctgagctgagtcatggagccaatgcgggcctgattaatgcattgaagcttatccagcctatcaaggacaaatacccaggtatcacttatgcagatttgttccagttagcaagtgctacggcgattgaggaagctggtggtccaaaaattccaatgaaatatggacgtgttgatgtcacagcagctgaacagtgtccgcccgaggggaggcttcctgatgctggcccacgtgatcctgctgaacaccttagggaggtattttatagaatgggccttgatgacaaggaaattgttgcactatctggagcacacacacttggaagagcaaggcctgaccggagtggctggggaaagctagaaacaaaatatactaaggatgggcctggtgagcctggagggcaatcatggacagttgagtggttgaagtttgataatagttacttcaaggacatgaagtttttgagccagcttccctggaaagagcagaaggaacaggatcttctagttttgcctacagatgctgcattatttgaggacccatcgttcaaggtatacgcagaaaagtatgcagaggaccaggaagcgttctttaaagactatggtgaagctcatgctaagctgagcgatcttggtgcaaagtttgatcctcctgagacggaagaacctacactggtagcggtaggagcggcagtagcaacagcgacagcggacgacaacaacggcgcagctccgcagccggagcccttcatcgctgccaattactcgtatggaaagagggagttgtcggatgcgatgaagcaaaagatcagggcggagtacgaggggtttggaggcagcccggacaagcccatgcagtccaactacttcctcaacatcatgatcctgattgcggggttggcgttcttgacgtctctgctcgggaactgagtgttatatcatcatatgatccgattcctgaagtctacgagtgtccatatctacgactagcattagagctacgtacgtgcaaacagtttttttcgcgaattttggagagaaacgagcaaaagaaatgtataacgagtgttggagaaatagcgacctgactatcaacactctacctgtatgatttatctactatgaagcagtggatgcatggatattcacaaatattctcggtgcacgatctgaccgtcacccacagctgaccgagtttttttttttgaactccataactgggcttcttaaaattattattcagaaacatacaa

SEQ ID NO: 54935 - DNA, 1766 bp, Zea Mays
tcgccgcgccacacgcgcacggcctcacccagtcctcgactagccgacgccgagaagcccctcgatggcgaggcgaaggcgcgcagcaatcctgcctcgcttccctccaaattcccaaagctctcgcgcgcggtgccatggcggagcgcctcgccgcctccctcctccctgccgcctcgccgtccccgtccgcccgccgcgcaacggtcgcagccgcagccgccgcctctttcccctccccatgctccgcccgcgcggggctgcgcctacgctcccgcccgcccctcttctcgcagaaggcggccgggcgcgggtgtggcctgcgggtggtgcggtgcatggcagcgtcggacgcggtgcagctcaaggccgcgcgggaggacatcaaggagctccttaagagcacatactgccaccccatcatggtccgtctggggtggcatgattctggtacctatgacaagaatattaaggactggccacagcgaggtggagctaatggaagtttaaggttcgatgctgagctgagtcatggagccaatgcgggcctgattaatgcattgaagcttatccagcctatcaaggacaaatacccaggtatcacttatgcagatttgttccagttagcaagtgctacggcgattgaggaagctggtggtccaaaaattccaatgaaatatggacgtgttgatgtcacagcagctgaacagtgtccgcccgaggggaggcttcctgatgctggcccacgtgatcctgctgaacaccttatctggagcacacacacttggaagagcaaggcctgaccggagtggctggggaaagctagaaacaaaatatactaaggatgggcctggtgagcctggagggcaatcatggacagttgagtggttgaagtttgataatagttacttcaaggacatgaagtttttgagccagcttccctggaaagagcagaaggaacaggatcttctagttttgcctacagatgctgcattatttgaggacccatcgttcaaggtatacgcagaaaagtatgcagaggaccaggaagcgttctttaaagactatggtgaagctcatgctaagctgagcgatcttggtgcaaagtttgatcctcctgagggattctcactcgacgatgacacatgctcttcaccttccgacgagaagacggaagaacctacactggtagcggtaggagcggcagtagcaacagcgacagcggacgacaacaacggcgcagctccgcagccggagcccttcatcgctgccaattactcgtatggaaagagggagttgtcggatgcgatgaagcaaaagatcagggcggagtacgaggggtttggaggcagcccggacaagcccatgcagtccaactacttcctcaacatcatgatcctgattgcggggttggcgttcttgacgtctctgctcgggaactgagtgttatatcatcatatgatccgattcctgaagtctacgagtgtccatatctacgactagcattagagctacgtacgtgcaaacagtttttttcgcgaattttggagagaaacgagcaaaagaaatgtataacgagtgttggagaaatagcgacctgactatcaacactctacctgtatgatttatctactatgaagcagtggatgcatggatattcacaaatattctcggtgcacgatctgaccgtcacccacagctgaccgagtttttttttttgaactccataactgggcttcttaaaattattattcagaaacatacaa

SEQ ID NO: 54936 - DNA, 2383 bp, Zea Mays
gtgagtcatctggccctctctgtcctctctctctcgctcgctcgataggagtactaggagcgaggcgaggatatggccccctctctctccctccttccatccgatcatccatatatccctcccctctgccgttccttttctcgatttgattcttccaccccggcccttgtgttcactggctctgtcccagtcccagtcccacccacctttgtgctcgtgcgatgtaggaacagggcatcggaaccgagcaagcaagcaagcagaagcaggattccggcagagggaggaggaaggaggaaggaaggcggtcgatcgatcggaagcgccggcgccggcgccgccgcaaaggatcgggcagacgagacgacacgagctaatgcctttttctaggttatctgaggcgcagagctcagggtgaaagaagaatctagtgaaagtggaaggatccgcgcacgggctccgtccgaagatgctgccctactttgatccggagtacgagaacttcaaccagcgcatcaaccccccaagggtttgcatcgacaacaccacatgcagcgactgcaccttggtgaaggttgacagcatgaacaagaatggcattctgctggaggtgctgcaggtcctgagcgatctggaccttcacatcttcaaagcctacatcacctctgatggtgggtggttcatggatgtgttccatgtcgttgataagcaagggcagaagatcactgatgacaagaccatcaagtacattgagaaggctttaggtccggagagcaatttgctgggcgcaaagggcagcaactcagcggggaggtcggtggggctgcactccatcggcgaccacaccgccatcgagctcaaggggcccgacaggaggggcctcctctcggagatcttcgcggtcctcgccgacctccagtgcaacgtgctggccgccgaggtgtggacgcaccgcatgcgcgtggcctgcgtcgtgtacgtgaacgacgtggccacggggcaggccatcgacgacccggaccgcgtggcccgggtcgaggaccggctgcgccacgtgctccgcgggtacggcggcggcggcggcgcgggggacgacgacgacggcagcggcgcgcacgccaacttcgcggccgcctcttcgacgccgcaccacgtggaccggcggctgcaccagctcatgcacgccgacgtggacgccgtccacggcgacggcgcgcacgcggcggccggcggcgagggcgaccggccggccgtgacggtggagcactgcgaggagaagtcctactccgtggtgaacgtcaagtgcaaggaccggtccaagctgctgttcgacatcgtgtgcacgctcacggacatggagtacgtcgtgttccatgccgccgtgtcgtccgaagccaactacggcatccaggagctgtacatccgccgcaaggacggcaaaacgcttctgaaagacgaagcagagaaggtgatcaggtgcctggaagcagccatctccagaagagtatccgagggattcacgctggaggtgtgcggccgggaccgggtgggcttgctgtcggacgtgacgagggtgctccgggagcacgggctcacggtgagccgcgccgacgtgacgacggcgggcgggcaggccacaaacgtcttctacgtccggaacccctcgggccagccagtggacatgaagaccgtcgaggggctcaggggccagtttggccagaccgccatgctcaacgtcaagagcgtgggcgtgcctgctgcggtggccaaagcggcggagccaagctccggcagcatggtcaggagcagcttcttctccttcggcagcctcttcgcgaagctccgggcctgacaactggtcaggcgattcgaactccagctgtgtgtagaagaaatgaactcagaactagggtagtggactagcgggggtgggcgggggagagaaacagggagcaactgtatctctatgtggcagctgtggttgttgtacagttcataaggagcctctaccagaagaatggtagttctgtggaatgcaggctgcggactgcttgttaaggtaagggtttatcccatctgcgcagaatttaaaaaaaaaacatcgatcctgtcatctgtcgaaactgtctctgattgttcagccccacacaacattccagcatttgcctctgcgtcactgcatgacttgtaacttcatccaaccattctctaatggctaatgctaaaaagtcttagtaatgagagcaagcaactattctccgtatattctgacaaaaggggcagccgtgtatgaacttgcaaactatttgcagacagaatgcaggcaatacgccggcaacaggatcaaaaagttgatgttcatcacactgaattcccgattcag

SEQ ID NO: 54937 - DNA, 2158 bp, Zea Mays
ggtgactgggcatcggaaccgagcaagcaagcaagcagaagcaggattccggcagagggaggaggaaggaggaaggaaggcggtcgatcgatcggaagcgccggcgccggcgccgccgcaaaggatcgggcagacgagacgacacgagctaatgcctttttctaggttatctgaggcgcagagctcagggtgaaagaagaatctagtgaaagtggaaggatccgcgcacgggctccgtccgaagatgctgccctactttgatccggagtacgagaacttcaaccagcgcatcaaccccccaagggtttgcatcgacaacaccacatgcagcgactgcaccttggtgaaggttgacagcatgaacaagaatggcattctgctggaggtgctgcaggtcctgagcgatctggaccttcacatcttcaaagcctacatcacctctgatggtgggtggttcatggatgtgttccatgtcgttgataagcaagggcagaagatcactgatgacaagaccatcaagtacattgagaaggctttaggtccggagagcaatttgctgggcgcaaagggcagcaactcagcggggaggtcggtggggctgcactccatcggcgaccacaccgccatcgagctcaaggggcccgacaggaggggcctcctctcggagatcttcgcggtcctcgccgacctccagtgcaacgtgctggccgccgaggtgtggacgcaccgcatgcgcgtggcctgcgtcgtgtacgtgaacgacgtggccacggggcaggccatcgacgacccggaccgcgtggcccgggtcgaggaccggctgcgccacgtgctccgcgggtacggcggcggcggcggcgcgggggacgacgacgacggcagcggcgcgcacgccaacttcgcggccgcctcttcgacgccgcaccacgtggaccggcggctgcaccagctcatgcacgccgacgtggacgccgtccacggcgacggcgcgcacgcggcggccggcggcgagggcgaccggccggccgtgacggtggagcactgcgaggagaagtcctactccgtggtgaacgtcaagtgcaaggaccggtccaagctgctgttcgacatcgtgtgcacgctcacggacatggagtacgtcgtgttccatgccgccgtgtcgtccgaagccaactacggcatccaggagctgtacatccgccgcaaggacggcaaaacgcttctgaaagacgaagcagagaaggtgatcaggtgcctggaagcagccatctccagaagagtatccgagggattcacgctggaggtgtgcggccgggaccgggtgggcttgctgtcggacgtgacgagggtgctccgggagcacgggctcacggtgagccgcgccgacgtgacgacggcgggcgggcaggccacaaacgtcttctacgtccggaacccctcgggccagccagtggacatgaagaccgtcgaggggctcaggggccagtttggccagaccgccatgctcaacgtcaagagcgtgggcgtgcctgctgcggtggccaaagcggcggagccaagctccggcagcatggtcaggagcagcttcttctccttcggcagcctcttcgcgaagctccgggcctgacaactggtcaggcgattcgaactccagctgtgtgtagaagaaatgaactcagaactagggtagtggactagcgggggtgggcgggggagagaaacagggagcaactgtatctctatgtggcagctgtggttgttgtacagttcataaggagcctctaccagaagaatggtagttctgtggaatgcaggctgcggactgcttgttaaggtaagggtttatcccatctgcgcagaatttaaaaaaaaaacatcgatcctgtcatctgtcgaaactgtctctgattgttcagccccacacaacattccagcatttgcctctgcgtcactgcatgacttgtaacttcatccaaccattctctaatggctaatgctaaaaagtcttagtaatgagagcaagcaactattctccgtatattctgacaaaaggggcagccgtgtatgaacttgcaaactatttgcagacagaatgcaggcaatacgccggcaacaggatcaaaaagttgatgttcatcacactgaattcccgattcag

SEQ ID NO: 54938 - DNA, 2169 bp, Zea Mays
gggaggggggagaaaggtgtccaaccaaccttggttgaaatcgttttgtgacacctagcattttacatagcctatataatataacagcccctagaggagggggaggacagacggtgtgtggcatggcataagctatagcggcatcaagtggtgggcacacggagagctggtgactggttatctgaggcgcagagctcagggtgaaagaagaatctagtgaaagtggaaggatccgcgcacgggctccgtccgaagatgctgccctactttgatccggagtacgagaacttcaaccagcgcatcaaccccccaagggtttgcatcgacaacaccacatgcagcgactgcaccttggtgaaggttgacagcatgaacaagaatggcattctgctggaggtgctgcaggtcctgagcgatctggaccttcacatcttcaaagcctacatcacctctgatggtgggtggttcatggatgtgttccatgtcgttgataagcaagggcagaagatcactgatgacaagaccatcaagtacattgagaaggctttaggtccggagagcaatttgctgggcgcaaagggcagcaactcagcggggaggtcggtggggctgcactccatcggcgaccacaccgccatcgagctcaaggggcccgacaggaggggcctcctctcggagatcttcgcggtcctcgccgacctccagtgcaacgtgctggccgccgaggtgtggacgcaccgcatgcgcgtggcctgcgtcgtgtacgtgaacgacgtggccacggggcaggccatcgacgacccggaccgcgtggcccgggtcgaggaccggctgcgccacgtgctccgcgggtacggcggcggcggcggcgcgggggacgacgacgacggcagcggcgcgcacgccaacttcgcggccgcctcttcgacgccgcaccacgtggaccggcggctgcaccagctcatgcacgccgacgtggacgccgtccacggcgacggcgcgcacgcggcggccggcggcgagggcgaccggccggccgtgacggtggagcactgcgaggagaagtcctactccgtggtgaacgtcaagtgcaaggaccggtccaagctgctgttcgacatcgtgtgcacgctcacggacatggagtacgtcgtgttccatgccgccgtgtcgtccgaagccaactacggcatccaggagctgtacatccgccgcaaggacggcaaaacgcttctgaaagacgaagcagagaaggtgatcaggtgcctggaagcagccatctccagaagagtatccgagggattcacgctggaggtgtgcggccgggaccgggtgggcttgctgtcggacgtgacgagggtgctccgggagcacgggctcacggtgagccgcgccgacgtgacgacggcgggcgggcaggccacaaacgtcttctacgtccggaacccctcgggccagccagtggacatgaagaccgtcgaggggctcaggggccagtttggccagaccgccatgctcaacgtcaagagcgtgggcgtgcctgctgcggtggccaaagcggcggagccaagctccggcagcatggtcaggagcagcttcttctccttcggcagcctcttcgcgaagctccgggcctgacaactggtcaggcgattcgaactccagctgtgtgtagaagaaatgaactcagaactagggtagtggactagcgggggtgggcgggggagagaaacagggagcaactgtatctctatgtggcagctgtggttgttgtacagttcataaggagcctctaccagaagaatggtagttctgtggaatgcaggctgcggactgcttgttaaggtaagggtttatcccatctgcgcagaatttaaaaaaaaaacatcgatcctgtcatctgtcgaaactgtctctgattgttcagccccacacaacattccagcatttgcctctgcgtcactgcatgacttgtaacttcatccaaccattctctaatggctaatgctaaaaagtcttagtaatgagagcaagcaactattctccgtatattctgacaaaaggggcagccgtgtatgaacttgcaaactatttgcagacagaatgcaggcaatacgccggcaacaggatcaaaaagttgatgttcatcacactgaattcccgattcag

SEQ ID NO: 54939 - DNA, 2315 bp, Zea Mays
gggaggggggagaaaggtgtccaaccaaccttggttgaaatcgttttgtgacacctagcattttacatagcctatataatataacagcccctagaggagggggaggacagacggtgtgtggcatggcataagctatagcggcatcaagtggtgggcacacggagagctggtgactggaacagggcatcggaaccgagcaagcaagcaagcagaagcaggattccggcagagggaggaggaaggaggaaggaaggcggtcgatcgatcggaagcgccggcgccggcgccgccgcaaaggatcgggcagacgagacgacacgaggttatctgaggcgcagagctcagggtgaaagaagaatctagtgaaagtggaaggatccgcgcacgggctccgtccgaagatgctgccctactttgatccggagtacgagaacttcaaccagcgcatcaaccccccaagggtttgcatcgacaacaccacatgcagcgactgcaccttggtgaaggttgacagcatgaacaagaatggcattctgctggaggtgctgcaggtcctgagcgatctggaccttcacatcttcaaagcctacatcacctctgatggtgggtggttcatggatgtgttccatgtcgttgataagcaagggcagaagatcactgatgacaagaccatcaagtacattgagaaggctttaggtccggagagcaatttgctgggcgcaaagggcagcaactcagcggggaggtcggtggggctgcactccatcggcgaccacaccgccatcgagctcaaggggcccgacaggaggggcctcctctcggagatcttcgcggtcctcgccgacctccagtgcaacgtgctggccgccgaggtgtggacgcaccgcatgcgcgtggcctgcgtcgtgtacgtgaacgacgtggccacggggcaggccatcgacgacccggaccgcgtggcccgggtcgaggaccggctgcgccacgtgctccgcgggtacggcggcggcggcggcgcgggggacgacgacgacggcagcggcgcgcacgccaacttcgcggccgcctcttcgacgccgcaccacgtggaccggcggctgcaccagctcatgcacgccgacgtggacgccgtccacggcgacggcgcgcacgcggcggccggcggcgagggcgaccggccggccgtgacggtggagcactgcgaggagaagtcctactccgtggtgaacgtcaagtgcaaggaccggtccaagctgctgttcgacatcgtgtgcacgctcacggacatggagtacgtcgtgttccatgccgccgtgtcgtccgaagccaactacggcatccaggagctgtacatccgccgcaaggacggcaaaacgcttctgaaagacgaagcagagaaggtgatcaggtgcctggaagcagccatctccagaagagtatccgagggattcacgctggaggtgtgcggccgggaccgggtgggcttgctgtcggacgtgacgagggtgctccgggagcacgggctcacggtgagccgcgccgacgtgacgacggcgggcgggcaggccacaaacgtcttctacgtccggaacccctcgggccagccagtggacatgaagaccgtcgaggggctcaggggccagtttggccagaccgccatgctcaacgtcaagagcgtgggcgtgcctgctgcggtggccaaagcggcggagccaagctccggcagcatggtcaggagcagcttcttctccttcggcagcctcttcgcgaagctccgggcctgacaactggtcaggcgattcgaactccagctgtgtgtagaagaaatgaactcagaactagggtagtggactagcgggggtgggcgggggagagaaacagggagcaactgtatctctatgtggcagctgtggttgttgtacagttcataaggagcctctaccagaagaatggtagttctgtggaatgcaggctgcggactgcttgttaaggtaagggtttatcccatctgcgcagaatttaaaaaaaaaacatcgatcctgtcatctgtcgaaactgtctctgattgttcagccccacacaacattccagcatttgcctctgcgtcactgcatgacttgtaacttcatccaaccattctctaatggctaatgctaaaaagtcttagtaatgagagcaagcaactattctccgtatattctgacaaaaggggcagccgtgtatgaacttgcaaactatttgcagacagaatgcaggcaatacgccggcaacaggatcaaaaagttgatgttcatcacactgaattcccgattcag

SEQ ID NO: 54940 - DNA, 2309 bp, Zea Mays
gggaggggggagaaaggtgtccaaccaaccttggttgaaatcgttttgtgacacctagcattttacatagcctatataatataacagcccctagaggagggggaggacagacggtgtgtggcatggcataagctatagcggcatcaagtggtgggcacacggagagctggtgactgggcatcggaaccgagcaagcaagcaagcagaagcaggattccggcagagggaggaggaaggaggaaggaaggcggtcgatcgatcggaagcgccggcgccggcgccgccgcaaaggatcgggcagacgagacgacacgaggttatctgaggcgcagagctcagggtgaaagaagaatctagtgaaagtggaaggatccgcgcacgggctccgtccgaagatgctgccctactttgatccggagtacgagaacttcaaccagcgcatcaaccccccaagggtttgcatcgacaacaccacatgcagcgactgcaccttggtgaaggttgacagcatgaacaagaatggcattctgctggaggtgctgcaggtcctgagcgatctggaccttcacatcttcaaagcctacatcacctctgatggtgggtggttcatggatgtgttccatgtcgttgataagcaagggcagaagatcactgatgacaagaccatcaagtacattgagaaggctttaggtccggagagcaatttgctgggcgcaaagggcagcaactcagcggggaggtcggtggggctgcactccatcggcgaccacaccgccatcgagctcaaggggcccgacaggaggggcctcctctcggagatcttcgcggtcctcgccgacctccagtgcaacgtgctggccgccgaggtgtggacgcaccgcatgcgcgtggcctgcgtcgtgtacgtgaacgacgtggccacggggcaggccatcgacgacccggaccgcgtggcccgggtcgaggaccggctgcgccacgtgctccgcgggtacggcggcggcggcggcgcgggggacgacgacgacggcagcggcgcgcacgccaacttcgcggccgcctcttcgacgccgcaccacgtggaccggcggctgcaccagctcatgcacgccgacgtggacgccgtccacggcgacggcgcgcacgcggcggccggcggcgagggcgaccggccggccgtgacggtggagcactgcgaggagaagtcctactccgtggtgaacgtcaagtgcaaggaccggtccaagctgctgttcgacatcgtgtgcacgctcacggacatggagtacgtcgtgttccatgccgccgtgtcgtccgaagccaactacggcatccaggagctgtacatccgccgcaaggacggcaaaacgcttctgaaagacgaagcagagaaggtgatcaggtgcctggaagcagccatctccagaagagtatccgagggattcacgctggaggtgtgcggccgggaccgggtgggcttgctgtcggacgtgacgagggtgctccgggagcacgggctcacggtgagccgcgccgacgtgacgacggcgggcgggcaggccacaaacgtcttctacgtccggaacccctcgggccagccagtggacatgaagaccgtcgaggggctcaggggccagtttggccagaccgccatgctcaacgtcaagagcgtgggcgtgcctgctgcggtggccaaagcggcggagccaagctccggcagcatggtcaggagcagcttcttctccttcggcagcctcttcgcgaagctccgggcctgacaactggtcaggcgattcgaactccagctgtgtgtagaagaaatgaactcagaactagggtagtggactagcgggggtgggcgggggagagaaacagggagcaactgtatctctatgtggcagctgtggttgttgtacagttcataaggagcctctaccagaagaatggtagttctgtggaatgcaggctgcggactgcttgttaaggtaagggtttatcccatctgcgcagaatttaaaaaaaaaacatcgatcctgtcatctgtcgaaactgtctctgattgttcagccccacacaacattccagcatttgcctctgcgtcactgcatgacttgtaacttcatccaaccattctctaatggctaatgctaaaaagtcttagtaatgagagcaagcaactattctccgtatattctgacaaaaggggcagccgtgtatgaacttgcaaactatttgcagacagaatgcaggcaatacgccggcaacaggatcaaaaagttgatgttcatcacactgaattcccgattcag

SEQ ID NO: 54941 - DNA, 2135 bp, Zea Mays
atttctgattcttgaataaggcgtatcgttgagttatcccatcatggctgagacaaatgatgccagcccttcgtcgaaactccatacaagattgagactctgggagtttcctgactgttatgtatttgaaccaattgatggccttgctgacttgtacctatcagttagccggaccagcggaacaatgaatctagttcaagacttgccatcacgtggatccactacaaaacataaagttcaaacagtatatggtgtgataggagtactcaaacttgcagttggatcatattttgtggtgatcacggatcgtgattgtgtgggatcctactttggacacgcaatttttaaagtgacaggactaaaaattcttccctgcaataatgcacataacaccacctctactgatcagaaaaaaatggaaacaaaattctcggagctcctggattctgcagagaggactattggccttcacttttcctatgatatcaacctaacactttctgcacagaggctacatgatctcggcgatgaatatagagctcttcctctttggagacaggcagaaccaagatttctatggaatggctacttgttagaacctctaattgagaacaagctgaaccagtacttattgccagtaattcaaggcagttttcaaaatatccaagcagaagttggatcagagatggtaaatgtgaccctgattgcacgtaggtgcacacgaaggataggtactcgaatgtggagacgaggagctgatgcagagggttatgctgcaaacttcgttgaatcggagcagataatgcagtcaaaagggtttacagcatcctatgtacaagtccgaggttctatgccattcttgtgggagcagattgttgatttgacatacaaacctagttttgacattgttagacaagaggaagcgcctcgtgtacttgagaggcacttccatgatttgcaaaagaaatatggagctgtcttagccgttgatcttgtcaatacaggtggcggtgagggccgcctccgtgaaagatatgcaaaatctattgaacctattcttagtgaagatctaagatatgtgcacttcgacttccaccgaatttgtggccatattcactttgagcgtctgtctcagctgtatgatcagatcaaggactaccttcagaaacataagtacttccttataaatgataaaggagagaaaattgaggagcagactggcactacaagaacaaattgtatagattgtttggatcgcaccaatgtaactcagagcatgattggtcgaaaaattctggaaagccaacttcaacgtataggagttcttggtgctggtgatacaataagcaaacatccaacctttgatacaaactacaaaattttgtgggccaatcatggagatgcaataagcattcagtactctggaactcctgctctgaagggagattttgttcggtatgggaagcgaactactcaaggaattctgaatgatttgaggaatgcacttggtagatactacctgaataacttcgttgatgggactaagcaggatgccatggatcttcttcaaggacattacatgacatctgttagtagagatatggcagtgccaagcaaagcaggacttctgcagagttatgcgtccttccgccttgcttttgcattggttatgggagctctaatgttcatgttgatgtcactgagacagggcagcaaacatttgctctctgtttttctatccaacataatttacggtttaaataaagtaactatttcttaaaagtcttccatttagtttcatcctttgaaaacaacttcgctactaatatgcggcctttgttattttgttggggcaaataaagaagattgtgcattgagtaaataaaagaacaacggattccacttgcacaaatgtttattccttctcttatcttttcttgggtcaatgaagagttgtgtctggttcaacttgtgtacgtgcttttaatgtttgtcgtcagctctttgtctactctatcaacttttttctctcaaacgcgcaggagagctacgcacaggggcgaagctacgtatagaggagagggtgcacatgaaccaacgaaaattcgaaaaagcagtggtttagaccaaatttt

SEQ ID NO: 54942 - DNA, 2312 bp, Zea Mays
gccggatcatggcacagcttttttgaccttgtctgtggcccccctcaacctctgcatcgacggcctcgagagaagagtcgccggctcgccgccctgctccggcaccagcaaaaccgccaggttatcccatcatggctgagacaaatgatgccagcccttcgtcgaaactccatacaagattgagactctgggagtttcctgactgttatgtatttgaaccaattgatggccttgctgacttgtacctatcagttagccggaccagcggaacaatgaatctagttcaagacttgccatcacgtggatccactacaaaacataaagttcaaacagtatatggtgtgataggagtactcaaacttgcagttggatcatattttgtggtgatcacggatcgtgattgtgtgggatcctactttggacacgcaatttttaaagtgacaggactaaaaattcttccctgcaataatgcacataacaccacctctactgatcagaaaaaaatggaaacaaaattctcggagctcctggattctgcagagaggactattggccttcacttttcctatgatatcaacctaacactttctgcacagaggctacatgatctcggcgatgaatatagagctcttcctctttggagacaggcagaaccaagatttctatggaatggctacttgttagaacctctaattgagaacaagctgaaccagtacttattgccagtaattcaaggcagttttcaaaatatccaagcagaagttggatcagagatggtaaatgtgaccctgattgcacgtaggtgcacacgaaggataggtactcgaatgtggagacgaggagctgatgcagagggttatgctgcaaacttcgttgaatcggagcagataatgcagtcaaaagggtttacagcatcctatgtacaagtccgaggttctatgccattcttgtgggagcagattgttgatttgacatacaaacctagttttgacattgttagacaagaggaagcgcctcgtgtacttgagaggcacttccatgatttgcaaaagaaatatggagctgtcttagccgttgatcttgtcaatacaggtggcggtgagggccgcctccgtgaaagatatgcaaaatctattgaacctattcttagtgaagatctaagatatgtgcacttcgacttccaccgaatttgtggccatattcactttgagcgtctgtctcagctgtatgatcagatcaaggactaccttcagaaacataagtacttccttataaatgataaaggagagaaaattgaggagcagactggcactacaagaacaaattgtatagattgtttggatcgcaccaatgtaactcagagcatgattggtcgaaaaattctggaaagccaacttcaacgtataggagttcttggtgctggtgatacaataagcaaacatccaacctttgatacaaactacaaaattttgtgggccaatcatggagatgcaataagcattcagtactctggaactcctgctctgaagggagattttgttcggtatgggaagcgaactactcaaggaattctgaatgatttgaggaatgcacttggtagatactacctgaataacttcgttgatgggactaagcaggatgccatggatcttcttcaaggacattacatgacatctgttagtagagatatggcagtgccaagcaaagcaggacttctgcagagttatgcgtccttccgccttgcttttgcattggttatgggagctctaatgttcatgttgatgtcactgagacagggtaagaattctgaatatttctgaaacagatatttgagggtttacaagctataaatttatgctgattaattttcccctgcaatttggcaggcagcaaacatttgctctctgtttttctatccaacataatttacggtttaaataaagtaactatttcttaaaagtcttccatttagtttcatcctttgaaaacaacttcgctactaatatgcggcctttgttattttgttggggcaaataaagaagattgtgcattgagtaaataaaagaacaacggattccacttgcacaaatgtttattccttctcttatcttttcttgggtcaatgaagagttgtgtctggttcaacttgtgtacgtgcttttaatgtttgtcgtcagctctttgtctactctatcaacttttttctctcaaacgcgcaggagagctacgcacaggggcgaagctacgtatagaggagagggtgcacatgaaccaacgaaaattcgaaaaagcagtggtttagaccaaatttt

SEQ ID NO: 54943 - DNA, 2895 bp, Zea Mays
gtactaggtaggtctttctccttgcaatctttccgtttcttcgtttgattccctcccgccgccgccgctggagacgcccaaccacgacagcgccccagggttcgtcctcccgctggaatagtaagtgaccggagaaaagcagcacaagagagatgtggtatctatgcgtcttctaccacaggctcctggactaccggcgaccggaggtggagtccctcgccgagctctttgccggcccaggcgcccgtgaatccgtcgagtggcgcatgccggagaaccaccacgtagactcccccttccacctcgttcgcctccctggagacgagcgcctcgccgctcaggcttgttggtgaagggggtctacgagctctggggctatggcactacctacgaggagctggagaagtcggtcagggagtaccccgacgagaggaagcttccgttcctggtcccggaaagcagcttcaagatcgttatcgacagcttcggcaaggtgatcagctcccaagagcagaacgagatcatacagagcctcacttacataccattcaagggacgtgttaatttgaagaagcctgatcacagattctttgtcatggagaccgatgactatgggtcgaacaatggtctcccaccggttgtcaagaggtcgatattctttggccgggaggttggagcagctgataggcatctcctgccaacataccagctcaagagtaggaagtacattggccccactgcaatggatgctgaaatggctttcctcatggccaatcagggtctggcctcgcctgggaagcttgtctatgacccttttgttgggaccgggagcattttggttgcagctgcacattttggagctatgacgatgatattgatataagggttgtacgggatggtcgtggccccaattgcaatgtttggagcaactttgagcaggtaatttcacactgttatcttcaatcagttcttgcatgttattgttgtctctatagcccagtcatctgcaatttgtttggaattatgagcctcatgaaaaggatatgtacagaaattatggtgggtgttataactgatggtggcaagtggcaacagtgatttccctgaaacgacaaatactttttttgaacttttatcctctatatttatgacttttgttgattttatctctagctatctcaacaaaccagtgacactcataagttggtctagcgatactagatttgagactccataccatagttctaccaatagagatgagacagggttttgttattcttttatttatttaaattgattcaattggagtatgttggaatataatataagtgaattgtccactcctcctattagcttaagcttttgggttaaattggttggtgcatgcaacttaattgttagagtatattagacatgttagagtatattaggcaactcctgatatggttggtttaggattgagtgtaatcccgggataccttccttatatctaggataaccttccttatctctagtataggcttcttgccctccaagtcatgtactcctatatattctctctagaggctcaatgcaatacattccacacattatacgcattatacacattatactgctgagtgagaaatcaaacgagatctgtgcaggcaagattttgtcttgcttccaagggagagctatttctgcttgcttgggctggcagggcaaggctttctcttgtgggcaaggcaaggcaagccaacacaggaatctaacatgcccatgcttgttatattagtctcattatgccatgattttttttgacttaatagttcaagtcgtggaaaacatccatgtttagttattcaccttttctttttggaaagaatatttagggatttatttgttaattaaatggctggaatgctagatttaatgctaagcactaacatgttgtctgtttatcagtataagttaccagagcctttgtgtttgctaagggcagacaacaatctcccaccctggcgtcctggattgaaggagatgttcgatgcaataatttgtgacccaccatatggagtccgggccggtggccggaagtctggtggtcggaagctcataaaaggcgtcaaaggcccttacacagtgcctgatgagaaacgggacaatcacatcccatcaaccgccccatatagcctcgcagagtgcgtccatgacctcctccaccttgccgcaaggatggtagtcatgggtggcaggctcgtcttcttctaccctgtactgcgaggtgaagatggcactgcgaacccgcagttccctgagcacccctgcttcaagttaatcacctcctctgagcagatcctgagctttcggtacagccgggttctgctgaccatggtgaaggttgcaccttacaccgaggagatcgagaagttggccgcagagcggcaccgggagttcagggagaaccaccagaagtggatggaggagggcaacctccattccgccgtgttcgagccagcccaggatgggaagcctgatagagactccaagcccaaatacagaggcaagtatgtgtagcagcgcagatactaacttgttgaatttagtggaaacacatttttggtggtttcctgttctgcatcctgtaccaaattttatgagctagtgtgttggcaggcgctgcgagatgtaccactgttccagagtaccattcaaatcttgtcagtccatttgatggatgaggaagtgtaattgcagcttaattgactgaacttatttttttggttaacctgcctttgacacggctgttgaaattggcgctgcttctgttactgaattatatgaaaagaaataattcagtaacagaagcagcaccaatttagtactaagggaaaaaacaagtaaaatacatca

SEQ ID NO: 54944 - DNA, 2902 bp, Zea Mays
gtactaggtaggtctttctccttgcaatctttccgtttcttcgtttgattccctcccgccgccgccgctggagacgcccaaccacgacagcgccccagggttcgtcctcccgctggaatagtaagtgaccggagaaaagcagcacaagagagatgtggtatctatgcgtcttctaccacaggctcctggactaccggcgaccggaggtggagtccctcgccgagctctttgccggcccaggcgcccgtgaatccgtcgagtggcgcatgccggagaaccaccacgtagactcccccttccacctcgttcgcctccctggagacgagcgcctcgccgctcaggcttgttggtgaagggggtctacgagctctggggctatggcactacctacgaggagctggagaagtcggtcagggagtaccccgacgagaggaagcttccgttcctggtcccggaaagcagcttcaagatcgttatcgacagcttcggcaaggtgatcagctcccaagagcagaacgagatcatacagagcctcacttacataccattcaagggacgtgttaatttgaagaagcctgatcacagattctttgtcatggagaccgatgactatgggtcgaacaatggtctcccaccggttgtcaagaggtcgatattctttggccgggaggttggagcagctgataggcatctcctgccaacataccagctcaagagtaggaagtacattggccccactgcaatggatgctgaaatggctttcctcatggccaatcagggtctggcctcgcctgggaagcttgtctatgacccttttgttgggaccgggagcattttggttgcagctgcacattttggagctatgacgatgggtgcagatattgatataagggttgtacgggatggtcgtggccccaattgcaatgtttggagcaactttgagcaggtaatttcacactgttatcttcaatcagttcttgcatgttattgttgtctctatagcccagtcatctgcaatttgtttggaattatgagcctcatgaaaaggatatgtacagaaattatggtgggtgttataactgatggtggcaagtggcaacagtgatttccctgaaacgacaaatactttttttgaacttttatcctctatatttatgacttttgttgattttatctctagctatctcaacaaaccagtgacactcataagttggtctagcgatactagatttgagactccataccatagttctaccaatagagatgagacagggttttgttattcttttatttatttaaattgattcaattggagtatgttggaatataatataagtgaattgtccactcctcctattagcttaagcttttgggttaaattggttggtgcatgcaacttaattgttagagtatattagacatgttagagtatattaggcaactcctgatatggttggtttaggattgagtgtaatcccgggataccttccttatatctaggataaccttccttatctctagtataggcttcttgccctccaagtcatgtactcctatatattctctctagaggctcaatgcaatacattccacacattatacgcattatacacattatactgctgagtgagaaatcaaacgagatctgtgcaggcaagattttgtcttgcttccaagggagagctatttctgcttgcttgggctggcagggcaaggctttctcttgtgggcaaggcaaggcaagccaacacaggaatctaacatgcccatgcttgttatattagtctcattatgccatgattttttttgacttaatagttcaagtcgtggaaaacatccatgtttagttattcaccttttctttttggaaagaatatttagggatttatttgttaattaaatggctggaatgctagatttaatgctaagcactaacatgttgtctgtttatcagtataagttaccagagcctttgtgtttgctaagggcagacaacaatctcccaccctggcgtcctggattgaaggagatgttcgatgcaataatttgtgacccaccatatggagtccgggccggtggccggaagtctggtggtcggaagctcataaaaggcgtcaaaggcccttacacagtgcctgatgagaaacgggacaatcacatcccatcaaccgccccatatagcctcgcagagtgcgtccatgacctcctccaccttgccgcaaggatggtagtcatgggtggcaggctcgtcttcttctaccctgtactgcgaggtgaagatggcactgcgaacccgcagttccctgagcacccctgcttcaagttaatcacctcctctgagcagatcctgagctttcggtacagccgggttctgctgaccatggtgaaggttgcaccttacaccgaggagatcgagaagttggccgcagagcggcaccgggagttcagggagaaccaccagaagtggatggaggagggcaacctccattccgccgtgttcgagccagcccaggatgggaagcctgatagagactccaagcccaaatacagaggcaagtatgtgtagcagcgcagatactaacttgttgaatttagtggaaacacatttttggtggtttcctgttctgcatcctgtaccaaattttatgagctagtgtgttggcaggcgctgcgagatgtaccactgttccagagtaccattcaaatcttgtcagtccatttgatggatgaggaagtgtaattgcagcttaattgactgaacttatttttttggttaacctgcctttgacacggctgttgaaattggcgctgcttctgttactgaattatatgaaaagaaataattcagtaacagaagcagcaccaatttagtactaagggaaaaaacaagtaaaatacatca

SEQ ID NO: 54945 - DNA, 1887 bp, Zea Mays
gtactaggtaggtctttctccttgcaatctttccgtttcttcgtttgattccctcccgccgccgccgctggagacgcccaaccacgacagcgccccagggttcgtcctcccgctggaatagtaagtgaccggagaaaagcagcacaagagagatgtggtatctatgcgtcttctaccacaggctcctggactaccggcgaccggaggtggagtccctcgccgagctctttgccggcccaggcgcccgtgaatccgtcgagtggcgcatgccggagaaccaccacgtagactcccccttccacctcgttcgcctccctggagacgagcgcctcgccgctcaggcttgttggtgaagggggtctacgagctctggggctatggcactacctacgaggagctggagaagtcggtcagggagtaccccgacgagaggaagcttccgttcctggtcccggaaagcagcttcaagatcgttatcgacagcttcggcaaggtgatcagctcccaagagcagaacgagatcatacagagcctcacttacataccattcaagggacgtgttaatttgaagaagcctgatcacagattctttgtcatggagaccgatgactatgggtcgaacaatggtctcccaccggttgtcaagaggtcgatattctttggccgggaggttggagcagctgataggcatctcctgccaacataccagctcaagagtaggaagtacattggccccactgcaatggatgctgaaatggctttcctcatggccaatcagggtctggcctcgcctgggaagcttgtctatgacccttttgttgggaccgggagcattttggttgcagctgcacattttggagctatgacgatgatattgatataagggttgtacgggatggtcgtggccccaattgcaatgtttggagcaactttgagcagtataagttaccagagcctttgtgtttgctaagggcagacaacaatctcccaccctggcgtcctggattgaaggagatgttcgatgcaataatttgtgacccaccatatggagtccgggccggtggccggaagtctggtggtcggaagctcataaaaggcgtcaaaggcccttacacagtgcctgatgagaaacgggacaatcacatcccatcaaccgccccatatagcctcgcagagtgcgtccatgacctcctccaccttgccgcaaggatggtagtcatgggtggcaggctcgtcttcttctaccctgtactgcgaggtgaagatggcactgcgaacccgcagttccctgagcacccctgcttcaagttaatcacctcctctgagcagatcctgagctttcggtacagccgggttctgctgaccatggtgaaggttgcaccttacaccgaggagatcgagaagttggccgcagagcggcaccgggagttcagggagaaccaccagaagtggatggaggagggcaacctccattccgccgtgttcgagccagcccaggatgggaagcctgatagagactccaagcccaaatacagaggcaagtatgtgtagcagcgcagatactaacttgttgaatttagtggaaacacatttttggtggtttcctgttctgcatcctgtaccaaattttatgagctagtgtgttggcaggcgctgcgagatgtaccactgttccagagtaccattcaaatcttgtcagtccatttgatggatgaggaagtgtaattgcagcttaattgactgaacttatttttttggttaacctgcctttgacacggctgttgaaattggcgctgcttctgttactgaattatatgaaaagaaataattcagtaacagaagcagcaccaatttagtactaagggaaaaaacaagtaaaatacatca

SEQ ID NO: 54946 - DNA, 1836 bp, Zea Mays
gtactaggtaggtctttctccttgcaatctttccgtttcttcgtttgattccctcccgccgccgccgctggagacgcccaaccacgacagcgccccagggttcgtcctcccgctggaatagtaagtgaccggagaaaagcagcacaagagagatgtggtatctatgcgtcttctaccacaggctcctggactaccggcgaccggaggtggagtccctcgccgagctctttgccggcccaggcgcccgtgaatccgtcgagtggcgcatgccggagaaccaccacgtagactcccccttccacctcgttcgcctccctggagacgagcgcctcgccgctcaggtcgccaaccgcagcttgttggtgaagggggtctacgagctctggggctatggcactacctacgaggagctggagaagtcggtcagggagtaccccgacgagaggaagcttccgttcctggtcccggaaagcagcttcaagatcgttatcgacagcttcggcaaggtgatcagctcccaagagcagaacgagatcatacagagcctcacttacataccattcaagggacgtgttaatttgaagaagcctgatcacagattctttgtcatggagaccgatgactatgggtcgaacaatggtctcccaccggttgtcaagaggtcgatattctttggccgggaggttggagcagctgataggcatctcctgccaacataccagctcaagagtaggaagtacattggccccactgcaatggatgctgaaatggctttcctcatggccaatcagggtctggcctcgcctgggaagcttgtctatgacccttttgttgggaccgggagcattttggttgcagctgcacattttggagctatgacgatgggtgcagatattgatataagggttgtacgggatggtcgtggccccaattgcaatgtttggagcaactttgagcagtataagttaccagagcctttgtgtttgctaagggcagacaacaatctcccaccctggcgtcctggattgaaggagatgttcgatgcaataatttgtgacccaccatatggagtccgggccggtggccggaagtctggtggtcggaagctcataaaaggcgtcaaaggcccttacacagtgcctgatgagaaacgggacaatcacatcccatcaaccgccccatatagcctcgcagagtgcgtccatgacctcctccaccttgccgcaaggatggtagtcatgggtggcaggctcgtcttcttctaccctgtactgcgagatcctgagctttcggtacagccgggttctgctgaccatggtgaaggttgcaccttacaccgaggagatcgagaagttggccgcagagcggcaccgggagttcagggagaaccaccagaagtggatggaggagggcaacctccattccgccgtgttcgagccagcccaggatgggaagcctgatagagactccaagcccaaatacagaggcaagtatgtgtagcagcgcagatactaacttgttgaatttagtggaaacacatttttggtggtttcctgttctgcatcctgtaccaaattttatgagctagtgtgttggcaggcgctgcgagatgtaccactgttccagagtaccattcaaatcttgtcagtccatttgatggatgaggaagtgtaattgcagcttaattgactgaacttatttttttggttaacctgcctttgacacggctgttgaaattggcgctgcttctgttactgaattatatgaaaagaaataattcagtaacagaagcagcaccaatttagtactaagggaaaaaacaagtaaaatacatca

SEQ ID NO: 54947 - DNA, 2068 bp, Zea Mays
ccagttgcttgcctggtctctccaactcaccctttttcaccttcggcagtctggctccatccgtctcctgcactgaccttttcctccacgtttccggcaactgcaagcaaccactgatccagcccgttctgtgtcccggcgaatggtgacgaaccaggacgcggatgcggcagcgccaggggcaggggcaacggtagatccgatgcggctagcatcgcggtggcgatcccggccagagtggaactgcgcgtcggcggagctggaggctgagccgtccgagctcaacaccgtcaacagctcgggactcttctccgtcgtctctaccgacaagttatcggtaaaatacctcggcagccatcaccacggccacgacgtcggtgtcgtgcaggccgaccgtcccgcgccgacgcgccgagccgtgtactacttcgagatgggcgtcaggaatgctggatacaaggggcagacatccattgggttcacgagcgagagcttcaagatgaggcgacaaccgggctgggagacaaacagttgtggataccatggtgacgacggccatctttatcggggtcaagggaaaggtgaatcatttgggccaaaattcacatctggtgacataattggtgctggcatcaactacttgtcacaagaatttttcttcacgaaaaatggtactctggttggagccattccaaaagaaattaaaggcccactatatcctaccattgcagttcatagttacggtgaagagttctcatataaagatatatagcgagtcaactgttgaatcaatgattaatgttgcaatgtaaagtcttacttaaagaacttatatagattttttatacagtaagtaatttatacctataccttttcattttctatatcctcattgtggggtctgatctctaggctaccccaagttgtttaggactaaaagtctgttcttacaggttgactgtaaactttggaaaagaaccattctgttttgacgttgagggttatattcttgaggacaaaatgaggcagcaatcagtgtctgataaattgaacttggagccagacatcagccattggattgtccgttcatatctcctacattatggataccaagatacattaaatgcttttgatatggcaaatgcaaccgatcgccccaccagtcgccaaaatggtaatgcagaacctcccgaaatgtatggtcttagccatagaaaacttttgcgtcagcttatcatgagtggagatattgactctacattcaaaagacttcgggagtggtatccgcaagtgataaaggatgagcaatcggttatttgcttcctacttcgttctcaaagattcatagaatatatcagggctgaacaactggaggttgccgtgaaatatggtcgtgctaacctggcaagcttcttcacccacaaagcttttgaggggctgctgaaagatagtgtggccctacttgcgtatgagaagcctacagaatcatgcttgggatacctgatggactcttcccagcgtgaatttgtggcggacgcggtgaacgcggctgtcctgtcgacgaaccccactgtgaaggaccctgagagctgcctttactcgtgtctcgagaggctactaaagcagctcacagtatgtagctttgagcgacgtgcattcaacaactaccaaggagatgcattcttactccacaaagaagtgcagaattatgaaaggtctaggcgctcataggcatcgggtttgatgcgcatctcagaagtaaactcagatgctagactcccaagtctcaactgctctttgaagggacgaaggttcagaaccaagtggtcgaccatgctaagcacaaatccttccccttgatgcagcacccctactttcggaagggtggatacaagatttcacagacagaggtcaggctttcggaaggtgtcttatcctccctgtaatcagaaaactacgtttcagtctccctagttttttttgttggttggctaatatgctgtttgacattgacattgtggatgctaaaaagtaaagatgctttaatgtatgcccacctttgagaaca

SEQ ID NO: 54948 - DNA, 2257 bp, Zea Mays
ccagttgcttgcctggtctctccaactcaccctttttcaccttcggcagtctggctccatccgtctcctgcactgaccttttcctccacgtttccggcaactgcaagcaaccactgatccagcccgttctgtgtcccggcgaatggtgacgaaccaggacgcggatgcggcagcgccaggggcaggggcaacggtagatccgatgcggctagcatcgcggtggcgatcccggccagagtggaactgcgcgtcggcggagctggaggctgagccgtccgagctcaacaccgtcaacagctcgggactcttctccgtcgtctctaccgacaagttatcggtaaaatacctcggcagccatcaccacggccacgacgtcggtgtcgtgcaggccgaccgtcccgcgccgacgcgccgagccgtgtactacttcgagatgggcgtcaggaatgctggatacaaggggcagacatccattgggttcacgagcgagagcttcaagatgaggcgacaaccgggctgggagacaaacagttgtggataccatggtgacgacggccatctttatcggggtcaagggaaaggtgaatcatttgggccaaaattcacatctggtgacataattggtgctggcatcaactacttgtcacaagaatttttcttcacgaaaaatggtactctggttggagccattccaaaagaaattaaaggcccactatatcctaccattgcagttcatagttacggtgaagagtaagcttttacttttttagttgtttaggcgacatataattgctatatggtgtaagttgtgattcaccccaggtcttccaaccttagttgcagaaacatctggcagacttggataataatacctgctccaaaatgcaatttactcatttgtttttttgcgtgttatatgatggttttcctttctagcacgacatataaagtcacaagttgtacgcctcaatagtaacacaagttaatcactccctgtttaattcttagacataactttatttgtaggttctcatataaagatatatagcgagtcaactgttgaatcaatgattaatgttgcaatgtaaagtcttacttaaagaacttatatagattttttatacagtaagtaatttatacctataccttttcattttctatatcctcattgtggggtctgatctctaggctaccccaagttgtttaggactaaaagtctgttcttacaggttgactgtaaactttggaaaagaaccattctgttttgacgttgagggttatattcttgaggacaaaatgaggcagcaatcagtgtctgataaattgaacttggagccagacatcagccattggattgtccgttcatatctcctacattatggataccaagatacattaaatgcttttgatatggcaaatgcaaccgatcgccccaccagtcgccaaaatggtaatgcagaacctcccgaaatgtatggtcttagccatagaaaacttttgcgtcagcttatcatgagtggagatattgactctacattcaaaagacttcgggagtggtatccgcaagtgataaaggatgagcaatcggttatttgcttcctacttcgttctcaaagattcatagaatatatcagggatagtgtggccctacttgcgtatgagaagcctacagaatcatgcttgggatacctgatggactcttcccagcgtgaatttgtggcggacgcggtgaacgcggctgtcctgtcgacgaaccccactgtgaaggaccctgagagctgcctttactcgtgtctcgagaggctactaaagcagctcacagtatgtagctttgagcgacgtgcattcaacaactaccaaggagatgcattcttactccacaaagaagtgcagaattatgaaaggtctaggcgctcataggcatcgggtttgatgcgcatctcagaagtaaactcagatgctagactcccaagtctcaactgctctttgaagggacgaaggttcagaaccaagtggtcgaccatgctaagcacaaatccttccccttgatgcagcacccctactttcggaagggtggatacaagatttcacagacagaggtcaggctttcggaaggtgtcttatcctccctgtaatcagaaaactacgtttcagtctccctagttttttttgttggttggctaatatgctgtttgacattgacattgtggatgctaaaaagtaaagatgctttaatgtatgcccacctttgagaaca

SEQ ID NO: 54949 - DNA, 2128 bp, Zea Mays
ccagttgcttgcctggtctctccaactcaccctttttcaccttcggcagtctggctccatccgtctcctgcactgaccttttcctccacgtttccggcaactgcaagcaaccactgatccagcccgttctgtgtcccggcgaatggtgacgaaccaggacgcggatgcggcagcgccaggggcaggggcaacggtagatccgatgcggctagcatcgcggtggcgatcccggccagagtggaactgcgcgtcggcggagctggaggctgagccgtccgagctcaacaccgtcaacagctcgggactcttctccgtcgtctctaccgacaagttatcggtaaaatacctcggcagccatccattgggttcacgagcgagagcttcaagatgaggcgacaaccgggctgggagacaaacagttgtggataccatggtgacgacggccatctttatcggggtcaagggaaaggtgaatcatttgggccaaaattcacatctggtgacataattggtgctggcatcaactacttgtcacaagaatttttcttcacgaaaaatggtactctggttggagccattccaaaagaaattaaaggcccactatatcctaccattgcagttcatagttacggtgaagagtaagcttttacttttttagttgtttaggcgacatataattgctatatggtgtaagttgtgattcaccccaggtcttccaaccttagttgcagaaacatctggcagacttggataataatacctgctccaaaatgcaatttactcatttgtttttttgcgtgttatatgatggttttcctttctagcacgacatataaagtcacaagttgtacgcctcaatagtaacacaagttaatcactccctgtttaattcttagacataactttatttgtaggttctcatataaagatatatagcgagtcaactgttgaatcaatgattaatgttgcaatgtaaagtcttacttaaagaacttatatagattttttatacagttgactgtaaactttggaaaagaaccattctgttttgacgttgagggttatattcttgaggacaaaatgaggcagcaatcagtgtctgataaattgaacttggagccagacatcagccattggattgtccgttcatatctcctacattatggataccaagatacattaaatgcttttgatatggcaaatgcaaccgatcgccccaccagtcgccaaaatggtaatgcagaacctcccgaaatgtatggtcttagccatagaaaacttttgcgtcagcttatcatgagtggagatattgactctacattcaaaagacttcgggagtggtatccgcaagtgataaaggatgagcaatcggttatttgcttcctacttcgttctcaaagattcatagaatatatcagggctgaacaactggaggttgccgtgaaatatggtcgtgctaacctggcaagcttcttcacccacaaagcttttgaggggctgctgaaagatagtgtggccctacttgcgtatgagaagcctacagaatcatgcttgggatacctgatggactcttcccagcgtgaatttgtggcggacgcggtgaacgcggctgtcctgtcgacgaaccccactgtgaaggaccctgagagctgcctttactcgtgtctcgagaggctactaaagcagctcacagtatgtagctttgagcgacgtgcattcaacaactaccaaggagatgcattcttactccacaaagaagtgcagaattatgaaaggtctaggcgctcataggcatcgggtttgatgcgcatctcagaagtaaactcagatgctagactcccaagtctcaactgctctttgaagggacgaaggttcagaaccaagtggtcgaccatgctaagcacaaatccttccccttgatgcagcacccctactttcggaagggtggatacaagatttcacagacagaggtcaggctttcggaaggtgtcttatcctccctgtaatcagaaaactacgtttcagtctccctagttttttttgttggttggctaatatgctgtttgacattgacattgtggatgctaaaaagtaaagatgctttaatgtatgcccacctttgagaaca

SEQ ID NO: 54950 - DNA, 2288 bp, Zea Mays
ccagttgcttgcctggtctctccaactcaccctttttcaccttcggcagtctggctccatccgtctcctgcactgaccttttcctccacgtttccggcaactgcaagcaaccactgatccagcccgttctgtgtcccggcgaatggtgacgaaccaggacgcggatgcggcagcgccaggggcaggggcaacggtagatccgatgcggctagcatcgcggtggcgatcccggccagagtggaactgcgcgtcggcggagctggaggctgagccgtccgagctcaacaccgtcaacagctcgggactcttctccgtcgtctctaccgacaagttatcggtaaaatacctcggcagccatcaccacggccacgacgtcggtgtcgtgcaggccgaccgtcccgcgccgacgcgccgagccgtgtactacttcgagatgggcgtcaggaatgctggatacaaggggcagacatccattgggttcacgagcgagagcttcaagatgaggcgacaaccgggctgggagacaaacagttgtggataccatggtgacgacggccatctttatcggggtcaagggaaaggtgaatcatttgggccaaaattcacatctggtgacataattggtgctggcatcaactacttgtcacaagaatttttcttcacgaaaaatggtactctggttggagccattccaaaagaaattaaaggcccactatatcctaccattgcagttcatagttacggtgaagagtaagcttttacttttttagttgtttaggcgacatataattgctatatggtgtaagttgtgattcaccccaggtcttccaaccttagttgcagaaacatctggcagacttggataataatacctgctccaaaatgcaatttactcatttgtttttttgcgtgttatatgatggttttcctttctagcacgacatataaagtcacaagttgtacgcctcaatagtaacacaagttaatcactccctgtttaattcttagacataactttatttgtaggttctcatataaagatatatagcgagtcaactgttgaatcaatgattaatgttgcaatgtaaagtcttacttaaagaacttatatagattttttatacagtaagtaatttatacctataccttttcattttctatatcctcattgtggggtctgatctctaggctaccccaagttgtttaggactaaaagtctgttcttacaggttgactgtaaactttggaaaagaaccattctgttttgacgttgagggttatattcttgaggacaaaatgaggcagcaatcagtgtctgataaattgaacttggagccagacatcagccattggattgtccgttcatatctcctacattatggataccaagatacattaaatgcttttgatatggcaaatgcaaccgatcgccccaccagtcgccaaaatgcttatcatgagtggagatattgactctacattcaaaagacttcgggagtggtatccgcaagtgataaaggatgagcaatcggttatttgcttcctacttcgttctcaaagattcatagaatatatcagggctgaacaactggaggttgccgtgaaatatggtcgtgctaacctggcaagcttcttcacccacaaagcttttgaggggctgctgaaagatagtgtggccctacttgcgtatgagaagcctacagaatcatgcttgggatacctgatggactcttcccagcgtgaatttgtggcggacgcggtgaacgcggctgtcctgtcgacgaaccccactgtgaaggaccctgagagctgcctttactcgtgtctcgagaggctactaaagcagctcacagtatgtagctttgagcgacgtgcattcaacaactaccaaggagatgcattcttactccacaaagaagtgcagaattatgaaaggtctaggcgctcataggcatcgggtttgatgcgcatctcagaagtaaactcagatgctagactcccaagtctcaactgctctttgaagggacgaaggttcagaaccaagtggtcgaccatgctaagcacaaatccttccccttgatgcagcacccctactttcggaagggtggatacaagatttcacagacagaggtcaggctttcggaaggtgtcttatcctccctgtaatcagaaaactacgtttcagtctccctagttttttttgttggttggctaatatgctgtttgacattgacattgtggatgctaaaaagtaaagatgctttaatgtatgcccacctttgagaaca

SEQ ID NO: 54951 - DNA, 1663 bp, Zea Mays
aagtccccgctcgaggaacaggcgtatggactgattaaatatccaatagatgatctgctagtaaggcccattgcagatgatccggctttatctaagagacctactctgctacagattttagagtaccaagatgttctgtgggagatctccttatggtatgggatttctgctcgtcttttgggagggttctgaatctgtccccatttccgctaacagatttggagaacacaatttgccacaaagaaagcaatgttcttcttgtggaaatacatgcagctatgaaggatgaaggtgactatttcactgttctgcagaacaagaaacggaagtaagttcagtaacatgggctgagtatctatgtgatttcttggaaatgacaaaaaatgaagaacgttccacaaacattgcaacagtaataaggggttattatggtcttattgacactgatataaagcttaagatcctccgggaactagtggaagaagctattcaaacctctgccataaaggagatactaagtgaccgtgtggaccagaaacaagtcctcaatgcaacaaaaagagagaacaccagaaaggacaaacaagagaaaaatcttaacactgaaattgccatgaaaagtcaggagaatcagacagatgatgtgcaagttggtcatgggggtgtagatgagctggttaggagaaaagaagaaaatgacaagagcaatatttctcggagtagaacagaagggaaacgacacttggtacagcaccttgagacggagattgagaaattatccatccgatccagcccacttggtaaagacaggcagtacaataggtactggtttttcaagcgtgaaggaaggctttttgttgaaactgcagattccagagaatggggttactacaacactaaggaagagctttgaaacggcaactagagaagttttacagtaagataagtaatgccctagagaaacgatcaaaagatatcgcaaacaggatgttacttgaagagggtgtactgcggcgttccacacgtgtccgggctcagccaaaggacatggcattcctcaagtacgtcaacaagtggaaggataactgaggtggcggtctgccagcggtggtggtggtctgccagcggtgggaggataacttgagccactgggtgacagggtttgcagtagatgtgtttggtttgaggttaaagtgggatgggacgggggcgacaccgtcctctcaattttttaattttttgggatcacgccgctacaaaaaaactactctggtgtttacctcgtccctacgtgactcccatttaaccactggagtaactgtgaccgtcccatttcatcctttcgtatacttggttaggtcgtcacagtggttcgccatactcgtcgcattagctaatgaaaactgtactagaacctagttttcttccctttgctactgaaatgaacactggttcacaaatgaaaagcttttgctactgaagtgaactgtgccactctttttccacctttgcgttccatgtgtttaacactggttcacaaatgaaaagcctttgctactgaactgagctgtgccaggcttctttacctttttagaacagtcaccactctttacatgtaacgatgtaaacgtgatgaggcaagacacttcgattttcaagggtg

SEQ ID NO: 54952 - DNA, 1616 bp, Zea Mays
gctatctacccccctcacataactacaagataagtccccgctcgaggaacaggcgtatggactgattaaatatccaatagatgatctgctagtaaggcccattgcagatgatccggctttatctaagagacctactctgctacagattttagagtaccaagatgttctgtgggagatctccttatggtatgggatttctgctcgtcttttgggagggttctgaatctgtccccatttccgctaacagatttggagaacacaatttgccacaaagaaagcaatgttcttcttgtggaaatacatgcagctatgaaggatgaaggtgactatttcactgttctgcagaacaagaaacggaagttaaagtaataaggggttattatggtcttattgacactgatataaagcttaagatcctccgggaactagtggaagaagctattcaaacctctgccataaaggagatactaagtgaccgtgtggaccagaaacaagtcctcaatgcaacaaaaagagagaacaccagaaaggacaaacaagagaaaaatcttaacactgaaattgccatgaaaagtcaggagaatcagacagatgatgtgcaagttggtcatgggggtgtagatgagctggttaggagaaaagaagaaaatgacaagagcaatatttctcggagtagaacagaagggaaacgacacttggtacagcaccttgagacggagattgagaaattatccatccgatccagcccacttggtaaagacaggcagtacaataggtactggtttttcaagcgtgaaggaaggctttttgttgaaactgcagattccagagaatggggttactacaacactaaggaagagctttgaaacggcaactagagaagttttacagtaagataagtaatgccctagagaaacgatcaaaagatatcgcaaacaggatgttacttgaagagggtgtactgcggcgttccacacgtgtccgggctcagccaaaggacatggcattcctcaagtacgtcaacaagtggaaggataactgaggtggcggtctgccagcggtggtggtggtctgccagcggtgggaggataacttgagccactgggtgacagggtttgcagtagatgtgtttggtttgaggttaaagtgggatgggacgggggcgacaccgtcctctcaattttttaattttttgggatcacgccgctacaaaaaaactactctggtgtttacctcgtccctacgtgactcccatttaaccactggagtaactgtgaccgtcccatttcatcctttcgtatacttggttaggtcgtcacagtggttcgccatactcgtcgcattagctaatgaaaactgtactagaacctagttttcttccctttgctactgaaatgaacactggttcacaaatgaaaagcttttgctactgaagtgaactgtgccactctttttccacctttgcgttccatgtgtttaacactggttcacaaatgaaaagcctttgctactgaactgagctgtgccaggcttctttacctttttagaacagtcaccactctttacatgtaacgatgtaaacgtgatgaggcaagacacttcgattttcaagggtg

SEQ ID NO: 54953 - DNA, 2793 bp, Zea Mays
cacctataaattcagaactactgtatcaggccacctagttcatgcggcgtgagtacctgattgctttctcatgtggtgtgattacctgattgctttcctgcttactgggagcatggagggtggagcttccacttcaccgaatcaaggtgccctcacgacttccccttccgaccgcgcatcgctagctcccgcaacgacccgacctctgcgggtggatcatatcggccgccgttagccctccctcccccgatccgctacgattctttgaccagaccttggtccagaaacgaaaaggcggcggggtaaacagccgcagagtcgagcagtggccgcagaggcaagcagagaggccagtgggcagtggcgcctatggaggcgtggagcaggagagcgtcgggtggcggagaagcgagacgacgtggacctgacggagagtggccttggggaatgtctacgaagtgcaagggggaggggaaggatggaagggccaatggtccaaccgtgccgcctgtcgctcgcgcccgagcttgcctgcgcatcccgcggctcgctatcttagcccgccgccacgcaaaaccctctggccggcgcaacagaagcctcaaacgccagcgcactgccctcgctggcgctccatgccaaggccaaagatgtcgtgcacgcgtggttgccactcgcgacggcgattggacggacgcccaccgtggtgccgtaggttcacaacgcaacgaactaaacgctaccacctctctcgatcgtctcctctaccttcgacaatgcccatgcacgcctatcagagtgacgggtgagcgttgcccttggaaagtcgtttggttggggcttttttacccgtaataggttcacggcgcaaactggtccgactactttactttgtgtttggttgggccatctccagcacgcgtgtatatgagcgagcgtgtgttttgcactgtagattgcacagtttacagagtgaagtttgagatagtgagtaagatagaagtaagatagaggggcgactggagattgtcttatgtcttccttttatggatcacacgttgttaaaggatatgggcaagtaagcgctcgacatctaaggctatctacccccctcacataactacaagataagtccccgctcgaggaacaggcgtatggactgattaaatatccaatagatgatctgctagtaaggcccattgcagatgatccggctttatctaagagacctactctgctacagattttagagtaccaagatgttctgtgggagatctccttatggtatgggatttctgctcgtcttttgggagggttctgaatctgtccccatttccgctaacagatttggagaacacaatttgccacaaagaaagcaatgttcttcttgtggaaatacatgcagctatgaaggatgaaggtgactatttcactgttctgcagaacaagaaacggaagttaaaggtaagttcagtaacatgggctgagtatctatgtgatttcttggaaatgacaaaaaatgaagaacgttccacaaacattgcaacagtaataaggggttattatggtcttattgacactgatataaagcttaagatcctccgggaactagtggaagaagctattcaaacctctgccataaaggagatactaagtgaccgtgtggaccagaaacaagtcctcaatgcaacaaaaagagagaacaccagaaaggacaaacaagagaaaaatcttaacactgaaattgccatgaaaagtcaggagaatcagacagatgatgtgcaagttggtcatgggggtgtagatgagctggttaggagaaaagaagaaaatgacaagagcaatatttctcggagtagaacagaagggaaacgacacttgcaccttgagacggagattgagaaattatccatccgatccagcccacttggtaaagacaggcagtacaataggtactggtttttcaagcgtgaaggaaggctttttgttgaaactgcagattccagagaatggggttactacaacactaaggaagagctttgaaacggcaactagagaagttttacagtaagataagtaatgccctagagaaacgatcaaaagatatcgcaaacaggatgttacttgaagagggtgtactgcggcgttccacacgtgtccgggctcagccaaaggacatggcattcctcaagtacgtcaacaagtggaaggataactgaggtggcggtctgccagcggtggtggtggtctgccagcggtgggaggataacttgagccactgggtgacagggtttgcagtagatgtgtttggtttgaggttaaagtgggatgggacgggggcgacaccgtcctctcaattttttaattttttgggatcacgccgctacaaaaaaactactctggtgtttacctcgtccctacgtgactcccatttaaccactggagtaactgtgaccgtcccatttcatcctttcgtatacttggttaggtcgtcacagtggttcgccatactcgtcgcattagctaatgaaaactgtactagaacctagttttcttccctttgctactgaaatgaacactggttcacaaatgaaaagcttttgctactgaagtgaactgtgccactctttttccacctttgcgttccatgtgtttaacactggttcacaaatgaaaagcctttgctactgaactgagctgtgccaggcttctttacctttttagaacagtcaccactctttacatgtaacgatgtaaacgtgatgaggcaagacacttcgattttcaagggtg

SEQ ID NO: 54954 - DNA, 2755 bp, Zea Mays
cacctataaattcagaactactgtatcaggccacctagttcatgcggcgtgagtacctgattgctttctcatgtggtgtgattacctgattgctttcctgcttactgggagcatggagggtggagcttccacttcaccgaatcaaggtgccctcacgacttccccttccgaccgcgcatcgctagctcccgcaacgacccgacctctgcgggtggatcatatcggccgccgttagccctccctcccccgatccgctacgattctttgaccagaccttggtccagaaacgaaaaggcggcggggtaaacagccgcagagtcgagcagtggccgcagaggcaagcagagaggccagtgggcagtggcgcctatggaggcgtggagcaggagagcgtcgggtggcggagaagcgagacgacgtggacctgacggagagtggccttggggaatgtctacgaagtgcaagggggaggggaaggatggaagggccaatggtccaaccgtgccgcctgtcgctcgcgcccgagcttgcctgcgcatcccgcggctcgctatcttagcccgccgccacgcaaaaccctctggccggcgcaacagaagcctcaaacgccagcgcactgccctcgctggcgctccatgccaaggccaaagatgtcgtgcacgcgtggttgccactcgcgacggcgattggacggacgcccaccgtggtgccgtaggttcacaacgcaacgaactaaacgctaccacctctctcgatcgtctcctctaccttcgacaatgcccatgcacgcctatcagagtgacgggtgagcgttgcccttggaaagtcgtttggttggggcttttttacccgtaataggttcacggcgcaaactggtccgactactttactttgtgtttggttgggccatctccagcacgcgtgtatatgagcgagcgtgtgttttgcactgtagattgcacagtttacagagtgaagtttgagatagtgagtaagatagaagtaagatagaggggcgactggagattgtcttatgtcttccttttatggatcacacgttgttaaaggatatgggcaagtaagcgctcgacatctaaggctatctacccccctcacataactacaagataagtccccgctcgaggaacaggcgtatggactgattaaatatccaatagatgatctgctagtaaggcccattgcagatgatccggctttatctaagagacctactctgctacagattttagagtaccaagatgttctgtgggagatctccttatggtatgggatttctgctcgtcttttgggagggttctgaatctgtccccatttccgctaacagatttggagaacacaatttgccacaaagaaagcaatgttcttcttgtggaaatacatgcagctatgaaggatgaaggtaagttcagtaacatgggctgagtatctatgtgatttcttggaaatgacaaaaaatgaagaacgttccacaaacattgcaacagtaataaggggttattatggtcttattgacactgatataaagcttaagatcctccgggaactagtggaagaagctattcaaacctctgccataaaggagatactaagtgaccgtgtggaccagaaacaagtcctcaatgcaacaaaaagagagaacaccagaaaggacaaacaagagaaaaatcttaacactgaaattgccatgaaaagtcaggagaatcagacagatgatgtgcaagttggtcatgggggtgtagatgagctggttaggagaaaagaagaaaatgacaagagcaatatttctcggagtagaacagaagggaaacgacacttggtacagcaccttgagacggagattgagaaattatccatccgatccagcccacttggtaaagacaggcagtacaataggtactggtttttcaagcgtgaaggaaggctttttgttgaaactgcagattccagagaatggggttactacaacactaaggaagagctttgaaacggcaactagagaagttttacagtaagataagtaatgccctagagaaacgatcaaaagatatcgcaaacaggatgttacttgaagagggtgtactgcggcgttccacacgtgtccgggctcagccaaaggacatggcattcctcaagtacgtcaacaagtggaaggataactgaggtggcggtctgccagcggtggtggtggtctgccagcggtgggaggataacttgagccactgggtgacagggtttgcagtagatgtgtttggtttgaggttaaagtgggatgggacgggggcgacaccgtcctctcaattttttaattttttgggatcacgccgctacaaaaaaactactctggtgtttacctcgtccctacgtgactcccatttaaccactggagtaactgtgaccgtcccatttcatcctttcgtatacttggttaggtcgtcacagtggttcgccatactcgtcgcattagctaatgaaaactgtactagaacctagttttcttccctttgctactgaaatgaacactggttcacaaatgaaaagcttttgctactgaagtgaactgtgccactctttttccacctttgcgttccatgtgtttaacactggttcacaaatgaaaagcctttgctactgaactgagctgtgccaggcttctttacctttttagaacagtcaccactctttacatgtaacgatgtaaacgtgatgaggcaagacacttcgattttcaagggtg

SEQ ID NO: 54955 - DNA, 6407 bp, Zea Mays
cacctacaggctgggagtgtccagaacattcgcctgatggttccggtcgtcctggagtcagagtcgccatcctacacgcgttggcgggacttgcttcttctcacccttcgccgctacgccctggatgaccacgtcctctgcgaccccaccggtgtggcgccgactgctgcgtgggtgcgcctcgacagcatcgtgctcacctggatcgtggggacgatctccgtcgacctccacagcctcctccggaaccttcctcacgctcgggctgtttggcttgccatcgagggccagttcatgggcaacgccgaggcccgggctctccacctcgacgccgcttttcgcaccttcgtccagggggacctcagtgtcagtgcgtactgccgccagatgaagaccatggcggactcacttggcgatctgggctgccccgtggaggaccgcatcctagtcctcaacgtcctccgcggcctcggcgatcgctacacccacctccggtcgttgctcatgcgccagcgcccctttcctaccttcctccaggttcgcgacgacctcgccctggaggagatcactctgggtgctcaggctgcatcgatctccggcccggggtcctcgtcctcttcgacagcactagcggctttcaccacgacccgtccgcctacttcgtcacagtctgcccttggccctcgccctcccgggccgagcatgggcggcgggggtcgaggtggcggaggcgggggcggtagtggtcgtcgccgccgtggtggccgcggtggtggtggtggttccggcggtggtgcctgtggccacgcatcgaccccggggccccagcagagtgcgccttggcccactttccaccacccgtggtcagggcgcatctccgtgtggccgttccaggggcctggctctgaggctcggcctccggcggccatgttcgctggtgcgcagcctggtttcgccttcgcctctccgtcgccctggacctcgacacctgccgcttcgtcgtggcccacgcctccggctactccaccgtccgggctggttggttgggacgcggccgccctggctgccttcctgactccgccgctgggtcccgagtggatcgcggacaccggtgctacctaccacaccacccccgaccctggtatactcacctctgttcgccctcctccttcctctctcccctcgtccatcatggtggcgaatggctcgtgtcttcctgtcacatctgtgggtgccgccggcccggctcttttcgcgttcccgatgttcttgtcgctccttctttggtccacaatcttctttctattcgtcggtttactgctgataattcttgttctgtcgagtttgactcttttgatcttactgtgaaggactcggcaactcgacgccccctcctcagatgtgacagcaccggccccctctacacccttcggcttccgtacgccacatcttcttcgtcttcgtcacctgacacagctgttgtttttgttgccgccacgtcttctaccacctggcatcgtcgccttggtcaccccggacgcgatgccttgatgcagcttactcgtagtgccactatcccatgtactagatcccatgatgagcatctttgtcatgcgtgccagttaggccgccatgtgcgtcttcctttttcttcttcttcctcacatgctactcatgcatttgatcttgtacactgcgatttgtggacttcacctattaccagtatgtcaggctacaaatactatcttgtggtgcttgatgatttttctcattatgtgtggacttttcctttgcgtgccaagtctgagactttccccgccctccgccacttcttcgcctgggtgtccactcagttcggcctcaccattaaggccgttcagtgtgacaatggtcgggagttcgataactccaccttccgtgacttctttctctctcacgggatgcaattgcggatgtcttgcccgtatacctcctcccagaacggcaaggttgggcgcatgatccgcacgaccaacgacaccatccgcactcttcttctccaggcgcaccttccggctcgtttctgggccgaggccctccacacctctacctacctcctcaaccgtctcccttccactgtgtgcccggcccccactcctcaccaggcactcttcggtacccctccgcgctatgaccacctccgtgtcttcgggtgtgcttgctacccgaacaccgctgccactgctcctcacaaactagcaccccgttccaccctctgtgtgtttctcgggtactccccggaccacaaaggctaccgctgctttgacctctgctctcgccgggtcctcatctctcgccatgtggtgtttgatgagtccgtatttccctactccaccacaccaccctcctctgaccctgaccttgacctcttcactctctttcagactgacgcggtggtcgagccacctctccttcctctctctgcaggtactcgctcaccacctgtcggtcctactcccggcccggtaccttgctcgggttcggtggtgtcgcctacggtggtgtcgcctctccgcggagccccgtctccgatcgcccccaggccgagcgaggggtggtgggactgcaccgcctacggggccgtcggttacgacccctccgacccgcttcacccggctggtgcgggtctaccagtgccggctgccgccgccggggttcgcacctccaccgtcgccgcccctgtcgttgtcaccgccggtggcccagtccccgccagggacacctacacctccgccgcggccacccgcggcccgtgtcgccggtgtaccatccaccgctccttcatcgcgacccacggcatgtccacccgatggtgacgcggcacgcggccggtaccctgccaccccgtgccctggcggccacgaccgcagactcgcaggtttctccggtaccctcctccgtccgcaccgccctgctggacccccactggcgtcaggcgatggaggaggagtacgcggcgctcgtcgccaaccagacgtgggatctggtgccccatccgcccggcaccaacgtcgtcaccggcaagtggatctggacacacaagcgacgggccgatggtaccctggaccagtacaaggctcgttgggttcttcggggcttcactcagcgccccggagtcgactacgatgagaccttcagcccggttgtgaagccggccactgtccgcacggtgctctcgctggccctcgctcgctcctggccagttcaccagctcgacgtcaagaacgccttcctgcacggcgccctcaccgagaccgtctaccgctgtcagcctgcggggttcgtggactcctctcgccctgacatggtctgccggctcaacaggtccctctacggcctcaagcaggccccccgggtgtggcactccagactggctacatttctggtgacactgggcttcgtggaggccaagtccgacacgtctttgttcgtccaccatcatggcgcagaggctgcctacttgctactctacgtggatgacattgtcctcaccgcctccagtccgtctcttcttcgccgcttcgttgacgcgcttcagcgggagtttccggtcaaagatctgggcgtccttcaccatttcctgggggtcactgctgagcctcgcccctcaggactcctccttcaccagcgacagtatactcttgacattctggagcgggcccagatgcgtgactgcaagccctgctccaccccagtcgacacgcaggccaagctctctgaggccacgggtgccccagtcgcggaccccaccggctataggagtcttgccggtgcccttcagtacctcaccttcaccaggccagacatctcctacgccgtgcagcaggtctgcctccatatgcacgaccctcgggagccccaccttgcggcgctcaagcgcctcctccgctacctccggggcaccgtcgactacggactgcttcttcaccggtctacctcctccgagttggtcgtctacactgatgttgactgggccgggtgcccagacactcggcgctccacctccggctacgctgtcttcttaggcggcaacctagtgtcctggtcgtcgaagcgccagccggtcgtttcccgctcaagtgcagaggcggagtaccgtgtcgtggccaacggcgtggcggaggctgtctggctccggcagctccttaccgagcttcacagtcccctctccaggagcacggtggtctactgcgacaacgtcagcgcggtctacctctccaccaacccagtgcagcaccagcggaccaagcatgtcgagatcgatctacacttcgtccgtgattatgtcgccgccggtactgttcgggtcctccacgtcccgaccacctcccagtttgccgacatcttcaccaagggtcttccgtcctcgaccttcgccgagtttcgctccagcctcaacatcagtagtggctagttgagtctgtggggagatcctattgtgtgatgtacttcttctttttgagtccagtctgtgtactccgctgcgtcggacgtccagactgcgggggggtgttagagtgttaggcctgttaaggctaggcccatgtggcccatgtaaacactatatagctaacctgttgggttaaccctaatctatggaatattcactccaatagtatccaggtaaaattcttgggttgtttcatgtcattcagatattgatgtatttggtatagaaagggttagtgtgacggttttgtgccatgcttgtgtatgatcattacatcatatgtcgtatttgtatgtatcaacacgtttgcccttttcaactcgtttcaggctgatttggtaagtatgccctgtgatgcatttggtgagttcctttacccgacacaaagatgtatgttgagggctcttttcttctgaacttagtacattatccacttgtagccttttctagatttttttctgtatatttagaatagtgtgattttaccatgttatactttcttctctgctgaagctgactaattataacattttaggaaatgcagtgagtcctattgtgctgtaaaattaagagaaaactgctagacaattaactctccggttgtcctaaaaacacagtatttggctgatgtagttttttttgttcagactgataaacatgggaacttgaagagctgttctacagtttcgtgctgataatgcgaagcagagtgaaatgattgtgaccattgccatgtgtgctggttttgctggtggattggttgactggcctcatattcagttaccatgtaacaatggagtttgaacaatcctatagattcgatgtctatgcttgtgagcatgcctttcttctgacggttcaaaagtgaagaagtcctaccttgtcctcatttgtggcacatcagattttacctacttgtaaaaaaaaggaatattatttaaaaaaactacattaactaccttgtgaatgcattgaagaataaactaacatgtgattggttcgaacctgtaagatgtccgcctcctaacaaggaaacaagtacaagtgactctgtaaaatacactattagtgattcagaaaagccttattgatgaatgattacttgaattaaattttatcagttacatcagaacatgttttaacagtttggatccttcctagcattgctacttgctttttatcactctttgaacgcaagagttttcagtctgctctctgtaactacctatgaagataggtttctttcacacagtgatagaatttagaagtttcaataggccagtgagttggttttctttctgctctgttggggagggcagtgagtgcttctgctacagtcttaggaatgatggtaaagatgttgagcctttagttttattccaaagatgctctttgttacttgtcatccttacacaacctatattaacattagtttctaatgacttttcgcctaaatctggtgccctgatgtgtttatttaaatcttactattaccatctaattaatatagttgcacaaaaccatgttggttcgtcgacattagcttctgccttaaacaactgtaaggcgcctaatgttctagtatctgaaaaatgctcaaccttttttggctcaggccaccatgcgcagacagtgtcacacacccatgctgccattctgtcaaagtcaaacaggcagtatacgcgccaacgctagcaaacagggagagagcgagatggacggcattgtccacgcaaggggattccacggtgtagcgacctcacaattggtacgcccctgcatcggcatgcatccttatctcataagcgctgttggcaggtactacctgttgctactgattgactattccctgatgctgagtgattagtgcaatgttacatgtcggaatctaagatatctgaatattacctggaataag

SEQ ID NO: 54956 - DNA, 1237 bp, Zea Mays
ggcgggcccacacctgtgccgttataaagaaacgtaacacgtaggcagacggcgtcccgctggtgtggtggcgtcctttttttccgccgggagataaaccgaccggacccctgactgcgacccgcagctgctcctgcttccgatccgaacttctctcgcccgccggttcttcgcgagcaattcttataaagcatcatcatcaccacttgtgatgggtggaagccagtacgatgatgaatgggtgttgcccagtgccgatatcactcttgttcttgttgggaaacttggctatggaaagagtgcaactggaaatagcatccttggacgggaagcatttgtatcagaatattcacattctggtgttactaatacttgtcagctgggaagcactaccctgatggacggccggaccatcaatgttattgatacaccagggttatttgatatgagcattgcatcagacgatgctggtaaagagattgttaaatgtatgaacatggctaaagatgggatacatgcagttctaatggtttttagtggcacatctcggttttctcgagaggatgcaagtacaattgagactattaaggtcttttttggagaaaagattgttgaccacatggttttagtttttacttatggtgatctagttggtgaatctaagttgaagaacatgctcaatgatgcgccagagtatttgcagaatgttgttgagctatgccaaaacagagttgtcgtcttcgataacaggaccaaggaccgaaggctccaagcgcagcaacttgacaaattgctctatgtagtggactcggtttgtgcaaacaatggaggaaaaccatttacagatcaaatgttcactcgcatcaaggaggtgcatgatagggaaaaagaggtgcataccttgggatattcagatgagcagatatctgagttgaaggaggagattcatagaactagggatgaacagcttgcacagataaccagcatggtcgaggaaaagctaaaccgcactgtggagaagctgcaacagcagctcatggaggaacagaacgcaaggctggaggccgagaaggtggcgcatgaagctatgcggaaatcagaagcgcagatccaggagctgaaggagagactcgagaaggctcgactggaaaacgaggagttccggaggatggcgcagagcagtaaatgatgagtaagtaatcggatctctccatggtgttgcgtaattcaataaatc

SEQ ID NO: 54957 - DNA, 1812 bp, Zea Mays
ggcgggcccacacctgtgccgttataaagaaacgtaacacgtaggcagacggcgtcccgctggtgtggtggcgtcctttttttccgccgggagataaaccgaccggacccctgactgcgacccgcagctgctcctgcttccgatccgaacttctctcgcccgccggttcttcgcgagcaagtaattattaatcctctctactttccttcttcgttcgtctattctgcgcagtccgtcgtggattttggaacttccgacagaaattccgccgttcttataaagcatcatcatcaccacttgtgatgggtggaagccagtacgatgatgaatgggtgttgcccagtgccgatatcactcttgttcttgttgggaaacttggctatggaaagagtgcaactggaaatagcatccttggacgggaagcatttgtatcagaatattcacattctggtgttactaatacttgtcagctgggaagcactaccctgatggacggccggaccatcaatgttattgatacaccagggttatttgatatgagcattgcatcagacgatgctggtaaagagattgttaaatgtatgaacatggctaaagatgggatacatgcagttctaatggtttttagtggcacatctcggttttctcgagaggatgcaagtacaattgagactattaaggtcttttttggagaaaagattgttgaccacatggttttagtttttacttatggtgatctagttggtgaatctaagttgaagaacatgctcaatgatgcgccagagtatttgcagaatgttgttgagctatgccaaaacagagttgtcgtcttcgataacaggaccaaggaccgaaggctccaagcgcagcaacttgacaaattgctctatgtagtggactcggtttgtgcaaacaatggaggaaaaccatttacagatcaaatgttcactcgcatcaaggaggtgcatgatagggaaaaagaggtgcataccttgggatattcagatgagcagatatctgagttgaaggaggagattcatagaactagggatgaacagcttgcacagataaccagcatggtcgaggaaaagctaaaccgcactgtggagaagctgcaacagcagctcatggaggaacagaacgcaaggctggaggccgagaaggtggcgcatgaagctatgcggaaatcagaagcgcagatccaggagctgaaggagagactcgagaaggctcgactggaaaacgaggagttccggaggatggcgcagagcagtaaatgtgctatcctatagtacttgctagaaaaactctgtgcggctatcgtgctgacgcgtctcttttttttttgtctgtagcaccttttttaaccgtttatttattacgcgacaactgttatgaagacactgctttgcttccgtatattatcttcttttttgcgcaattattccatatatgcactgtacaacctagccactgctgtacggtattccaagtataagatacaacttaaatacaacataatacaatggtcatgtctaaaacatgtgtcttaccatattcattgtaccaatcaaagcattcaataaattaaaatgaccaatcaattagtctcctgtctcgaacatagagctaagacaatgtgtcttcgtcaagatacatgtcttgatttttttttagatttactttactagatacattctaagatataacttaagacaccttattgtacatgcctttatcgttgtgcttatcttccttgcaggatgagtaagtaatcggatctctccatggtgttgcgtaattcaataaatc

SEQ ID NO: 54958 - DNA, 1155 bp, Zea Mays
  misc_feature (1)..(1): n is a, c, g, or t
nagacatgttcacatggagttgcttgtaattttattcactgcttccgcaatcctggaggagattatgagtgggctgattgggacaatcatcctcctagatactggattaggaagatggttgctctttttggtccctcagttgatgagatgaatgaaaaggcgagtcataccccagattttagaagttcagtgggctctgataggaagaaacttaaaatttccagcaacagatatgtttcaagaggatctaggaacgaagatgtgcatacacgacactctcctcaagattattcacattctaagcaagaacgaagtagccacaacatgaattatgagtacagacgacataaaagagattcttcagcagcagataagcaccgaagacaagatgttggagatacaaatgacagacaattttcaacaatgggaaatgacagcaagtcccataggcataagcatgaagaacggcatagaagtgatcatggtaatggagaaaaagaagatgacagcaaaactaggcctaggaagcactgttctgttaggcgtggaagtttggaggttggatattctgactggtctccagacttcactggtacagacaacagcaagggtccttcaggtgagaagtccactagcagaggtcaggtagaagtacgaaggatgacaagagaaggaaacatcacagtggaaacaggtggcacagcggcactgaagagggtacctcagattcaagcggtggagatttgagctctgattcgtggagtggtagatcgagaaacagtgagaacttttcagcacacaggtcaaagaggaagcgaagtcggagcaaggagtctggttattagttgtaaatagttagcctctttttggagcacatgaattcgtaggaatcgtgcagaaattttacaggaatcggtttaacttcgcacgaaaaatttcccgcactccaaacatgcggtagtggcttcttgatattctactgtatgctttcaccgtttcgcttacaagttctgttactgtacactgcggtagtgcggttcatagcattgctcaattccggacccgttctcaagcgtctggctatgttaatacaggtattatttccgtgctatacctttcagaattttgatctcgatgaataacctcactgataaa

SEQ ID NO: 54959 - DNA, 1683 bp, Zea Mays
atgtcggccttagcggcgggcggtggcgccgccgccgatggtgccccggaggcgacagcggcgccgacaaggagggagaagcggagggagcggaagaaggagcgccgccggagggcgcggaggcaggccgcggcgcgcgctcgtgcggcggtcgaggcggaggcacccgcggtcgaccccgaggaggagcgccgactccttgagatccaggaggccgaggcggctgctgagtccgagcgtgcgctccgcgccttcgaggacgccgagcgccggtggctcgaggccgccgctgcccgcgccgcagagaaggccgcggctgctgcggccgaagaggatgcaagggctgcggaggcttccgctcgaaacaagcctaaagatggccaaggaaaccagtcagaagaagatagtgaatgggaatatgttgaagatggtccagcagaaattatatggaaaggaaatgagatcattgtgaagaagaaaaaggttaaagtaccaaaggggtccaaggaaaagctgcaaattcaggaggataaggcccattgtccatttcatctcaagacaggggcttgtcgctttggattgcgctgcagcagagttcacttttaccctgataaatcaatcacattgctaatgaaaaacatgtataacggtccaggccttgctttggagcaagatgaagggcttgaggtttgttagaggaaattctctaatgcataactttattgcatgttctttcgtgttatcttcagaacttcgacttgaggcatacagtgatcagaccagttgatttcacttgattgaggacgtcttgaactttgatctgctaatgtatcctaaattatcatggtcttgctgatgttgctgagctttttgatgttttctattgctattagaaatgtgcccaatatttgaaatcggtacatgtattgggtatcatttatcaagtagatccttgacaattttgataatattcgggaaattttaaatgttgaaccgttgaggagtatttcttttattggacgtctttggtgaccattagggtgacagttcacagatgaagagattgaacaaagctatgaagaattttatgaagatgtacatacagaatttctgaaatttggtgaacttgtgaatttcaaggtatgtagaaatgggtctttccatcttcgagggaatgtttatgtgcactataaatcgttggattcagctcttcttgcctacagcagcatgaatggacgctattttgctggaaaacaggtaatcactctatttccttcctcaagtattatgtgaggataattgttatagcttaagggagaaagtacaaattactactctgaaatttgtctggctggataaaccccctagaatattatattttatttcccaagctatttcagttggttcaatctactcctttataaagtttgtgtactaagttgagttttaagttatgttaaaaaagttacgtccggtatcaccccacaaaattgcactccctcctttaaaaattataagacattttagctttttctatatatgtagttttcactatgcatttagctatacattatatttaaatacatagtaaaaacaatgtatctagagaagccaaaatgccttataatttggaagagggaataagttgtaagtcagcttgtacatggagaaacaaaaaaaatg

SEQ ID NO: 54960 - DNA, 1441 bp, Zea Mays
atgtcggccttagcggcgggcggtggcgccgccgccgatggtgccccggaggcgacagcggcgccgacaaggagggagaagcggagggagcggaagaaggagcgccgccggagggcgcggaggcaggccgcggcgcgcgctcgtgcggcggtcgaggcggaggcacccgcggtcgaccccgaggaggagcgccgactccttgagatccaggaggccgaggcggctgctgagtccgagcgtgcgctccgcgccttcgaggacgccgagcgccggtggctcgaggccgccgctgcccgcgccgcagagaaggccgcggctgctgcggccgaagaggatgcaagggctgcggaggcttccgctcgaaacaagcctaaagatggccaaggaaaccagtcagaagaagatagtgaatgggaatatgttgaagatggtccagcagaaattatatggaaaggaaatgagatcattgtgaagaagaaaaaggttaaagtaccaaaggggtccaaggaaaagctgcaaattcaggaggataaggcccattgtccatttcatctcaagacaggggcttgtcgctttggattgcgctgcagcagagttcacttttaccctgataaatcaatcacattgctaatgaaaaacatgtataacggtccaggccttgctttggagcaagatgaagggcttgagactcgcgacagattgcatgttctttcgtgttatcttcagaacttcgacttgaggcatacagtgatcagaccagttgatttcacttgattgaggacgtcttgaactttgatctgctaatttcacagatgaagagattgaacaaagctatgaagaattttatgaagatgtacatacagaatttctgaaatttggtgaacttgtgaatttcaaggtatgtagaaatgggtctttccatcttcgagggaatgtttatgtgcactataaatcgttggattcagctcttcttgcctacagcagcatgaatggacgctattttgctggaaaacaggtaatcactctatttccttcctcaagtattatgtgaggataattgttatagcttaagggagaaagtacaaattactactctgaaatttgtctggctggataaaccccctagaatattatattttatttcccaagctatttcagttggttcaatctactcctttataaagtttgtgtactaagttgagttttaagttatgttaaaaaagttacgtccggtatcaccccacaaaattgcactccctcctttaaaaattataagacattttagctttttctatatatgtagttttcactatgcatttagctatacattatatttaaatacatagtaaaaacaatgtatctagagaagccaaaatgccttataatttggaagagggaataagttgtaagtcagcttgtacatggagaaacaaaaaaaatg

SEQ ID NO: 54961 - DNA, 1944 bp, Zea Mays
atgtcggccttagcggcgggcggtggcgccgccgccgatggtgccccggaggcgacagcggcgccgacaaggagggagaagcggagggagcggaagaaggagcgccgccggagggcgcggaggcaggccgcggcgcgcgctcgtgcggcggtcgaggcggaggcacccgcggtcgaccccgaggaggagcgccgactccttgagatccaggaggccgaggcggctgctgagtccgagcgtgcgctccgcgccttcgaggacgccgagcgccggtggctcgaggccgccgctgcccgcgccgcagagaaggccgcggctgctgcggccgaagaggatgcaagggctgcggaggcttccgctcgaaacaagcctaaagatggccaaggaaaccagtcagaagaagatagtgaatgggaatatgttgaagatggtccagcagaaattatatggaaaggaaatgagatcattgtgaagaagaaaaaggttaaagtaccaaaggggtccaaggaaaagctgcaaattcaggaggataaggcccattgtccatttcatctcaagacaggggcttgtcgctttggattgcgctgcagcagagttcacttttaccctgataaatcaatcacattgctaatgaaaaacatgtataacggtccaggccttgctttggagcaagatgaagggcttgaggtttgttagaggaaattctctaatgcataactttgtatccttaaactactgtttatttacgtttaaggatgctcaattttggtttcatgggcagtgccattttaagttgtgatagtttaatactaaagcaagctcatgtcaaaataacaagtattccactttaagcttgtaagcctttataagaagacatgagtataaataactgactacttggaactatttgaatttttttaatctactgctcaagataactcttaccccaagttttccttggctactatcagactcgcgacagattgcatgttctttcgtgttatcttcagaacttcgacttgaggcatacagtgatcagaccagttgatttcacttgattgaggacgtcttgaactttgatctgctaatgtatcctaaattatcatggtcttgctgatgttgctgagctttttgatgttttctattgctattagaaatgtgcccaatatttgaaatcggtacatgtattgggtatcatttatcaagtagatccttgacaattttgataatattcgggaaattttaaatgttgaaccgttgaggagtatttcttttattggacgtctttggtgaccattagggtgacagttcacagatgaagagattgaacaaagctatgaagaattttatgaagatgtacatacagaatttctgaaatttggtgaacttgtgaatttcaaggtatgtagaaatgggtctttccatcttcgagggaatgtttatgtgcactataaatcgttggattcagctcttcttgcctacagcagcatgaatggacgctattttgctggaaaacaggtaatcactctatttccttcctcaagtattatgtgaggataattgttatagcttaagggagaaagtacaaattactactctgaaatttgtctggctggataaaccccctagaatattatattttatttcccaagctatttcagttggttcaatctactcctttataaagtttgtgtactaagttgagttttaagttatgttaaaaaagttacgtccggtatcaccccacaaaattgcactccctcctttaaaaattataagacattttagctttttctatatatgtagttttcactatgcatttagctatacattatatttaaatacatagtaaaaacaatgtatctagagaagccaaaatgccttataatttggaagagggaataagttgtaagtcagcttgtacatggagaaacaaaaaaaatg

SEQ ID NO: 54962 - DNA, 1683 bp, Zea Mays
cgcgactcgccaacgccttttcccccgggccgctgcgatcgcgccctaccgggagaccggcgacggcgaatcgacgagctcgccatgtcggccttagcggcgggcggtggcgccgccgccgatggtgccccggaggcgacagcggcgccgacaaggagggagaagcggagggagcggaagaaggagcgccgccggagggcgcggaggcaggccgcggcgcgcgctcgtgcggcggtcgaggcggaggcacccgcggtcgaccccgaggaggagcgccgactccttgagatccaggaggccgaggcggctgctgagtccgagcgtgcgctccgcgccttcgaggacgccgagcgccggtggctcgaggccgccgctgcccgcgccgcagagaaggccgcggctgctgcggccgaagaggatgcaagggctgcggaggcttccgctcgaaacaagcctaaagatggccaaggaaaccagtcagaagaagatagtgaatgggaatatgttgaagatggtccagcagaaattatatggaaaggaaatgagatcattgtgaagaagaaaaaggttaaagtaccaaaggggtccaaggaaaagctgcaaattcaggaggaagatagacctacatcaaatccgctcccaccacagtctgttgctttggctgctcataggagagaaccttctttgtctgctcaagaagtacttgacaaagttgctcaagagactccgaattttggaacagaacaggataaggcccattgtccatttcatctcaagacaggggcttgtcgctttggattgcgctgcagcagagttcacttttaccctgataaatcaatcacattgctaatgaaaaacatgtataacggtccaggccttgctttggagcaagatgaagggcttgaggtttgttagaggaaattctctaatgcataactttattgcatgttctttcgtgttatcttcagaacttcgacttgaggcatacagtgatcagaccagttgatttcacttgattgaggacgtcttgaactttgatctgctaatttcacagatgaagagattgaacaaagctatgaagaattttatgaagatgtacatacagaatttctgaaatttggtgaacttgtgaatttcaaggtatgtagaaatgggtctttccatcttcgagggaatgtttatgtgcactataaatcgttggattcagctcttcttgcctacagcagcatgaatggacgctattttgctggaaaacaggtaatcactctatttccttcctcaagtattatgtgaggataattgttatagcttaagggagaaagtacaaattactactctgaaatttgtctggctggataaaccccctagaatattatattttatttcccaagctatttcagttggttcaatctactcctttataaagtttgtgtactaagttgagttttaagttatgttaaaaaagttacgtccggtatcaccccacaaaattgcactccctcctttaaaaattataagacattttagctttttctatatatgtagttttcactatgcatttagctatacattatatttaaatacatagtaaaaacaatgtatctagagaagccaaaatgccttataatttggaagagggaataagttgtaagtcagcttgtacatggagaaacaaaaaaaatg

SEQ ID NO: 54963 - DNA, 1706 bp, Zea Mays
cgcgactcgccaacgccttttcccccgggccgctgcgatcgcgccctaccgggagaccggcgacggcgaatcgacgagctcgccatgtcggccttagcggcgggcggtggcgccgccgccgatggtgccccggaggcgacagcggcgccgacaaggagggagaagcggagggagcggaagaaggagcgccgccggagggcgcggaggcaggccgcggcgcgcgctcgtgcggcggtcgaggcggaggcacccgcggtcgaccccgaggaggagcgccgactccttgagatccaggaggccgaggcggctgctgagtccgagcgtgcgctccgcgccttcgaggacgccgagcgccggtggctcgaggccgccgctgcccgcgccgcagagaaggccgcggctgctgcggccgaagaggatgcaagggctgcggaggcttccgctcgaaacaagcctaaagatggccaaggaaaccagtcagaagaagatagtgaatgggaatatgttgaagatggtccagcagaaattatatggaaaggaaatgagatcattgtgaagaagaaaaaggttaaagtaccaaaggggtccaaggaaaagctgcaaattcaggaggaagatagacctacatcaaatccgctcccaccacagtctgttgctttggctgctcataggagagaaccttctttgtctgctcaagaagtacttgacaaagttgctcaagagactccgaattttggaacagaacaggataaggcccattgtccatttcatctcaagacaggggcttgtcgctttggattgcgctgcagcagagttcacttttaccctgataaatcaatcacattgctaatgaaaaacatgtataacggtccaggccttgctttggagcaagatgaagggcttgagactcgcgacagattgcatgttctttcgtgttatcttcagaacttcgacttgaggcatacagtgatcagaccagttgatttcacttgattgaggacgtcttgaactttgatctgctaatgagtatttcttttattggacgtctttggtgaccattagggtgacagttcacagatgaagagattgaacaaagctatgaagaattttatgaagatgtacatacagaatttctgaaatttggtgaacttgtgaatttcaaggtatgtagaaatgggtctttccatcttcgagggaatgtttatgtgcactataaatcgttggattcagctcttcttgcctacagcagcatgaatggacgctattttgctggaaaacaggtaatcactctatttccttcctcaagtattatgtgaggataattgttatagcttaagggagaaagtacaaattactactctgaaatttgtctggctggataaaccccctagaatattatattttatttcccaagctatttcagttggttcaatctactcctttataaagtttgtgtactaagttgagttttaagttatgttaaaaaagttacgtccggtatcaccccacaaaattgcactccctcctttaaaaattataagacattttagctttttctatatatgtagttttcactatgcatttagctatacattatatttaaatacatagtaaaaacaatgtatctagagaagccaaaatgccttataatttggaagagggaataagttgtaagtcagcttgtacatggagaaacaaaaaaaatg

SEQ ID NO: 54964 - DNA, 1937 bp, Zea Mays
cgcgactcgccaacgccttttcccccgggccgctgcgatcgcgccctaccgggagaccggcgacggcgaatcgacgagctcgccatgtcggccttagcggcgggcggtggcgccgccgccgatggtgccccggaggcgacagcggcgccgacaaggagggagaagcggagggagcggaagaaggagcgccgccggagggcgcggaggcaggccgcggcgcgcgctcgtgcggcggtcgaggcggaggcacccgcggtcgaccccgaggaggagcgccgactccttgagatccaggaggccgaggcggctgctgagtccgagcgtgcgctccgcgccttcgaggacgccgagcgccggtggctcgaggccgccgctgcccgcgccgcagagaaggccgcggctgctgcggccgaagaggatgcaagggctgcggaggcttccgctcgaaacaagcctaaagatggccaaggaaaccagtcagaagaagatagtgaatgggaatatgttgaagatggtccagcagaaattatatggaaaggaaatgagatcattgtgaagaagaaaaaggttaaagtaccaaaggggtccaaggaaaagctgcaaattcaggaggaagatagacctacatcaaatccgctcccaccacagtctgttgctttggctgctcataggagagaaccttctttgtctgctcaagaagtacttgacaaagttgctcaagagactccgaattttggaacagaacaggataaggcccattgtccatttcatctcaagacaggggcttgtcgctttggattgcgctgcagcagagttcacttttaccctgataaatcaatcacattgctaatgaaaaacatgtataacggtccaggccttgctttggagcaagatgaagggcttgaggtttgttagaggaaattctctaatgcataactttgtatccttaaactactgtttatttacgtttaaggatgctcaattttggtttcatgggcagtgccattttaagttgtgatagtttaatactaaagcaagctcatgtcaaaataacaagtattccactttaagcttgtaagcctttataagaagacatgagtataaataactgactacttggaactatttgaatttttttaatctactgctcaagataactcttaccccaagttttccttggctactatcagactcgcgacagattgcatgttctttcgtgttatcttcagaacttcgacttgaggcatacagtgatcagaccagttgatttcacttgattgaggacgtcttgaactttgatctgctaatatgaagagattgaacaaagctatgaagaattttatgaagatgtacatacagaatttctgaaatttggtgaacttgtgaatttcaaggtatgtagaaatgggtctttccatcttcgagggaatgtttatgtgcactataaatcgttggattcagctcttcttgcctacagcagcatgaatggacgctattttgctggaaaacaggtaatcactctatttccttcctcaagtattatgtgaggataattgttatagcttaagggagaaagtacaaattactactctgaaatttgtctggctggataaaccccctagaatattatattttatttcccaagctatttcagttggttcaatctactcctttataaagtttgtgtactaagttgagttttaagttatgttaaaaaagttacgtccggtatcaccccacaaaattgcactccctcctttaaaaattataagacattttagctttttctatatatgtagttttcactatgcatttagctatacattatatttaaatacatagtaaaaacaatgtatctagagaagccaaaatgccttataatttggaagagggaataagttgtaagtcagcttgtacatggagaaacaaaaaaaatg

SEQ ID NO: 54965 - DNA, 1660 bp, Zea Mays
cgcgactcgccaacgccttttcccccgggccgctgcgatcgcgccctaccgggagaccggcgacggcgaatcgacgagctcgccatgtcggccttagcggcgggcggtggcgccgccgccgatggtgccccggaggcgacagcggcgccgacaaggagggagaagcggagggagcggaagaaggagcgccgccggagggcgcggaggcaggccgcggcgcgcgctcgtgcggcggtcgaggcggaggcacccgcggtcgaccccgaggaggagcgccgactccttgagatccaggaggccgaggcggctgctgagtccgagcgtgcgctccgcgccttcgaggacgccgagcgccggtggctcgaggccgccgctgcccgcgccgcagagaaggccgcggctgctgcggccgaagaggatgcaagggctgcggaggcttccgctcgaaacaagcctaaagatggccaaggaaaccagtcagaagaagatagtgaatgggaatatgttgaagatggtccagcagaaattatatggaaaggaaatgagatcattgtgaagaagaaaaaggttaaagtaccaaaggggtccaaggaaaagctgcaaattcaggaggaagatagacctacatcaaatccgctcccaccacagtctgttgctttggctgctcataggagagaaccttctttgtctgctcaagaagtacttgacaaagttgctcaagagactccgaattttggaacagaacaggataaggcccattgtccatttcatctcaagacaggggcttgtcgctttggattgcgctgcagcagagttcacttttaccctgataaatcaatcacattgctaatgaaaaacatgtataacggtccaggccttgctttggagcaagatgaagggcttgagactcgcgacagattgcatgttctttcgtgttatcttcagaacttcgacttgaggcatacagtgatcagaccagttgatttcacttgattgaggacgtcttgaactttgatctgctaatttcacagatgaagagattgaacaaagctatgaagaattttatgaagatgtacatacagaatttctgaaatttggtgaacttgtgaatttcaaggtatgtagaaatgggtctttccatcttcgagggaatgtttatgtgcactataaatcgttggattcagctcttcttgcctacagcagcatgaatggacgctattttgctggaaaacaggtaatcactctatttccttcctcaagtattatgtgaggataattgttatagcttaagggagaaagtacaaattactactctgaaatttgtctggctggataaaccccctagaatattatattttatttcccaagctatttcagttggttcaatctactcctttataaagtttgtgtactaagttgagttttaagttatgttaaaaaagttacgtccggtatcaccccacaaaattgcactccctcctttaaaaattataagacattttagctttttctatatatgtagttttcactatgcatttagctatacattatatttaaatacatagtaaaaacaatgtatctagagaagccaaaatgccttataatttggaagagggaataagttgtaagtcagcttgtacatggagaaacaaaaaaaatg

SEQ ID NO: 54966 - DNA, 1726 bp, Zea Mays
cgcgactcgccaacgccttttcccccgggccgctgcgatcgcgccctaccgggagaccggcgacggcgaatcgacgagctcgccatgtcggccttagcggcgggcggtggcgccgccgccgatggtgccccggaggcgacagcggcgccgacaaggagggagaagcggagggagcggaagaaggagcgccgccggagggcgcggaggcaggccgcggcgcgcgctcgtgcggcggtcgaggcggaggcacccgcggtcgaccccgaggaggagcgccgactccttgagatccaggaggccgaggcggctgctgagtccgagcgtgcgctccgcgccttcgaggacgccgagcgccggtggctcgaggccgccgctgcccgcgccgcagagaaggccgcggctgctgcggccgaagaggatgcaagggctgcggaggcttccgctcgaaacaagcctaaagatggccaaggaaaccagtcagaagaagatagtgaatgggaatatgttgaagatggtccagcagaaattatatggaaaggaaatgagatcattgtgaagaagaaaaaggttaaagtaccaaaggggtccaaggaaaagctgcaaattcaggaggaagatagacctacatcaaatccgctcccaccacagtctgttgctttggctgctcataggagagaaccttctttgtctgctcaagaagtacttgacaaagttgctcaagagactccgaattttggaacagaacaggataaggcccattgtccatttcatctcaagacaggggcttgtcgctttggattgcgctgcagcagagttcacttttaccctgataaatcaatcacattgctaatgaaaaacatgtataacggtccaggccttgctttggagcaagatgaagggcttgaggtttgttagaggaaattctctaatgcataactttattgcatgttctttcgtgttatcttcagaacttcgacttgaggcatacagtgatcagaccagttgatttcacttgattgaggacgtcttgaactttgatctgctaattatttcttttattggacgtctttggtgaccattagggtgacagttcacagatgaagagattgaacaaagctatgaagaattttatgaagatgtacatacagaatttctgaaatttggtgaacttgtgaatttcaaggtatgtagaaatgggtctttccatcttcgagggaatgtttatgtgcactataaatcgttggattcagctcttcttgcctacagcagcatgaatggacgctattttgctggaaaacaggtaatcactctatttccttcctcaagtattatgtgaggataattgttatagcttaagggagaaagtacaaattactactctgaaatttgtctggctggataaaccccctagaatattatattttatttcccaagctatttcagttggttcaatctactcctttataaagtttgtgtactaagttgagttttaagttatgttaaaaaagttacgtccggtatcaccccacaaaattgcactccctcctttaaaaattataagacattttagctttttctatatatgtagttttcactatgcatttagctatacattatatttaaatacatagtaaaaacaatgtatctagagaagccaaaatgccttataatttggaagagggaataagttgtaagtcagcttgtacatggagaaacaaaaaaaatg

SEQ ID NO: 54967 - DNA, 1936 bp, Zea Mays
cgcgactcgccaacgccttttcccccgggccgctgcgatcgcgccctaccgggagaccggcgacggcgaatcgacgagctcgccatgtcggccttagcggcgggcggtggcgccgccgccgatggtgccccggaggcgacagcggcgccgacaaggagggagaagcggagggagcggaagaaggagcgccgccggagggcgcggaggcaggccgcggcgcgcgctcgtgcggcggtcgaggcggaggcacccgcggtcgaccccgaggaggagcgccgactccttgagatccaggaggccgaggcggctgctgagtccgagcgtgcgctccgcgccttcgaggacgccgagcgccggtggctcgaggccgccgctgcccgcgccgcagagaaggccgcggctgctgcggccgaagaggatgcaagggctgcggaggcttccgctcgaaacaagcctaaagatggccaaggaaaccagtcagaagaagatagtgaatgggaatatgttgaagatggtccagcagaaattatatggaaaggaaatgagatcattgtgaagaagaaaaaggttaaagtaccaaaggggtccaaggaaaagctgcaaattcaggaggaagatagacctacatcaaatccgctcccaccacagtctgttgctttggctgctcataggagagaaccttctttgtctgctcaagaagtacttgacaaagttgctcaagagactccgaattttggaacagaacaggataaggcccattgtccatttcatctcaagacaggggcttgtcgctttggattgcgctgcagcagagttcacttttaccctgataaatcaatcacattgctaatgaaaaacatgtataacggtccaggccttgctttggagcaagatgaagggcttgaggtttgttagaggaaattctctaatgcataactttgtatccttaaactactgtttatttacgtttaaggatgctcaattttggtttcatgggcagtgccattttaagttgtgatagtttaatactaaagcaagctcatgtcaaaataacaagtattccactttaagcttgtaagcctttataagaagacatgagtataaataactgactacttggaactatttgaatttttttaatctactgctcaagataactcttaccccaagttttccttggctactatcagactcgcgacagattgcatgttctttcgtgttatcttcagaacttcgacttgaggcatacagtgatcagaccagttgatttcacttgattgaggacgtcttgaactttgatctgctaatttcacagatgaagagattgaacaaagctatgaagaattttatgaagatgtacatacagaatttctgaaatttggtgaacttgtgaatttcaagaaatgggtctttccatcttcgagggaatgtttatgtgcactataaatcgttggattcagctcttcttgcctacagcagcatgaatggacgctattttgctggaaaacaggtaatcactctatttccttcctcaagtattatgtgaggataattgttatagcttaagggagaaagtacaaattactactctgaaatttgtctggctggataaaccccctagaatattatattttatttcccaagctatttcagttggttcaatctactcctttataaagtttgtgtactaagttgagttttaagttatgttaaaaaagttacgtccggtatcaccccacaaaattgcactccctcctttaaaaattataagacattttagctttttctatatatgtagttttcactatgcatttagctatacattatatttaaatacatagtaaaaacaatgtatctagagaagccaaaatgccttataatttggaagagggaataagttgtaagtcagcttgtacatggagaaacaaaaaaaatg

SEQ ID NO: 54968 - DNA, 1944 bp, Zea Mays
cgcgactcgccaacgccttttcccccgggccgctgcgatcgcgccctaccgggagaccggcgacggcgaatcgacgagctcgccatgtcggccttagcggcgggcggtggcgccgccgccgatggtgccccggaggcgacagcggcgccgacaaggagggagaagcggagggagcggaagaaggagcgccgccggagggcgcggaggcaggccgcggcgcgcgctcgtgcggcggtcgaggcggaggcacccgcggtcgaccccgaggaggagcgccgactccttgagatccaggaggccgaggcggctgctgagtccgagcgtgcgctccgcgccttcgaggacgccgagcgccggtggctcgaggccgccgctgcccgcgccgcagagaaggccgcggctgctgcggccgaagaggatgcaagggctgcggaggcttccgctcgaaacaagcctaaagatggccaaggaaaccagtcagaagaagatagtgaatgggaatatgttgaagatggtccagcagaaattatatggaaaggaaatgagatcattgtgaagaagaaaaaggttaaagtaccaaaggggtccaaggaaaagctgcaaattcaggaggaagatagacctacatcaaatccgctcccaccacagtctgttgctttggctgctcataggagagaaccttctttgtctgctcaagaagtacttgacaaagttgctcaagagactccgaattttggaacagaacaggataaggcccattgtccatttcatctcaagacaggggcttgtcgctttggattgcgctgcagcagagttcacttttaccctgataaatcaatcacattgctaatgaaaaacatgtataacggtccaggccttgctttggagcaagatgaagggcttgaggtttgttagaggaaattctctaatgcataactttgtatccttaaactactgtttatttacgtttaaggatgctcaattttggtttcatgggcagtgccattttaagttgtgatagtttaatactaaagcaagctcatgtcaaaataacaagtattccactttaagcttgtaagcctttataagaagacatgagtataaataactgactacttggaactatttgaatttttttaatctactgctcaagataactcttaccccaagttttccttggctactatcagactcgcgacagattgcatgttctttcgtgttatcttcagaacttcgacttgaggcatacagtgatcagaccagttgatttcacttgattgaggacgtcttgaactttgatctgctaatttcacagatgaagagattgaacaaagctatgaagaattttatgaagatgtacatacagaatttctgaaatttggtgaacttgtgaatttcaaggtatgtagaaatgggtctttccatcttcgagggaatgtttatgtgcactataaatcgttggattcagctcttcttgcctacagcagcatgaatggacgctattttgctggaaaacaggtaatcactctatttccttcctcaagtattatgtgaggataattgttatagcttaagggagaaagtacaaattactactctgaaatttgtctggctggataaaccccctagaatattatattttatttcccaagctatttcagttggttcaatctactcctttataaagtttgtgtactaagttgagttttaagttatgttaaaaaagttacgtccggtatcaccccacaaaattgcactccctcctttaaaaattataagacattttagctttttctatatatgtagttttcactatgcatttagctatacattatatttaaatacatagtaaaaacaatgtatctagagaagccaaaatgccttataatttggaagagggaataagttgtaagtcagcttgtacatggagaaacaaaaaaaatg

SEQ ID NO: 54969 - DNA, 1542 bp, Zea Mays
cgcgactcgccaacgccttttcccccgggccgctgcgatcgcgccctaccgggagaccggcgacggcgaatcgacgagctcgccatgtcggccttagcggcgggcggtggcgccgccgccgatggtgccccggaggcgacagcggcgccgacaaggagggagaagcggagggagcggaagaaggagcgccgccggagggcgcggaggcaggccgcggcgcgcgctcgtgcggcggtcgaggcggaggcacccgcggtcgaccccgaggaggagcgccgactccttgagatccaggaggccgaggcggctgctgagtccgagcgtgcgctccgcgccttcgaggacgccgagcgccggtggctcgaggccgccgctgcccgcgccgcagagaaggccgcggctgctgcggccgaagaggatgcaagggctgcggaggcttccgctcgaaacaagcctaaagatggccaaggaaaccagtcagaagaagatagtgaatgggaatatgttgaagatggtccagcagaaattatatggaaaggaaatgagatcattgtgaagaagaaaaaggttaaagtaccaaaggggtccaaggaaaagctgcaaattcaggaggaagatagacctacatcaaatccgctcccaccacagtctgttgctttggctgctcataggagagaaccttctttgtctgctcaagaagtacttgacaaagttgctcaagagactccgaattttggaacagaacaggataaggcccattgtccatttcatctcaagacaggggcttgtcgctttggattgcgctgcagcagagttcacttttaccctgataaatcaatcacattgctaatgaaaaacatgtataacggtccaggccttgctttggagcaagatgaagggcttgagttcacagatgaagagattgaacaaagctatgaagaattttatgaagatgtacatacagaatttctgaaatttggtgaacttgtgaatttcaaggtatgtagaaatgggtctttccatcttcgagggaatgtttatgtgcactataaatcgttggattcagctcttcttgcctacagcagcatgaatggacgctattttgctggaaaacaggtaatcactctatttccttcctcaagtattatgtgaggataattgttatagcttaagggagaaagtacaaattactactctgaaatttgtctggctggataaaccccctagaatattatattttatttcccaagctatttcagttggttcaatctactcctttataaagtttgtgtactaagttgagttttaagttatgttaaaaaagttacgtccggtatcaccccacaaaattgcactccctcctttaaaaattataagacattttagctttttctatatatgtagttttcactatgcatttagctatacattatatttaaatacatagtaaaaacaatgtatctagagaagccaaaatgccttataatttggaagagggaataagttgtaagtcagcttgtacatggagaaacaaaaaaaatg

SEQ ID NO: 54970 - DNA, 2163 bp, Zea Mays
cgcgactcgccaacgccttttcccccgggccgctgcgatcgcgccctaccgggagaccggcgacggcgaatcgacgagctcgccatgtcggccttagcggcgggcggtggcgccgccgccgatggtgccccggaggcgacagcggcgccgacaaggagggagaagcggagggagcggaagaaggagcgccgccggagggcgcggaggcaggccgcggcgcgcgctcgtgcggcggtcgaggcggaggcacccgcggtcgaccccgaggaggagcgccgactccttgagatccaggaggccgaggcggctgctgagtccgagcgtgcgctccgcgccttcgaggacgccgagcgccggtggctcgaggccgccgctgcccgcgccgcagagaaggccgcggctgctgcggccgaagaggatgcaagggctgcggaggcttccgctcgaaacaagcctaaagatggccaaggaaaccagtcagaagaagatagtgaatgggaatatgttgaagatggtccagcagaaattatatggaaaggaaatgagatcattgtgaagaagaaaaaggttaaagtaccaaaggggtccaaggaaaagctgcaaattcaggaggaagatagacctacatcaaatccgctcccaccacagtctgttgctttggctgctcataggagagaaccttctttgtctgctcaagaagtacttgacaaagttgctcaagagactccgaattttggaacagaacaggataaggcccattgtccatttcatctcaagacaggggcttgtcgctttggattgcgctgcagcagagttcacttttaccctgataaatcaatcacattgctaatgaaaaacatgtataacggtccaggccttgctttggagcaagatgaagggcttgaggtttgttagaggaaattctctaatgcataactttgtatccttaaactactgtttatttacgtttaaggatgctcaattttggtttcatgggcagtgccattttaagttgtgatagtttaatactaaagcaagctcatgtcaaaataacaagtattccactttaagcttgtaagcctttataagaagacatgagtataaataactgactacttggaactatttgaatttttttaatctactgctcaagataactcttaccccaagttttccttggctactatcagactcgcgacagattgcatgttctttcgtgttatcttcagaacttcgacttgaggcatacagtgatcagaccagttgatttcacttgattgaggacgtcttgaactttgatctgctaatgtatcctaaattatcatggtcttgctgatgttgctgagctttttgatgttttctattgctattagaaatgtgcccaatatttgaaatcggtacatgtattgggtatcatttatcaagtagatccttgacaattttgataatattcgggaaattttaaatgttgaaccgttgaggagtatttcttttattggacgtctttggtgaccattagggtgacagttcacagatgaagagattgaacaaagctatgaagaattttatgaagatgtacatacagaatttctgaaatttggtgaacttgtgaatttcaaggtatgtagaaatgggtctttccatcttcgagggaatgtttatgtgcactataaatcgttggattcagctcttcttgcctacagcagcatgaatggacgctattttgctggaaaacaggtaatcactctatttccttcctcaagtattatgtgaggataattgttatagcttaagggagaaagtacaaattactactctgaaatttgtctggctggataaaccccctagaatattatattttatttcccaagctatttcagttggttcaatctactcctttataaagtttgtgtactaagttgagttttaagttatgttaaaaaagttacgtccggtatcaccccacaaaattgcactccctcctttaaaaattataagacattttagctttttctatatatgtagttttcactatgcatttagctatacattatatttaaatacatagtaaaaacaatgtatctagagaagccaaaatgccttataatttggaagagggaataagttgtaagtcagcttgtacatggagaaacaaaaaaaatg

SEQ ID NO: 54971 - DNA, 1640 bp, Zea Mays
cgcgactcgccaacgccttttcccccgggccgctgcgatcgcgccctaccgggagaccggcgacggcgaatcgacgagctcgccatgtcggccttagcggcgggcggtggcgccgccgccgatggtgccccggaggcgacagcggcgccgacaaggagggagaagcggagggagcggaagaaggagcgccgccggagggcgcggaggcaggccgcggcgcgcgctcgtgcggcggtcgaggcggaggcacccgcggtcgaccccgaggaggagcgccgactccttgagatccaggaggccgaggcggctgctgagtccgagcgtgcgctccgcgccttcgaggacgccgagcgccggtggctcgaggccgccgctgcccgcgccgcagagaaggccgcggctgctgcggccgaagaggatgcaagggctgcggaggcttccgctcgaaacaagcctaaagatggccaaggaaaccagtcagaagaagatagtgaatgggaatatgttgaagatggtccagcagaaattatatggaaaggaaatgagatcattgtgaagaagaaaaaggttaaagtaccaaaggggtccaaggaaaagctgcaaattcaggaggaagatagacctacatcaaatccgctcccaccacagtctgttgctttggctgctcataggagagaaccttctttgtctgctcaagaagtacttgacaaagttgctcaagagactccgaattttggaacagaacaggataaggcccattgtccatttcatctcaagacaggggcttgtcgctttggattgcgctgcagcagagttcacttttaccctgataaatcaatcacattgctaatgaaaaacatgtataacggtccaggccttgctttggagcaagatgaagggcttgagactcgcgacagattgcatgttctttcgtgttatcttcagaacttcgacttgaggcatacagtgatcagaccagttgatttcacttgattgaggacgtcttgaactttgatctgctaatttcacagatgaagagattgaacaaagctatgaagaattttatgaagatgtacatacagaatttctgaaatttggtgaacttgtgaatttcaagggtcgtggttgccttagtgagagagagttggagaattagcttacaattaaattgatcatggtttatcggtatttcttaagctctacatgaggagactggttcactttagtagtccactgctattgcatactagaatatgtccaaacttctgaagacttagggggcatttggttccctagctagttttccttaccttgctatgctaggctagagaacctttgctaggcaaggtgagcagattttgctttctgaccacagcacggtaaatccttggcagcacagacctcaagataggcttaccaactattcaaatgcatgtccctgttctgcattgtctctcagcaaggctaaacagtccctggtaaagaattcaaacgcaaacttagtcttagctaagcattttaacctcacctcgctattcgcatatatgattgactgttagacctctttctatttttatctttctacttactagaatgcacaccacttgttactatgggcgaagttaaattttgacacaaat

SEQ ID NO: 54972 - DNA, 1924 bp, Zea Mays
cgcgactcgccaacgccttttcccccgggccgctgcgatcgcgccctaccgggagaccggcgacggcgaatcgacgagctcgccatgtcggccttagcggcgggcggtggcgccgccgccgatggtgccccggaggcgacagcggcgccgacaaggagggagaagcggagggagcggaagaaggagcgccgccggagggcgcggaggcaggccgcggcgcgcgctcgtgcggcggtcgaggcggaggcacccgcggtcgaccccgaggaggagcgccgactccttgagatccaggaggccgaggcggctgctgagtccgagcgtgcgctccgcgccttcgaggacgccgagcgccggtggctcgaggccgccgctgcccgcgccgcagagaaggccgcggctgctgcggccgaagaggatgcaagggctgcggaggcttccgctcgaaacaagcctaaagatggccaaggaaaccagtcagaagaagatagtgaatgggaatatgttgaagatggtccagcagaaattatatggaaaggaaatgagatcattgtgaagaagaaaaaggttaaagtaccaaaggggtccaaggaaaagctgcaaattcaggaggaagatagacctacatcaaatccgctcccaccacagtctgttgctttggctgctcataggagagaaccttctttgtctgctcaagaagtacttgacaaagttgctcaagagactccgaattttggaacagaacaggataaggcccattgtccatttcatctcaagacaggggcttgtcgctttggattgcgctgcagcagagttcacttttaccctgataaatcaatcacattgctaatgaaaaacatgtataacggtccaggccttgctttggagcaagatgaagggcttgaggtttgttagaggaaattctctaatgcataactttgtatccttaaactactgtttatttacgtttaaggatgctcaattttggtttcatgggcagtgccattttaagttgtgatagtttaatactaaagcaagctcatgtcaaaataacaagtattccactttaagcttgtaagcctttataagaagacatgagtataaataactgactacttggaactatttgaatttttttaatctactgctcaagataactcttaccccaagttttccttggctactatcagactcgcgacagattgcatgttctttcgtgttatcttcagaacttcgacttgaggcatacagtgatcagaccagttgatttcacttgattgaggacgtcttgaactttgatctgctaatttcacagatgaagagattgaacaaagctatgaagaattttatgaagatgtacatacagaatttctgaaatttggtgaacttgtgaatttcaagggtcgtggttgccttagtgagagagagttggagaattagcttacaattaaattgatcatggtttatcggtatttcttaagctctacatgaggagactggttcactttagtagtccactgctattgcatactagaatatgtccaaacttctgaagacttagggggcatttggttccctagctagttttccttaccttgctatgctaggctagagaacctttgctaggcaaggtgagcagattttgctttctgaccacagcacggtaaatccttggcagcacagacctcaagataggcttaccaactattcaaatgcatgtccctgttctgcattgtctctcagcaaggctaaacagtccctggtaaagaattcaaacgcaaacttagtcttagctaagcattttaacctcacctcgctattcgcatatatgattgactgttagacctctttctatttttatctttctacttactagaatgcacaccacttgttactatgggcgaagttaaattttgacacaaat

SEQ ID NO: 54973 - DNA, 1522 bp, Zea Mays
cgcgactcgccaacgccttttcccccgggccgctgcgatcgcgccctaccgggagaccggcgacggcgaatcgacgagctcgccatgtcggccttagcggcgggcggtggcgccgccgccgatggtgccccggaggcgacagcggcgccgacaaggagggagaagcggagggagcggaagaaggagcgccgccggagggcgcggaggcaggccgcggcgcgcgctcgtgcggcggtcgaggcggaggcacccgcggtcgaccccgaggaggagcgccgactccttgagatccaggaggccgaggcggctgctgagtccgagcgtgcgctccgcgccttcgaggacgccgagcgccggtggctcgaggccgccgctgcccgcgccgcagagaaggccgcggctgctgcggccgaagaggatgcaagggctgcggaggcttccgctcgaaacaagcctaaagatggccaaggaaaccagtcagaagaagatagtgaatgggaatatgttgaagatggtccagcagaaattatatggaaaggaaatgagatcattgtgaagaagaaaaaggttaaagtaccaaaggggtccaaggaaaagctgcaaattcaggaggaagatagacctacatcaaatccgctcccaccacagtctgttgctttggctgctcataggagagaaccttctttgtctgctcaagaagtacttgacaaagttgctcaagagactccgaattttggaacagaacaggataaggcccattgtccatttcatctcaagacaggggcttgtcgctttggattgcgctgcagcagagttcacttttaccctgataaatcaatcacattgctaatgaaaaacatgtataacggtccaggccttgctttggagcaagatgaagggcttgagttcacagatgaagagattgaacaaagctatgaagaattttatgaagatgtacatacagaatttctgaaatttggtgaacttgtgaatttcaagggtcgtggttgccttagtgagagagagttggagaattagcttacaattaaattgatcatggtttatcggtatttcttaagctctacatgaggagactggttcactttagtagtccactgctattgcatactagaatatgtccaaacttctgaagacttagggggcatttggttccctagctagttttccttaccttgctatgctaggctagagaacctttgctaggcaaggtgagcagattttgctttctgaccacagcacggtaaatccttggcagcacagacctcaagataggcttaccaactattcaaatgcatgtccctgttctgcattgtctctcagcaaggctaaacagtccctggtaaagaattcaaacgcaaacttagtcttagctaagcattttaacctcacctcgctattcgcatatatgattgactgttagacctctttctatttttatctttctacttactagaatgcacaccacttgttactatgggcgaagttaaattttgacacaaat

SEQ ID NO: 54974 - DNA, 2143 bp, Zea Mays
cgcgactcgccaacgccttttcccccgggccgctgcgatcgcgccctaccgggagaccggcgacggcgaatcgacgagctcgccatgtcggccttagcggcgggcggtggcgccgccgccgatggtgccccggaggcgacagcggcgccgacaaggagggagaagcggagggagcggaagaaggagcgccgccggagggcgcggaggcaggccgcggcgcgcgctcgtgcggcggtcgaggcggaggcacccgcggtcgaccccgaggaggagcgccgactccttgagatccaggaggccgaggcggctgctgagtccgagcgtgcgctccgcgccttcgaggacgccgagcgccggtggctcgaggccgccgctgcccgcgccgcagagaaggccgcggctgctgcggccgaagaggatgcaagggctgcggaggcttccgctcgaaacaagcctaaagatggccaaggaaaccagtcagaagaagatagtgaatgggaatatgttgaagatggtccagcagaaattatatggaaaggaaatgagatcattgtgaagaagaaaaaggttaaagtaccaaaggggtccaaggaaaagctgcaaattcaggaggaagatagacctacatcaaatccgctcccaccacagtctgttgctttggctgctcataggagagaaccttctttgtctgctcaagaagtacttgacaaagttgctcaagagactccgaattttggaacagaacaggataaggcccattgtccatttcatctcaagacaggggcttgtcgctttggattgcgctgcagcagagttcacttttaccctgataaatcaatcacattgctaatgaaaaacatgtataacggtccaggccttgctttggagcaagatgaagggcttgaggtttgttagaggaaattctctaatgcataactttgtatccttaaactactgtttatttacgtttaaggatgctcaattttggtttcatgggcagtgccattttaagttgtgatagtttaatactaaagcaagctcatgtcaaaataacaagtattccactttaagcttgtaagcctttataagaagacatgagtataaataactgactacttggaactatttgaatttttttaatctactgctcaagataactcttaccccaagttttccttggctactatcagactcgcgacagattgcatgttctttcgtgttatcttcagaacttcgacttgaggcatacagtgatcagaccagttgatttcacttgattgaggacgtcttgaactttgatctgctaatgtatcctaaattatcatggtcttgctgatgttgctgagctttttgatgttttctattgctattagaaatgtgcccaatatttgaaatcggtacatgtattgggtatcatttatcaagtagatccttgacaattttgataatattcgggaaattttaaatgttgaaccgttgaggagtatttcttttattggacgtctttggtgaccattagggtgacagttcacagatgaagagattgaacaaagctatgaagaattttatgaagatgtacatacagaatttctgaaatttggtgaacttgtgaatttcaagggtcgtggttgccttagtgagagagagttggagaattagcttacaattaaattgatcatggtttatcggtatttcttaagctctacatgaggagactggttcactttagtagtccactgctattgcatactagaatatgtccaaacttctgaagacttagggggcatttggttccctagctagttttccttaccttgctatgctaggctagagaacctttgctaggcaaggtgagcagattttgctttctgaccacagcacggtaaatccttggcagcacagacctcaagataggcttaccaactattcaaatgcatgtccctgttctgcattgtctctcagcaaggctaaacagtccctggtaaagaattcaaacgcaaacttagtcttagctaagcattttaacctcacctcgctattcgcatatatgattgactgttagacctctttctatttttatctttctacttactagaatgcacaccacttgttactatgggcgaagttaaattttgacacaaat

SEQ ID NO: 54975 - DNA, 1859 bp, Zea Mays
cgcgactcgccaacgccttttcccccgggccgctgcgatcgcgccctaccgggagaccggcgacggcgaatcgacgagctcgccatgtcggccttagcggcgggcggtggcgccgccgccgatggtgccccggaggcgacagcggcgccgacaaggagggagaagcggagggagcggaagaaggagcgccgccggagggcgcggaggcaggccgcggcgcgcgctcgtgcggcggtcgaggcggaggcacccgcggtcgaccccgaggaggagcgccgactccttgagatccaggaggccgaggcggctgctgagtccgagcgtgcgctccgcgccttcgaggacgccgagcgccggtggctcgaggccgccgctgcccgcgccgcagagaaggccgcggctgctgcggccgaagaggatgcaagggctgcggaggcttccgctcgaaacaagcctaaagatggccaaggaaaccagtcagaagaagatagtgaatgggaatatgttgaagatggtccagcagaaattatatggaaaggaaatgagatcattgtgaagaagaaaaaggttaaagtaccaaaggggtccaaggaaaagctgcaaattcaggaggaagatagacctacatcaaatccgctcccaccacagtctgttgctttggctgctcataggagagaaccttctttgtctgctcaagaagtacttgacaaagttgctcaagagactccgaattttggaacagaacaggataaggcccattgtccatttcatctcaagacaggggcttgtcgctttggattgcgctgcagcagagttcacttttaccctgataaatcaatcacattgctaatgaaaaacatgtataacggtccaggccttgctttggagcaagatgaagggcttgagactcgcgacagattgcatgttctttcgtgttatcttcagaacttcgacttgaggcatacagtgatcagaccagttgatttcacttgattgaggacgtcttgaactttgatctgctaatgtatcctaaattatcatggtcttgctgatgttgctgagctttttgatgttttctattgctattagaaatgtgcccaatatttgaaatcggtacatgtattgggtatcatttatcaagtagatccttgacaattttgataatattcgggaaattttaaatgttgaaccgttgaggagtatttcttttattggacgtctttggtgaccattagggtgacagttcacagatgaagagattgaacaaagctatgaagaattttatgaagatgtacatacagaatttctgaaatttggtgaacttgtgaatttcaagggtcgtggttgccttagtgagagagagttggagaattagcttacaattaaattgatcatggtttatcggtatttcttaagctctacatgaggagactggttcactttagtagtccactgctattgcatactagaatatgtccaaacttctgaagacttagggggcatttggttccctagctagttttccttaccttgctatgctaggctagagaacctttgctaggcaaggtgagcagattttgctttctgaccacagcacggtaaatccttggcagcacagacctcaagataggcttaccaactattcaaatgcatgtccctgttctgcattgtctctcagcaaggctaaacagtccctggtaaagaattcaaacgcaaacttagtcttagctaagcattttaacctcacctcgctattcgcatatatgattgactgttagacctctttctatttttatctttctacttactagaatgcacaccacttgttactatgggcgaagttaaattttgacacaaat

SEQ ID NO: 54976 - DNA, 2842 bp, Zea Mays
ctcgactccaggccaaggcagccagcctacccagacaaccaaacgaacccgcccggagcagcaaagcataggcgctcgagcgctccctcctgagctcctccgcctcacggtcacgcctcgtgtccccccaccccctcctcgtcctccaccggccgcctcacgccgtcacctccgctcggcgagtctcggctccgaccccagccgccacgtgcgacctcccctactcctgactcctgagagatctgcggggctcggcatggggtgaccagatcgggccgctgctcggtgctttccagctgaattctgcccgcagctcgtgtcggaggcagcggagatggcggaggccggcgtggcacgcggctcagggagtgctggcgatgctttgttcagggaactctggcatgcttgtgctgggccgttggtcacagtgcctcgccaaggcgagctggtttattacttcccgcagggtcatatggaacagcttgaagcgtctacagatcaacaacttgatcagcacttgcctttgtttaatctaccgcacaagatcctctgcaaggtggtcaatgtagaacttagagctgaaactgattctgatgaagtttatgctcaaattatgctgcaaccacaaacagagcaaagtgagcccaccagcccagatcctgaaccacctgagcctgaaagatgcaacattcattccttctgcaagaccttgactgcttcagatacaagtacccatggtggattctctgtcctcaggaggcatgctgaagaatgtttgccccaactggacatgactcagaatccaccgtggcaagaactagtggctaaagatctccatggaaatgaatggcatttccgtcacatctttcgagggcaaccaaggaggcatctacttacaacaggctggagtgtttttgttagctcaaaaagattggttgcgggtgacgcgtttatcttcttgagaggtgagaacggagagctgcgagtcggggtaaggaggctcatgagacaactaaataacatgccgtcttcggttatctcaagccacagcatgcatcttggagtcctagcaactgcatctcatgccatctccactggaactctcttttctgttttctacaaacccagaacaagtagatctgaatttgtcgttagtgtaaacaagtacctcgaagctaagaatcacaagatgtctgttggtatgaggtttaaaatgagatttgagggtgatgaatcccctgaaagaagattcagtgggacaattattggtatgggatgcatgccagctaactcaacatctccatgggctaactctgaatggagatcattgaaggtccaatgggacgagccttccgctattctgcgtccagatagagtttcaccatgggaagtagaaccccttgatcgaacaaatccacagccacctcaacctcctttacggaataagcgagcacggcctcctgcttcaccttcgattgctccagaacttgctccagtttttggtttttggaagtccccagctgagcctgcccaagctttctcattctcaggactgcagcgaactcaggagctataccattcaagccccagttcaatgttctcatcgtcgttgaatgtgggattcaatccaaagtacgagggtcccactccaaacaccaaccatttgtactggacaatgagagagacaagaactgaatcctactccgctagtatcaacaaagctccaactgaaaagaagcaagaatccactacttctggctgcagattgttcggtatcgagataggttcttctgcagtgtcacccgtggttactgttgctagcgtcgggcatgatcctccgccacctgctctctcagtagacgctgaatctgaccagctgtcacagccgtcccatgccaacaaagcaacggatgccccagcggcaagcagcgatcgctctcctaacgagacagagagccggcaagccaggagctgcaccaaggtaatcatgcaaggggtggcggttggccgggcggtggacttgacgaggctagatgggtacgatgacctccgccgcaagttggaggagatgttcgatatcccgggagagctttccgccagcctcaagaaatggaaggtgatctacacagatgacgaggacgatatgatgctggtcggggacgatccatggaggatggtaaaaaggatatacatttattcctacgaggaggccaagtctttgactcccaaggcgaagctgccggccatcggtggtgacaccggcgtcaagccggacccaagcaaactgccaccagaatccgacgtgccacagagcgactccgacaacagtgctcccgttgctgctgataaggactgatggacgctagctcggccgtaccttccctttggatgttggccatgggaggcaagtgcagtgcccatgctccttgagactgctaagagttgatcatctgttccatctgcctcggcttggaccagcgaggatggccgggagggagtgcatgacgttctgtgcgtgtttcgtttgccgtgtttggtaggagccatggcttgttgccggctacttcggttctgtagactgttacactgactgctgccgtctcacctggccgtcggcgcgggccgccccctctcacctctctagtaatatatactagggcttatgtacacagctgttttggtagtggcatatgtatatcgtcggtcatgttgcttgcgacatttagcatcctccgtagctgctatttcctctcctgcattttaatcctgtcttggtatcagatgctctggcgcaatatgtgttccagcgacatgcccttttcggcgcgtgcttcccttttcg

SEQ ID NO: 54977 - DNA, 2859 bp, Zea Mays
tccacctcgactccaggccaaggcagccagcctacccagacaaccaaacgaacccgcccggagcagcaaagcataggcgctcgagcgctccctcctgagctcctccgcctcacggtcacgcctcgtgtccccccaccccctcctcgtcctccaccggccgcctcacgccgtcacctccgctcggcgagtctcggctccgaccccagccgccacgtgcgacctcccctactcctgactcctgagagatctgcggggctcggcatggggtgaccagatcgggccgctgctcggtgctttccagctgaattctgcccgcagctcgtgtcggaggcagcggagatggcggaggccggcgtggcacgcggctcagggagtgctggcgatgctttgttcagggaactctggcatgcttgtgctgggccgttggtcacagtgcctcgccaaggcgagctggtttattacttcccgcagggtcatatggaacagcttgaagcgtctacagatcaacaacttgatcagcacttgcctttgtttaatctaccgcacaagatcctctgcaaggtggtcaatgtagaacttagagctgaaactgattctgatgaagtttatgctcaaattatgctgcaaccacaaacagagcaaagtgagcccaccagcccagatcctgaaccacctgagcctgaaagatgcaacattcattccttctgcaagaccttgactgcttcagatacaagtacccatggtggattctctgtcctcaggaggcatgctgaagaatgtttgccccaactggacatgactcagaatccaccgtggcaagaactagtggctaaagatctccatggaaatgaatggcatttccgtcacatctttcgagggcaaccaaggaggcatctacttacaacaggctggagtgtttttgttagctcaaaaagattggttgcgggtgacgcgtttatcttcttgagaggtgagaacggagagctgcgagtcggggtaaggaggctcatgagacaactaaataacatgccgtcttcggttatctcaagccacagcatgcatcttggagtcctagcaactgcatctcatgccatctccactggaactctcttttctgttttctacaaacccagaacaagtagatctgaatttgtcgttagtgtaaacaagtacctcgaagctaagaatcacaagatgtctgttggtatgaggtttaaaatgagatttgagggtgatgaatcccctgaaagaagattcagtgggacaattattggtatgggatgcatgccagctaactcaacatctccatgggctaactctgaatggagatcattgaaggtccaatgggacgagccttccgctattctgcgtccagatagagtttcaccatgggaagtagaaccccttgatcgaacaaatccacagccacctcaacctcctttacggaataagcgagcacggcctcctgcttcaccttcgattgctccagaacttgctccagtttttggtttttggaagtccccagctgagcctgcccaagctttctcattctcaggactgcagcgaactcaggagctataccattcaagccccagttcaatgttctcatcgtcgttgaatgtgggattcaatccaaagtacgagggtcccactccaaacaccaaccatttgtactggacaatgagagagacaagaactgaatcctactccgctagtatcaacaaagctccaactgaaaagaagcaagaatccactacttctggctgcagattgttcggtatcgagataggttcttctgcagtgtcacccgtggttactgttgctagcgtcgggcatgatcctccgccacctgctctctcagtagacgctgaatctgaccagctgtcacagccgtcccatgccaacaaagcaacggatgccccagcggcaagcagcgatcgctctcctaacgagacagagagccggcaagccaggagctgcaccaaggtaatcatgcaaggggtggcggttggccgggcggtggacttgacgaggctagatgggtacgatgacctccgccgcaagttggaggagatgttcgatatcccgggagagctttccgccagcctcaagaaatggaaggtgatctacacagatgacgaggacgatatgatgctggtcggggacgatccatggagtgaattttgcaggatggtaaaaaggatatacatttattcctacgaggaggccaagtctttgactcccaaggcgaagctgccggccatcggtggtgacaccggcgtcaagccggacccaagcaaactgccaccagaatccgacgtgccacagagcgactccgacaacagtgctcccgttgctgctgataaggactgatggacgctagctcggccgtaccttccctttggatgttggccatgggaggcaagtgcagtgcccatgctccttgagactgctaagagttgatcatctgttccatctgcctcggcttggaccagcgaggatggccgggagggagtgcatgacgttctgtgcgtgtttcgtttgccgtgtttggtaggagccatggcttgttgccggctacttcggttctgtagactgttacactgactgctgccgtctcacctggccgtcggcgcgggccgccccctctcacctctctagtaatatatactagggcttatgtacacagctgttttggtagtggcatatgtatatcgtcggtcatgttgcttgcgacatttagcatcctccgtagctgctatttcctctcctgcattttaatcctgtcttggtatcagatgctctggcgcaatatgtgttccagcgacatgcccttttcggcgcgtgcttcccttttcg

SEQ ID NO: 54978 - DNA, 901 bp, Zea Mays
ggagcaccgagatctccacagacgacgtcgaccgatcgaccgtcgacgaacaaccgatccggccacccggttcctcaacggatttgaatctggatcacagtagccgtcgacggcgtatgagctcgagggagacgacgaggtagacgaggatgatgctgtgtcgtgtgccaatgtcggccagtggacaccaattggtgtagatgacaccggaggcggagaagaagataggagttaccgagttaaggttacggataggagttacatggttccacaaacgcgcaaatccgttgaggatggagcgggggaggatcgccgacgatatatctgagcggaggtggagagccggaggtcggagagaggagagggagaccgaagagaggacagatcgcagcggaggaggagaaaccgagggagaaggagttcgcggctgcgcgagactgcgagaggaaggagagttgtctatggacgaggcgtttatggttaagcccgcgggcgcgactttggcatatggggatatggcgcttggctgggcctggcgcctgggcgtgccaacccagtataccgtgttgggcctgggtcgatactatgggctgagctggtggcctatgcacgacacagtgtatgggctggatctggttcgggctgggtcgtgctttttagtgccgtgcccgggctggctcaccgtgttagtgctatatggccatctataggggagagctttcagagcaaggcaaagcgtcacaaccaaaggatggcagtggaattccctggaataaacgctcctattccagacaatggtgaccagtggctgtggggtagcaccccgccccagcctcaagccgccaccactcatcggattcgagatagagtcatagaggacctcctggcgctgatcattatt

SEQ ID NO: 54979 - DNA, 2681 bp, Zea Mays
ttgattccccctcttcatatttccgttcccctgtacccgcgtggtcttcgatcttgccaagtttcacgttcgatctcgctgccccccaaaacttgtttcgtaaccatcctattttttctctcgaattctttcttgtgattaaggcctggctaatttctattcttcaggtttgcagatcggcgcagttttggtcgcaaaggcgtggtcgttctcctcgagcatcgatttagggttcttcggctttctatgatcaggaggagttgctggattattttatcagggaacagaatggtgtgattcgttgattggattacagtctggatctctcttgcatcaaatggttgagcaaggcaaaccacgaagcatcccgacgaaggcgaagaaatcgccgttcgtggaggtagaggttgacgagattggccaggctagtggggtggtgtttgcaagggaatcaccgctggcgcctaagagcgaccaaggatgcagcgttagccatagtcatggcgacgacgaaacacatgaatcggatgggtgcgtgcaaagccaggggctagacgagcatgggtgggtggacttcggtcactcactgcagctggtgctgttctcgcgacagtggagcctcgctgaaagtcttgttgacctagcagatcagcagccgatgctggattatggcctgtcgattgcccttgatgccatatggtttttgcggacgaaacaggatcttgaggggctcaacagtctgatatcgaagattgtggcctcaggggcaaaggattttgcaagagcaatcctcaggacatcgctgctcgcgtcatgtgttgcagcgtgccaaagcaaggctatcactgtgggtaacagcaaggagatcgtcgcagagaggtgctgagcatctaaaaatagaggcaggtgccaaggtgcagaagttcatggaatgggctttacagtgtattcatatgcatcattgttctgaagatacacatatgtacagatggaactacaatactctccaagaggtacagcttcatgtatcagcatttaggaccttcttggacatagctggtgacaacttaagtggcaagatttttactgaggcatttgatgcggtctgcttcccccttacactcttctcaagtttatttgaacctggatggtcttctgggagttcagcagtctccattaagggccttttatcattgctggtggaaggaggcgctgacaatgtaaatcagtgttttcttgaagcagcgcgctttggaagtactgaacttgtacgcattctgctgaaggtcgcatatcagaatagcttggctgtggacaccgatctggctctggtgtatgcctcacattactgcaagttcaaaacaatggaatgcctagttgatgaagggaacgtgagttctttccttggccctctgataaaagctgcagagcgtgggtgcttgcaggttgtccactggttcgtcagtcgaggcgtctctgacattgagatgtgccttgccctgacgactgctgcctccagcggccatttcgtagtggcgtcgtacatgcttgcacatatccctcagcaaatccttgaagctctcagcacacagatcctcaaagccgcgaggggccagggcagcaggccgcttgatggtgtcaccttccttctgagatccaacttcctaagagacgcagctgcaacatatgaggccgcagacatcattgcaaccgggggcaccaacggtgagctcccggacctggttgccttcctgaaagaacactggtcccaggacgcgtttgctgaaggggtgagcgccggtgaaatgcacttcgtgaatgtcatgagggtcctcaggagaggggcgtccccgatctgcctggaggacctcccgcctgagatggtgctcggcatcacgtacctgccactgtaccgtgagtgcctgagcgcgggtgggcagctgttgccccaaaggctgaggggggagctgctggaggcggtgcaccggctcggtgagcccgttggcccggagagccaggggaaggacctcgtgctggcactagagcgccacatgccgtcgttcttggttggatcctgagatgtttccaggttgtaaaagaagcttgtgcaggctataccttgctttaaaaaattgtatggagcagtgttgattaccaacttctggctgcggtggaatcagcaatagatttggcgcgtcacatgtctcgtgatcgtgtagaaagattttgtttttgttttgtattttgcatgagaaagaagtttctttcttgattgcctattgaaggggcctgttcttgttgccagctgagctcttccaattattttccgggctgcgcacgagacgtacatgtgtgctagtggtgctgttagtctagtttgtgttgtgttgtgttgagtgtatgcgttgtgtgcgcgcgggcgcgtgtggtggtgctaagagtagtttctgcgtatactgggccttcagtggtatgcctggtaatctcaataagtatcgctttcaagacatggattcttcagcaaaagggtatttgatgcatgccttggtgggagtaatgtctaggttccgttccttccaagtcggccgtatacattttgttttttagatttagtttacaacatctgaacccacaatcttaatgtgtcatgggttgtcatatattttataccacatttgtct

SEQ ID NO: 54980 - DNA, 2574 bp, Zea Mays
taggcaacaaacagtgtctaataaaatcacagcggggaaaaataagatactgtccccgtctacttccgcttttgctggcatatttgattccccctcttcatatttccgttcccctgtacccgcgtggtcttcgatcttgccaagtttcacgtttgcagatcggcgcagttttggtcgcaaaggcgtggtcgttctcctcgagcatcgatttagggttcttcggctttctatgatcaggaggagttgctggattattttatcagggaacagaatggtgtgattcgttgattggattacagtctggatctctcttgcatcaaatggttgagcaaggcaaaccacgaagcatcccgacgaaggcgaagaaatcgccgttcgtggaggtagaggttgacgagattggccaggctagtggggtggtgtttgcaagggaatcaccgctggcgcctaagagcgaccaaggatgcagcgttagccatagtcatggcgacgacgaaacacatgaatcggatgggtgcgtgcaaagccaggggctagacgagcatgggtgggtggacttcggtcactcactgcagctggtgctgttctcgcgacagtggagcctcgctgaaagtcttgttgacctagcagatcagcagccgatgctggattatggcctgtcgattgcccttgatgccatatggtttttgcggacgaaacaggatcttgaggggctcaacagtctgatatcgaagattgtggcctcaggggcaaaggattttgcaagagcaatcctcaggacatcgctgctcgcgtcatgtgttgcagcgtgccaaagcaaggctatcactgtgggtaacagcaaggagatcgtcgcagagagattgcatgatcgtctgcgagattgtccaggtgctgagcatctaaaaatagaggcaggtgccaaggtgcagaagttcatggaatgggctttacagtgtattcatatgcatcattgttctgaagatacacatatgtacagatggaactacaatactctccaagagtttatttgaacctggatggtcttctgggagttcagcagtctccattaagggccttttatcattgctggtggaaggaggcgctgacaatgtaaatcagtgttttcttgaagcagcgcgctttggaagtactgaacttgtacgcattctgctgaaggtcgcatatcagaatagcttggctgtggacaccgatctggctctggtgtatgcctcacattactgcaagttcaaaacaatggaatgcctagttgatgaagggaacgtgagttctttccttggccctctgataaaagctgcagagcgtgggtgcttgcaggttgtccactggttcgtcagtcgaggcgtctctgacattgagatgtgccttgccctgacgactgctgcctccagcggccatttcgtagtggcgtcgtacatgcttgcacatatccctcagcaaatccttgaagctctcagcacacagatcctcaaagccgcgaggggccagggcagcaggccgcttgatggtgtcaccttccttctgagatccaacttcctaagagacgcagctgcaacatatgaggccgcagacatcattgcaaccgggggcaccaacggtgagctcccggacctggttgccttcctgaaagaacactggtcccaggacgcgtttgctgaaggggtgagcgccggtgaaatgcacttcgtgaatgtcatgagggtcctcaggagaggggcgtccccgatctgcctggaggacctcccgcctgagatggtgctcggcatcacgtacctgccactgtaccgtgagtgcctgagcgcgggtgggcagctgttgccccaaaggctgaggggggagctgctggaggcggtgcaccggctcggtgagcccgttggcccggagagccaggggaaggacctcgtgctggcactagagcgccacatgccgtcgttcttggttggatcctgagatgtttccaggttgtaaaagaagcttgtgcaggctataccttgctttaaaaaattgtatggagcagtgttgattaccaacttctggctgcggtggaatcagcaatagatttggcgcgtcacatgtctcgtgatcgtgtagaaagattttgtttttgttttgtattttgcatgagaaagaagtttctttcttgattgcctattgaaggggcctgttcttgttgccagctgagctcttccaattattttccgggctgcgcacgagacgtacatgtgtgctagtggtgctgttagtctagtttgtgttgtgttgtgttgagtgtatgcgttgtgtgcgcgcgggcgcgtgtggtggtgctaagagtagtttctgcgtatactgggccttcagtggtatgcctggtaatctcaataagtatcgctttcaagacatggattcttcagcaaaagggtatttgatgcatgccttggtgggagtaatgtctaggttccgttccttccaagtcggccgtatacattttgttttttagatttagtttacaacatctgaacccacaatcttaatgtgtcatgggttgtcatatattttataccacatttgtct

SEQ ID NO: 54981 - DNA, 2566 bp, Zea Mays
taggcaacaaacagtgtctaataaaatcacagcggggaaaaataagatactgtccccgtctacttccgcttttgctggcatatttgattccccctcttcatatttccgttcccctgtacccgcgtggtcttcgatcttgccaagtttcacatcggcgcagttttggtcgcaaaggcgtggtcgttctcctcgagcatcgatttagggttcttcggctttctatgatcaggaggagttgctggattattttatcagggaacagaatggtgtgattcgttgattggattacagtctggatctctcttgcatcaaatggttgagcaaggcaaaccacgaagcatcccgacgaaggcgaagaaatcgccgttcgtggaggtagaggttgacgagattggccaggctagtggggtggtgtttgcaagggaatcaccgctggcgcctaagagcgaccaaggatgcagcgttagccatagtcatggcgacgacgaaacacatgaatcggatgggtgcgtgcaaagccaggggctagacgagcatgggtgggtggacttcggtcactcactgcagctggtgctgttctcgcgacagtggagcctcgctgaaagtcttgttgacctagcagatcagcagccgatgctggattatggcctgtcgattgcccttgatgccatatggtttttgcggacgaaacaggatcttgaggggctcaacagtctgatatcgaagattgtggcctcaggggcaaaggattttgcaagagcaatcctcaggacatcgctgctcgcgtcatgtgttgcagcgtgccaaagcaaggctatcactgtgggtaacagcaaggagatcgtcgcagagagattgcatgatcgtctgcgagattgtccaggtgctgagcatctaaaaatagaggcaggtgccaaggtgcagaagttcatggaatgggctttacagtgtattcatatgcatcattgttctgaagatacacatatgtacagatggaactacaatactctccaagagtttatttgaacctggatggtcttctgggagttcagcagtctccattaagggccttttatcattgctggtggaaggaggcgctgacaatgtaaatcagtgttttcttgaagcagcgcgctttggaagtactgaacttgtacgcattctgctgaaggtcgcatatcagaatagcttggctgtggacaccgatctggctctggtgtatgcctcacattactgcaagttcaaaacaatggaatgcctagttgatgaagggaacgtgagttctttccttggccctctgataaaagctgcagagcgtgggtgcttgcaggttgtccactggttcgtcagtcgaggcgtctctgacattgagatgtgccttgccctgacgactgctgcctccagcggccatttcgtagtggcgtcgtacatgcttgcacatatccctcagcaaatccttgaagctctcagcacacagatcctcaaagccgcgaggggccagggcagcaggccgcttgatggtgtcaccttccttctgagatccaacttcctaagagacgcagctgcaacatatgaggccgcagacatcattgcaaccgggggcaccaacggtgagctcccggacctggttgccttcctgaaagaacactggtcccaggacgcgtttgctgaaggggtgagcgccggtgaaatgcacttcgtgaatgtcatgagggtcctcaggagaggggcgtccccgatctgcctggaggacctcccgcctgagatggtgctcggcatcacgtacctgccactgtaccgtgagtgcctgagcgcgggtgggcagctgttgccccaaaggctgaggggggagctgctggaggcggtgcaccggctcggtgagcccgttggcccggagagccaggggaaggacctcgtgctggcactagagcgccacatgccgtcgttcttggttggatcctgagatgtttccaggttgtaaaagaagcttgtgcaggctataccttgctttaaaaaattgtatggagcagtgttgattaccaacttctggctgcggtggaatcagcaatagatttggcgcgtcacatgtctcgtgatcgtgtagaaagattttgtttttgttttgtattttgcatgagaaagaagtttctttcttgattgcctattgaaggggcctgttcttgttgccagctgagctcttccaattattttccgggctgcgcacgagacgtacatgtgtgctagtggtgctgttagtctagtttgtgttgtgttgtgttgagtgtatgcgttgtgtgcgcgcgggcgcgtgtggtggtgctaagagtagtttctgcgtatactgggccttcagtggtatgcctggtaatctcaataagtatcgctttcaagacatggattcttcagcaaaagggtatttgatgcatgccttggtgggagtaatgtctaggttccgttccttccaagtcggccgtatacattttgttttttagatttagtttacaacatctgaacccacaatcttaatgtgtcatgggttgtcatatattttataccacatttgtct

SEQ ID NO: 54982 - DNA, 277 bp, Zea Mays
ttcctcttcttccgtcgctctcgctctcggtctcggactacggttgagcgaagtcgtcactgtaatctactgatctgcaaatggcggaggcggaggcgacggtggggcgactgatgctgtactcgtactggcgcagctcgtgctcccaccgtgcccgcatcgctctcaatctcaaaggtgtggattacgagtacaaggcggtgaaccttctcaagggcgagcagtctgatccagacgattttgtagaataaagccggttgcaattagattattcaag

SEQ ID NO: 54983 - DNA, 4899 bp, Zea Mays
atgctggtccccgcccagtcggcaccggcgccgccgttgtgctctctccgctccctatcgtcacactacctcctccttccgtcccacttcctcccccctggcggcgtccttcccccgctccgccgcggcgacctcgccatccgcatgggcggcgggccgcgcaccttccccggcggcgtgtccaagtggcagtggaagcgtatgcaggccaagaaggcgcggcagctcctcaaggcgcgtctggcccgcgagcgccagctctacgagatgcgcaagcgcgtcgagctccgcgacgccgtggcgcacctcgagcggccctgggacgcgggctcctccgccggcgcgtccgccgtggctcccactctgctctccgtcgcggccgaggaccagctcagggcgctcgcggaccgcttccaccgccccggcggcgtggacctgtggaacgaccgcgacgggccccgcgtcttcgcgtccccggccacaggcgccgcctccgccaggttcttccccaggaacgccttccacagcatccagccctacgcgctcgtcggcgccggcgtagaggcgagcgcgcagggtgttcgtgagaatgccgcggaggatggcgcgcacagtagcattgcgaccgatcgcgagcctgcggttgaactcacggaaagggatgatggaacatgggagccggtggatgcactcggcgacgccgatgtcagcgacgccggtgactggacctcggaagacgatgacgacgaagctgctgctactcctgaatcagagggcatgggagatgccggttcttggcgtgagcaacgagccatggtaaggagaaatggaaggagcaacggtgcagcaagatgggaatctgcaggtgcaatggctgccggcagcggaaatgacgctgcaactcctgaatcagagggcatggtagatgcgggttcttggcgtgagcagcgagccatggttaggagaaatggaaggagcaacggtgcagcaagatggggagctgccggtgcaacggctgccagcagcgacaatggcagaggttcgagtggaagacggactggctcgaaggccacggcgggcagccatgtcagacagaggggccgaacaggtgctggttcgttgtctgaatctgaggcgacccctggctcgaaggccacggcgcgcagccatgtcagacagaggggccgaacaggtgctggttcgttgtctgaatctgaggtgacccgcgcgcgctccgagccgaaatggggaacgaggaacagagatgacacgaggaatggtgccggccggtggaatgctcctagaaaggatagggtgagtgatggtggtgggtttgattcagagtcaggcagtgcaagagggaaggaaccggaaccaagacggggagccagaagtaagatgaacggaagcgatagtcttagaggaagatcgaaacacaactacagtgctaatgccaacggcggggagaagctgttcaagtacctgagcggtgacggtgacccgcgcgcaaacagcagcaatggctttgcggagggtttggaggcaccaaaatggaagccgagaagaatgaatcgagctaggagcagcaatggtggcagagatgatgacatgggtgggagattcaggcgaggcgatgatagagtggcaagacggctacgggcaaacgcgaaaccaatcaatacgacgagcggagatgatggcagcagcgcggatggtgaacggagcaggaatggaggacgactgctctggggagacgagtactcgctgcggccaacgtcggaattgcgcggctcttggcgggacactggatcgcatagattgtaggctactaccaaagacagactgatgatttcttcgtgctaacttttgtaaaactagacctctgaaaagtaatgtactccaccaaccaacaatggaacatctcaacttttaacggaaacgcacttgcaaactcaaataagcacataaaagatagtccaggattcttgaattacatgagcactgtcagatccatatagcaaggattaacacagggtcccaagacaatagttggacggaccagtgggcaagtctacctggtcacagattacaatatggtcatggctgaccttatgagctcaaaactgtaaaaacatcaacagcaccagtgcttggtaaagttggctccagcttcttgaccgagtcacggatcctgccggcgatctagtggtggttgtcgccggaggggcggtagaggcggttgtaggcggcctcgccgacgaggtagatcccgaaggcgacgatggcgatgccgagcccgggtgtggcgtggcgcagctggttccccgccatagggtgcctcctccactcgtccctccgccggaagaactccccagtcgcgttgagtcccttccctccgctcgccatcgcctccgccgcgctctcgatcccttcccctctctctcacaactgtccgaagcaggaagataggcacgcgcacaataacccaagcccaggtaatatacgcagcccaacgttcagctacagctctatgcctctatggctctatctcatggcgacggcgacgtcgtcggcgccgctgctcccgaagcccgcactccgagctgcgtcctcttcttctctacacaccccaaatccaaggtccaagatacagcgagccaccccagaacagcaggaccaacatgtcgacaccaagtggaggaggcagccgagggccccgccccggcgcggcgagggagccaagagacgcctgcgcagcctcgtccagcgcggggaaatcgacgaagcgctcgtgctcttcgattccatggcctccggcggcggcaggaactgcccgcccgttgtcccctgcaacatcctcatcaagcggctgtgctcggacggccgcgtctccgacgcggagcgcgtgttcgcggcgctcggcccctccgccaccgtcgtcacctacaacaccatggtaaacgggtactgccgcgccggccggatcgaggacgcgcgccgcctcatcaacggcatgccgttcccgccggacacgttcacgttcaacccgctcatccgcgcgctctgcgtccgcgggcgcatccctgacgccctggcggtgttcgacgacatgctccaccggggatgctccccgagcgtcgtcacctacagcatcctcctggacgccacctgcaaggagagcggctacaggcaggccatggcgctcctcgacgagatgcgcgccaagggctgcgagccggacattgtcacgtacaatgtcctcatcaatgccatgtgcaacgagggcgacgttgatgaagctctgaacatattgagcaacctgccgtctcatggatgcaaacctgacgctgtcacgtacacacctgtgttgaagagtctgtgtggctctgaacggtggaaggaggttgaggagctcttggctgagatgaccagcaacaattgtgcgccagatgaggtgacattcaacacaatagtcacttccctgtgtcagcaaggcttggttgatcgtgcaatcgaagtggttgatcatatgtcagagcacggatgcgtcgctgacatcgtcacatacagcagtattcttgatggtttgtgcgacgtagggcgcgttgacgacgcagttgagttgttaagcagactgaaatcctacgggtgcaaacccgatacaattgcctataccactgttctgaagggcctgtgcagcacagaacaatgggagcgtgccgaggagctcatggccgagatgctctgcagcgattgcccccctgacgaagtgacattcaacacagtagttgcttctctatgtcagaaagggttggtcgatcgtgcaatcagagtcgttgagcagatgtcagagaacggttgcagccctgacattgtcacatacaactgtatcatcgatggtctgtgcaacgaaagctgtattgacgatgccatggaattgttaagcgatctgcagtcctgtgggtgcaagcctgatatagttaccttcaacactttactgaagggcctgtgtggcgttgaccggtgggaggatgctgagcagctcatggctaacatgatgcgcagtaactgtccccctgacgaattgacgtttaatacggtaatcacttctttgtgccagaaaggattacttacgcaggcaatcgaaactctgaagataatggctgagaatggttgcgttccgaactcatctacctacagcatagtagtcgatgcacttctgaaggccggaaaggctcaggcagcccttgagctgctgagtggcatgacaaatggtactccagatctgattacttataatacagtaatttccaatcttaccaaggccgggaaaatggaggaagctcttgacttgttgcgtgtgatggtctctaatggcctttgcccggacacgaccacatacagatctttggcctatggtgtctgtagagaagatggaaccgacagggcggtcagaatgctccgcagggtgcaagatacgggcttgtcgcctgacactacattctacaatgatgttcttcttggtttctgtcgagatcggagaacggatcttgccatcgattgctttgctcatatggtctccagtggctgcatgcctgatgaatcgacctacgttatcctccttgaggctcttgcttatgggggtcttttggacgaggcaaaacgacttctagccagcctgtgttctcttggcgttttagataagaagttgatcgaggaagaaagccactactcgtagactgagcgtttgaaccagaaatgagcaagcggacggtccgcgcctgtgggccggacggtccgcgcgtgcgcagaacagattagggtttcgagttttgtgctacggttgttagctatattcacgggattagctcggaatcagttgtgtaaagggtccagccc

SEQ ID NO: 54984 - DNA, 4691 bp, Zea Mays
gagatcgcgaccgcgagtcagggtattttgggcaccaccagagcgccaagaagggaaggttggcttctccttcctaccctttccgcgctgcaaccgccaaattctccgactgcctcgcactctcgcagcacgtggggggtgattctctctttcttctcttcctcagccgccaggaaggtggattcttttcgagctcttgcccagctgattataggtaggtacgtggctggatagaccctactgctggatagagcgtctcagggacgggttgactctttctggccgcatcagcggccggctattcttcttgtccggctatccgttccaggacttcggattaagaggcgacgagatgatgcgacgctgcgtctcggcgttggcccgccgccgccgtccagatcgcacggttgatactatgaaggcacgattccaatgtttggttaacatttcctcttcaataagggacactgacagccaaaggtgctcaagtacgtgtgctacttcctgtgctaccgatccagatgttttatcgagagaaacatcgtcatcagaaatgcttgttgattcatttgggagatgccggttcttggcgtgagcaacgagccatggtaaggagaaatggaaggagcaacggtgcagcaagatgggaatctgcaggtgcaatggctgccggcagcggaaatgacgctgcaactcctgaatcagagggcatggtagatgcgggttcttggcgtgagcagcgagccatggttaggagaaatggaaggagcaacggtgcagcaagatggggagctgccggtgcaacggctgccagcagcgacaatggcagaggttcgagtggaagacggactggctcgaaggccacggcgggcagccatgtcagacagaggggccgaacaggtgctggttcgttgtctgaatctgaggcgacccctggctcgaaggccacggcgcgcagccatgtcagacagaggggccgaacaggtgctggttcgttgtctgaatctgaggtgacccgcgcgcgctccgagccgaaatggggaacgaggaacagagatgacacgaggaatggtgccggccggtggaatgctcctagaaaggatagggtgagtgatggtggtgggtttgattcagagtcaggcagtgcaagagggaaggaaccggaaccaagacggggagccagaagtaagatgaacggaagcgatagtcttagaggaagatcgaaacacaactacagtgctaatgccaacggcggggagaagctgttcaagtacctgagcggtgacggtgacccgcgcgcaaacagcagcaatggctttgcggagggtttggaggcaccaaaatggaagccgagaagaatgaatcgagctaggagcagcaatggtggcagagatgatgacatgggtgggagattcaggcgaggcgatgatagagtggcaagacggctacgggcaaacgcgaaaccaatcaatacgacgagcggagatgatggcagcagcgcggatggtgaacggagcaggaatggaggacgactgctctggggagacgagtactcgctgcggccaacgtcggaattgcgcggctcttggcgggacactggatcgcatagattgtaggctactaccaaagacagactgatgatttcttcgtgctaacttttgtaaaactagacctctgaaaagtaatgtactccaccaaccaacaatggaacatctcaacttttaacggaaacgcacttgcaaactcaaataagcacataaaagatagtccaggattcttgaattacatgagcactgtcagatccatatagcaaggattaacacagggtcccaagacaatagttggacggaccagtgggcaagtctacctggtcacagattacaatatggtcatggctgaccttatgagctcaaaactgtaaaaacatcaacagcaccagtgcttggtaaagttggctccagcttcttgaccgagtcacggatcctgccggcgatctagtggtggttgtcgccggaggggcggtagaggcggttgtaggcggcctcgccgacgaggtagatcccgaaggcgacgatggcgatgccgagcccgggtgtggcgtggcgcagctggttccccgccatagggtgcctcctccactcgtccctccgccggaagaactccccagtcgcgttgagtcccttccctccgctcgccatcgcctccgccgcgctctcgatcccttcccctctctctcacaactgtccgaagcaggaagataggcacgcgcacaataacccaagcccaggtaatatacgcagcccaacgttcagctacagctctatgcctctatggctctatctcatggcgacggcgacgtcgtcggcgccgctgctcccgaagcccgcactccgagctgcgtcctcttcttctctacacaccccaaatccaaggtccaagatacagcgagccaccccagaacagcaggaccaacatgtcgacaccaagtggaggaggcagccgagggccccgccccggcgcggcgagggagccaagagacgcctgcgcagcctcgtccagcgcggggaaatcgacgaagcgctcgtgctcttcgattccatggcctccggcggcggcaggaactgcccgcccgttgtcccctgcaacatcctcatcaagcggctgtgctcggacggccgcgtctccgacgcggagcgcgtgttcgcggcgctcggcccctccgccaccgtcgtcacctacaacaccatggtaaacgggtactgccgcgccggccggatcgaggacgcgcgccgcctcatcaacggcatgccgttcccgccggacacgttcacgttcaacccgctcatccgcgcgctctgcgtccgcgggcgcatccctgacgccctggcggtgttcgacgacatgctccaccggggatgctccccgagcgtcgtcacctacagcatcctcctggacgccacctgcaaggagagcggctacaggcaggccatggcgctcctcgacgagatgcgcgccaagggctgcgagccggacattgtcacgtacaatgtcctcatcaatgccatgtgcaacgagggcgacgttgatgaagctctgaacatattgagcaacctgccgtctcatggatgcaaacctgacgctgtcacgtacacacctgtgttgaagagtctgtgtggctctgaacggtggaaggaggttgaggagctcttggctgagatgaccagcaacaattgtgcgccagatgaggtgacattcaacacaatagtcacttccctgtgtcagcaaggcttggttgatcgtgcaatcgaagtggttgatcatatgtcagagcacggatgcgtcgctgacatcgtcacatacagcagtattcttgatggtttgtgcgacgtagggcgcgttgacgacgcagttgagttgttaagcagactgaaatcctacgggtgcaaacccgatacaattgcctataccactgttctgaagggcctgtgcagcacagaacaatgggagcgtgccgaggagctcatggccgagatgctctgcagcgattgcccccctgacgaagtgacattcaacacagtagttgcttctctatgtcagaaagggttggtcgatcgtgcaatcagagtcgttgagcagatgtcagagaacggttgcagccctgacattgtcacatacaactgtatcatcgatggtctgtgcaacgaaagctgtattgacgatgccatggaattgttaagcgatctgcagtcctgtgggtgcaagcctgatatagttaccttcaacactttactgaagggcctgtgtggcgttgaccggtgggaggatgctgagcagctcatggctaacatgatgcgcagtaactgtccccctgacgaattgacgtttaatacggtaatcacttctttgtgccagaaaggattacttacgcaggcaatcgaaactctgaagataatggctgagaatggttgcgttccgaactcatctacctacagcatagtagtcgatgcacttctgaaggccggaaaggctcaggcagcccttgagctgctgagtggcatgacaaatggtactccagatctgattacttataatacagtaatttccaatcttaccaaggccgggaaaatggaggaagctcttgacttgttgcgtgtgatggtctctaatggcctttgcccggacacgaccacatacagatctttggcctatggtgtctgtagagaagatggaaccgacagggcggtcagaatgctccgcagggtgcaagatacgggcttgtcgcctgacactacattctacaatgatgttcttcttggtttctgtcgagatcggagaacggatcttgccatcgattgctttgctcatatggtctccagtggctgcatgcctgatgaatcgacctacgttatcctccttgaggctcttgcttatgggggtcttttggacgaggcaaaacgacttctagccagcctgtgttctcttggcgttttagataagaagttgatcgaggaagaaagccactactcgtagactgagcgtttgaaccagaaatgagcaagcggacggtccgcgcctgtgggccggacggtccgcgcgtgcgcagaacagattagggtttcgagttttgtgctacggttgttagctatattcacgggattagctcggaatcagttgtgtaaagggtccagccc

SEQ ID NO: 54985 - DNA, 2044 bp, Zea Mays
gagatcgcgaccgcgagtcagggtattttgggcaccaccagagcgccaagaagggaaggttggcttctccttcctaccctttccgcgctgcaaccgccaaattctccgactgcctcgcactctcgcagcacgtggggggtgattctctctttcttctcttcctcagccgccaggaaggtggattcttttcgagctcttgcccagctgattataggtaggtacgtggctggatagaccctactgctggatagagcgtctcagggacgggttgactctttctggccgcatcagcggccggctattcttcttgtccggctatccgttccaggacttcggattaagaggcgacgagatgatgcgacgctgcgtctcggcgttggcccgccgccgccgtccagatcgcacggttgatactatgaaggcacgattccaatgtttggttaacatttcctcttcaataagggacactgacagccaaaggtgctcaagtacgtgtgctacttcctgtgctaccgatccagatgttttatcgagagaaacatcgtcatcagaaatgcttgttgattcatttgggaggttccacaattacttgaggatctccttgaccgagcgctgtaatctgaggtgccagtactgtatgcctgctgaaggagttgaactaacaccaaagtcagagcttctgtcacatgatgagataattcgaatcgctgacctttttgttacttctggtgtgaataagatccgattaattggtggagaacctaccgtacgaaaagatattgaagatatttgtttgcatctttctagtttgaagggactgaaaactcttgcaatgaccacaaatggaattgttctttcaaagaaactcccaaagttgaaagaatgtggactcaatgctttaaatataagtttagatacactagtacctgcaaagtttgagttcatgacaaggcgtaaagggcactcaaaggtcttggaatcaatagatgctgctgtagaacttgggtatagccctgttaaggtcaactgtgtcatcatgcgtggtataaatgatgatgagatctgcaattttgttgaattgacgagacacaagcccatcaacgttagatttattgagtttatgccatttgatggtaatgtttggaatgtgaagaagctagttccttatgcagagatgttggacaaagtggtaagcggcaaagttataaaggagtagagagacttcaagatcaccccacagacactgcaaagaatttcaggattgatggacatgttggcactatttcatttattacatcaatgacagagcatttttgtgctggctgcaatagattacggttattggctgatggaaacctcaaggtaagtttgagagaacccatccgtactggtgttgatgacgctggactgaaggagataattggtgccgcggttaaaaggaagaaagctaaacatgccgggatgtttgatattgccaagacagcaaatagacccatgatacatataggtggctgaggtgtgcagaatttcctcatgtcgaatatgagccaataaaatggatttgccaactgctgggttgctgcctggttttacctgaacgaccatgaaaaagttctctgatgcaatggaccaaactctttccgagtggtttaaacattagaggaggaagtggagtgtattggtcactgcagtcatacaatttagatccgtatacttgaacaaatgaacagtgtcacagaaactcactcagtcttcgcgtgccaaggtgttttggttgtgtacttgtatgttgtatgctcataatgtcacgttgtgtaagctctcttttgagatctcaccgtttgtgaattaaactgctaccttgagatcaatcgcacatcctcgtttccgttttagaaatgagcatttcagaattcagataatggagataatctttagcctacaccgagctgcacacagctaatttggaaacaaagcaatagaagaaccaaatcggctgacagtaaatcagagcagtattgagtaaatgacagggatacggatg

SEQ ID NO: 54986 - DNA, 2334 bp, Zea Mays
aaaaaagagatcgcgaccgcgagtcagggtattttgggcaccaccagagcgccaagaagggaaggttggcttctccttcctaccctttccgcgctgcaaccgccaaattctccgactgcctcgcactctcgcagcacgtggggggtgattctctctttcttctcttcctcagccgccaggaaggtggattcttttcgagctcttgcccagctgattatagcggccggctattcttcttgtccggctatccgttccaggacttcggattaagaggcgacgagatgatgcgacgctgcgtctcggcgttggcccgccgccgccgtccagatcgcacggttgatactatgaaggcacgattccaatgtttggttaacatttcctcttcaataagggacactgacagccaaaggtgctcaagtacgtgtgctacttcctgtgctaccgatccagatgttttatcgagagaaacatcgtcatcagaaatgcttgttgattcatttgggaggttccacaattacttgaggatctccttgaccgagcgctgtaatctgaggtgccagtactgtatgcctgctgaaggagttgaactaacaccaaagtcagagcttctgtcacatgatgagataattcgaatcgctgacctttttgttacttctggtgtgaataagatccgattaattggtggagaacctaccgtacgaaaagatattgaagatatttgtttgcatctttctagtttgaagggactgaaaactcttgcaatgaccacaaatggaattgttctttcaaagaaactcccaaagttgaaagaatgtggactcaatgctttaaatataagtttagatacactagtacctgcaaagtttgagttcatgacaaggcgtaaagggcactcaaaggtcttggaatcaatagatgctgctgtagaacttgggtatagccctgttaaggtcaactgtgtcatcatgcgtggtataaatgatgatgagatctgcaattttgttgaattgacgagacacaagcccatcaacgttagatttattgagtttatgccatttgatggtaatgtttggaatgtgaagaagctagttccttatgcagagatgttggacaaagtggtaagcggcaaagttataaaggagtagagagacttcaagatcaccccacagacactgcaaagaatttcaggattgatggacatgttggcactatttcatttattacatcaatgacagagcatttttgtgctggctgcaatagattacggttattggctgatggaaacctcaaggtgtgcttatttggcccctcagaggtaagtttgagagaacccatccgtactggtgttgatgacgctggactgaaggagataattggtgccgcggttaaaaggaagaaagctaaacatgccgggatgtttgatattgccaagacagcaaatagacccatgatacatataggtggctgaggtatcctcttatcaacatctgtacatttttactacaatgactatgtaatagattgttcacggacatgacaagattgatatttgagatgatttatcgcatggcaccttctatagttgccttgttgcacgcccagtttggtggttctcaaacttcagtagtcggtcccttttatgttctaacttctaatgaggaaaaaaattgcaaaccatttcatgagatcactgctgagtttaaacatcccatggatttttactgctgtttaagatatcgttttggaatctggtgatcaaatgtgttcagcattcaattcacgtgcatctctcttatttggaatcaggtgtgcagaatttcctcatgtcgaatatgagccaataaaatggatttgccaactgctgggttgctgcctggttttacctgaacgaccatgaaaaagttctctgatgcaatggaccaaactctttccgagtggtttaaacattagaggaggaagtggagtgtattggtcactgcagtcatacaatttagatccgtatacttgaacaaatgaacagtgtcacagaaactcactcagtcttcgcgtgccaaggtgttttggttgtgtacttgtatgttgtatgctcataatgtcacgttgtgtaagctctcttttgagatctcaccgtttgtgaattaaactgctaccttgagatcaatcgcacatcctcgtttccgttttagaaatgagcatttcagaattcagataatggagataatctttagcctacaccgagctgcacacagctaatttggaaacaaagcaatagaagaaccaaatcggctgacagtaaatcagagcagtattgagtaaatgacagggatacggatg

SEQ ID NO: 54987 - DNA, 2099 bp, Zea Mays
ccaaaaccgaaccgaaaaataccgatatcggactcgtcggctgcgacttgcgaggacgacacgagtcagccgcgaccgcgagttgctgcagtacccacaaaaaaaaaagagatcgcgaccgcgagtcagggtattttgggcaccaccagagcgccaagaagggaaggttggcttctccttcctaccctttccgcgctgcaaccgccaaattctccgactgcctcgcactctcgcagcacgtggggggtgattctctctttcttctcttcctcagccgccaggaaggtggattcttttcgagctcttgcccagctgattatagcggccggctattcttcttgtccggctatccgttccaggacttcggattaagaggcgacgagatgatgcgacgctgcgtctcggcgttggcccgccgccgccgtccagatcgcacggttgatactatgaaggcacgattccaatgtttggttaacatttcctcttcaataagggacactgacagccaaaggtgctcaagtacgtgtgctacttcctgtgctaccgatccagatgttttatcgagagaaacatcgtcatcagaaatgcttgttgattcatttgggaggttccacaattacttgaggatctccttgaccgagcgctgtaatctgaggtgccagtactgtatgcctgctgaaggagttgaactaacaccaaagtcagagcttctgtcacatgatgagataattcgaatcgctgacctttttgttacttctggtgtgaataagatccgattaattggtggagaacctaccgtacgaaaagatattgaagatatttgtttgcatctttctagtttgaagggactgaaaactcttgcaatgaccacaaatggaattgttctttcaaagaaactcccaaagttgaaagaatgtggactcaatgctttaaatataagtttagatacactagtacctgcaaagtttgagttcatgacaaggcgtaaagggcactcaaaggtcttggaatcaatagatgctgctgtagaacttgggtatagccctgttaaggtcaactgtgtcatcatgcgtggtataaatgatgatgagatctgcaattttgttgaattgacgagacacaagcccatcaacgttagatttattgagtttatgccatttgatggtaatgtttggaatgtgaagaagctagttccttatgcagagatgttggacaaagtggtaagcggcaaagttataaaggagtagagagacttcaagatcaccccacagacactgcaaagaatttcaggattgatggacatgttggcactatttcatttattacatcaatgacagagcatttttgtgctggctgcaatagattacggttattggctgatggaaacctcaaggtgtgcttatttggcccctcagaggtaagtttgagagaacccatccgtactggtgttgatgacgctggactgaaggagataattggtgccgcggttaaaaggaagaaagctaaacatgccgggatgtttgatattgccaagacagcaaatagacccatgatacatataggtggctgaggtgtgcagaatttcctcatgtcgaatatgagccaataaaatggatttgccaactgctgggttgctgcctggttttacctgaacgaccatgaaaaagttctctgatgcaatggaccaaactctttccgagtggtttaaacattagaggaggaagtggagtgtattggtcactgcagtcatacaatttagatccgtatacttgaacaaatgaacagtgtcacagaaactcactcagtcttcgcgtgccaaggtgttttggttgtgtacttgtatgttgtatgctcataatgtcacgttgtgtaagctctcttttgagatctcaccgtttgtgaattaaactgctaccttgagatcaatcgcacatcctcgtttccgttttagaaatgagcatttcagaattcagataatggagataatctttagcctacaccgagctgcacacagctaatttggaaacaaagcaatagaagaaccaaatcggctgacagtaaatcagagcagtattgagtaaatgacagggatacggatg

SEQ ID NO: 54988 - DNA, 1567 bp, Zea Mays
atttcacgatcataaaatcaatagcaaaaatagtaaatcggctcaccacatcacaattcgatttggtagttgcctgaacgacgacggccttcagctgaacacccacgagctatgtacactggcttcgcttttttcatccgcacacataaattgcattgacgaacggcgagatcagaaaggctcggtgttggggaaaaataccagaaatgacgggtgatggagctggcagatgatgatggtgtcgtgaagcaaataaggttaaactacggcgtggtctgtgccataagagaatgccggcacacagcacgacggatagcggaagtcaatcgacgagatccaactacggcgcgatgcgcattaggaacaagcgcacgcggtagcgaacacggtcgacgagcctaacgacacagagccgagcgacgaacagatttggcgaggtcgcgaccatggatgatggcaaggtcaacagggaaaatcgacaccatgatggcaacaactgtcgcccatcccagtagcatacgcacaacaactagtcctagaccaaagataggcgtgcgacgaggtcgaggacgaacgcggaggcaaccgacgaaccgcgcgtgcaccagaaaaaccaagcagggcgcgagctgcgcgcaggcacgcgacgaccacggcaagggagctccgagctgggacggcgaggaaactccacgacgggagtcgtggtttggacagagcagagggaaaagtggctgggcaccagaggaccgagcagatgagcgcgactggagcaggcgatgccgcggctggagcaggggcgcggcggcaggaagggcgcgcggccaggattctggcgcgcgacgattggagaaggagaattagagcgcgcgcagggcgagctctaagtttgaagatgtggtttgccagacgtgcaatggagggactcggccagagcgcagtccgagcagagggagcttcggccggcgaacagggagaagcaaggagaggtccgagagagagagagcggagaagaaacagcgcgcagagagaaagaagaagtcgcgcgcgtgaaaaaaaaagtaggggagccgctcggcggaagacgcagggaggaatggagggagctaggcgggctgcgcgcaggggaaagaaccagggcacgtggcgcatgggagctccaagctgtgcaggggaaaccacgacgctggggctagggctcgggaggatgcactgagcagggactccacggcgaggtcacggacgagctacaaggcgacggctaggcgccataaccgagcagggaaagctgcgcgcggcacaggggcgagcaggaacagtcggccgagctggaggagcaagggagctggggaatcgtcggccatggaggatacggatgagcggcaggggagctcgcagctgggactggaatccgagccagaggggcgcggcagaggaggaggaaaccgggcagggagggatccacgaaagaaccgccatgggaagaggaggagatgggcaggaggccgagcgcagtgccacacggcggccagcatccatggcagctagcgcgagaggcagatggaga

SEQ ID NO: 54989 - DNA, 2458 bp, Zea Mays
gcggaaagcggagccaggaccgggagctgaagcggttgtcttccccccctcgtctccgtcaactggtgagctccctcctccacctcctctccctgctctttgatctcgccctcgcttcttcctccccagccggccatcagttccggcgactgcttccttcgttcgtccccgccgccgccgccgccgctggactctttccgaattgctctgtctatcctgtgccgtggatcgagttgcttccggaggcgacgcggtgatgttctgctcgtgcgcgcgatgcagctgggagcactgctttctcgactctgtttctccttgcactgattcagcacccccacaagccagcaagatggacgggttcgtggaccccttcgtcccggaacaggcatggccgcaggacgccatgttcatcggctcatcctggccatgcgccggcgccggcgccacttccctcgccgaccctgcagggacgtacgcgtacctgggagctcaggctgcaccaggccaaggcgcaggctttcacctccaagacggctcctccacggcgctcgtgccgcccttggagctgcaccagcagttcctgagcgcgcacctgccgggcgacgacgtgaccgtgacccaggaggagggcctcggcttcgaggtgaacagcgcgctggtggccggcatgctgggcccggtcctgagcgcgccctgcgcggtatcgctcgccgacagcgcgccggtggtgtgcagctcctccaacgacagcagcggcgggagcgagcagtccggcctgccgccgccgccgcggttcctagtcctgggagagcagcccgcgtcgtggccttccgcgttcccgcggatctcgtcgctggccggggaagagacttcgcggagcttcggtttcggcgcggttagcgacaacgatctcgtccgtggatcctcctgtgtcgcggacgtgaacaagtatccacagataggcaatgcgcggctacatgtagaggatgacgttgagttcaacactggaaagatgctgtcgttcgctcctggccttgactttggcgatctgcagctcagccaaaaggaactcagcggtctgcgtcacctgaactctgggcagcagctctcgtcgtttgatgcaacgcgtaatcctgaacagtcgtctaacgaggccagcggcggcggaactgggttgaatgcgccgccgttcatggttccggccaatggggctgctgggaatggagctcctaagccgcgcgtcagggctcgccggggccaggcaactgatccacacagcattgcggagaggctccgaagggagaagatctctgacaggatgaagaatctacaggagctcgttccgaactccaacaggactgacaaggcatccatgcttgacgagatcatcgaatacgtcaaatttctccagctgcaagtgaaggttctcagcatgagcaggctgggcgcgacggaagccgtcgtcccgctccttacacagtctcagaccgagaactccggtggtggtcttctgctgtcccctaggtcaggctcaggcaggcagcagcaggcacgcggaggcagcctgccgccgccgtcgtccgaggtccgggacggcgcggcgttcgagcaggaggtggcccagctgatggagagcgacatgacgacggcgatgcagtacctgcagagcaagggcctgtgcctcatgcccgtcgcgctggcgtcggcgatatcgggccagaagggggcgtcctccgcggcggtccagccggagaatgggggcgccaaggaaatgctgcgcgcggtgaagcccctagcaagtccaatccatgggagatgaagtgtccggatcctagacggctggctcaacgacgcagtgcagtccccggcatcaaatcaaagccatctcccgtttagattccaatgtcctaacagcctgcgccctgttttgcatgctccttccacaacttgtagccatatcatgaagcctggacctagcttactacatgtgctccatcgcaagaacgcgtattactttcttattaaaacccgccagggttcggcgcgctctccgcgttcggcggccttctcccgcagctcgtcggtccggccgcgttcggtggcctcctcttccctaccccgtggtctctggccgcctgctctgcctggtgagacccgacctgaatggggccctcctcgttcctccttccaccattcctccgccggcttctagagcccatctaaacacgccagcgcggccacgaccgtcggcctcctccgcttctgcgctagccggaaacctaccttccggcacctctccatcacttcctgtgtcgctgccctctccaccacacctaccgttcccttcgcctccatcactgtcagtaaaatgggagctaaaacatacgaaatataattttttttctaagattttaggagtttttataatatttttacactcgaaaatagttataaaaag

SEQ ID NO: 54990 - DNA, 2672 bp, Zea Mays
gcggaaagcggagccaggaccgggagctgaagcggttgtcttccccccctcgtctccgtcaactggtgagctccctcctccacctcctctccctgctctttgatctcgccctcgcttcttcctccccagccggccatcagttccggcgactgcttccttcgttcgtccccgccgccgccgccgccgctggactctttccgaattgctctgtctatcctgtgccgtggatcgagttgcttccggaggcgacgcggtgatgttctgctcgtgcgcgcgatgcagctgggagcactgctttctcgactctgtttctccttgcactgattcagcacccccacaagccagcaagatggacgggttcgtggaccccttcgtcccggaacaggcatggccgcaggacgccatgttcatcggctcatcctggccatgcgccggcgccggcgccacttccctcgccgaccctgcagggacgtacgcgtacctgggagctcaggctgcaccaggccaaggcgcaggctttcacctccaagacggctcctccacggcgctcgtgccgcccttggagctgcaccagcagttcctgagcgcgcacctgccgggcgacgacgtgaccgtgacccaggaggagggcctcggcttcgaggtgaacagcgcgctggtggccggcatgctgggcccggtcctgagcgcgccctgcgcggtatcgctcgccgacagcgcgccggtggtgtgcagctcctccaacgacagcagcggcgggagcgagcagtccggcctgccgccgccgccgcggttcctagtcctgggagagcagcccgcgtcgtggccttccgcgttcccgcggatctcgtcgctggccggggaagagacttcgcggagcttcggtttcggcgcggttagcgacaacgatctcgtccgtggatcctcctgtgtcgcggacgtgaacaagtatccacagataggcaatgcgcggctacatgtagaggatgacgttgagttcaacactggaaagatgctgtcgttcgctcctggccttgactttggcgatctgcagctcagccaaaaggtcagaatcagacgcctgctctcttctgcttgtcttttttgctcgcccgtctgccatatgtaatgacggaacagaagcacggtggttattggacttggacagcagcactaccatctgaataaaaggtgtacagtaagctgacggtgtcggcacaggctgagagtgtaccgtgagtgacgcgcttgttcgcctaacctgatcgcgacccctgcaggaactcagcggtctgcgtcacctgaactctgggcagcagctctcgtcgtttgatgcaacgcgtaatcctgaacagtcgtctaacgaggccagcggcggcggaactgggttgaatgcgccgccgttcatggttccggccaatggggctgctgggaatggagctcctaagccgcgcgtcagggctcgccggggccaggcaactgatccacacagcattgcggagaggctccgaagggagaagatctctgacaggatgaagaatctacaggagctcgttccgaactccaacaggactgacaaggcatccatgcttgacgagatcatcgaatacgtcaaatttctccagctgcaagtgaaggttctcagcatgagcaggctgggcgcgacggaagccgtcgtcccgctccttacacagtctcagaccgagaactccggtggtggtcttctgctgtcccctaggtcaggctcaggcaggcagcagcaggcacgcggaggcagcctgccgccgccgtcgtccgaggtccgggacggcgcggcgttcgagcaggaggtggcccagctgatggagagcgacatgacgacggcgatgcagtacctgcagagcaagggcctgtgcctcatgcccgtcgcgctggcgtcggcgatatcgggccagaagggggcgtcctccgcggcggtccagccggagaatgggggcgccaaggaaatgctgcgcgcggtgaagcccctagcaagtccaatccatgggagatgaagtgtccggatcctagacggctggctcaacgacgcagtgcagtccccggcatcaaatcaaagccatctcccgtttagattccaatgtcctaacagcctgcgccctgttttgcatgctccttccacaacttgtagccatatcatgaagcctggacctagcttactacatgtgctccatcgcaagaacgcgtattactttcttattaaaacccgccagggttcggcgcgctctccgcgttcggcggccttctcccgcagctcgtcggtccggccgcgttcggtggcctcctcttccctaccccgtggtctctggccgcctgctctgcctggtgagacccgacctgaatggggccctcctcgttcctccttccaccattcctccgccggcttctagagcccatctaaacacgccagcgcggccacgaccgtcggcctcctccgcttctgcgctagccggaaacctaccttccggcacctctccatcacttcctgtgtcgctgccctctccaccacacctaccgttcccttcgcctccatcactgtcagtaaaatgggagctaaaacatacgaaatataattttttttctaagattttaggagtttttataatatttttacactcgaaaatagttataaaaag

SEQ ID NO: 54991 - DNA, 2255 bp, Zea Mays
caaagatacacacacgcacgcaggcaggcacaagaaacaaaaccgcgcctctccccctcgtccgttccgatccccagcggaaagcggagccaggaccgggagctgaagcggttgtcttccccccctcgtctccgtcaactggcacccccacaagccagcaagatggacgggttcgtggaccccttcgtcccggaacaggcatggccgcaggacgccatgttcatcggctcatcctggccatgcgccggcgccggcgccacttccctcgccgaccctgcagggacgtacgcgtacctgggagctcaggctgcaccaggccaaggcgcaggctttcacctccaagacggctcctccacggcgctcgtgccgcccttggagctgcaccagcagttcctgagcgcgcacctgccgggcgacgacgtgaccgtgacccaggaggagggcctcggcttcgaggtgaacagcgcgctggtggccggcatgctgggcccggtcctgagcgcgccctgcgcggtatcgctcgccgacagcgcgccggtggtgtgcagctcctccaacgacagcagcggcgggagcgagcagtccggcctgccgccgccgccgcggttcctagtcctgggagagcagcccgcgtcgtggccttccgcgttcccgcggatctcgtcgctggccggggaagagacttcgcggagcttcggtttcggcgcggttagcgacaacgatctcgtccgtggatcctcctgtgtcgcggacgtgaacaagtatccacagataggcaatgcgcggctacatgtagaggatgacgttgagttcaacactggaaagatgctgtcgttcgctcctggccttgactttggcgatctgcagctcagccaaaagcggtctgcgtcacctgaactctgggcagcagctctcgtcgtttgatgcaacgcgtaatcctgaacagtcgtctaacgaggccagcggcggcggaactgggttgaatgcgccgccgttcatggttccggccaatggggctgctgggaatggagctcctaagccgcgcgtcagggctcgccggggccaggcaactgatccacacagcattgcggagaggctccgaagggagaagatctctgacaggatgaagaatctacaggagctcgttccgaactccaacaggactgacaaggcatccatgcttgacgagatcatcgaatacgtcaaatttctccagctgcaagtgaagcatgagcaggctgggcgcgacggaagccgtcgtcccgctccttacacagtctcagaccgagaactccggtggtggtcttctgctgtcccctaggtcaggctcaggcaggcagcagcaggcacgcggaggcagcctgccgccgccgtcgtccgaggtccgggacggcgcggcgttcgagcaggaggtggcccagctgatggagagcgacatgacgacggcgatgcagtacctgcagagcaagggcctgtgcctcatgcccgtcgcgctggcgtcggcgatatcgggccagaagggggcgtcctccgcggcggtccagccggagaatgggggcgccaaggaaatgctgcgcgcggtgaagcccctagcaagtccaatccatgggagatgaagtgtccggatcctagacggctggctcaacgacgcagtgcagtccccggcatcaaatcaaagccatctcccgtttagattccaatgtcctaacagcctgcgccctgttttgcatgctccttccacaacttgtagccatatcatgaagcctggacctagcttactacatgtgctccatcgcaagaacgcgtattactttcttattaaaacccgccagggttcggcgcgctctccgcgttcggcggccttctcccgcagctcgtcggtccggccgcgttcggtggcctcctcttccctaccccgtggtctctggccgcctgctctgcctggtgagacccgacctgaatggggccctcctcgttcctccttccaccattcctccgccggcttctagagcccatctaaacacgccagcgcggccacgaccgtcggcctcctccgcttctgcgctagccggaaacctaccttccggcacctctccatcacttcctgtgtcgctgccctctccaccacacctaccgttcccttcgcctccatcactgtcagtaaaatgggagctaaaacatacgaaatataattttttttctaagattttaggagtttttataatatttttacactcgaaaatagttataaaaag

SEQ ID NO: 54992 - DNA, 2391 bp, Zea Mays
ctccggttctccctgcacgcacggtaacagaggcggtccgagggggccgggcgcgcccagggtcggcggccccgcaaagcccatcagcatcgacgcgccctccatacccttggacgagctaaagaagatcaccaacaacttcagcgagcgcgccctcatcggcgagggctcctacggccgcgtctacaacgccacgctcggcgacggccgcgccgccgtcatcaagaagctcgacaccagcgcctcgcaggactccgacaccgacttctccgcgcagatagccatggtctccaagctcaagaacgagtatttcctggagctcctggggtactgcttggaggacggcaaccggatggtagcctaccagttcgccacgatgggttccttgcataacatactacacgggaagaaaggagtccagggcgcggagcccggccccgtcctcaactgggctcagcgcgtgaagatagcctacggagccgcgagaggtctggagtacctgcacgagaaggtgcagccgtcgatcgtccaccgggacatccgctccagcaacgtcctcatcttcgacgatttcagctccaagatcgccgacttcaacctcaccaaccagggcaccgacacagccgcgcgcttgcactctactcgtgtgctggggacctttgggtaccatgctccagaatacgccatgacaggccagatcaaccagaagagcgacgtctacagtttcggtgtgatccttctggagctactcaccgggcggaagccagtcgaccacaccatgccgaaaggccagcaaagccttgttacctgggccactccaaggttgagcgaagacaaagtgaagcagtgtgtcgatccgaagctcaacagcgactaccctccaaaggcggttgcaaagctggcggcggttgcagcgctgtgcgttcagtacgagtccgacttccggccaaacatgaccatcgtggtgaaggcgatcacgcctctcctgaacgcacctaaaccggctgctccggccgcgccgcaatcctgatcaaccaaccagccagatgacagaatttagccaacaccgcggtttccctctgtttctgatcatagatatgtgtttcaaggaaccgcgcatccttgctccatccatccagcgcttatgcttctgtaaaggaaaaaacaacactgatctgctggtgctgcaggacacatataggggaatttttaaaaatgttaatctgctactctgaattcgtgtgcttcttgctgtaagtttgtgttataccatgtgcagttttagagagtacacatgcagtttctagctacaaaagtaggcacgacgatggtttccagcttttccaaatataaaacaaattcacagccacagctacaggagtgcatcagatcaagatagtattggctctttttcaccatatataattgctggtaccaattacaaaaaggagcaaactctgatgactccaaagtttgcttacgcttaaaccaaaactttggtgagcaactggaaaaactactacatagaatggacatgcaaaactttcaccggttgtttgcattatgaccactagggaggcattgcacatgtgtccagatcacatgacgtgctgatgaatactgcggttgtctcccactagcatttgagcactgtaaatagaaaaaggtcagcaaaaattaaaaaggataaaaacactcagaagccttttcctaaagaaaaaggtcagcaaatttctaaagtataacatgtgaagtgaaggttgatcctgcataatttgacatgattcaggtagtgatttgttacttgatcttttaccgactacctcgattcctcgaaactacatcatgtcttgaaccaattggatcgaaatggcagaggtgagcatccctgtcattctctcaataccagcaaaaaaaatcaataaataagtaaaaggttcaggttaactcctgctaggaactgtcacagtacttaatagctctcaaggcctgttttactctataccagttgagatacaatgatacatgtatcagtggaaaatctgaatgtaacaatttcaatattccctccattccaagcaggaacataagctattgagagtgagattttgaatcacacttctggctacaggccaattttccatatttttttaacaacatgggacattgggaaatctgggggattaatttttgttcaattgagatttttatgtaataatgcaaattgcaatccagatttggatctctggttccaagcagtagctagttgtgaaacatctttcattcgaattgcatctaaacagaactaaacagaataaacctaccataccaaagatgattgtgtgcacaataaataaataaataaataatgccagaaaatttctagtctta

SEQ ID NO: 54993 - DNA, 2436 bp, Zea Mays
caggagcccgattgtaatataagggttctggacagcaccggataccagtagccataccatgtctcaacgctggaggcaagagcaagagctccaacttgtatcagaagattgcaacacaaagaggaagcatggggaagacaaggatataatgggagaggtaaccaagactcatgaagccatacagtgagctccttcaacttcatatggggttcaacttaaccatgcaactgtgttgagttttagtatctgaagacttttctttggaatttgtttatggtgttagatcattggataagtccatctcaacgctgcagatggagcttgcagcaaagcggagcacacttgagctactccgatctagtggttcaccagtaacctctgaaactaaccaaccaaggaaaaaggcttttgttgtcattggagtcaacactgcattcagcagccgcaagcgccgtgattctgtccgggagacatggatgcctcaaggagaaaagctgcaacaattagaagaacagaagggaatagttatccgcttcactatcgggcacagtgctacatccaacagtatactggacaaagctatagattcagaggacgctcagcatcatgactttcttaggctggaccatgttgagggatatcatgaactctcagctaagacaaaaatattcttctctactgctgttggcatctgggacgctgacttctacgtcaaggtcgatgatgatgtgcatgtaaacctaggaatgcttgccactacccttgctcggcataaatcgaaaccaagaacttatattggctgcatgaagtcaggcccagttcttgctgacaagaatgtgaagtaccatgaacctgagtactggaaatttggggaggaaggaaataagtacttccgtcatgctacagggcagatatatgccatttcgaaagatctggcgacttatatctcaatcaatcggcctatcttgcacaaatacgcaaacgaagacgtgtcgcttggatcgtggttcatcggtttggaagttaatcacatcgatgaaaggaacatgtgctgtggaactccaccagactgtgagtggaaagggcaagctggcaatgtctgcgtagcgtctttcgactggagctgcagtggcatatgcaagtctgttgagaggatcaaagatgtacatgctcgctgcggcgaaggggattcagcagtttggagtgctcttgtctagcacataccctcctttgcccgtaaatatgtagcataattggtaagctttggtggtggtggacaccagcataggcgttaggcaactccccaagtaaacttgacaaaacccagagatcatgatcatgccccgtggaacattgccaatggtaactctggctggaaaaattctgcgtaattttggtctgtcactgttcatgaccttcggacttcggtggtgttaggagctccaaggtagggttgcaactgatgttactgatcttacatgtagggggagagtttctcagctgatgcgagatcatgtaatgcagaggacattgttttatgcaaattttgacattcttttgcgggttctttccacacatttctgtcattcattcatgagagtgcaccatactgtaacatatgagccgtggacggattgttgatttagcaaatcttgttctattaggaaatctattttctattcgtgactgtctcgtagaaaagaattacacttcctcgtgcaacaaatcaacatatacactagatcctaattaaccttttgagacgtcttttcatgaattaaccttttgagatgcattttcatgccaaaacccatgtttttaacagcaaacaaaggcatgtggcagcatgattccaagatcggacttacacagggaaaaccaaagctcctttcggtgtgcgaaaaacatgtcagacctatctgtgagcactaaatccctaactgttggacacgcggcaatataggaaaaaatatatcgccttgctaacgatccaagacaaaaactcatgccaaaaatgattctcagcgtcccaacatggccggcctcgggtgttccaattatctttagtcccctgtactcttgtgctgctgctgctgcttctcgtccagctcaatatggaggagaatgctcttgacttcttcattgaactgcatagactgaagcttcttcttgagttcctcacagccttttacctacaaaaggattggaattgatatcatagaatgggaaaatggtgaaaatgagctagtaaccaccggaaaagcagaaatatctgaacgctagaaaattgaggaaaggcttaccgtgtctgcaatctcgtcgaaatccaaaggtgtcacttgcactatttcatcttctttccaaccaagcaacatcatgaaacgcttatcttctggagaaatgtcagctggatggaaatcatcatctgattcagta

SEQ ID NO: 54994 - DNA, 2652 bp, Zea Mays
gtttttgtcagtcatgcggccagcttcctccccgctagctcactagccaggcccgggcgcctcaccgccacggtgaccgccgccttctttgacgcctgcggcctgcctaaccccgaagtctctcagtgcgtgtttggccgaaatccacggggagggcttgtcctcgcctttgctgagctgctccggagcggagccgtgcctacttgagttcaggtttgtttcgccatccgaggccaagattcggagcgtcgccgaagggaggcgatgaagggcaaaggcgggccggtggacaggaggtcctccgccaggtggaggttgctggtgctctgcgcattcagcttcggcatcggcatgctcttcaccgaccggttctggacagcaccggataccagtagccataccatgtctcaacgctggaggcaagagcaagagctccaacttgtatcagaagattgcaacacaaagaggaagcatggggaagacaaggatataatgggagaggtaaccaagactcatgaagccatacaatcattggataagtccatctcaacgctgcagatggagcttgcagcaaagcggagcacacttgagctactccgatctagtggttcaccagtaacctctgaaactaaccaaccaaggaaaaaggcttttgttgtcattggagtcaacactgcattcagcagccgcaagcgccgtgattctgtccgggagacatggatgcctcaaggagaaaagctgcaacaattagaagaacagaagggaatagttatccgcttcactatcgggcacagtgctacatccaacagtatactggacaaagctatagattcagaggacgctcagcatcatgactttcttaggctggaccatgttgagggatatcatgaactctcagctaagacaaaaatattcttctctactgctgttggcatctgggacgctgacttctacgtcaaggaatgcttgccactacccttgctcggcataaatcgaaaccaagaacttatattggctgcatgaagtcaggcccagttcttgctgacaagaatgtgaagtaccatgaacctgagtactggaaatttggggaggaaggaaataagtacttccgtcatgctacagggcagatatatgccatttcgaaagatctggcgacttatatctcaatcaatcggcctatcttgcacaaatacgcaaacgaagacgtgtcgcttggatcgtggttcatcggtttggaagttaatcacatcgatgaaaggaacatgtgctgtggaactccaccagactgtgagtggaaagggcaagctggcaatgtctgcgtagcgtctttcgactggagctgcagtggcatatgcaagtctgttgagaggatcaaagatgtacatgctcgctgcggcgaaggggattcagcagtttggagtgctcttgtctagcacataccctcctttgcccgtaaatatgtagcataattggtaagctttggtggtggtggacaccagcataggcgttaggcaactccccaagtaaacttgacaaaacccagagatcatgatcatgccccgtggaacattgccaatggtaactctggctggaaaaattctgcgtaattttggtctgtcactgttcatgaccttcggacttcggtggtgttaggagctccaaggtagggttgcaactgatgttactgatcttacatgtagggggagagtttctcagctgatgcgagatcatgtaatgcagaggacattgttttatgcaaattttgacattcttttgcgggttctttccacacatttctgtcattcattcatgagagtgcaccatactgtaacatatgagccgtggacggattgttgatttagcaaatcttgttctattaggaaatctattttctattcgtgactgtctcgtagaaaagaattacacttcctcgtgcaacaaatcaacatatacactagatcctaattaaccttttgagacgtcttttcatgaattaaccttttgagatgcattttcatgccaaaacccatgtttttaacagcaaacaaaggcatgtggcagcatgattccaagatcggacttacacagggaaaaccaaagctcctttcggtgtgcgaaaaacatgtcagacctatctgtgagcactaaatccctaactgttggacacgcggcaatataggaaaaaatatatcgccttgctaacgatccaagacaaaaactcatgccaaaaatgattctcagcgtcccaacatggccggcctcgggtgttccaattatctttagtcccctgtactcttgtgctgctgctgctgcttctcgtccagctcaatatggaggagaatgctcttgacttcttcattgaactgcatagactgaagcttcttcttgagttcctcacagccttttacctacaaaaggattggaattgatatcatagaatgggaaaatggtgaaaatgagctagtaaccaccggaaaagcagaaatatctgaacgctagaaaattgaggaaaggcttaccgtgtctgcaatctcgtcgaaatccaaaggtgtcacttgcactatttcatcttctttccaaccaagcaacatcatgaaacgcttatcttctggagaaatgtcagctggatggaaatcatcatctgattcagta

SEQ ID NO: 54995 - DNA, 2625 bp, Zea Mays
gtttttgtcagtcatgcggccagcttcctccccgctagctcactagccaggcccgggcgcctcaccgccacggtgaccgccgccttctttgacgcctgcggcctgcctaaccccgaagtctctcagtgcgtgtttggccgaaatccacggggagggcttgtcctcgcctttgctgagctgctccggagcggagccgtgcctacttgagttcaggtttgtttcgccatccgaggccaagattcggagcgtcgccgaagggaggcgatgaagggcaaaggcgggccggtggacaggaggtcctccgccaggtggaggttgctggtgctctgcgcattcagcttcggcatcggcatgctcttcaccgaccggttctggacagcaccggataccagtagccataccatgtctcaacgctggaggcaagagcaagagctccaacttgtatcagaagattgcaacacaaagaggaagcatggggaagacaaggatataatgggagaggtaaccaagactcatgaagccatacaatcattggataagtccatctcaacgctgcagatggagcttgcagcaaagcggagcacacttgagctactccgatctagtggttcaccagtaacctctgaaactaaccaaccaaggaaaaaggcttttgttgtcattggagtcaacactgcattcagcagccgcaagcgccgtgattctgtccgggagacatggatgcctcaaggagaaaagctgcaacaattagaagaacagaagggaatagttatccgcttcactatcgggcacagtgctacatccaacagtatactggacaaagctatagattcagaggacgctcagcatcatgactttcttaggctggaccatgttgagggatatcatgaactctcagctaagacaaaaatattcttctctactgctgttggcatctgggacgctgacttctacgtcaaggtcgatgatgatgtgcatgtaaacctaggaatgcttgccactacccttgctcggcataaatcgaaaccaagaacttatattggctgcatgaagtcaggcccagttcttgctgacaagaatgtgaagtaccatgaacctgagtactggaaatttggggaggaaggaaataagtacttccgtcatgctacagggcagatatatgccatttcgaaagatctggcgacttatatctcaatcaatcggcctatcttgcacaaatacgcaaacgaagacgtgtcgcttggatcgtggttcatcggtttggaagttaatcacatcgatgaaaggaacatgtgctgtggaactccaccagactgtgagtggaaagggcaagctggcaatgtctgcgtagcgtctttcgactggagctgcagtggcatatgcaagtctgttgagaggatcaaagatgtacatgctcgctgcggcgaaggggattcagcagtttggagtgctcttgtctagcacataccctcctttgcccgtaaatatgtagcataattggtaagctttggtggtggtggacaccagcataggcgttaggcaactccccaagtaaacttgacaaaacccagagatcatgatcatgccccgtggaacattgccaatggtaactctggctggaaaaattctgcgtaattttgggttgcaactgatgttactgatcttacatgtagggggagagtttctcagctgatgcgagatcatgtaatgcagaggacattgttttatgcaaattttgacattcttttgcgggttctttccacacatttctgtcattcattcatgagagtgcaccatactgtaacatatgagccgtggacggattgttgatttagcaaatcttgttctattaggaaatctattttctattcgtgactgtctcgtagaaaagaattacacttcctcgtgcaacaaatcaacatatacactagatcctaattaaccttttgagacgtcttttcatgaattaaccttttgagatgcattttcatgccaaaacccatgtttttaacagcaaacaaaggcatgtggcagcatgattccaagatcggacttacacagggaaaaccaaagctcctttcggtgtgcgaaaaacatgtcagacctatctgtgagcactaaatccctaactgttggacacgcggcaatataggaaaaaatatatcgccttgctaacgatccaagacaaaaactcatgccaaaaatgattctcagcgtcccaacatggccggcctcgggtgttccaattatctttagtcccctgtactcttgtgctgctgctgctgcttctcgtccagctcaatatggaggagaatgctcttgacttcttcattgaactgcatagactgaagcttcttcttgagttcctcacagccttttacctacaaaaggattggaattgatatcatagaatgggaaaatggtgaaaatgagctagtaaccaccggaaaagcagaaatatctgaacgctagaaaattgaggaaaggcttaccgtgtctgcaatctcgtcgaaatccaaaggtgtcacttgcactatttcatcttctttccaaccaagcaacatcatgaaacgcttatcttctggagaaatgtcagctggatggaaatcatcatctgattcagta

SEQ ID NO: 54996 - DNA, 2671 bp, Zea Mays
gtggaaccgagggagaggtactgtttttgtcagtcatgcggccagcttcctccccgctagctcactagccaggcccgggcgcctcaccgccacggtgaccgccgccttctttgacgcctgcggcctgcctaaccccgaagtctctcagtgcgtgtttggccgaaatccacggggagggcttgtcctcgcctttgctgagctgctccggagcggagccgtgcctacttgagttcaggtttgtttcgccatccgaggccaagattcggagcgtcgccgaagggaggcgatgaagggcaaaggcgggccggtggacaggaggtcctccgccaggtggaggttgctggtgctctgcgcattcagcttcggcatcggcatgctcttcaccgaccggttctggacagcaccggataccagtagccataccatgtctcaacgctggaggcaagagcaagagctccaacttgtatcagaagattgcaacacaaagaggaagcatggggaagacaaggatataatgggagaggtaaccaagactcatgaagccatacaatggagcttgcagcaaagcggagcacacttgagctactccgatctagtggttcaccagtaacctctgaaactaaccaaccaaggaaaaaggcttttgttgtcattggagtcaacactgcattcagcagccgcaagcgccgtgattctgtccgggagacatggatgcctcaaggagaaaagctgcaacaattagaagaacagaagggaatagttatccgcttcactatcgggcacagtgctacatccaacagtatactggacaaagctatagattcagaggacgctcagcatcatgactttcttaggctggaccatgttgagggatatcatgaactctcagctaagacaaaaatattcttctctactgctgttggcatctgggacgctgacttctacgtcaaggtcgatgatgatgtgcatgtaaacctaggaatgcttgccactacccttgctcggcataaatcgaaaccaagaacttatattggctgcatgaagtcaggcccagttcttgctgacaagaatgtgaagtaccatgaacctgagtactggaaatttggggaggaaggaaataagtacttccgtcatgctacagggcagatatatgccatttcgaaagatctggcgacttatatctcaatcaatcggcctatcttgcacaaatacgcaaacgaagacgtgtcgcttggatcgtggttcatcggtttggaagttaatcacatcgatgaaaggaacatgtgctgtggaactccaccagactgtgagtggaaagggcaagctggcaatgtctgcgtagcgtctttcgactggagctgcagtggcatatgcaagtctgttgagaggatcaaagatgtacatgctcgctgcggcgaaggggattcagcagtttggagtgctcttgtctagcacataccctcctttgcccgtaaatatgtagcataattggtaagctttggtggtggtggacaccagcataggcgttaggcaactccccaagtaaacttgacaaaacccagagatcatgatcatgccccgtggaacattgccaatggtaactctggctggaaaaattctgcgtaattttggtctgtcactgttcatgaccttcggacttcggtggtgttaggagctccaaggtagggttgcaactgatgttactgatcttacatgtagggggagagtttctcagctgatgcgagatcatgtaatgcagaggacattgttttatgcaaattttgacattcttttgcgggttctttccacacatttctgtcattcattcatgagagtgcaccatactgtaacatatgagccgtggacggattgttgatttagcaaatcttgttctattaggaaatctattttctattcgtgactgtctcgtagaaaagaattacacttcctcgtgcaacaaatcaacatatacactagatcctaattaaccttttgagacgtcttttcatgaattaaccttttgagatgcattttcatgccaaaacccatgtttttaacagcaaacaaaggcatgtggcagcatgattccaagatcggacttacacagggaaaaccaaagctcctttcggtgtgcgaaaaacatgtcagacctatctgtgagcactaaatccctaactgttggacacgcggcaatataggaaaaaatatatcgccttgctaacgatccaagacaaaaactcatgccaaaaatgattctcagcgtcccaacatggccggcctcgggtgttccaattatctttagtcccctgtactcttgtgctgctgctgctgcttctcgtccagctcaatatggaggagaatgctcttgacttcttcattgaactgcatagactgaagcttcttcttgagttcctcacagccttttacctacaaaaggattggaattgatatcatagaatgggaaaatggtgaaaatgagctagtaaccaccggaaaagcagaaatatctgaacgctagaaaattgaggaaaggcttaccgtgtctgcaatctcgtcgaaatccaaaggtgtcacttgcactatttcatcttctttccaaccaagcaacatcatgaaacgcttatcttctggagaaatgtcagctggatggaaatcatcatctgattcagta

SEQ ID NO: 54997 - DNA, 814 bp, Zea Mays
gtttttgtcagtcatgcggccagcttcctccccgctagctcactagccaggcccgggcgcctcaccgccacggtgaccgccgccttctttgacgcctgcggcctgcctaaccccgaagtctctcagtgcgtgtttggccgaaatccacggggagggcttgtcctcgcctttgctgagctgctccggagcggagccgtgcctacttgagttcaggtttgtttcgccatccgaggccaagattcggagcgtcgccgaagggaggcgatgaagggcaaaggcgggccggtggacaggaggtcctccgccaggtggaggttgctggtgctctgcgcattcagcttcggcatcggcatgctcttcaccgaccggttctggacagcaccggataccagtagccataccatgtctcaacgctggaggcaagagcaagagctccaacttgtatcagaagattgcaacacaaagaggaagcatggggaagacaaggatataatgggagaggtaaccaagactcatgaagccatacaatcattggataagtccatctcaacgctgcagatggagcttgcagcaaagcggagcacacttgagctactccgatctagtggttcaccagtaacctctgaaactaaccaaccaaggaaaaaggcttttgttgtcattggagtcaacactgcattcagcagccgcaagcgccgtgattctgtccgggagacatggatgcctcaaggagaaaagctgcaacaattagaagaacagaagggaatagttatccgcttcactatcgggcacagctattcttagcatgatattg

SEQ ID NO: 54998 - DNA, 1023 bp, Zea Mays
ccaacttatttatgtaccttctgtttttattagaaaaaaacggtatgctacttaaaaaaattcacttctatgcacacatcggtatgctacttaaaaaaattcacttctatgcacacatcacttcacagattaacagaatggtgaaccagtgttgtgaggaaggatgttgtcttgagttgtttggtgaagctctggctttttatttcgtacgtggtgtcgtttgtttcgctggccggggcagtgggtttcttggttcaagatgcgcttacggatacggggccatctgcgtggactggcagtgctggcatcctgcagtgcgtgtttgtgttagtgagtgggctgatctactggacgtgccactctgaagattgacttaagaagtataggtatatatggccaaggaggaggaggatggagactgcttttctcagaagcgattgcttttccgtagtacgtttctggaggcacctttggaccgtgctttccgaaacgggtggaataaagagccattttctagttgtttcaagagagatgtagataagctgtactactattttacacgtgtttatagtcgtgtatcatgttgcttaaaactactttgtgaggtgttgttttggagcaagaaacttataggggtgctaagtactcgctctgtttctttttagctgtcgccggatagttcaattttgcactatacagcgacaactaaaatgaaatgaatggagtagtcaggaaacatcgttacatttttccctgttggcgaatttctcgtgcaaggtttgacaactctagtctgctcctgtacctcccgaggaagtttggtgttgccaacattttgtagacgcctagtcatgttgtgtctggttggttggaggcctgccaggcaacaacacatcttggcccaatcggacgcctgggatggataggcagctttttgcagcctcccatccaaccgcctagtcatgttgtgtttgatgtttgggacctgtaatctctttgaagattgggcgtgtgactattaag

SEQ ID NO: 54999 - DNA, 2381 bp, Zea Mays
cgacgacggaaagaggatgatgcggggagtcggaggtccgctgctcaccatcggggatctactcagcgacctcgctgtcgacgacccactcgtcggcgtcggagatgcgtctgtcccatcatctccatcggcggcgcagcaagcggggaaggccaatccgtccgatctcagccggctctttgaggcttctctggcaatcgtgtctggaagagaaggtagttgcatcgctgcagttttagtcacaagagagactttgctgctgcaattttagtcataagaggaacactatgacgatttgatgaaggctctacaagagaaggatccttcatggccctcactgatgctgaagctgtgcgcggcgctgaagactgcggataggctgatgagttgcgcggacacgaacgcggaacagctgctggagaaggtgaaggcactggagggcgtcctcgacaggagcggtcatgcggtggcagagattgtagaagctctccagaggtcaggcctagccaatgatggtcacggttccccgtcaaaatcggctagcaagtagacgttctggtctgctttttgttcgtcttctatcccatgcaaatctctgggtattgtgagtgagttgtatgtcgacctgtgcctccacggctttgcggcctgccttgttttttttttttacccctcaccgctcttggaatgcgcgtttgtgtttatcctgtcagaagtagcgggcgatactggatttgcggtgtacaagcttcttccttcttggatcattagcttggtttcttgctaagttgcaccaagtctgaaatcaactcaaaattctggagcagaaagacgctaaaaatgccagattgcgtacgctttgtgaaacgtgagaacttgaccgccttcaatgtttgaacgcagagcatcttccgaaccagtaaaaaaaagcggtttcatctcatttgtggacgagtttacatgaaacatttcgattcacataaagtctacagtctagcgtgccaggacgtctcgaatttcttccaaaatattccaaaatgggctatcagcatccgaattccgaaggcacgatgaatttgcacttcatatttgggagctggaactacagtccctcaccctgttcattcattcagaaaagtgcggtggtttctcgtgaacgagcaacccagaaaaagtacacctgtcgcgtaagcgtcctcaggcagcagctccccggtcgcggtctctgtctctctgaagggaaagctctgtttccccttcccggtgccggagtcggggaaggtcaccgcgggcgcgagccgatggacagcaacaacctcctggcggcgtggccggtcctggggccgggcgtcgccggcgccgtattcggcgcaggctggtggttttgggtcgacgccgtcgtctgcagcgccgccgccgtgccattcctccactacctcccagggttcttcgcctcgttcgccgcgctcatgttcaactgcgtcaaccgggaggacatcggcgatggctactactcaccgtacgacgactccgagtggagggtgaagctctggctttttatttcgtacgtggtgtcgtttgtttcgctggccggggcagtgggtttcttggttcaagatgcgcttacggatacggggccatctgcgtggactggcagtgctggcatcctgcagtgcgtgtttgtgttagtgagtgggctgatctactggacgtgccactctgaagattgacttaagaagtataggtatatatggccaaggaggaggaggatggagactgcttttctcagaagcgattgcttttccgtagtacgtttctggaggcacctttggaccgtgctttccgaaacgggtggaataaagagccattttctagttgtttcaagagagatgtagataagctgtactactattttacacgtgtttatagtcgtgtatcatgttgcttaaaactactttgtgaggtgttgttttggagcaagaaacttataggggtgctaagtactcgctctgtttctttttagctgtcgccggatagttcaattttgcactatacagcgacaactaaaatgaaatgaatggagtagtcaggaaacatcgttacatttttccctgttggcgaatttctcgtgcaaggtttgacaactctagtctgctcctgtacctcccgaggaagtttggtgttgccaacattttgtagacgcctagtcatgttgtgtctggttggttggaggcctgccaggcaacaacacatcttggcccaatcggacgcctgggatggataggcagctttttgcagcctcccatccaaccgcctagtcatgttgtgtttgatgtttgggacctgtaatctctttgaagattgggcgtgtgactattaag

SEQ ID NO: 55000 - DNA, 2132 bp, Zea Mays
cgacgacggaaagaggatgatgcggggagtcggaggtccgctgctcaccatcggggatctactcagcgacctcgctgtcgacgacccactcgtcggcgtcggagatgcgtctgtcccatcatctccatcggcggcgcagcaagcggggaaggccaatccgtccgatctcagccggctctttgaggaacactatgacgatttgatgaaggctctacaagagaaggatccttcatggccctcactgatgctgaagctgtgcgcggcgctgaagactgcggataggctgatgagttgcgcggacacgaacgcggaacagctgctggagaaggtgaaggcactggagggcgtcctcgacaggagcggtcatgcggtggcagagattgtagaagctctccagaggtcaggcctagccaatgatggtcacggttccccgtcaaaatcggctagcaagtagacgttctggtctgctttttgttcgtcttctatcccatgcaaatctctgggtattgtgagtgagttgtatgtcgacctgtgcctccacggctttgcggcctgccttgttttttttttttacccctcaccgctcttggaatgcgcgtttgtgtttatcctgtcagaagtagcgggcgatactggatttgcggtgtacaagcttcttccttcttggatcattagcttggtttcttgctaagttgcaccaagtctgaaatcaactcaaaattctggagcagaaagacgctaaaaatgccagattgcgtacgctttgtgaaacgtgagaacttgaccgccttcaatgtttgaacgcagagcatcttccgaaccagtaaaaaaaagcggtttcatctcatttgtggacgagtttacatgaaacatttcgattcacataaagtctacagtctagcgtgccaggacgtctcgaatttcttccaaaatattccaaaatgggctatcagcatccgaattccgaaggcacgatgaatttgcacttcatatttgggagctggaactacagtccctcaccctgttcattcattcagaaaagtgcggtggtttctcgtgaacgagcaacccagaaaaagtacacctgtcgcgtaagcgtcctcaggcagcagctccccggtcgcggtctctgtctctctgaagggaaagctctgtttccccttcccggtgccggagtcggggaaggtcaccgcgggcgcgagccgatggacagcaacaacctcctggcggcgtggccggtcctggggccgggcgtcgccggcgccgtattcggcgcaggctggtggttttgggtcgacgccgtcgtctgcagcgccgccgccgtgccattcctccactacctcccagggttcttcgcctcgttcgccgcgctcatgttcaactgcgtcaaccgggaggacatcggcgatggctactactcaccgtacgacgactccgagtggagtgggctgatctactggacgtgccactctgaagattgacttaagaagtataggtatatatggccaaggaggaggaggatggagactgcttttctcagaagcgattgcttttccgtagtacgtttctggaggcacctttggaccgtgctttccgaaacgggtggaataaagagccattttctagttgtttcaagagagatgtagataagctgtactactattttacacgtgtttatagtcgtgtatcatgttgcttaaaactactttgtgaggtgttgttttggagcaagaaacttataggggtgctaagtactcgctctgtttctttttagctgtcgccggatagttcaattttgcactatacagcgacaactaaaatgaaatgaatggagtagtcaggaaacatcgttacatttttccctgttggcgaatttctcgtgcaaggtttgacaactctagtctgctcctgtacctcccgaggaagtttggtgttgccaacattttgtagacgcctagtcatgttgtgtctggttggttggaggcctgccaggcaacaacacatcttggcccaatcggacgcctgggatggataggcagctttttgcagcctcccatccaaccgcctagtcatgttgtgtttgatgtttgggacctgtaatctctttgaagattgggcgtgtgactattaag

SEQ ID NO: 55001 - DNA, 2278 bp, Zea Mays
cgacgacggaaagaggatgatgcggggagtcggaggtccgctgctcaccatcggggatctactcagcgacctcgctgtcgacgacccactcgtcggcgtcggagatgcgtctgtcccatcatctccatcggcggcgcagcaagcggggaaggccaatccgtccgatctcagccggctctttgaggaacactatgacgatttgatgaaggctctacaagagaaggatccttcatggccctcactgatgctgaagctgtgcgcggcgctgaagactgcggataggctgatgagttgcgcggacacgaacgcggaacagctgctggagaaggtgaaggcactggagggcgtcctcgacaggagcggtcatgcggtggcagagattgtagaagctctccagaggtcaggcctagccaatgatggtcacggttccccgtcaaaatcggctagcaagtagacgttctggtctgctttttgttcgtcttctatcccatgcaaatctctgggtattgtgagtgagttgtatgtcgacctgtgcctccacggctttgcggcctgccttgttttttttttttacccctcaccgctcttggaatgcgcgtttgtgtttatcctgtcagaagtagcgggcgatactggatttgcggtgtacaagcttcttccttcttggatcattagcttggtttcttgctaagttgcaccaagtctgaaatcaactcaaaattctggagcagaaagacgctaaaaatgccagattgcgtacgctttgtgaaacgtgagaacttgaccgccttcaatgtttgaacgcagagcatcttccgaaccagtaaaaaaaagcggtttcatctcatttgtggacgagtttacatgaaacatttcgattcacataaagtctacagtctagcgtgccaggacgtctcgaatttcttccaaaatattccaaaatgggctatcagcatccgaattccgaaggcacgatgaatttgcacttcatatttgggagctggaactacagtccctcaccctgttcattcattcagaaaagtgcggtggtttctcgtgaacgagcaacccagaaaaagtacacctgtcgcgtaagcgtcctcaggcagcagctccccggtcgcggtctctgtctctctgaagggaaagctctgtttccccttcccggtgccggagtcggggaaggtcaccgcgggcgcgagccgatggacagcaacaacctcctggcggcgtggccggtcctggggccgggcgtcgccggcgccgtattcggcgcaggctggtggttttgggtcgacgccgtcgtctgcagcgccgccgccgtgccattcctccactacctcccagggttcttcgcctcgttcgccgcgctcatgttcaactgcgtcaaccgggaggacatcggcgatggctactactcaccgtacgacgactccgagtggagctctggctttttatttcgtacgtggtgtcgtttgtttcgctggccggggcagtgggtttcttggttcaagatgcgcttacggatacggggccatctgcgtggactggcagtgctggcatcctgcagtgcgtgtttgtgttagtgagtgggctgatctactggacgtgccactctgaagattgacttaagaagtataggtatatatggccaaggaggaggaggatggagactgcttttctcagaagcgattgcttttccgtagtacgtttctggaggcacctttggaccgtgctttccgaaacgggtggaataaagagccattttctagttgtttcaagagagatgtagataagctgtactactattttacacgtgtttatagtcgtgtatcatgttgcttaaaactactttgtgaggtgttgttttggagcaagaaacttataggggtgctaagtactcgctctgtttctttttagctgtcgccggatagttcaattttgcactatacagcgacaactaaaatgaaatgaatggagtagtcaggaaacatcgttacatttttccctgttggcgaatttctcgtgcaaggtttgacaactctagtctgctcctgtacctcccgaggaagtttggtgttgccaacattttgtagacgcctagtcatgttgtgtctggttggttggaggcctgccaggcaacaacacatcttggcccaatcggacgcctgggatggataggcagctttttgcagcctcccatccaaccgcctagtcatgttgtgtttgatgtttgggacctgtaatctctttgaagattgggcgtgtgactattaag

SEQ ID NO: 55002 - DNA, 1432 bp, Zea Mays
cgacgacggaaagaggatgatgcggggagtcggaggtccgctgctcaccatcggggatctactcagcgacctcgctgtcgacgacccactcgtcggcgtcggagatgcgtctgtcccatcatctccatcggcggcgcagcaagcggggaaggccaatccgtccgatctcagccggctctttgagaaaagtgcggtggtttctcgtgaacgagcaacccagaaaaagtacacctgtcgcgtaagcgtcctcaggcagcagctccccggtcgcggtctctgtctctctgaagggaaagctctgtttccccttcccggtgccggagtcggggaaggtcaccgcgggcgcgagccgatggacagcaacaacctcctggcggcgtggccggtcctggggccgggcgtcgccggcgccgtattcggcgcaggctggtggttttgggtcgacgccgtcgtctgcagcgccgccgccgtgccattcctccactacctcccagggttcttcgcctcgttcgccgcgctcatgttcaactgcgtcaaccgggaggacatcggcgatggctactactcaccgtacgacgactccgagtggagggtgaagctctggctttttatttcgtacgtggtgtcgtttgtttcgctggccggggcagtgggtttcttggttcaagatgcgcttacggatacggggccatctgcgtggactggcagtgctggcatcctgcagtgcgtgtttgtgttagtgagtgggctgatctactggacgtgccactctgaagattgacttaagaagtataggtatatatggccaaggaggaggaggatggagactgcttttctcagaagcgattgcttttccgtagtacgtttctggaggcacctttggaccgtgctttccgaaacgggtggaataaagagccattttctagttgtttcaagagagatgtagataagctgtactactattttacacgtgtttatagtcgtgtatcatgttgcttaaaactactttgtgaggtgttgttttggagcaagaaacttataggggtgctaagtactcgctctgtttctttttagctgtcgccggatagttcaattttgcactatacagcgacaactaaaatgaaatgaatggagtagtcaggaaacatcgttacatttttccctgttggcgaatttctcgtgcaaggtttgacaactctagtctgctcctgtacctcccgaggaagtttggtgttgccaacattttgtagacgcctagtcatgttgtgtctggttggttggaggcctgccaggcaacaacacatcttggcccaatcggacgcctgggatggataggcagctttttgcagcctcccatccaaccgcctagtcatgttgtgtttgatgtttgggacctgtaatctctttgaagattgggcgtgtgactattaag

SEQ ID NO: 55003 - DNA, 2261 bp, Zea Mays
gatacagaatgcagtgaggcccacgtccctctcgtctcgtacagacgacgacggaaagaggatgatgcggggagtcggaggtccgctgctcaccatcggggatctactcagcgacctcgctgtcgacgacccactcgtcggcgtcggagatgcgtctgtcccatcatctccatcggcggcgcagcaagcggggaaggccaatccgtccgatctcagccggctctttgagctgtgcgcggcgctgaagactgcggataggctgatgagttgcgcggacacgaacgcggaacagctgctggagaaggtgaaggcactggagggcgtcctcgacaggagcggtcatgcggtggcagagattgtagaagctctccagaggtcaggcctagccaatgatggtcacggttccccgtcaaaatcggctagcaagtagacgttctggtctgctttttgttcgtcttctatcccatgcaaatctctgggtattgtgagtgagttgtatgtcgacctgtgcctccacggctttgcggcctgccttgttttttttttttacccctcaccgctcttggaatgcgcgtttgtgtttatcctgtcagaagtagcgggcgatactggatttgcggtgtacaagcttcttccttcttggatcattagcttggtttcttgctaagttgcaccaagtctgaaatcaactcaaaattctggagcagaaagacgctaaaaatgccagattgcgtacgctttgtgaaacgtgagaacttgaccgccttcaatgtttgaacgcagagcatcttccgaaccagtaaaaaaaagcggtttcatctcatttgtggacgagtttacatgaaacatttcgattcacataaagtctacagtctagcgtgccaggacgtctcgaatttcttccaaaatattccaaaatgggctatcagcatccgaattccgaaggcacgatgaatttgcacttcatatttgggagctggaactacagtccctcaccctgttcattcattcagaaaagtgcggtggtttctcgtgaacgagcaacccagaaaaagtacacctgtcgcgtaagcgtcctcaggcagcagctccccggtcgcggtctctgtctctctgaagggaaagctctgtttccccttcccggtgccggagtcggggaaggtcaccgcgggcgcgagccgatggacagcaacaacctcctggcggcgtggccggtcctggggccgggcgtcgccggcgccgtattcggcgcaggctggtggttttgggtcgacgccgtcgtctgcagcgccgccgccgtgccattcctccactacctcccagggttcttcgcctcgttcgccgcgctcatgttcaactgcgtcaaccgggaggacatcggcgatggctactactcaccgtacgacgactccgagtggagggtgaagctctggctttttatttcgtacgtggtgtcgtttgtttcgctggccggggcagtgggtttcttggttcaagatgcgcttacggatacggggccatctgcgtggactggcagtgctggcatcctgcagtgcgtgtttgtgttagtgagtgggctgatctactggacgtgccactctgaagattgacttaagaagtataggtatatatggccaaggaggaggaggatggagactgcttttctcagaagcgattgcttttccgtagtacgtttctggaggcacctttggaccgtgctttccgaaacgggtggaataaagagccattttctagttgtttcaagagagatgtagataagctgtactactattttacacgtgtttatagtcgtgtatcatgttgcttaaaactactttgtgaggtgttgttttggagcaagaaacttataggggtgctaagtactcgctctgtttctttttagctgtcgccggatagttcaattttgcactatacagcgacaactaaaatgaaatgaatggagtagtcaggaaacatcgttacatttttccctgttggcgaatttctcgtgcaaggtttgacaactctagtctgctcctgtacctcccgaggaagtttggtgttgccaacattttgtagacgcctagtcatgttgtgtctggttggttggaggcctgccaggcaacaacacatcttggcccaatcggacgcctgggatggataggcagctttttgcagcctcccatccaaccgcctagtcatgttgtgtttgatgtttgggacctgtaatctctttgaagattgggcgtgtgactattaag

SEQ ID NO: 55004 - DNA, 3367 bp, Zea Mays
cttagccggagccagaccttctcttcagaccacacttgttgggctctatcagggttcattgaggcccataatcggttcgctgatacagaatgcagtgaggcccacgtccctctcgtctcgtacagacgacgacggaaagaggatgatgcggggagtcggaggtccgctgctcaccatcggggatctactcagcgacctcgctgtcgacgacccactcgtcggcgtcggagatgcgtctgtcccatcatctccatcggcggcgcagcaagcggggaaggccaatccgtccgatctcagccggctctttgagtttttgcagatcccaaaatgctgctggatttcagtaccactgatcttcaacctgagcgggttctggagcgtcgtctggtgaagaaaggctctaaggctgtcccacaggtgctggtgaaatggactcaccttccagtggactcggcgacctgggaagactggtatgttctacaggccaggtttccttcgttcgttgcttgtggacaagcaaccgctgcaggggggaagctgtcgcggccggtgtgccggacgcgcctcaatgactgaagccgacgtgtctaagcctgggttagtggcctaagtatgccagatgtcatggagtctgtaatcagggcaccacctgtgggcccagtcgtcaatgcctatgtgcagagtatgtaataagcgagacttgggaacttgagagacaagaaagaaaaagaaacagaaacttgccgccggaacctttcctggcgagcacccacctctccctcgttcgtttgagtacgcacctcacgccatcggagatcctcggtggccacggggcacaacacgcatgcacggcagacggcgagcacacaactggcgaagggcagcgcctgcaacattctcaatgaaatgcccaaaagaacacagttcgctttgatttacgtagacgcaattttactgacctggctgttgcgaacttactacataaacgttcaatgtcttgccccaggcttctctggcaatcgtgtctggaagagaaggtagttgcatcgctgcagttttagtcacaagagagactttgctgctgcaattttagtcataagaggtacacttgcgacctgcgggaaaactgaatcggagttctagatttgtcgatgcagttttggtcatccgcgcctggtcaaaccacacccttggacatcatctcgattcccacccaactaaaaaaaagaatctgattgaatatgggtctgttaacgatgctaccaggaacactatgacgatttgatgaaggctctacaagagaaggatccttcatggccctcactgatgctgaagctgtgcgcggcgctgaagactgcggataggctgatgagttgcgcggacacgaacgcggaacagctgctggagaaggtgaaggcactggagggcgtcctcgacaggagcggtcatgcggtggcagagattgtagaagctctccagaggtcaggcctagccaatgatggtcacggttccccgtcaaaatcggctagcaagtagacgttctggtctgctttttgttcgtcttctatcccatgcaaatctctgggtattgtgagtgagttgtatgtcgacctgtgcctccacggctttgcggcctgccttgttttttttttttacccctcaccgctcttggaatgcgcgtttgtgtttatcctgtcagaagtagcgggcgatactggatttgcggtgtacaagcttcttccttcttggatcattagcttggtttcttgctaagttgcaccaagtctgaaatcaactcaaaattctggagcagaaagacgctaaaaatgccagattgcgtacgctttgtgaaacgtgagaacttgaccgccttcaatgtttgaacgcagagcatcttccgaaccagtaaaaaaaagcggtttcatctcatttgtggacgagtttacatgaaacatttcgattcacataaagtctacagtctagcgtgccaggacgtctcgaatttcttccaaaatattccaaaatgggctatcagcatccgaattccgaaggcacgatgaatttgcacttcatatttgggagctggaactacagtccctcaccctgttcattcattcagaaaagtgcggtggtttctcgtgaacgagcaacccagaaaaagtacacctgtcgcgtaagcgtcctcaggcagcagctccccggtcgcggtctctgtctctctgaagggaaagctctgtttccccttcccggtgccggagtcggggaaggtcaccgcgggcgcgagccgatggacagcaacaacctcctggcggcgtggccggtcctggggccgggcgtcgccggcgccgtattcggcgcaggctggtggttttgggtcgacgccgtcgtctgcagcgccgccgccgtgccattcctccactacctcccagggttcttcgcctcgttcgccgcgctcatgttcaactgcgtcaaccgggaggacatcggcgatggctactactcaccgtacgacgactccgagtggagggtgaagctctggctttttatttcgtacgtggtgtcgtttgtttcgctggccggggcagtgggtttcttggttcaagatgcgcttacggatacggggccatctgcgtggactggcagtgctggcatcctgcagtgcgtgtttgtgttagtgagtgggctgatctactggacgtgccactctgaagattgacttaagaagtataggtatatatggccaaggaggaggaggatggagactgcttttctcagaagcgattgcttttccgtagtacgtttctggaggcacctttggaccgtgctttccgaaacgggtggaataaagagccattttctagttgtttcaagagagatgtagataagctgtactactattttacacgtgtttatagtcgtgtatcatgttgcttaaaactactttgtgaggtgttgttttggagcaagaaacttataggggtgctaagtactcgctctgtttctttttagctgtcgccggatagttcaattttgcactatacagcgacaactaaaatgaaatgaatggagtagtcaggaaacatcgttacatttttccctgttggcgaatttctcgtgcaaggtttgacaactctagtctgctcctgtacctcccgaggaagtttggtgttgccaacattttgtagacgcctagtcatgttgtgtctggttggttggaggcctgccaggcaacaacacatcttggcccaatcggacgcctgggatggataggcagctttttgcagcctcccatccaaccgcctagtcatgttgtgtttgatgtttgggacctgtaatctctttgaagattgggcgtgtgactattaag

SEQ ID NO: 55005 - DNA, 4032 bp, Zea Mays
ggaggtcctttttctcccttcgaacccagaataaaaaaaaaagtttttgtaaagtagcaatatccacaggcccctcgagttatcgacgcacacgtaccactagaatgcagccatgatcgtctcctccttcctcccgctccgctcctccgtcttcgtcctcccctccagcgccgcctcccgctcccgtcccgccaccgccaccctccttccctttccaaggatcaccctcagccggcgccgccgcttggccgccgccgcgactgagagcagcagcagcagcagcgaagaaggagaaggagaagcggcgggcgggagtacgaacgggtccctcccgggcctgccccctgtggaggaggaggaggagctgtgccccgtggactgcgtgacggagttcaagacggacgaggagttccagcgccacctgaaccggtccagggccacgggcgctctggtggtggtggacttctaccggccctcctgcggcagctgcaagtacatcgagaaggccttcacgcgcctctgcaaggggtccggcgacgacggcgctcccgtcgtattcctcaagcacaacgtgatcgacgagtacgacgagcagtcggaggtggcggaccggctgcgcatcaagatcgtgccgctcttccatttctacgtggacggggtgctggtggagtcgttcccaacgagggacaaggagaggatcattgccgtcatccggaagtacacctcggtcgagccagaaccagaacctgaggaagagcagcaggagtgattccatttccactccagtggtggacatcagtttcctcgagggtgcagatagcctgctgaatcagagatatcatgcacaacagcaccacaggattgtttggagattggagtttatacacctatcccagcatttgggatgtgtgagctaccaccagcagtatatcatgaatctggatcaatgtaccactatctgtaatacgagatgatgtatagtttctgaatcaaacatgagcacttatcttgtacgccgtatctcgaacggaactgtgcaggacgcaaattagaacctataaaatttgatatatcgggagagtaaataacaaagtacatcaatacattttttgagaggtttgcatgagtcttgatagtttaattatacggaaagtttgataattagacagttatgattccagccgcttcaaaaatacagatactgagaatgaaactgttcttcattggtctcgtggatccagtcaagtcaagctatacaagatcagttgatccagtactgttttccttttaaacgtaaataaatttttttttataacacacctacattcgtttagttgttcgggaataaaattacaaacaccatctggtaggtaggtagtgacgaaaaccatacaagtgctgctaattaaagagcttctagcaaacctgtgtgcattaccaccgttggttctgcgattttcatgaacaaaccacctaccccaatccatatggattgagggggtttcaatccctagcaaatcaaaatcttctctaatccatatcaatcccctacaatatatatgaattgaaaataaccgaacaaaagccaaacggtgaaatggagcttctggacaagaatgtccttagccggagccagaccttctcttcagaccacacttgttgggctctatcagggttcattgaggcccataatcggttcgctgatacagaatgcagtgaggcccacgtccctctcgtctcgtacagacgacgacggaaagaggatgatgcggggagtcggaggtccgctgctcaccatcggggatctactcagcgacctcgctgtcgacgacccactcgtcggcgtcggagatgcgtctgtcccatcatctccatcggcggcgcagcaagcggggaaggccaatccgtccgatctcagccggctctttgaggaacactatgacgatttgatgaaggctctacaagagaaggatccttcatggccctcactgatgctgaagctgtgcgcggcgctgaagactgcggataggctgatgagttgcgcggacacgaacgcggaacagctgctggagaaggtgaaggcactggagggcgtcctcgacaggagcggtcatgcggtggcagagattgtagaagctctccagaggtcaggcctagccaatgatggtcacggttccccgtcaaaatcggctagcaagtagacgttctggtctgctttttgttcgtcttctatcccatgcaaatctctgggtattgtgagtgagttgtatgtcgacctgtgcctccacggctttgcggcctgccttgttttttttttttacccctcaccgctcttggaatgcgcgtttgtgtttatcctgtcagaagtagcgggcgatactggatttgcggtgtacaagcttcttccttcttggatcattagcttggtttcttgctaagttgcaccaagtctgaaatcaactcaaaattctggagcagaaagacgctaaaaatgccagattgcgtacgctttgtgaaacgtgagaacttgaccgccttcaatgtttgaacgcagagcatcttccgaaccagtaaaaaaaagcggtttcatctcatttgtggacgagtttacatgaaacatttcgattcacataaagtctacagtctagcgtgccaggacgtctcgaatttcttccaaaatattccaaaatgggctatcagcatccgaattccgaaggcacgatgaatttgcacttcatatttgggagctggaactacagtccctcaccctgttcattcattcagaaaagtgcggtggtttctcgtgaacgagcaacccagaaaaagtacacctgtcgcgtaagcgtcctcaggcagcagctccccggtcgcggtctctgtctctctgaagggaaagctctgtttccccttcccggtgccggagtcggggaaggtcaccgcgggcgcgagccgatggacagcaacaacctcctggcggcgtggccggtcctggggccgggcgtcgccggcgccgtattcggcgcaggctggtggttttgggtcgacgccgtcgtctgcagcgccgccgccgtgccattcctccactacctcccagggttcttcgcctcgttcgccgcgctcatgttcaactgcgtcaaccgggaggacatcggcgatggctactactcaccgtacgacgactccgagtggagggtgaagctctggctttttatttcgtacgtggtgtcgtttgtttcgctggccggggcagtgggtttcttggttcaagatgcgcttacggatacggggccatctgcgtggactggcagtgctggcatcctgcagtgcgtgtttgtgttagtgagtgggctgatctactggacgtgccactctgaagattgacttaagaagtataggtatatatggccaaggaggaggaggatggagactgcttttctcagaagcgattgcttttccgtagtacgtttctggaggcacctttggaccgtgctttccgaaacgggtggaataaagagccattttctagttgtttcaagagagatgtagataagctgtactactattttacacgtgtttatagtcgtgtatcatgttgcttaaaactactttgtgaggtgttgttttggagcaagaaacttataggggtgctaagtactcgctctgtttctttttagctgtcgccggatagttcaattttgcactatacagcgacaactaaaatgaaatgaatggagtagtcaggaaacatcgttacatttttccctgttggcgaatttctcgtgcaaggtttgacaactctagtctgctcctgtacctcccgaggaagtttggtgttgccaacattttgtagacgcctagtcatgttgtgtctggttggttggaggcctgccaggcaacaacacatcttggcccaatcggacgcctgggatggataggcagctttttgcagcctcccatccaaccgcctagtcatgttgtgtttgatgtttgggacctgtaatctctttgaagattgggcgtgtgactattaag

SEQ ID NO: 55006 - DNA, 655 bp, Zea Mays
agtgaggcccacgtccctctcgtctcgtacagacgacgacggaaagaggatgatgcggggagtcggaggtccgctgctcaccatcggggatctactcagcgacctcgctgtcgacgacccactcgtcggcgtcggagatgcgtctgtcccatcatctccatcggcggcgcagcaagcggggaaggccaatccgtccgatctcagccggctctttgagatcccaaaatgctgctggatttcagtaccactgatcttcaacctgagcgggttctggagcgtcgtctggtgaagaaaggctctaaggctgtcccacaggtgctggtgaaatggactcaccttccagtggactcggcgacctgggaagactggtatgttctacaggccaggtttccttcgttcgttgcttgtggacaagcaaccgctgcaggggggaagctgtcgcggccggtgtgccggacgcgcctcaatgactgaagccgacgtgtctaagcctgggttagtggcctaagtatgccagatgtcatggagtctgtaatcagggcaccacctgtgggcccagtcgtcaatgcctatgtgcagagtatgtaataagcgagacttgggaacttgagagacaagaaagaaaaagaaacagaaacttgccgccggaaccttt

SEQ ID NO: 55007 - DNA, 271 bp, Zea Mays
gttcgctgatacagaatgcagtgaggcccacgtccctctcgtctcgtacagacgacgacggaaagaggatgatgcggggagtcggaggtccgctgctcaccatcggggatctactcagcgacctcgctgtcgacgacccactcgtcggcgtcggagatgcgtctgtcccatcatctccatcggcggcgcagcaagcggggaaggccaatccgtccgatctcagccggctctttgaggcggtgcatattgccaagatccaagaagccttatt

SEQ ID NO: 55008 - DNA, 523 bp, Zea Mays
gtgaggcccacgtccctctcgtctcgtacagacgacgacggaaagaggatgatgcggggagtcggaggtccgctgctcaccatcggggatctactcagcgacctcgctgtcgacgacccactcgtcggcgtcggagatgcgtctgtcccatcatctccatcggcggcgcagcaagcggggaaggccaatccgtccgatctcagccggctctttgagatcccaaaatgctgctggatttcagtaccactgatcttcaacctgagcgggttctggagcgtcgtctggtgtagaaaggctctaaggctgtcccacaggtgctggtgaaatggactcaccttccagtggactcggcgacctgggaagactggtatgttctacaggccaggtttccttcgttcgttgcttgtggacaagcaaccgctgcaggggggaagctgtcgcggccggtgtgccggacgcgcctcaatgactgaagccgacgtgtctaagcctgggttagtggcctaagtatgccagatgtcat

SEQ ID NO: 55009 - DNA, 1234 bp, Zea Mays
cttcgaacccagaataaaaaaaaaagtttttgtaaagtagcaatatccacaggcccctcgagttatcgacgcacacgtaccactagaatgcagccatgatcgtctcctccttcctcccgctccgctcctccgtcttcgtcctcccctccagcgccgcctcccgctcccgtcccgccaccgccaccctccttccctttccaaggatcaccctcagccggcgccgccgcttggccgccgccgcgactgagagcagcagcagcagcagcgaagaaggagaaggagaagcggcgggcgggagtacgaacgggtccctcccgggcctgccccctgtggaggaggaggaggagctgtgccccgtggactgcgtgacggagttcaagacggacgaggagttccagcgccacctgaaccggtccagggccacgggcgctctggtggtggtggacttctaccggccctcctgcggcagctgcaagtacatcgagaaggccttcacgcgcctctgcaaggggtccggcgacgacggcgctcccgtcgtattcctcaagcacaacgtgatcgacgagtacgacgagcagtcggaggtggcggaccggctgcgcatcaagatcgtgccgctcttccatttctacgtggacggggtgctggtggagtcgttcccaacgagggacaaggagaggatcattgccgtcatccggaagtacacctcggtcgagccagaaccagaacctgactgagtgtggataagtgtcgatcaacgatcaacgatcgaagggacgcattttctctctctctgaacatgaacacatcgctacgcttttgcagctgttgtaagaattcgagtcgagctgacatttccatttccctcgcagggaagagcagcaggagtgattccatttccactccagtggtggacatcagtttcctcgagggtgcagatagcctgctgaatcagagatatcatgcacaacagcaccacaggattgtttggagattggagtttatacacctatcccagcatttgggatgtgtgagctaccaccagcagtatatcatgaatctggatcaatgtaccactatctgtaatacgagatgatgtatagtttctgaatcaaacatgagcacttatcttgtacgccgtatctcgaacggaactgtgcaggacgcaaattagaacctataaaatttgatatatcgggagagtaaataacaaagtacatcaatacattttttg

SEQ ID NO: 55010 - DNA, 2633 bp, Zea Mays
cgcggaaatccaacccgccacgcgcatgtgacccatccgatccgaccaccctctcctctcctctcttcctcttcctcttcgtcgcaccaccaccaccaccaccctccctctcctcgcctcccaaaaaaggcgcggcaccaaaaggcgcgagagagaggcacggggaccgcccgcctcgctcgcctgcgcaccggattcgtcgctgcggcggtggttgcagcggcggcggcctggcggggagatgtcttcgcgctcggggtccacgggcggagggagcaccggcggcggcagcagcgcggggggaggcggcgcggtgccgctggccgtgctgctcaggcgggaggtggccagcgagcgcaccgcgtcggagcgcccggagctgcactggggcctcttcagccaggccaagaagggcgaggacttcaccttcctcaagcccgaatgcgagcgcgtccctgacgtcccgtcctcctccttctccgccttcggcctgtttgatgggcataatgggaacggagccgcaatttacaccaaggagaatctcttgaacaacatcttgagtgcggtcccagccgatctgaacagggaagactggcttgctgcactcccaagagcgctggttgctgcattcgtcaaaaccgataaggatttccagactaaagggacaactgtgacatttgtcataatagatggattggtcatcactgttgcatcagttggtgattcccgttgtgtactacaagctgaaggttcaatttatcatctatcctctgatcatcggttcgatgcaagcaaagaggaggttgatcgtgtaacagaatgcggaggtgatgttggaaggctaaatgttgttggtggtgctgagattggcccccttagatgttggcctggaggtttgtgcctatcaaggtcaattggagatcaagatgttggtgaatttatcgttccagttcctcttgtgaagcaagttaaggtatcactgtttaattcttcacatcagcttcgcaggactgcacttgttttgctttgaaatcttatgccttaccctttcctcttgatctccaatattactaataaagttacagtttctccaagtctctcctaatatgtgtagctattcagcattatgtcaatatcttcagcattcagaccgtattctgcctcataatatgtgtagctatctactgcgggtggccgactcattattgcaagtgatggtgtttgggatgtcttgtctccagaagtagcttttaactgttcacgtgaacttcctccagtgcctgcagctgagcaaatcgttaaaactgctgtgcaatcaaaagggctgagggatgataccacctgtattgttgttgatataatagtagaaaaaaacaactcttccatgccacttgctaaaaggcaaccaggaattggtgtcttcaaaaatatgttcggcaagaaaaaatcatcggattcatcatcccattcccattcagatagagaatatatggatccagataacgtggaggaaatatttgaggatgggtgtgcgcttctttctagacggctggattctgaataccctgttcgaaatatgttcaaactgttcatatgtgccatttgtcaagtagagttaaagccaaaccaaggtatatctgtacatgaagattcatcacaacctgggagcttgcgtcgctgggatggtccattcctttgccagagctgtcaggaaaagaaagaagcaatggagggaaagcgtcgttcacgagattcatcaagaaacagtgggtaagtgaatagttgacatgtgtagagtgatcaggtaactactgaccagcaacaccccagcaccaccattttgcagcatttcttctgttgtggcacttccttgatcacattcacatgtaatatctgggagttctgatctagaactagattgaagtattgaattgctactgtggaggtggctgctgcttatagctctcatcccaagtgaggagcatgccttgtcctcagcaaggtccttgcccaggaatgtaggcagctttactcagccctttgaccttgatggcacatacaggttgaaagattaacgatgccaaaatgatatggcttgtatattctaaggtccattgctgcgacgatcttcttatagagttctgacaaatagctatggcactgtttctgaattagaactaggcgcttacatcaattcttccccgttcgagctagccttaatttatggctagagaccttagtattatcagtcctgctgaggtccagccttcgctgacaccaatgtaattgtcatctaaaatattctttcaagcagctgtgattcatcagtaagacattagttgtcatgtacaatgtacaaaatcttgctaacaagacagatctgtttcgtcattacttggatgaaaatcaattggtgtctcaattggaggaaagaaattgttctaataaatgtggatggtagacttgcttgagtcactcgaagtgtcactgaccctttttgtatattttattttagagtaaaatacactctaaacttgtagcgttatgtcattccagtcctaaaactttcaaagtgcacatttaaagtctttaaatttgtgaaattgcatcgtccttatctctaaacttttaat

SEQ ID NO: 55011 - DNA, 2606 bp, Zea Mays
cgcggaaatccaacccgccacgcgcatgtgacccatccgatccgaccaccctctcctctcctctcttcctcttcctcttcgtcgcaccaccaccaccaccaccctccctctcctcgcctcccaaaaaaggcgcggcaccaaaaggcgcgagagagaggcacggggaccgcccgcctcgctcgcctgcgcaccggattcgtcgctgcggcggtggttgcagcggcggcggcctggcggggagatgtcttcgcgctcggggtccacgggcggagggagcaccggcggcggcagcagcgcggggggaggcggcgcggtgccgctggccgtgctgctcaggcgggaggtggccagcgagcgcaccgcgtcggagcgcccggagctgcactggggcctcttcagccaggccaagaagggcgaggacttcaccttcctcaagcccgaatgcgagcgcgtccctgacgtcccgtcctcctccttctccgccttcggcctgtttgatgggcataatgggaacggagccgcaatttacaccaaggagaatctcttgaacaacatcttgagtgcggtcccagccgatctgaacagggaagactggcttgctgcactcccaagagcgctggttgctgcattcgtcaaaaccgataaggatttccagactaaagatggattggtcatcactgttgcatcagttggtgattcccgttgtgtactacaagctgaaggttcaatttatcatctatcctctgatcatcggttcgatgcaagcaaagaggaggttgatcgtgtaacagaatgcggaggtgatgttggaaggctaaatgttgttggtggtgctgagattggcccccttagatgttggcctggaggtttgtgcctatcaaggtcaattggagatcaagatgttggtgaatttatcgttccagttcctcttgtgaagcaagttaaggtatcactgtttaattcttcacatcagcttcgcaggactgcacttgttttgctttgaaatcttatgccttaccctttcctcttgatctccaatattactaataaagttacagtttctccaagtctctcctaatatgtgtagctattcagcattatgtcaatatcttcagcattcagaccgtattctgcctcataatatgtgtagctatctactgcgggtggccgactcattattgcaagtgatggtgtttgggatgtcttgtctccagaagtagcttttaactgttcacgtgaacttcctccagtgcctgcagctgagcaaatcgttaaaactgctgtgcaatcaaaagggctgagggatgataccacctgtattgttgttgatataatagtagaaaaaaacaactcttccatgccacttgctaaaaggcaaccaggaattggtgtcttcaaaaatatgttcggcaagaaaaaatcatcggattcatcatcccattcccattcagatagagaatatatggatccagataacgtggaggaaatatttgaggatgggtgtgcgcttctttctagacggctggattctgaataccctgttcgaaatatgttcaaactgttcatatgtgccatttgtcaagtagagttaaagccaaaccaaggtatatctgtacatgaagattcatcacaacctgggagcttgcgtcgctgggatggtccattcctttgccagagctgtcaggaaaagaaagaagcaatggagggaaagcgtcgttcacgagattcatcaagaaacagtgggtaagtgaatagttgacatgtgtagagtgatcaggtaactactgaccagcaacaccccagcaccaccattttgcagcatttcttctgttgtggcacttccttgatcacattcacatgtaatatctgggagttctgatctagaactagattgaagtattgaattgctactgtggaggtggctgctgcttatagctctcatcccaagtgaggagcatgccttgtcctcagcaaggtccttgcccaggaatgtaggcagctttactcagccctttgaccttgatggcacatacaggttgaaagattaacgatgccaaaatgatatggcttgtatattctaaggtccattgctgcgacgatcttcttatagagttctgacaaatagctatggcactgtttctgaattagaactaggcgcttacatcaattcttccccgttcgagctagccttaatttatggctagagaccttagtattatcagtcctgctgaggtccagccttcgctgacaccaatgtaattgtcatctaaaatattctttcaagcagctgtgattcatcagtaagacattagttgtcatgtacaatgtacaaaatcttgctaacaagacagatctgtttcgtcattacttggatgaaaatcaattggtgtctcaattggaggaaagaaattgttctaataaatgtggatggtagacttgcttgagtcactcgaagtgtcactgaccctttttgtatattttattttagagtaaaatacactctaaacttgtagcgttatgtcattccagtcctaaaactttcaaagtgcacatttaaagtctttaaatttgtgaaattgcatcgtccttatctctaaacttttaat

SEQ ID NO: 55012 - DNA, 2447 bp, Zea Mays
cgcggaaatccaacccgccacgcgcatgtgacccatccgatccgaccaccctctcctctcctctcttcctcttcctcttcgtcgcaccaccaccaccaccaccctccctctcctcgcctcccaaaaaaggcgcggcaccaaaaggcgcgagagagaggcacggggaccgcccgcctcgctcgcctgcgcaccggattcgtcgctgcggcggtggttgcagcggcggcggcctggcggggagatgtcttcgcgctcggggtccacgggcggagggagcaccggcggcggcagcagcgcggggggaggcggcgcggtgccgctggccgtgctgctcaggcgggaggtggccagcgagcgcaccgcgtcggagcgcccggagctgcactggggcctcttcagccaggccaagaagggcgaggacttcaccttcctcaagcccgaatgcgagcgcgtccctgacgtcccgtcctcctccttctccgccttcggcctgtttgatgggcataatgggaacggagccgcaatttacaccaaggagaatctcttgaacaacatcttgagtgcggtcccagccgatctgaacagggaagactggcttgctgcactcccaagagcgctggttgctgcattcgtcaaaaccgataaggatttccagactaaagcacgttcttcagggacaactgtgacatttgtcataatagatggattggtcatcactgttgcatcagttggtgattcccgttgtgtactacaagctgaaggttcaatttatcatctatcctctgatcatcggttcgatgcaagcaaagaggaggttgatcgtgtaacagaatgcggaggtgatgttggaaggctaaatgttgttggtggtgctgagattggcccccttagatgttggcctggaggtttgtgcctatcaaggtcaattggagatcaagatgttggtgaatttatcgttccagttcctcttgtgaagcaagttaagctatctactgcgggtggccgactcattattgcaagtgatggtgtttgggatgtcttgtctccagaagtagcttttaactgttcacgtgaacttcctccagtgcctgcagctgagcaaatcgttaaagtaacctcctttctatgtgcagccataaatcttgaatgatactcttatttacatatctgaaacttttgcagactgctgtgcaatcaaaagggctgagggatgataccacctgtattgttgttgatataatagtagaaaaaaacaactcttccatgccacttgctaaaaggcaaccaggaattggtgtcttcaaaaatatgttcggcaagaaaaaatcatcggattcatcatcccattcccattcagatagagaatatatggatccagataacgtggaggaaatatttgaggatgggtgtgcgcttctttctagacgagttaaagccaaaccaaggtatatctgtacatgaagattcatcacaacctgggagcttgcgtcgctgggatggtccattcctttgccagagctgtcaggaaaagaaagaagcaatggagggaaagcgtcgttcacgagattcatcaagaaacagtgggtaagtgaatagttgacatgtgtagagtgatcaggtaactactgaccagcaacaccccagcaccaccattttgcagcatttcttctgttgtggcacttccttgatcacattcacatgtaatatctgggagttctgatctagaactagattgaagtattgaattgctactgtggaggtggctgctgcttatagctctcatcccaagtgaggagcatgccttgtcctcagcaaggtccttgcccaggaatgtaggcagctttactcagccctttgaccttgatggcacatacaggttgaaagattaacgatgccaaaatgatatggcttgtatattctaaggtccattgctgcgacgatcttcttatagagttctgacaaatagctatggcactgtttctgaattagaactaggcgcttacatcaattcttccccgttcgagctagccttaatttatggctagagaccttagtattatcagtcctgctgaggtccagccttcgctgacaccaatgtaattgtcatctaaaatattctttcaagcagctgtgattcatcagtaagacattagttgtcatgtacaatgtacaaaatcttgctaacaagacagatctgtttcgtcattacttggatgaaaatcaattggtgtctcaattggaggaaagaaattgttctaataaatgtggatggtagacttgcttgagtcactcgaagtgtcactgaccctttttgtatattttattttagagtaaaatacactctaaacttgtagcgttatgtcattccagtcctaaaactttcaaagtgcacatttaaagtctttaaatttgtgaaattgcatcgtccttatctctaaacttttaat

SEQ ID NO: 55013 - DNA, 2511 bp, Zea Mays
cgcggaaatccaacccgccacgcgcatgtgacccatccgatccgaccaccctctcctctcctctcttcctcttcctcttcgtcgcaccaccaccaccaccaccctccctctcctcgcctcccaaaaaaggcgcggcaccaaaaggcgcgagagagaggcacggggaccgcccgcctcgctcgcctgcgcaccggattcgtcgctgcggcggtggttgcagcggcggcggcctggcggggagatgtcttcgcgctcggggtccacgggcggagggagcaccggcggcggcagcagcgcggggggaggcggcgcggtgccgctggccgtgctgctcaggcgggaggtggccagcgagcgcaccgcgtcggagcgcccggagctgcactggggcctcttcagccaggccaagaagggcgaggacttcaccttcctcaagcccgaatgcgagcgcgtccctgacgtcccgtcctcctccttctccgccttcggcctgtttgatgggcataatgggaacggagccgcaatttacaccaaggagaatctcttgaacaacatcttgagtgcggtcccagccgatctgaacagggaagactggcttgctgcactcccaagagcgctggttgctgcattcgtcaaaaccgataaggatttccagactaaagggacaactgtgacatttgtcataatagatggattggtcatcactgttgcatcagttggtgattcccgttgtgtactacaagctgaaggttcaatttatcatctatcctctgatcatcggttcgatgcaagcaaagaggagtaagattgttttctcctgatgcacgtctcttccccattctcatggcaactctttgctcctttaacttaatttggtgtgcagggttgatcgtgtaacagaatgcggaggtgatgttggaaggctaaatgttgttggtggtgctgagattggcccccttagatgttggcctggaggtttgtgcctatcaaggtcaattggagatcaagatgttggtgaatttatcgttccagttcctcttgtgaagcaagttaagctatctactgcgggtggccgactcattattgcaagtgatggtgtttgggatgtcttgtctccagaagtagcttttaactgttcacgtgaacttcctccagtgcctgcagctgagcaaatcgttaaaactgctgtgcaatcaaaagggctgagggatgataccacctgtattgttgttgatataatagtagaaaaaaacaactcttccatgccacttgctaaaaggcaaccaggaattggtgtcttcaaaaatatgttcggcaagaaaaaatcatcggattcatcatcccattcccattcagatagagaatatatggatccagataacgtggaggaaatatttgaggatgggtgtgcgcttctttctagacggctggattctgaataccctgttcgaaatatgttcaaactgttcatatgtgccatttgtcaagtagagttaaagccaaaccaaggtatatctgtacatgaagattcatcacaacctgggagcttgcgtcgctgggatggtccattcctttgccagagctgtcaggaaaagaaagaagcaatggagggaaagcgtcgttcacgagattcatcaagaaacagtgggtaagtgaatagttgacatgtgtagagtgatcaggtaactactgaccagcaacaccccagcaccaccattttgcagcatttcttctgttgtggcacttccttgatcacattcacatgtaatatctgggagttctgatctagaactagattgaagtattgaattgctactgtggaggtggctgctgcttatagctctcatcccaagtgaggagcatgccttgtcctcagcaaggtccttgcccaggaatgtaggcagctttactcagccctttgaccttgatggcacatacaggttgaaagattaacgatgccaaaatgatatggcttgtatattctaaggtccattgctgcgacgatcttcttatagagttctgacaaatagctatggcactgtttctgaattagaactaggcgcttacatcaattcttccccgttcgagctagccttaatttatggctagagaccttagtattatcagtcctgctgaggtccagccttcgctgacaccaatgtaattgtcatctaaaatattctttcaagcagctgtgattcatcagtaagacattagttgtcatgtacaatgtacaaaatcttgctaacaagacagatctgtttcgtcattacttggatgaaaatcaattggtgtctcaattggaggaaagaaattgttctaataaatgtggatggtagacttgcttgagtcactcgaagtgtcactgaccctttttgtatattttattttagagtaaaatacactctaaacttgtagcgttatgtcattccagtcctaaaactttcaaagtgcacatttaaagtctttaaatttgtgaaattgcatcgtccttatctctaaacttttaat

SEQ ID NO: 55014 - DNA, 2708 bp, Zea Mays
aaaaaacgaaaccggagtacggacacgcggaaatccaacccgccacgcgcatgtgacccatccgatccgaccaccctctcctctcctctcttcctcttcctcttcgtcgcaccaccaccaccaccaccctccctctcctcgcctcccaaaaaaggcgcggcaccaaaaggcgcgagagagaggcacggggaccgcccgcctcgctcgcctgcgcaccggattcgtcgctgcggcggtggttgcagcggcggcggcctggcggggagatgtcttcgcgctcggggtccacgggcggagggagcaccggcggcggcagcagcgcggggggaggcggcgcggtgccgctggccgtgctgctcaggcgggaggtggccagcgagcgcaccgcgtcggagcgcccggagctgcactggggcctcttcagccaggccaagaagggcgaggacttcaccttcctcaagcccgaatgcgagcgcgtccctgacgtcccgtcctcctccttctccgccttcggcctgtttgatgggcataatgggaacggagccgcaatttacaccaaggagaatctcttgaacaacatcttgagtgcggtcccagccgatctgaacagggaagactggcttgctgcactcccaagagcgctggttgctgcattcgtcaaaaccgataaggatttccagactaaagcacgttcttcagggacaactgtgacatttgtcataatagatggattggtcatcactgttgcatcagttggtgattcccgttgtgtactacaagctgaaggttcaatttatcatctatcctctgatcatcggttcgatgcaagcaaagaggaggttgatcgtgtaacagaatgcggaggtgatgttggaaggctaaatgttgttggtggtgctgaggtttgaacttcgcccatatttttttcctgttagctaatattggcccccttagatgttggcctggaggtttgtgcctatcaaggtcaattggagatcaagatgttggtgaatttatcgttccagttcctcttgtgaagcaagttaaggtatcactgtttaattcttcacatcagcttcgcaggactgcacttgttttgctttgaaatcttatgccttaccctttcctcttgatctccaatattactaataaagttacagtttctccaagtctctcctaatatgtgtagctattcagcattatgtcaatatcttcagcattcagaccgtattctgcctcataatatgtgtagctatctactgcgggtggccgactcattattgcaagtgatggtgtttgggatgtcttgtctccagaagtagcttttaactgttcacgtgaacttcctccagtgcctgcagctgagcaaatcgttaaaactgctgtgcaatcaaaagggctgagggatgataccacctgtattgttgttgatataatagtagaaaaaaacaactcttccatgccacttgctaaaaggcaaccaggaattggtgtcttcaaaaatatgttcggcaagaaaaaatcatcggattcatcatcccattcccattcagatagagaatatatggatccagataacgtggaggaaatatttgaggatgggtgtgcgcttctttctagacggctggattctgaataccctgttcgaaatatgttcaaactgttcatatgtgccatttgtcaagtagagttaaagccaaaccaaggtatatctgtacatgaagattcatcacaacctgggagcttgcgtcgctgggatggtccattcctttgccagagctgtcaggaaaagaaagaagcaatggagggaaagcgtcgttcacgagattcatcaagaaacagtgggtaagtgaatagttgacatgtgtagagtgatcaggtaactactgaccagcaacaccccagcaccaccattttgcagcatttcttctgttgtggcacttccttgatcacattcacatgtaatatctgggagttctgatctagaactagattgaagtattgaattgctactgtggaggtggctgctgcttatagctctcatcccaagtgaggagcatgccttgtcctcagcaaggtccttgcccaggaatgtaggcagctttactcagccctttgaccttgatggcacatacaggttgaaagattaacgatgccaaaatgatatggcttgtatattctaaggtccattgctgcgacgatcttcttatagagttctgacaaatagctatggcactgtttctgaattagaactaggcgcttacatcaattcttccccgttcgagctagccttaatttatggctagagaccttagtattatcagtcctgctgaggtccagccttcgctgacaccaatgtaattgtcatctaaaatattctttcaagcagctgtgattcatcagtaagacattagttgtcatgtacaatgtacaaaatcttgctaacaagacagatctgtttcgtcattacttggatgaaaatcaattggtgtctcaattggaggaaagaaattgttctaataaatgtggatggtagacttgcttgagtcactcgaagtgtcactgaccctttttgtatattttattttagagtaaaatacactctaaacttgtagcgttatgtcattccagtcctaaaactttcaaagtgcacatttaaagtctttaaatttgtgaaattgcatcgtccttatctctaaacttttaat

SEQ ID NO: 55015 - DNA, 2724 bp, Zea Mays
atgcatagatcatgatcgtcgggtctgtactttgtaccctggagccgttcaaagaaaaaacgaaaccggagtacggacacgcggaaatccaacccgccacgcgcatgtgacccatccgatccgaccaccctctcctctcctctcttcctcttcctcttcgtcgcaccaccaccaccaccaccctccctctcctcgcctcccaaaaaaggcgcggcaccaaaaggcgcgagagagaggcacggggaccgcccgcctcgctcgcctgcgcaccggattcgtcgctgcggcggtggttgcagcggcggcggcctggcggggagatgtcttcgcgctcggggtccacgggcggagggagcaccggcggcggcagcagcgcggggggaggcggcgcggtgccgctggccgtgctgctcaggcgggaggtggccagcgagcgcaccgcgtcggagcgcccggagctgcactggggcctcttcagccaggccaagaagggcgaggacttcaccttcctcaagcccgaatgcgagcgcgtccctgacgtcccgtcctcctccttctccgccttcggcctgtttgatgggcataatgggaacggagccgcaatttacaccaaggagaatctcttgaacaacatcttgagtgcggtcccagccgatctgaacagggaagactggcttgctgcactcccaagagcgctggttgctgcattcgtcaaaaccgataaggatttccagactaaagcacgttcttcagggacaactgtgacatttgtcataatagatggattggtcatcactgttgcatcagttggtgattcccgttgtgtactacaagctgaaggttcaatttatcatctatcctctgatcatcggttcgatgcaagcaaagaggaggttgatcgtgtaacagaatgcggaggtgatgttggaaggctaaatgttgttggtggtgctgagattggcccccttagatgttggcctggaggtttgtgcctatcaaggtcaattggagatcaagatgttggtgaatttatcgttccagttcctcttgtgaagcaagttaaggtatcactgtttaattcttcacatcagcttcgcaggactgcacttgttttgctttgaaatcttatgccttaccctttcctcttgatctccaatattactaataaagttacagtttctccaagtctctcctaatatgtgtagctattcagcattatgtcaatatcttcagcattcagaccgtattctgcctcataatatgtgtagctatctactgcgggtggccgactcattattgcaagtgatggtgtttgggatgtcttgtctccagaagtagcttttaactgttcacgtgaacttcctccagtgcctgcagctgagcaaatcgttaaaactgctgtgcaatcaaaagggctgagggatgataccacctgtattgttgttgatataatagtagaaaaaaacaactcttccatgccacttgctaaaaggcaaccaggaattggtgtcttcaaaaatatgttcggcaagaaaaaatcatcggattcatcatcccattcccattcagatagagaatatatggatccagataacgtggaggaaatatttgaggatgggtgtgcgcttctttctagacggctggattctgaataccctgttcgaaatatgttcaaactgttcatatgtgccatttgtcaagtagagttaaagccaaaccaaggtatatctgtacatgaagattcatcacaacctgggagcttgcgtcgctgggatggtccattcctttgccagagctgtcaggaaaagaaagaagcaatggagggaaagcgtcgttcacgagattcatcaagaaacagtgggtaagtgaatagttgacatgtgtagagtgatcaggtaactactgaccagcaacaccccagcaccaccattttgcagcatttcttctgttgtggcacttccttgatcacattcacatgtaatatctgggagttctgatctagaactagattgaagtattgaattgctactgtggaggtggctgctgcttatagctctcatcccaagtgaggagcatgccttgtcctcagcaaggtccttgcccaggaatgtaggcagctttactcagccctttgaccttgatggcacatacaggttgaaagattaacgatgccaaaatgatatggcttgtatattctaaggtccattgctgcgacgatcttcttatagagttctgacaaatagctatggcactgtttctgaattagaactaggcgcttacatcaattcttccccgttcgagctagccttaatttatggctagagaccttagtattatcagtcctgctgaggtccagccttcgctgacaccaatgtaattgtcatctaaaatattctttcaagcagctgtgattcatcagtaagacattagttgtcatgtacaatgtacaaaatcttgctaacaagacagatctgtttcgtcattacttggatgaaaatcaattggtgtctcaattggaggaaagaaattgttctaataaatgtggatggtagacttgcttgagtcactcgaagtgtcactgaccctttttgtatattttattttagagtaaaatacactctaaacttgtagcgttatgtcattccagtcctaaaactttcaaagtgcacatttaaagtctttaaatttgtgaaattgcatcgtccttatctctaaacttttaat

SEQ ID NO: 55016 - DNA, 798 bp, Zea Mays
cttttgtgtgaaaggaatgacaggcaatattcagaggtgcgatgaaaggcaaactgatagtgtcttgcccccttcctcctgagaggataccaagattctaacttcttttcaaggatgtctgagaaaactgcagctcatcacgtgcacacaatcagctacctagcccaaggtttgtatttaatcacgttcatcaaatatgatgggtatagatttcttgtttggtctactagtcaagcaagagaatgcccttcgttttgctgaggatgcaaaccagttgtgctatggcacctgcctttagtgtcttccttacttcctattcatatggcgattctatgagtatggcacgagcagtagaagctataaaggagggaggtcctagaggtagtaagtcacttgtttactccatgatgacaatagcaagcagatcgcggtggtgcctatggatgctacaacaagaaagatcaaaagttcttttggatggatgcagctagatattttgttttgtattttctccaaaagagaaatttgcaagtgaacttaaaattgtgaaaccaacatgtggttgtactagctagtatctctaagctttcacaagccaaacttagtgttgttgctgcttattttaatctttattacaacaaaagcaaacttgtgaactttatgtgaatgcagtacaattgttattgtcatgaatgaaaacatgagctatgtatgaatgcagtacaattgctatgtatgaatgtagtataattgttatctgatgttgatgataattggaaactgctagtaatatatttt

SEQ ID NO: 55017 - DNA, 1044 bp, Zea Mays
gtcaataataaggaagtaggctgtggaaggacacctgaccacacaaaatggataggtttttttagcagcaaacaagactttatcgatgtagttgaggcaatattcagaggtgcgatgaaaggcaaactgatagtgtcttgcccccttcctcctgagaggataccaagattctaacttcttttcaaggatgtctgagaaaactgcagctcatcacgtgcacacaatcagctacctagcccaaggtaagtagaaaagctgaagcttctataagagaagcacaacagaggggacaatgcaggcgtgttcgtgcttcgaaaaaacctaattgtgctggaaacagccattttcattctcaagactttgcgcaaatctctgcaataatctaatgttgtacttgtccatattgcatgtttaggtttgtatttaatcacgttcatcaaatatgatgggtatagatttcttgtttggtctactagtcaagcaagagaatgcccttcgttttgctgaggatgcaaaccagttgtgctatggcacctgcctttagtgtcttccttacttcctattcatatggcgattctatgagtatggcacgagcagtagaagctataaaggagggaggtcctagaggtagtaagtcacttgtttactccatgatgacaatagcaagcagatcgcggtggtgcctatggatgctacaacaagaaagatcaaaagttcttttggatggatgcagctagatattttgttttgtattttctccaaaagagaaatttgcaagtgaacttaaaattgtgaaaccaacatgtggttgtactagctagtatctctaagctttcacaagccaaacttagtgttgttgctgcttattttaatctttattacaacaaaagcaaacttgtgaactttatgtgaatgcagtacaattgttattgtcatgaatgaaaacatgagctatgtatgaatgcagtacaattgctatgtatgaatgtagtataattgttatctgatgttgatgataattggaaactgctagtaatatatttt

SEQ ID NO: 55018 - DNA, 1157 bp, Zea Mays
caaaaaaaacatgtgtggcgcgcaaattagtggctgccccaaataccagccgcgccgccgcagcccaaaaccctatctcccttcccgtaattccagtcgtcgcgctccacccaaaaattgatgccgccgccgccaatcgccgtccacagccgcgcgccctagccggccggttgcaaccgccgtcccagccgcgcgcccaagcaggccggcccccaacgccgtcgccgtgatcctattacctgatgcggcggcaccaaacctcgcaaggtcgaagcccgtacgccgccctttgtcgcccaccgtgagtcacccctccggtcctccctccttaccccctcgccaagtccctagaggtcgctcaacgctggatctgccacgaccctaggctcccagctatctacgtcctactcctgcccctggctatacctatgactgcgtctcggcagccggcgccctgtggaagccctccgcttcatatccccgtgctgtcgtgcagccagctgccaggagggacacctgaccacacaaaatggataggtttttttagcagcaaacaagactttatcgatgtagttgaggcaatattcagaggtgcgatgaaaggcaaactgatagtgtcttgcccccttcctcctgagaggataccaagattctaacttcttttcaaggatgtctgagaaaactgcagctcatcacgtgcacacaatcagctacctagcccaaggagggaggtcctagaggtagtaagtcacttgtttactccatgatgacaatagcaagcagatcgcggtggtgcctatggatgctacaacaagaaagatcaaaagttcttttggatggatgcagctagatattttgttttgtattttctccaaaagagaaatttgcaagtgaacttaaaattgtgaaaccaacatgtggttgtactagctagtatctctaagctttcacaagccaaacttagtgttgttgctgcttattttaatctttattacaacaaaagcaaacttgtgaactttatgtgaatgcagtacaattgttattgtcatgaatgaaaacatgagctatgtatgaatgcagtacaattgctatgtatgaatgtagtataattgttatctgatgttgatgataattggaaactgctagtaatatatttt

SEQ ID NO: 55019 - DNA, 1273 bp, Zea Mays
caaaaaaaacatgtgtggcgcgcaaattagtggctgccccaaataccagccgcgccgccgcagcccaaaaccctatctcccttcccgtaattccagtcgtcgcgctccacccaaaaattgatgccgccgccgccaatcgccgtccacagccgcgcgccctagccggccggttgcaaccgccgtcccagccgcgcgcccaagcaggccggcccccaacgccgtcgccgtgatcctattacctgatgcggcggcaccaaacctcgcaaggtcgaagcccgtacgccgccctttgtcgcccaccgacacctgaccacacaaaatggataggtttttttagcagcaaacaagactttatcgatgtagttgaggcaatattcagaggtgcgatgaaaggcaaactgatagtgtcttgcccccttcctcctgagaggataccaagattctaacttcttttcaaggatgtctgagaaaactgcagctcatcacgtgcacacaatcagctacctagcccaaggtttgtatttaatcacgttcatcaaatatgatgggtatagatttcttgtttggtctactagtcaagcaagagaatgcccttcgttttgctgaggatgcaaaccagttgtgctatggcacctgcctttagtgtcttccttacttcctattcatatggcgattctatgagtatggcacgagcagtagaagctataaaggtaaaattggccagctatgcataactatgaattcccaaacacttgttttgaccctttttgtttgaccatcattttttatttgcacgtgaactgctcaaattatatggtacaaatgtcttgggttagagatgagggaggtcctagaggtagtaagtcacttgtttactccatgatgacaatagcaagcagatcgcggtggtgcctatggatgctacaacaagaaagatcaaaagttcttttggatggatgcagctagatattttgttttgtattttctccaaaagagaaatttgcaagtgaacttaaaattgtgaaaccaacatgtggttgtactagctagtatctctaagctttcacaagccaaacttagtgttgttgctgcttattttaatctttattacaacaaaagcaaacttgtgaactttatgtgaatgcagtacaattgttattgtcatgaatgaaaacatgagctatgtatgaatgcagtacaattgctatgtatgaatgtagtataattgttatctgatgttgatgataattggaaactgctagtaatatatttt

SEQ ID NO: 55020 - DNA, 1183 bp, Zea Mays
caaaaaaaacatgtgtggcgcgcaaattagtggctgccccaaataccagccgcgccgccgcagcccaaaaccctatctcccttcccgtaattccagtcgtcgcgctccacccaaaaattgatgccgccgccgccaatcgccgtccacagccgcgcgccctagccggccggttgcaaccgccgtcccagccgcgcgcccaagcaggccggcccccaacgccgtcgccgtgatcctattacctgatgcggcggcaccaaacctcgcaaggtcgaagcccgtacgccgccctttgtcgcccaccgacacctgaccacacaaaatggataggtttttttagcagcaaacaagactttatcgatgtagttgaggcaatattcagaggtgcgatgaaaggcaaactgatagtgtcttgcccccttcctcctgagaggataccaagattctaacttcttttcaaggatgtctgagaaaactgcagctcatcacgtgcacacaatcagctacctagcccaaggtttgtatttaatcacgttcatcaaatatgatgggtatagatttcttgtttggtctactagtcaagcaagagaatgcccttcgttttgctgaggatgcaaaccagttgtgctatggcacctgcctttagtgtcttccttacttcctattcatatggcgattctatgagtatggcacgagcagtagaagctataaaggtaaaattggccagctatgcataactatgaattcccaaacacttgttttgaccctttttgtttgaccatcattttttatttgcacgtgaactgctcaaattatatggtacaaatgtcttgggttagagatgtaagttttttctgaactactttgtttacatgtgttttcagtatgcaaatattgctatgtctcaatttataaagcaataaaaagtcattgttgtctatttaacacgcaccttctgtgacaatggccatttcgtcacaattaatggcgtcaccaaaatactacctatgacaaataaacactagttagtgacgtaatcataatgtcactgaaggcctaaaatgttgtagtgtattttgagtagcagcaaggtgtccttgagtagcagcaaggacacttgtttgatcaacatagcacggaccctagcaaggacacttgagtagttgctctctaaaattcatgcagc

SEQ ID NO: 55021 - DNA, 1309 bp, Zea Mays
caaaaaaaacatgtgtggcgcgcaaattagtggctgccccaaataccagccgcgccgccgcagcccaaaaccctatctcccttcccgtaattccagtcgtcgcgctccacccaaaaattgatgccgccgccgccaatcgccgtccacagccgcgcgccctagccggccggttgcaaccgccgtcccagccgcgcgcccaagcaggccggcccccaacgccgtcgccgtgatcctattacctgatgcggcggcaccaaacctcgcaaggtcgaagcccgtacgccgccctttgtcgcccaccgctcccagctatctacgtcctactcctgcccctggctatacctatgactgcgtctcggcagccggcgccctgtggaagccctccgcttcatatccccgtgctgtcgtgcagccagctgccaggagggacacctgaccacacaaaatggataggtttttttagcagcaaacaagactttatcgatgtagttgaggcaatattcagaggtgcgatgaaaggcaaactgatagtgtcttgcccccttcctcctgagaggataccaagattctaacttcttttcaaggatgtctgagaaaactgcagctcatcacgtgcacacaatcagctacctagcccaaggtttgtatttaatcacgttcatcaaatatgatgggtatagatttcttgtttggtctactagtcaagcaagagaatgcccttcgttttgctgaggatgcaaaccagttgtgctatggcacctgcctttagtgtcttccttacttcctattcatatggcgattctatgagtatggcacgagcagtagaagctataaaggtaaaattggccagctatgcataactatgaattcccaaacacttgttttgaccctttttgtttgaccatcattttttatttgcacgtgaactgctcaaattatatggtacaaatgtcttgggttagagatgtaagttttttctgaactactttgtttacatgtgttttcagtatgcaaatattgctatgtctcaatttataaagcaataaaaagtcattgttgtctatttaacacgcaccttctgtgacaatggccatttcgtcacaattaatggcgtcaccaaaatactacctatgacaaataaacactagttagtgacgtaatcataatgtcactgaaggcctaaaatgttgtagtgtattttgagtagcagcaaggtgtccttgagtagcagcaaggacacttgtttgatcaacatagcacggaccctagcaaggacacttgagtagttgctctctaaaattcatgcagc

SEQ ID NO: 55022 - DNA, 1175 bp, Zea Mays
cctgacatgttgctactaagacagtagtataggaggaaaagagacaggctaattgaacgcgcttctgttgcacgcttgcctttgaaatggggcaatgtccatgcatattgctacaaatctgttattgatggcattgagcatattgccatggtgaaaggtgatattggtgacggccaagacattttggtgagggtgcactctgagtgcctcacaggcgacatttttggatccgcaagatgtgattgtggcgaccagcttgcgatggcaatggagatgattgagaaggctggaaggggtgtattagtctatctccgtggacatgaaggaaggggtattggtctgggccacaagcttcgtgcttataacttacaggatgatgggcgtgatactgtggaagctaatgaggaacttggtcttcctgtggactcacgggaatacgggattggcgcacagatattgcgggatctaggagtccgttcaatgaagctgatgactaataaccctgcgaaatatagtggtctcaagggctatggattgagcattgcgggcagggtgcccttgattacgccaattaccagtgagaaccgtaggtacctggagactaaaagaacaaagatgggacatgtatatgggttggccaatgcgcaggccaacctagcaaatggcagccagagcacagaagagaatcattaggcccccaagcatgtttccattattattccagcaatccagcttggtgacacaaaagagtgatatgattcttcgtttggggagttcctgaaatcttctcccccgatatttccgtagattctttcgcaaaaaagccgatatttcggtagatcgatttgttcttcaattgtaactgtaggtttcaaggtggctaatgagtaatgagcctaataatgaacggtaggtttcaagatggccagtaatgatatacacggagttagtcgtcataatgtactgtgttgagttttacgactttatcgccttggtgtggttgtcctgatggagttgtgatcgaatggtgtggcttttcactgccctttccttcacccactaaaaagcatagaatgtggagaattttaccttgagccattatagaagtttataatactttatgtgccacgaaatttttggttgtccctcttcatttcttcgtgcaaagttttctg

SEQ ID NO: 55023 - DNA, 1497 bp, Zea Mays
attgtctattgcagttgatatggatgcaaaagagggcacaactactggggtatctgccaaggacagggcaaaaacggtcatgactcttgcatctcctgactctaagcctgaggacctcaaccgccctggtcatattttccctttgaaatacagagaagggggtgttctgaaacgagctggacacaccgaggcatctgttgaccttgccatgttggctggattacctcctgttgctgtcctttgtgaaattgtggatgatgcagatggttctatggctcgcctaccaaagttgcgtgtctttgctgaaaaggagaacttaaagattatatctattgctgacttgattaggtataggaggaaaagagacaggctaattgaacgcgcttctgttgcacgcttgcctttgaaatggggcaatgtccatgcatattgctacaaatctgttattgatggcattgagcatattgccatggtgaaaggtgatattggtgacggccaagacattttggtgagggtgcactctgagtgcctcacaggcgacatttttggatccgcaagatgtgattgtggcgaccagcttgcgatggcaatggagatgattgagaaggctggaaggggtgtattagtctatctccgtggacatgaaggaaggggtattggtctgggccacaagcttcgtgcttataacttacaggatgatgggcgtgatactgtggaagctaatgaggaacttggtcttcctgtggactcacgggaatacgggattggcgcacagatattgcgggatctaggagtccgttcaatgaagctgatgactaataaccctgcgaaatatagtggtctcaagggctatggattgagcattgcgggcagggtgcccttgattacgccaattaccagtgagaaccgtaggtacctggagactaaaagaacaaagatgggacatgtatatgggttggccaatgcgcaggccaacctagcaaatggcagccagagcacagaagagaatcattaggcccccaagcatgtttccattattattccagcaatccagcttggtgacacaaaagagtgatatgattcttcgtttggggagttcctgaaatcttctcccccgatatttccgtagattctttcgcaaaaaagccgatatttcggtagatcgatttgttcttcaattgtaactgtaggtttcaaggtggctaatgagtaatgagcctaataatgaacggtaggtttcaagatggccagtaatgatatacacggagttagtcgtcataatgtactgtgttgagttttacgactttatcgccttggtgtggttgtcctgatggagttgtgatcgaatggtgtggcttttcactgccctttccttcacccactaaaaagcatagaatgtggagaattttaccttgagccattatagaagtttataatactttatgtgccacgaaatttttggttgtccctcttcatttcttcgtgcaaagttttctg

SEQ ID NO: 55024 - DNA, 2139 bp, Zea Mays
ctcccacccgcgcccacgcccacgcccacgcccacggccgcaccaaccaccaggcaccagccccgatttcctcctaatcaatcacaccatcaaaccaaaacccaaacagcacttctcctgcaatcgccgacgtcgccggaggcttcgccggccggagcagcgccgacggttgttttgcccctccctcgtccggcccagcagcccaggcgagcatgccttcgattgcgccaccgtcttcctccgtcgctgccctcacccgtcaaccggtgcaattcttcaaagggtgcagtgtatccaaggagacaaagggaccggtccgcagtttcttcactgcaaattcaaagagcaccaaggtgaaatcagcgggcttgaaagtagcatcatccttcaaaaatgatggtggttatccagctggcggtgtctcttggaaggacgacactctattgccaaaaagcacaaccattcgtggccaggaccattcggttgctgaccctgtactcccaatggattccatgattacgccagaaatcctctctgctaatgtggaacgtgttatagacatgtttgcagatgatgacactgatactgaacttgatttggatagcccgacagagggcttcacatcaattgcagaagccattgaggacatacagcaaggaaaacttgtgattgttgttgatgatgaatcaagggaaaatgaaggagatctgataatggctgcctccttggttaccccagaggctatggcttttatagtaaggcatgggacaggaattgtttgtgtcagcatgaaagaagatgatctggaaagactgagccttcctttgatggttaccacaaaagaaaatgaggagaagctatgcactgctttcactgttacagtggatgcaaaagagggcacaactactggggtatctgccaaggacagggcaaaaacggtcatgactcttgcatctcctgactctaagcctgaggacctcaaccgccctggtataggaggaaaagagacaggctaattgaacgcgcttctgttgcacgcttgcctttgaaatggggcaatgtccatgcatattgctacaaatctgttattgatggcattgagcatattgccatggtgaaaggtgatattggtgacggccaagacattttggtgagggtgcactctgagtgcctcacaggcgacatttttggatccgcaagatgtgattgtggcgaccagcttgcgatggcaatggagatgattgagaaggctggaaggggtgtattagtctatctccgtggacatgaaggaaggggtattggtctgggccacaagcttcgtgcttataacttacaggatgatgggcgtgatactgtggaagctaatgaggaacttggtcttcctgtggactcacgggaatacgggattggcgcacagatattgcgggatctaggagtccgttcaatgaagctgatgactaataaccctgcgaaatatagtggtctcaagggctatggattgagcattgcgggcagggtgcccttgattacgccaattaccagtgagaaccgtaggtacctggagactaaaagaacaaagatgggacatgtatatgggttggccaatgcgcaggccaacctagcaaatggcagccagagcacagaagagaatcattaggcccccaagcatgtttccattattattccagcaatccagcttggtgacacaaaagagtgatatgattcttcgtttggggagttcctgaaatcttctcccccgatatttccgtagattctttcgcaaaaaagccgatatttcggtagatcgatttgttcttcaattgtaactgtaggtttcaaggtggctaatgagtaatgagcctaataatgaacggtaggtttcaagatggccagtaatgatatacacggagttagtcgtcataatgtactgtgttgagttttacgactttatcgccttggtgtggttgtcctgatggagttgtgatcgaatggtgtggcttttcactgccctttccttcacccactaaaaagcatagaatgtggagaattttaccttgagccattatagaagtttataatactttatgtgccacgaaatttttggttgtccctcttcatttcttcgtgcaaagttttctg

SEQ ID NO: 55025 - DNA, 2283 bp, Zea Mays
ctcccacccgcgcccacgcccacgcccacgcccacggccgcaccaaccaccaggcaccagccccgatttcctcctaatcaatcacaccatcaaaccaaaacccaaacagcacttctcctgcaatcgccgacgtcgccggaggcttcgccggccggagcagcgccgacggttgttttgcccctccctcgtccggcccagcagcccaggcgagcatgccttcgattgcgccaccgtcttcctccgtcgctgccctcacccgtcaaccggtgcaattcttcaaagggtgcagtgtatccaaggagacaaagggaccggtccgcagtttcttcactgcaaattcaaagagcaccaaggtgaaatcagcgggcttgaaagtagcatcatccttcaaaaatgatggtggttatccagctggcggtgtctcttggaaggacgacactctattgccaaaaagcacaaccattcgtggccaggaccattcggttgctgaccctgtactcccaatggattccatgattacgccagaaatcctctctgctaatgtggaacgtgttatagacatgtttgcagatgatgacactgatactgaacttgatttggatagcccgacagagggcttcacatcaattgcagaagccattgaggacatacagcaaggaaaaaggctatggcttttatagtaaggcatgggacaggaattgtttgtgtcagcatgaaagaagatgatctggaaagactgagccttcctttgatggttaccacaaaagaaaatgaggagaagctatgcactgctttcactgttacagtggatgcaaaagagggcacaactactggggtatctgccaaggacagggcaaaaacggtcatgactcttgcatctcctgactctaagcctgaggacctcaaccgccctggtcatattttccctttgaaatacagagaagggggtgttctgaaacgagctggacacaccgaggcatctgttgaccttgccatgttggctggattacctcctgttgctgtcctttgtgaaattgtggatgatgcagatggttctatggctcgcctaccaaagttgcgtgtctttgctgaaaaggagaacttaaagattatatctattgctgacttgattaggtataggaggaaaagagacaggctaattgaacgcgcttctgttgcacgcttgcctttgaaatggggcaatgtccatgcatattgctacaaatctgttattgatggcattgagcatattgccatggtgaaaggtgatattggtgacggccaagacattttggtgagggtgcactctgagtgcctcacaggcgacatttttggatccgcaagatgtgattgtggcgaccagcttgcgatggcaatggagatgattgagaaggctggaaggggtgtattagtctatctccgtggacatgaaggaaggggtattggtctgggccacaagcttcgtgcttataacttacaggatgatgggcgtgatactgtggaagctaatgaggaacttggtcttcctgtggactcacgggaatacgggattggcgcacagatattgcgggatctaggagtccgttcaatgaagctgatgactaataaccctgcgaaatatagtggtctcaagggctatggattgagcattgcgggcagggtgcccttgattacgccaattaccagtgagaaccgtaggtacctggagactaaaagaacaaagatgggacatgtatatgggttggccaatgcgcaggccaacctagcaaatggcagccagagcacagaagagaatcattaggcccccaagcatgtttccattattattccagcaatccagcttggtgacacaaaagagtgatatgattcttcgtttggggagttcctgaaatcttctcccccgatatttccgtagattctttcgcaaaaaagccgatatttcggtagatcgatttgttcttcaattgtaactgtaggtttcaaggtggctaatgagtaatgagcctaataatgaacggtaggtttcaagatggccagtaatgatatacacggagttagtcgtcataatgtactgtgttgagttttacgactttatcgccttggtgtggttgtcctgatggagttgtgatcgaatggtgtggcttttcactgccctttccttcacccactaaaaagcatagaatgtggagaattttaccttgagccattatagaagtttataatactttatgtgccacgaaatttttggttgtccctcttcatttcttcgtgcaaagttttctg

SEQ ID NO: 55026 - DNA, 2285 bp, Zea Mays
ccacccgctccgtctcgagtcctctcccacccgcgcccacgcccacgcccacgcccacggccgcaccaaccaccaggcaccagccccgatttcctcctaatcaatcacaccatcaaaccaaaacccaaacagcacttctcctgcaatcgccgacgtcgccggaggcttcgccggccggagcagcgccgacgggtgcaattcttcaaagggtgcagtgtatccaaggagacaaagggaccggtccgcagtttcttcactgcaaattcaaagagcaccaaggtgaaatcagcgggcttgaaagtagcatcatccttcaaaaatgatggtggttatccagctggcggtgtctcttggaaggacgacactctattgccaaaaagcacaaccattcgtggccaggaccattcggttgctgaccctgtactcccaatggattccatgattacgccagaaatcctctctgctaatgtggaacgtgttatagacatgtttgcagatgatgacactgatactgaacttgatttggatagcccgacagagggcttcacatcaattgcagaagccattgaggacatacagcaaggaaaacttgtgattgttgttgatgatgaatcaagggaaaatgaaggagatctgataatggctgcctccttggttaccccagaggctatggcttttatagtaaggcatgggacaggaattgtttgtgtcagcatgaaagaagatgatctggaaagactgagccttcctttgatggttaccacaaaagaaaatgaggagaagctatgcactgctttcactgttacagtggatgcaaaagagggcacaactactggggtatctgccaaggacagggcaaaaacggtcatgactcttgcatctcctgactctaagcctgaggacctcaaccgccctggtcatattttccctttgaaatacagagaagggggtgttctgaaacgagctggacacaccgaggcatctgttgaccttgccatgttggctggattacctcctgttgctgtcctttgtgaaattgtggatgatgcagatggttctatggctcgcctaccaaagttgcgtgtctttgctgaaaaggagaacttaaagattatatctattgctgacttgattaggtataggaggaaaagagacaggctaattgaacgcgcttctgttgcacgcttgcctttgaaatggggcaatgtccatgcatattgctacaaatctgttattgatggcattgagcatattgccatggtgaaaggtgatattggtgacggccaagacattttggtgagggtgcactctgagtgcctcacaggcgacatttttggatccgcaagatgtgattgtggcgaccagcttgcgatggcaatggagatgattgagaaggctggaaggggtgtattagtctatctccgtggacatgaaggaaggggtattggtctgggccacaagcttcgtgcttataacttacaggatgatgggcgtgatactgtggaagctaatgaggaacttggtcttcctgtggactcacgggaatacgggattggcgcacagatattgcgggatctaggagtccgttcaatgaagctgatgactaataaccctgcgaaatatagtggtctcaagggctatggattgagcattgcgggcagggtgcccttgattacgccaattaccagtgagaaccgtaggtacctggagactaaaagaacaaagatgggacatgtatatgggttggccaatgcgcaggccaacctagcaaatggcagccagagcacagaagagaatcattaggcccccaagcatgtttccattattattccagcaatccagcttggtgacacaaaagagtgatatgattcttcgtttggggagttcctgaaatcttctcccccgatatttccgtagattctttcgcaaaaaagccgatatttcggtagatcgatttgttcttcaattgtaactgtaggtttcaaggtggctaatgagtaatgagcctaataatgaacggtaggtttcaagatggccagtaatgatatacacggagttagtcgtcataatgtactgtgttgagttttacgactttatcgccttggtgtggttgtcctgatggagttgtgatcgaatggtgtggcttttcactgccctttccttcacccactaaaaagcatagaatgtggagaattttaccttgagccattatagaagtttataatactttatgtgccacgaaatttttggttgtccctcttcatttcttcgtgcaaagttttctg

SEQ ID NO: 55027 - DNA, 2591 bp, Zea Mays
atgcctgcgacagtggtcgcgcttgtcgtcctctcccgctcgatcgtcgtcgccgaccggatctggttaccgccgcaaatgcatccacaccgcaccctgcgcttggggaggagggcgcgatgggatcaggagaactcggccaccttccatcgacggcgtggggaggcggatcccctgcgcttggggaggagggctcggatgacggggaccgcggagcagagaaaatgggagctgaaagtgttccgagtgccaaccgcaaccgtaaatttcacaagtggagagggcatgagcgcaaaaggcaacaatcttagcacagcagcaccaaagcgcgtcgtgtcgtgcaaatccaactttgataccactcgctgcctggttatggactccaccaggagcaaccaggtcgccggcagatgcaacagcaccatcgcgtcaagggctgccacggtcccgccgtcgctgaccatgccgcgcggcgaactcgctgacgccatcgtgggcggaggcggaggaggaggagcggacggggacccccgggccgccctcctccgtctgtctgctctcggggaccgcatggccgccgtccggggccgtatctgcgcctctatctcgggcgaagcccggcctctctcctacgccgacatccaatctgtctcctccgagatctccgccgctgcccagctcgtcgtcctcaacgccgccgagctcctcgcttcctccgtcccctttcccgccccacctccacctcctccttccgccgctccctctcccgctcccgtccgagagatcccagttgtggccgcttccgcccaagagcaacccctggaggccgccaaggacgacggtggctacgaggtcgtggagctcgacgccgccgagctgctagcggagcacgtccacttctgcgagatctgcggcaagggcttccgccgcgacgccaacctcaggatgcacatgcgcgcccacggcgaccgcttcaagaccctagacgcgctctcccgccctggtcacggccagccgaagccgcccgttggcagcaacgtgcgcttctcctgcccctttgcgggctgcaacaggaaccgcacacaccgccgcttccggccgctcaagtcggcggtgtgcgcgcggaaccacttccggcgcagccactgccccaagctctacgcctgcgagcgatgtggcggcaagaagcgcttcgctgtcctggcggacctccgcagccacctccgccactgcggcgaggaggcacagtggcgctgctcctgcggcaccaccttctcccgcaaggacaagctcttcggtcatctagcgctctttgaaggccacacgccagcagttactaagccaaacaaggatgtggtgacagggcctacagagtccaccattgatgctatggaggaagggggatttgaagaaggcattcctgaccgggaggaggatgaagagggcggttatgatccagagttcttcaaggagtggatggatgagctcagaggtggtgctggtggctccaattggcctggaccagcagcagatggacattagcaatgttgcgagggttaatagggctaggcaaggcaccttaacatggtattttacaactatagatttctttttcaccggtgataaatattataattagtcctattgtggaagaatgtaaacaacaaatgagtctatgactattatcaagagagcagagctagtgctagaggatcccacatgagtggggttgagaggagggataaaccaaggcaagcctccccccaatgtggagagactgcttcgatcccgcgacctggtaactcagtgaagcagctctcaccagtcaccactacatcaggcctgctcctcaagagatgaaacttttttgttaaacttttgccaagaactctgactagaatgaacagcatgtagcttgaattcaatggtggctgcacttataaatggtttgacaagggacatctgcttacatcaagtgaccaggaggatcaataaagactgaataaaggtgatagtaaagaaaagaggtgctttgggatagtttgtaggatttctctttaccattgtgtttgtgcgttcgttctaaccagtagcttgtatggtatggtgcgtgtgttgtttagttgctgttcactgggcctctcccttgccattctcggttgctttcatgttatcctgtgaatttgtgatctaccaggtaatacagtggagaactgtgtcatgctctgtaagcgttctccttggctgtgtgggtcatggagttgccgattactgaggaagaaggatagcttgcaggaaaacggtggcaccagttccctgtgcgctgctgaggatgcgaagtattcgggggagttttagaaaaatactttggttttgtgaaacaatttgattttagaatgtattgatgtgtttggacgcaacaaactttagtatttgttagaaagttaggcatttttagttttaatttaatccagaaaaacagtgcgatatatgtgatgacatgtatgtgcatgtgtgtataactactcgcataagcagtaaacagcaatgaaacatgcacaaatacgaagaacagagtgtacccagcggag

SEQ ID NO: 55028 - DNA, 2347 bp, Zea Mays
atgcctgcgacagtggtcgcgcttgtcgtcctctcccgctcgatcgtcgtcgccgaccggatctggttaccgccgcaaatgcatccacaccgcaccctgcgcttggggaggagggcgcgatgggatcaggagaactcggccaccttccatcgacggcgtggggaggcggatcccctgcgcttggggaggagggctcggatgacggggaccgcggagcagagaaaatgggagctgaaagtgttccgagtgccaaccgcaaccgtaaatttcacaagtggagagggcatgagcgcaaaaggcaacaatcttagcacagcagcaccaaagcgcgtcgtgtcgtgcaaatccaactttgataccactcgctgcctggttatggactccaccaggagcaaccaggtcgccggcagatgcaacagcaccatcgcgtcaagggctgccacggtcccgccgtcgctgaccatgccgcgcggcgaactcgctgacgccatcgtgggcggaggcggaggaggaggagcggacggggacccccgggccgccctcctccgtctgtctgctctcggggaccgcatggccgccgtccggggccgtatctgcgcctctatctcgggcgaagcccggcctctctcctacgccgacatccaatctgtctcctccgagatctccgccgctgcccagctcgtcgtcctcaacgccgccgagctcctcgcttcctccgtcccctttcccgccccacctccacctcctccttccgccgctccctctcccgctcccgtccgagagatcccagttgtggccgcttccgcccaagagcaacccctggaggccgccaaggacgacggtggctacgaggtcgtggagctcgacgccgccgagctgctagcggagcacgtccacttctgcgagatctgcggcaagggcttccgccgcgacgccaacctcaggatgcacatgcgcgcccacggcgaccgcttcaagaccctagacgcgctctcccgccctggtcacggccagccgaagccgcccgttggcagcaacgtgcgcttctcctgcccctttgcgggctgcaacaggaaccgcacacaccgccgcttccggccgctcaagtcggcggtgtgcgcgcggaaccacttccggcgcagccactgccccaagctctacgcctgcgagcgatgtggcggcaagaagcgcttcgctgtcctggcggacctccgcagccacctccgccactgcggcgaggaggcacagtggcgctgctcctgcggcaccaccttctcccgcaaggacaagctcttcggtcatctagcgctctttgaaggccacacgccagcagttactaagccaaacaaggatgtggtgacagggcctacagagtccaccattgatgctatggaggaagggggatttgaagaaggcattcctgaccgggaggaggatgaagagggcggttatgatccagagttcttcaaggagtggatggatgagctcagaggtggtgctggtggctccaattggcctggaccagcagcagatggacattagcaatgttgcgagggttaatagggtgataaatattataattagtcctattgtggaagaatgtaaacaacaaatgagtctatgactattatcaagagagcagagctagtgctagaggatcccacatgagtggggttgagaggagggataaaccaaggcaagcctccccccaatgtggagagactgcttcgatcccgcgacctggtaactcagtgaagcagctctcaccagtcaccactacatcaggcctgctcctcaagagatgaaacttttttgttaaacttttgccaagaactctgactagaatgaacagcatgtagcttgaattcaatggtggctgcacttataaatggtttgacaagggacatctgcttacatcaagtgaccaggaggatcaataaagactgaataaaggtaatacagtggagaactgtgtcatgctctgtaagcgttctccttggctgtgtgggtcatggagttgccgattactgaggaagaaggatagcttgcaggaaaacggtggcaccagttccctgtgcgctgctgaggatgcgaagtattcgggggagttttagaaaaatactttggttttgtgaaacaatttgattttagaatgtattgatgtgtttggacgcaacaaactttagtatttgttagaaagttaggcatttttagttttaatttaatccagaaaaacagtgcgatatatgtgatgacatgtatgtgcatgtgtgtataactactcgcataagcagtaaacagcaatgaaacatgcacaaatacgaagaacagagtgtacccagcggag

SEQ ID NO: 55029 - DNA, 2421 bp, Zea Mays
atgcctgcgacagtggtcgcgcttgtcgtcctctcccgctcgatcgtcgtcgccgaccggatctggttaccgccgcaaatgcatccacaccgcaccctgcgcttggggaggagggcgcgatgggatcaggagaactcggccaccttccatcgacggcgtggggaggcggatcccctgcgcttggggaggagggctcggatgacggggaccgcggagcagagaaaatgggagctgaaagtgttccgagtgccaaccgcaaccgtaaatttcacaagtggagagggcatgagcgcaaaaggcaacaatcttagcacagcagcaccaaagcgcgtcgtgtcgtgcaaatccaactttgataccactcgctgcctggttatggactccaccaggagcaaccaggtcgccggcagatgcaacagcaccatcgcgtcaagggctgccacggtcccgccgtcgctgaccatgccgcgcggcgaactcgctgacgccatcgtgggcggaggcggaggaggaggagcggacggggacccccgggccgccctcctccgtctgtctgctctcggggaccgcatggccgccgtccggggccgtatctgcgcctctatctcgggcgaagcccggcctctctcctacgccgacatccaatctgtctcctccgagatctccgccgctgcccagctcgtcgtcctcaacgccgccgagctcctcgcttcctccgtcccctttcccgccccacctccacctcctccttccgccgctccctctcccgctcccgtccgagagatcccagttgtggccgcttccgcccaagagcaacccctggaggccgccaaggacgacggtggctacgaggtcgtggagctcgacgccgccgagctgctagcggagcacgtccacttctgcgagatctgcggcaagggcttccgccgcgacgccaacctcaggatgcacatgcgcgcccacggcgaccgcttcaagaccctagacgcgctctcccgccctggtcacggccagccgaagccgcccgttggcagcaacgtgcgcttctcctgcccctttgcgggctgcaacaggaaccgcacacaccgccgcttccggccgctcaagtcggcggtgtgcgcgcggaaccacttccggcgcagccactgccccaagctctacgcctgcgagcgatgtggcggcaagaagcgcttcgctgtcctggcggacctccgcagccacctccgccactgcggcgaggaggcacagtggcgctgctcctgcggcaccaccttctcccgcaaggacaagctcttcggtcatctagcgctctttgaaggccacacgccagcagttactaagccaaacaaggatgtggtgacagggcctacagagtccaccattgatgctatggaggaagggggatttgaagaaggcattcctgaccgggaggaggatgaagagggcggttatgatccagagttcttcaaggagtggatggatgagctcagaggtggtgctggtggctccaattggcctggaccagcagcagatggacattagcaatgttgcgagggttaatagggtgataaatattataattagtcctattgtggaagaatgtaaacaacaaatgagtctatgactattatcaagagagcagagctagtgctagaggatcccacatgagtggggttgagaggagggataaaccaaggcaagcctccccccaatgtggagagactgcttcgatcccgcgacctggtaactcagtgaagcagctctcaccagtcaccactacatcaggcctgctcctcaagagatgaaacttttttgttaaacttttgccaagaactctgactagaatgaacagcatgtagcttgaattcaatggtggctgcacttataaatggtttgacaagggacatctgcttacatcaagtgaccaggaggatcaataaagactgaataaagttgctgttcactgggcctctcccttgccattctcggttgctttcatgttatcctgtgaatttgtgatctaccaggtaatacagtggagaactgtgtcatgctctgtaagcgttctccttggctgtgtgggtcatggagttgccgattactgaggaagaaggatagcttgcaggaaaacggtggcaccagttccctgtgcgctgctgaggatgcgaagtattcgggggagttttagaaaaatactttggttttgtgaaacaatttgattttagaatgtattgatgtgtttggacgcaacaaactttagtatttgttagaaagttaggcatttttagttttaatttaatccagaaaaacagtgcgatatatgtgatgacatgtatgtgcatgtgtgtataactactcgcataagcagtaaacagcaatgaaacatgcacaaatacgaagaacagagtgtacccagcggag

SEQ ID NO: 55030 - DNA, 2444 bp, Zea Mays
atgcctgcgacagtggtcgcgcttgtcgtcctctcccgctcgatcgtcgtcgccgaccggatctggttaccgccgcaaatgcatccacaccgcaccctgcgcttggggaggagggcgcgatgggatcaggagaactcggccaccttccatcgacggcgtggggaggcggatcccctgcgcttggggaggagggctcggatgacggggaccgcggagcagagaaaatgggagctgaaagtgttccgagtgccaaccgcaaccgtaaatttcacaagtggagagggcatgagcgcaaaaggcaacaatcttagcacagcagcaccaaagcgcgtcgtgtcgtgcaaatccaactttgataccactcgctgcctggttatggactccaccaggagcaaccaggtcgccggcagatgcaacagcaccatcgcgtcaagggctgccacggtcccgccgtcgctgaccatgccgcgcggcgaactcgctgacgccatcgtgggcggaggcggaggaggaggagcggacggggacccccgggccgccctcctccgtctgtctgctctcggggaccgcatggccgccgtccggggccgtatctgcgcctctatctcgggcgaagcccggcctctctcctacgccgacatccaatctgtctcctccgagatctccgccgctgcccagctcgtcgtcctcaacgccgccgagctcctcgcttcctccgtcccctttcccgccccacctccacctcctccttccgccgctccctctcccgctcccgtccgagagatcccagttgtggccgcttccgcccaagagcaacccctggaggccgccaaggacgacggtggctacgaggtcgtggagctcgacgccgccgagctgctagcggagcacgtccacttctgcgagatctgcggcaagggcttccgccgcgacgccaacctcaggatgcacatgcgcgcccacggcgaccgcttcaagaccctagacgcgctctcccgccctggtcacggccagccgaagccgcccgttggcagcaacgtgcgcttctcctgcccctttgcgggctgcaacaggaaccgcacacaccgccgcttccggccgctcaagtcggcggtgtgcgcgcggaaccacttccggcgcagccactgccccaagctctacgcctgcgagcgatgtggcggcaagaagcgcttcgctgtcctggcggacctccgcagccacctccgccactgcggcgaggaggcacagtggcgctgctcctgcggcaccaccttctcccgcaaggacaagctcttcggtcatctagcgctctttgaaggccacacgccagcagttactaagccaaacaaggatgtggtgacagggcctacagagtccaccattgatgctatggaggaagggggatttgaagaaggcattcctgaccgggaggaggatgaagagggcggttatgatccagagttcttcaaggagtggatggatgagctcagaggtggtgctggtggctccaattggcctggaccagcagcagatggacattagcaatgttgcgagggttaataggaattattcggcaagccaaccaacctagttgtgatgttatgaatatgtcagcttgattgtctagcaagtcatcctcatacaaaaagtgtaagattcaggtgataaatattataattagtcctattgtggaagaatgtaaacaacaaatgagtctatgactattatcaagagagcagagctagtgctagaggatcccacatgagtggggttgagaggagggataaaccaaggcaagcctccccccaatgtggagagactgcttcgatcccgcgacctggtaactcagtgaagcagctctcaccagtcaccactacatcaggcctgctcctcaagagatgaaacttttttgttaaacttttgccaagaactctgactagaatgaacagcatgtagcttgaattcaatggtggctgcacttataaatggtttgacaagggacatctgcttacatcaagtgaccaggaggatcaataaagactgaataaaggtaatacagtggagaactgtgtcatgctctgtaagcgttctccttggctgtgtgggtcatggagttgccgattactgaggaagaaggatagcttgcaggaaaacggtggcaccagttccctgtgcgctgctgaggatgcgaagtattcgggggagttttagaaaaatactttggttttgtgaaacaatttgattttagaatgtattgatgtgtttggacgcaacaaactttagtatttgttagaaagttaggcatttttagttttaatttaatccagaaaaacagtgcgatatatgtgatgacatgtatgtgcatgtgtgtataactactcgcataagcagtaaacagcaatgaaacatgcacaaatacgaagaacagagtgtacccagcggag

SEQ ID NO: 55031 - DNA, 650 bp, Zea Mays
aatcagtatagcttattgatcaaggagacatatggacgaatatgataccggtattaatgaatgccgtgggtggaattcttgttggtcttgtcacaacttacgcaggtggcgttagaaagggttttgttatagtttcagctctccttgtaactgcactgctacaatttatatttgatgggaagccaccgtcactctactgcctgatagcattaccacttgtcgcgtcaagcatattcatctaccaaaaacatccatatgttgataggaagaagaaagactgatccacataattgtcagagacgggaattatcaacaggatgtgatcctaacctcattttctccacaaggctggaatttgcaccgtcaaggggaccaaatttgactcttgaagagttgctgttcgtcaagctatgtttcaattatctactgatctatatatatagaattaattagtaggacactagcctggaatcagtttcagcaggcagttgacaagcttgcatataacttctcgaaggaggcttcgtatcaatgatgatgatgaagtgtttccatgtgcagctatctatacttatcacctgattaatccgccattgtgcattgagaagtttcatgcggcaacttctttacttcggcaaaactagcagcag

SEQ ID NO: 55032 - DNA, 1617 bp, Zea Mays
tcattcgatcaaaccgagcccattgcccttgccccccagccgcgcaaacgtgagcgcgacttggcaggcgtgctcgtccggtcttcgtcctggttccctgtgcccccactgttccagcatcagatattcagatcagatcgatcagaccagaaagtttgcgctcgtctgcttggtaaaggaaaggagaagtttccgaaataggggcggcgcgccgggcgcattttggttgctggattggaaccgagcgaacgcgccggagtccggatgggctcctcgtccgctccggcggccgcggccgcggccgcgccgagccggcgcaaggtggcgctctacctggccctcctcaccctgcagtacggcgcccagcccctcatctccaagcgctttgtccgcgaagatactatagtgacctcactagttcttgcaacggaagcagcaaaggttatttgcgcaatcattttattgattgcagagggtagtctgaaaaaacagttcagtaactggactctcactggatcactgactgcgtctggactgcctgctgccatttatgccctccagaatagtctgctgcaagtatcatacaagcatctggattccttgaccttttcaatccttaaccagactaagcttttgtggacagcatttttcacatttcttattttggggcaaaagcaatcttccaggcaagttctagcattggccctcttaattggtgctgccgttcttttaagtgttggggagagcagtagcaaaggttccaagggtggtggctctgactatatcttgctatatgggatcattccagttacagtcgcttctgtgctgtctgggctggcctcttcattgtgtcagtgggcatctcaggttaaaaaacatacctcttatatgatgaccatagagatgtcatttattggaagtatgtgcttgttagcaagtacctatcgctcaccagatggagaggccatcaggaaatatggatttttccatgaatggactttctggactgtgataccggtattaatgaatgccgtgggtggaattcttgttggtcttgtcacaacttacgcaggtggcgttagaaagggttttgttatagtttcagctctccttgtaactgcactgctacaatttatatttgatgggaagccaccgtcactctactgcctgatagcattaccacttgtcgcgtcaagcatattcatctaccaaaaacatccatatgttgataggaagaagaaagactgatccacataattgtcagagacgggaattatcaacaggatgtgatcctaacctcattttctccacaaggctggaatttgcaccgtcaaggggaccaaatttgactcttgaagagttgctgttcgtcaagctatgtttcaattatctactgatctatatatatagaattaattagtaggacactagcctggaatcagtttcagcaggcagttgacaagcttgcatataacttctcgaaggaggcttcgtatcaatgatgatgatgaagtgtttccatgtgcagctatctatacttatcacctgattaatccgccattgtgcattgagaagtttcatgcggcaacttctttacttcggcaaaactagcagcag

SEQ ID NO: 55033 - DNA, 1473 bp, Zea Mays
tcattcgatcaaaccgagcccattgcccttgccccccagccgcgcaaacgtgagcgcgacttggcaggcgtgctcgtccggtcttcgtcctggttccctgtgcccccactgttccagcatcagatattcagatcagatcgatcagaccagaaagtttgcgctcgtctgcttggtaaaggaaaggagaagtttccgaaataggggcggcgcgccgggcgcattttggttgctggattggaaccgagcgaacgcgccggagtccggatgggctcctcgtccgctccggcggccgcggccgcggccgcgccgagccggcgcaaggtggcgctctacctggccctcctcaccctgcagtacggcgcccagcccctcatctccaagcgctttgtccgcgaagatactatagtgacctcactagttcttgcaacggaagcagcaaaggttatttgcgcaatcattttattgattgcagagggtagtctgaaaaaacagttcagtaactggactctcactggatcactgactgcgtctggactgcctgctgccatttatgccctccagaatagtctgctgcaagtatcatacaagcatctggattccttgaccttttcaatccttaaccagactaagcttttgtggacagcatttttcacatttcttattttggggcaaaagcaatcttccaggcaagttctagcattggccctcttaattggtgctgccgttcttttaagtgttggggagagcagtagcaaaggttccaagggtggtggctctgactatatcttgctatatgggatcattccagttacagtcgcttctgtgctgtctgggctggcctcttcattgtgtcagtgggcatctcagataccggtattaatgaatgccgtgggtggaattcttgttggtcttgtcacaacttacgcaggtggcgttagaaagggttttgttatagtttcagctctccttgtaactgcactgctacaatttatatttgatgggaagccaccgtcactctactgcctgatagcattaccacttgtcgcgtcaagcatattcatctaccaaaaacatccatatgttgataggaagaagaaagactgatccacataattgtcagagacgggaattatcaacaggatgtgatcctaacctcattttctccacaaggctggaatttgcaccgtcaaggggaccaaatttgactcttgaagagttgctgttcgtcaagctatgtttcaattatctactgatctatatatatagaattaattagtaggacactagcctggaatcagtttcagcaggcagttgacaagcttgcatataacttctcgaaggaggcttcgtatcaatgatgatgatgaagtgtttccatgtgcagctatctatacttatcacctgattaatccgccattgtgcattgagaagtttcatgcggcaacttctttacttcggcaaaactagcagcag

SEQ ID NO: 55034 - DNA, 1677 bp, Zea Mays
tcattcgatcaaaccgagcccattgcccttgccccccagccgcgcaaacgtgagcgcgacttggcaggcgtgctcgtccggtcttcgtcctggttccctgtgcccccactgttccagcatcagatattcagatcagatcgatcagaccagaaagtttgcgctcgtctgcttggtaaaggaaaggagaagtttccgaaataggggcggcgcgccgggcgcattttggttgctggattggaaccgagcgaacgcgccggagtccggatgggctcctcgtccgctccggcggccgcggccgcggccgcgccgagccggcgcaaggtggcgctctacctggccctcctcaccctgcagtacggcgcccagcccctcatctccaagcgctttgtccgcgaagatactatagtgacctcactagttcttgcaacggaagcagcaaaggttatttgcgcaatcattttattgattgcagagggtagtctgaaaaaacagttcagtaactggactctcactggatcactgactgcgtctggactgcctgctgccatttatgccctccagaatagtctgctgcaagtatcatacaagcatctggattccttgaccttttcaatccttaaccagactaagcttttgtggacagcatttttcacatttcttattttggggcaaaagcaatcttccaggcaagttctagcattggccctcttaattggtgctgccgttcttttaagtgttggggagagcagtagcaaaggttccaagggtggtggctctgactatatcttgctatatgggatcattccagttacagtcgcttctgtgctgtctgggctggcctcttcattgtgtcagtgggcatctcaggttaaaaaacatacctcttatatgatgaccatagagatgtcatttattggaagtatgtgcttgttagcaagtacctatcgctcaccagatggagaggccatcaggaaatatggatttttccatgaatggactttctggactgtgcaaaagctgcaatggatcttcattgatgtgtgggatcctaatcaccattctttacctcagataccggtattaatgaatgccgtgggtggaattcttgttggtcttgtcacaacttacgcaggtggcgttagaaagggttttgttatagtttcagctctccttgtaactgcactgctacaatttatatttgatgggaagccaccgtcactctactgcctgatagcattaccacttgtcgcgtcaagcatattcatctaccaaaaacatccatatgttgataggaagaagaaagactgatccacataattgtcagagacgggaattatcaacaggatgtgatcctaacctcattttctccacaaggctggaatttgcaccgtcaaggggaccaaatttgactcttgaagagttgctgttcgtcaagctatgtttcaattatctactgatctatatatatagaattaattagtaggacactagcctggaatcagtttcagcaggcagttgacaagcttgcatataacttctcgaaggaggcttcgtatcaatgatgatgatgaagtgtttccatgtgcagctatctatacttatcacctgattaatccgccattgtgcattgagaagtttcatgcggcaacttctttacttcggcaaaactagcagcag

SEQ ID NO: 55035 - DNA, 1586 bp, Zea Mays
gctagagatacacgcagaaggaaccttctcacatggaaaaaaaacatcgcaagttcgcgacagaatagtgacatcctgaagcagtcaagcactcaacctctccttcagtccttcccatctcatcctccatctcgatctcttcgctccgtcgaactttcacctagtcagcctgccgcgctacccctccaccgccgtctccacgcccgtggccaagccagcggaaccctagcatggcgaagctagcgcgatcgccaacgacctccccgccggcggcggccgcggataagcaccgctccgcggccgggtcggggctccggtccctcgccagtgccgcctccggatggtgggaccggtggacggtcattggttccggactctccaagctcgaaagggccttcggcgaccagttccccgagggcgagcgctacttcgggctcgagaacttcggcaacacctgctactgcaacagcgtcctccaggcattgtattattgtgctccattccgggaacagttgctggaatactatagaagaaacagaaatctcgaagatgctgaagaaaatttgttgacctgcctagcagatcttttttcacagataagtgcatcaaagaaaaagactggtgttattgctccaaaacgtttcattcaaatggttaggaaactaaatgaatattttcgtggctacatgcatcaggatgcccatgagtttttgaatttcttactgaatgaaattgttgatattctggaaaaagagtctagttctgcaaaggattctcctgggaccacatcttctgaaaatgtctcaaatggcgcagctgttgatggagttagaaaagaaccactggttacatgggtacataagaattttcagtttgcaagaagcagagaagagaatgaagataaaaaaggcgccacaaatattagtgatccacctaaagcgcttcaagttcatcgagcagcttaaccggcacaagaagctgtcgtaccgagtggtgtaccccttggagcttaagctcagcagcaactccgctgatgccgactgtgagtactccctctttgccgtggtggtccacctggggagcggccccaaccaggggcactacgtagccatgatcaagagccatgaccattggttgtccttcgatgatgacaatgtcgagatgatcccggagtctaccctacagaccttctatggctcttatcatgaatattcgggcaacactgatcatggctacatcttgttctacgggcgcattggtgggagtggaaatgagaagaccgactcttccgatggagtgtgaccgttgacatgggatcctgggtggttcgatgtacatgggctttcctggccttcgtatacttcggttggataggatatatttacattttcaacaagaaagtgttttttttgcggaagaccgtggggggaaaacataaaagtttagtttgttgttagttgcagttccttgtaaaggattagttggcaggttagtatatcattttattttgttttcataattctaacttgtcatcgggaccacattgcgcacgtttttttttttttgtgaaaaagtcctgttcggaa

SEQ ID NO: 55036 - DNA, 321 bp, Zea Mays
ctgaatttgggggtataaattttcttttccaatatccaccaaattcaggtgttaccctctctttcccttgatttttcttttcttttccctaaatagtgggggattattttgtcttatatctacgtgtaagcctagtaaattaaaaccctatgagtgccttgattgtcgcatcatgctgaagcatattttcactttgtttgatgagcgagtttgtgaagtatgcgtttaattaggaattcgattcgaggtagtaggaaatagaaaaggaagagaaaataacaaaatgaaaaaacaacaaagaggcccagcattatcttttct

SEQ ID NO: 55037 - DNA, 1027 bp, Zea Mays
ctccaaacgttttagggcattattgaatccgccctcaaagggagtcaagcctcctccagcctttcctttcaaatcggatttgtttgctcaagttgcaagatggataagaggaccaaggttgcagtttgtgttgctgctgcacataacttactgtcaatgatggccgtgattattgcgtctagaaaaagaaaacgaaatgcaaggagcgcacagattacctatgcaccattgcatgatgacaaaagcgatgctgattgtttaaacaagccttttgaacactttgatgagatgcaaacaatatttggaaataccatggccacatgtaagtttgcaaaggattccagtgcaggtctaggtgaagatgatgaaactgaaaatgaagaggtgacggcacgtgctttcactaaaaggcagttcgcttgtgatgataatgtcgcaacatcttctgcaagcaagagcaacaagaaggcaaaaaaacgtgacagtgaagaggagttgattgctgcattcaaaagtgtcgcggataagctatccaatgctattgagaaggttgccacatgggacactgatgtaccagatgatctttttgacaatttgctaaaccttccaggttttgagcagacccacatatctctgtatttcaattatttggtggcgcaccctcacattgctagagccttcaacaagttgccgttcgaccacaagttaatttgggctcgcaatttcgccagtgagaagttctctagagtgtgagggtaattagtaggtagatttgggcggctcttttgcttgaaccacatcgaacaatgaattgtgggctaagtacgtgtggattttgtagaagccttgaacttgatattatgtgcaaggctaggacacattattatgtgtgctgtgtggagttaataatatgtgttttgtggacttaatattagttgtaacatatcctgagatgggggcaatggctataagctttttggttgaattccagttttttgttctcatggttgctgcttgtggagtgaca

SEQ ID NO: 55038 - DNA, 1341 bp, Zea Mays
ctttctcggagttggacctggaccctccgtgggtttaaggaatagttgctagaggctagagcagggacagaaggcagagagtgtctccattagaccgtgtaacgctgaactgtagatgggatctgctggagatagcctcagtcttttttttttccgaaaggagatagcctcagtcttttttcacgaaaacaggggagaacagatggaaaggcgatggtctgaacctccgctttggatctgttgggcagtgggctgctggagttatatccgccctcaaagggagtcaagcctcctccagcctttcctttcaaatcggatttgtttgctcaagttgcaagatggataagaggaccaaggttgcagtttgtgttgctgctgcacataacttactgtcaatgatggccgtgattattgcgtctagaaaaagaaaacgaaatgcaaggagcgcacagattacctatgcaccattgcatgtgagtggtacaggctgggatgaagataattttgttattactctggatgaagagcactataatggttatgttaaggatgacaaaagcgatgctgattgtttaaacaagccttttgaacactttgatgagatgcaaacaatatttggaaataccatggccacatgtaagtttgcaaaggattccagtgcaggtctaggtgaagatgatgaaactgaaaatgaagaggtgacggcacgtgctttcactaaaaggcagttcgcttgtgatgataatgtcgcaacatcttctgcaagcaagagcaacaagaaggcaaaaaaacgtgacagtgaagaggagttgattgctgcattcaaaagtgtcgcggataagctatccaatgctattgagaaggttgccacatgggacactgatgtaccagatgatctttttgacaatttgctaaaccttccaggttttgagcagacccacatatctctgtatttcaattatttggtggcgcaccctcacattgctagagccttcaacaagttgccgttcgaccacaagttaatttgggctcgcaatttcgccagtgagaagttctctagagtgtgagggtaattagtaggtagatttgggcggctcttttgcttgaaccacatcgaacaatgaattgtgggctaagtacgtgtggattttgtagaagccttgaacttgatattatgtgcaaggctaggacacattattatgtgtgctgtgtggagttaataatatgtgttttgtggacttaatattagttgtaacatatcctgagatgggggcaatggctataagctttttggttgaattccagttttttgttctcatggttgctgcttgtggagtgaca

SEQ ID NO: 55039 - DNA, 1102 bp, Zea Mays
cggaaggcgaaggatggtattttaagatccgccctcaaagggagtcaagcctcctccagcctttcctttcaaatcggatttgtttgctcaagttgcaagatggataagaggaccaaggttgcagtttgtgttgctgctgcacataacttactgtcaatgatggccgtgattattgcgtctagaaaaagaaaacgaaatgcaaggagcgcacagattacctatgcaccattgcatgtgagtggtacaggctgggatgaagataattttgttattactctggatgaagagcactataatggttatgttaaggatgacaaaagcgatgctgattgtttaaacaagccttttgaacactttgatgagatgcaaacaatatttggaaataccatggccacatgtaagtttgcaaaggattccagtgcaggtctaggtgaagatgatgaaactgaaaatgaagaggtgacggcacgtgctttcactaaaaggcagttcgcttgtgatgataatgtcgcaacatcttctgcaagcaagagcaacaagaaggcaaaaaaacgtgacagtgaagaggagttgattgctgcattcaaaagtgtcgcggataagctatccaatgctattgagaaggttgccacatgggacactgatgtaccagatgatctttttgacaatttgctaaaccttccaggttttgagcagacccacatatctctgtatttcaattatttggtggcgcaccctcacattgctagagccttcaacaagttgccgttcgaccacaagttaatttgggctcgcaatttcgccagtgagaagttctctagagtgtgagggtaattagtaggtagatttgggcggctcttttgcttgaaccacatcgaacaatgaattgtgggctaagtacgtgtggattttgtagaagccttgaacttgatattatgtgcaaggctaggacacattattatgtgtgctgtgtggagttaataatatgtgttttgtggacttaatattagttgtaacatatcctgagatgggggcaatggctataagctttttggttgaattccagttttttgttctcatggttgctgcttgtggagtgaca

SEQ ID NO: 55040 - DNA, 1098 bp, Zea Mays
gtcgctagctacatggttatcaatccgccctcaaagggagtcaagcctcctccagcctttcctttcaaatcggatttgtttgctcaagttgcaagatggataagaggaccaaggttgcagtttgtgttgctgctgcacataacttactgtcaatgatggccgtgattattgcgtctagaaaaagaaaacgaaatgcaaggagcgcacagattacctatgcaccattgcatgtgagtggtacaggctgggatgaagataattttgttattactctggatgaagagcactataatggttatgttaaggatgacaaaagcgatgctgattgtttaaacaagccttttgaacactttgatgagatgcaaacaatatttggaaataccatggccacatgtaagtttgcaaaggattccagtgcaggtctaggtgaagatgatgaaactgaaaatgaagaggtgacggcacgtgctttcactaaaaggcagttcgcttgtgatgataatgtcgcaacatcttctgcaagcaagagcaacaagaaggcaaaaaaacgtgacagtgaagaggagttgattgctgcattcaaaagtgtcgcggataagctatccaatgctattgagaaggttgccacatgggacactgatgtaccagatgatctttttgacaatttgctaaaccttccaggttttgagcagacccacatatctctgtatttcaattatttggtggcgcaccctcacattgctagagccttcaacaagttgccgttcgaccacaagttaatttgggctcgcaatttcgccagtgagaagttctctagagtgtgagggtaattagtaggtagatttgggcggctcttttgcttgaaccacatcgaacaatgaattgtgggctaagtacgtgtggattttgtagaagccttgaacttgatattatgtgcaaggctaggacacattattatgtgtgctgtgtggagttaataatatgtgttttgtggacttaatattagttgtaacatatcctgagatgggggcaatggctataagctttttggttgaattccagttttttgttctcatggttgctgcttgtggagtgaca

SEQ ID NO: 55041 - DNA, 1677 bp, Zea Mays
ctgctctatccaccacccccgcccacatcaccagagcacccgaggcttgtcttccttcctctcacatccgtacatagaaaaaaaaagaagaaatagggataccggagccgaactccggcggaccatctggtattctggtctggcactctggcgtgagaaaaggaaactgaattgaagcacaggtgtgctcagaatatgcagtcatctgcgatggcgttcttccctagcgttgccacggcgaagctggagctgaactctctgtacaggaagtacgtggacatgttcggtgtatcatcaaacaactctaccgttggctctcacaccatccacaagatgtcgcaccttcctgtcctgctggtcgatcgtacattcttcagcaccggtactgctattcagagcattgccatcagctatggagctcttattcgtaggtggttactgggcggaacttctgttgcacaggcaatccaaacatgaccgccacggccggatggtatttcgacgtgggccataggaaacgccggcgtgaagaagcgcttccagtaccagtaccagtgctttgacccatatgataatatggagggcaatagtgctagtatagatccgccctcaaagggagtcaagcctcctccagcctttcctttcaaatcggatttgtttgctcaagttgcaagatggataagaggaccaaggttgcagtttgtgttgctgctgcacataacttactgtcaatgatggccgtgattattgcgtctagaaaaagaaaacgaaatgcaaggagcgcacagattacctatgcaccattgcatgtgagtggtacaggctgggatgaagataattttgttattactctggatgaagagcactataatggttatgttaaggatgacaaaagcgatgctgattgtttaaacaagccttttgaacactttgatgagatgcaaacaatatttggaaataccatggccacatgtaagtttgcaaaggattccagtgcaggtctaggtgaagatgatgaaactgaaaatgaagaggtgacggcacgtgctttcactaaaaggcagttcgcttgtgatgataatgtcgcaacatcttctgcaagcaagagcaacaagaaggcaaaaaaacgtgacagtgaagaggagttgattgctgcattcaaaagtgtcgcggataagctatccaatgctattgagaaggttgccacatgggacactgatgtaccagatgatctttttgacaatttgctaaaccttccaggttttgagcagacccacatatctctgtatttcaattatttggtggcgcaccctcacattgctagagccttcaacaagttgccgttcgaccacaagttaatttgggctcgcaatttcgccagtgagaagttctctagagtgtgagggtaattagtaggtagatttgggcggctcttttgcttgaaccacatcgaacaatgaattgtgggctaagtacgtgtggattttgtagaagccttgaacttgatattatgtgcaaggctaggacacattattatgtgtgctgtgtggagttaataatatgtgttttgtggacttaatattagttgtaacatatcctgagatgggggcaatggctataagctttttggttgaattccagttttttgttctcatggttgctgcttgtggagtgaca

SEQ ID NO: 55042 - DNA, 3014 bp, Zea Mays
cccgcttgctcgcctccgctgtctgctctatccaccacccccgcccacatcaccagagcacccgaggcttgtcttccttcctctcacatccgtacatagaaaaaaaaagaagaaatagggataccggagccgaactccggcggaccatctggtattctggtctggcactctggcgtgagaaaaggaaactgaattgaagcacaggtgtgctcagaatatgcagtcatctgcgatggcgttcttccctagcgttgccacggcgaagctggagctgaactctctgtacaggaagtacgtggacatgttcggtgtatcatcaaacaactctaccgttggctctcacaccatccacaagatgtcgcaccttcctgtcctgctggtcgatcgtacattcttcagcaccggtactgctattcagagcattgccatcagctatggagctcttattcgtaggtggttactgggcggaacttctgttgcacagcacgcgatgatatcccgtgctgctatgaactcgcttccttgctgtgccttcctgccattctttgccagcgttggtgctctaatgaccaagctctgtggctgcactatgattccagaccgtttttctggttggcaatctgtccttggccaaagtgctaacctccgtggagaaccagttctggtcgtggacaataatgagctgggcaatgatcagacattatcgagctttcttgggcgcaagcgagattacgtcggtctcggtctagcgcttcagtgcatctgttaccctgcatgtctgaaggttgctgagttcccccagaagaatctcagcttcagcaggcagtggatgcgaagtggccatgacacgagcgcaatctggagggccatggcgaggaatgagcaatacctggcattcgtcgtagtcctggcggccttgcagctcttcctgcggctagcccgggtgaacgtcaccatcctgttcctgccaatgctgtcccaggccgtgagttccaggagcagcccagcggtgatcggcaacgttctgctggttctggtgacctcctgcggagttcttggatctgcactctcagtgaaacagttcggccgggaggtgacgttcgctatcggtgccatcgtgatggtaatttgccaggtcgcgattccactgatcatggaagtccagatcggggttggcggaggaacgcgcatgccggtgggttacacggccgcgacgttcgccctgacgtgcgtcgtgtcctgcggcctcagctggtcgtggggctcgttcttctggaccttacctggcaggaaggttcactcggccggacacgttctggccgtggctctgaacctgggcgtctgcttcgcccagatgcggtacttcctgctgatgctgtgcaggctgaagaacgccacccttgcgtactatgcgctgtggatctggtcgtgattgggattcagctgagggagaatgcgtagctagatgagtgcgtgttaactctggttacttgagtaggaggctagtttggtggatgtaaatacttctcttggcttggcttgtacagagttctggcgctatttctgatggctccgtagatagcaactgtagggcttggttgcacttcctatgctaatggctgttctactaactgtgtggcgctcaataaagctgttatggttggcatggtcgctacagggttatcaattaagcggatatgtggctgaccaatcggacactttcaaattcagggatgggatataattttttttctcccacgggtaattttttatgtctaaggtttgttattcaattcgaggcaatccaaacatgaccgccacggccggatggtatttcgacgtgggccataggaaacgccggcgtgaagaagcgcttccagtaccagtaccagtgctttgacccatatgataatatggagggcaatagtgctagtatagatccgccctcaaagggagtcaagcctcctccagcctttcctttcaaatcggatttgtttgctcaagttgcaagatggataagaggaccaaggttgcagtttgtgttgctgctgcacataacttactgtcaatgatggccgtgattattgcgtctagaaaaagaaaacgaaatgcaaggagcgcacagattacctatgcaccattgcatgtgagtggtacaggctgggatgaagataattttgttattactctggatgaagagcactataatggttatgttaaggatgacaaaagcgatgctgattgtttaaacaagccttttgaacactttgatgagatgcaaacaatatttggaaataccatggccacatgtaagtttgcaaaggattccagtgcaggtctaggtgaagatgatgaaactgaaaatgaagaggtgacggcacgtgctttcactaaaaggcagttcgcttgtgatgataatgtcgcaacatcttctgcaagcaagagcaacaagaaggcaaaaaaacgtgacagtgaagaggagttgattgctgcattcaaaagtgtcgcggataagctatccaatgctattgagaaggttgccacatgggacactgatgtaccagatgatctttttgacaatttgctaaaccttccaggttttgagcagacccacatatctctgtatttcaattatttggtggcgcaccctcacattgctagagccttcaacaagttgccgttcgaccacaagttaatttgggctcgcaatttcgccagtgagaagttctctagagtgtgagggtaattagtaggtagatttgggcggctcttttgcttgaaccacatcgaacaatgaattgtgggctaagtacgtgtggattttgtagaagccttgaacttgatattatgtgcaaggctaggacacattattatgtgtgctgtgtggagttaataatatgtgttttgtggacttaatattagttgtaacatatcctgagatgggggcaatggctataagctttttggttgaattccagttttttgttctcatggttgctgcttgtggagtgaca

SEQ ID NO: 55043 - DNA, 2175 bp, Zea Mays
ctgctctatccaccacccccgcccacatcaccagagcacccgaggcttgtcttccttcctctcacatccgtacatagaaaaaaaaagaagaaatagggataccggagccgaactccggcggaccatctggtattctggtctggcactctggcgtgagaaaaggaaactgaattgaagcacaggtgtgctcagaatatgcagtcatctgcgatggcgttcttccctagcgttgccacggcgaagctggagctgaactctctgtacaggaagtacgtggacatgttcggtgtatcatcaaacaactctaccgttggctctcacaccatccacaagatgtcgcaccttcctgtcctgctggtcgatcgtacattcttcagcaccggtactgctattcagagcattgccatcagctatggagctcttattcgtaggtggttactgggcggaacttctgttgcacagcacgcgatgatatcccgtgctgctatgaactcgcttccttgctgtgccttcctgccattctttgccagcgttggtgctctaatgaccaagctctgtggctgcactatgattccagaccgtttttctggttggcaatctgtccttggccaaagtgctaacctccgtggagaaccagttctggtcgtggacaataatgagctgggcaatgatcagacattatcgagctttcttgggcgcaagcgagattacgtcggtctcggtctagcgcttcagtgcatctgttaccctgcatgtctgaaggttgctgagttcccccagaagaatctcagcttcagcaggcagtggatgcgaagtggccatgacacgagcgcaatctggagggccatggcgaggaatgagcaatacctggcattcgtcgtagtcctggcggccttgcagctcttcctgcggctagcccgggtgaacgtcaccatcctgttcctgccaatgctgtcccaggccgtgagttccaggagcagcccagcggtgatcggcaacgttctgctggttctggtgacctcctgcggagttcttggatctgcactctcagtgaaacagttcggccgggaggtgacgttcgctatcggtgccatcgtgatggtaatttgccaggtcgcgattccactgatcatggaagtccagatcggggttggcggaggaacgcgcatgccggtgggttacacggccgcgacgttcgccctgacgtgcgtcgtgtcctgcggcctcagctggtcgtggggctcgttcttctggaccttacctggcaggaaggttcactcggccggacacgttctggccgtggctctgaacctgggcgtctgcttcgcccagatgcggtacttcctgctgatgctgtgcaggctgaagaacgccacccttgcgtactatgcgctgtggatctggtcgtgattgggattcagctgagggagaatgcgtagctagatgagtgcgtgttaactctggttacttgagtaggaggctagtttggtggatgtaaatacttctcttggcttggcttgtacagagttctggcgctatttctgatggctccgtagatagcaactgtagggcttggttgcacttcctatgctaatggctgttctactaactgtgtggcgctcaataaagctgttatggttggcatggtcgctacagggttatcaattaagcggatatgtggctgaccaatcggacactttcaaattcagggatgggatataattttttttctcccacgggtaattttttatgtctaaggtttgttattcaattcgaggcaatccaaacatgaccgccacggccggatggtatttcgacgtgggccataggaaacgccggcgtgaagaagcgcttccagtaccagtaccagtgctttgacccatatgataatatggagggcaatagtgctagtataggtgaaaccaccgaaaaaagtattttacaagtacgagggcaattgtcagtcttgcaaactttagaatttccctgtttcatatcatatgcgcacacagaattactacgcctggtgaagcgagtggtggaggatcacctatacattgccccctccgcttttgttgcaaggaggaaacaatgcataaaacaatttatgcaaattcttttcttatctgtaataatgtgcttgataaaagattgacatcaaatttcatacatata

SEQ ID NO: 55044 - DNA, 2013 bp, Zea Mays
ctgctctatccaccacccccgcccacatcaccagagcacccgaggcttgtcttccttcctctcacatccgtacatagaaaaaaaaagaagaaatagggataccggagccgaactccggcggaccatctggtattctggtctggcactctggcgtgagaaaaggaaactgaattgaagcacagatcgatcgagagaggcgaacggcagtcggcaggcgagaaagaagtgctgacgcctcgtttccgtcctgttgctgacaggcacgcaccactactactcgcccagtccgccgctctcccgcggatccttcacctccactccattccgaggatctcattagcacgctctccggcgcggcggcggcccttcctccgagaccaggagctcgccgccggagtcagtgagtgaggggtacgtggtcgccgtccgtttccgacagtccgcggggcccgcggagcgtaaagcaaggacgcagccaagggagagagggggagggaagcaagtggatctgtgctagctgttgcggtattctccggaacactctccaccaggcacagagcagaatatgcagtcatctgcgatggcgttcttccctagcgttgccacggcgaagctggagctgaactctctgtacaggaagtacgtggacatgttcggtgtatcatcaaacaactctaccgttggctctcacaccatccacaagatgtcgcaccttcctgtcctgctggtcgatcgtacattcttcagcaccggtactgctattcagagcattgccatcagctatggagctcttattcgtaggtggttactgggcggaacttctgttgcacagaccgtttttctggttggcaatctgtccttggccaaagtgctaacctccgtggagaaccagttctggtcgtggacaataatgagctgggcaatgatcagacattatcgagctttcttgggcgcaagcgagattacgtcggtctcggtctagcgcttcagtgcatctgttaccctgcatgtctgaaggttgctgagttcccccagaagaatctcagcttcagcaggcagtggatgcgaagtggccatgacacgagcgcaatctggagggccatggcgaggaatgagcaatacctggcattcgtcgtagtcctggcggccttgcagctcttcctgcggctagcccgggtgaacgtcaccatcctgttcctgccaatgctgtcccaggccgtgagttccaggagcagcccagcggtgatcggcaacgttctgctggttctggtgacctcctgcggagttcttggatctgcactctcagtgaaacagttcggccgggaggtgacgttcgctatcggtgccatcgtgatggtaatttgccaggtcgcgattccactgatcatggaagtccagatcggggttggcggaggaacgcgcatgccggtgggttacacggccgcgacgttcgccctgacgtgcgtcgtgtcctgcggcctcagctggtcgtggggctcgttcttctggaccttacctggcaggaaggttcactcggccggacacgttctggccgtggctctgaacctgggcgtctgcttcgcccagatgcggtacttcctgctgatgctgtgcaggctgaagaacgccacccttgcgtactatgcgctgtggatctggtcgtgattgggattcagctgagggagaatgcgtagctagatgagtgcgtgttaactctggttacttgagtaggaggctagtttggtggatgtaaatacttctcttggcttggcttgtacagagttctggcgctatttctgatggctccgtagatagcaactgtagggcttggttgcacttcctatgctaatggctgttctactaactgtgtggcgctcaataaagctgttatggttggcatggtcgctacagggttatcaattaagcggatatgtggctgaccaatcggacactttcaaattcagggatgggatataattttttttctcccacgggtaattttttatgtctaag

SEQ ID NO: 55045 - DNA, 1837 bp, Zea Mays
ctcgcctccgctgtctgctctatccaccacccccgcccacatcaccagagcacccgaggcttgtcttccttcctctcacatccgtacatagaaaaaaaaagaagaaatagggataccggagccgaactccggcggaccatctggtattctggtctggcactctggcgtgagaaaaggaaactgaattgaagcacagatcgatcgagagaggcgaacggcagtcggcaggcgagaaagaagtgctgacgcctcgtttccgtcgtgtgctcagaatatgcagtcatctgcgatggcgttcttccctagcgttgccacggcgaagctggagctgaactctctgtacaggaagtacgtggacatgttcggtgtatcatcaaacaactctaccgttggctctcacaccatccacaagatgtcgcaccttcctgtcctgctggtcgatcgtacattcttcagcaccggtactgctattcagagcattgccatcagctatggagctcttattcgtaggtggttactgggcggaacttctgttgcacagcacgcgatgatatcccgtgctgctatgaactcgcttccttgctgtgccttcctgccattctttgccagcgttggtgctctaatgaccaagctctgtggctgcactatgattccagaccgtttttctggttggcaatctgtccttggccaaagtgctaacctccgtggagaaccagttctggtcgtggacaataatgagctgggcaatgatcagacattatcgagctttcttgggcgcaagcgagattacgtcggtctcggtctagcgcttcagtgcatctgttaccctgcatgtctgaaggttgctgagttcccccagaagaatctcagcttcagcaggcagtggatgcgaagtggccatgacacgagcgcaatctggagggccatggcgaggaatgagcaatacctggcattcgtcgtagtcctggcggccttgcagctcttcctgcggctagcccgggtgaacgtcaccatcctgttcctgccaatgctgtcccaggccgtgagttccaggagcagcccagcggtgatcggcaacgttctgctggttctggtgacctcctgcggagttcttggatctgcactctcagtgaaacagttcggccgggaggtgacgttcgctatcggtgccatcgtgatggtaatttgccaggtcgcgattccactgatcatggaagtccagatcggggttggcggaggaacgcgcatgccggtgggttacacggccgcgacgttcgccctgacgtgcgtcgtgtcctgcggcctcagctggtcgtggggctcgttcttctggaccttacctggcaggaaggttcactcggccggacacgttctggccgtggctctgaacctgggcgtctgcttcgcccagatgcggtacttcctgctgatgctgtgcaggctgaagaacgccacccttgcgtactatgcgctgtggatctggtcgtgattgggattcagctgagggagaatgcgtagctagatgagtgcgtgttaactctggttacttgagtaggaggctagtttggtggatgtaaatacttctcttggcttggcttgtacagagttctggcgctatttctgatggctccgtagatagcaactgtagggcttggttgcacttcctatgctaatggctgttctactaactgtgtggcgctcaataaagctgttatggttggcatggtcgctacagggttatcaattaagcggatatgtggctgaccaatcggacactttcaaattcagggatgggatataattttttttctcccacgggtaattttttatgtctaag

SEQ ID NO: 55046 - DNA, 1707 bp, Zea Mays
atcgaaacccgcttgctcgcctccgctgtctgctctatccaccacccccgcccacatcaccagagcacccgaggcttgtcttccttcctctcacatccgtacatagaaaaaaaaagaagaaatagggataccggagccgaactccggcggaccatctggtattctggtctggcactctggcgtgagaaaaggaaactgaattgaagcacaggtgtgctcagaatatgcagtcatctgcgatggcgttcttccctagcgttgccacggcgaagctggagctgaactctctgtacaggaagtacgtggacatgttcggtgtatcatcaaacaactctaccgttggctctcacaccatccacaagatgtcgcaccttcctgtcctgctggtcgatcgtacattcttcagcaccgcacgcgatgatatcccgtgctgctatgaactcgcttccttgctgtgccttcctgccattctttgccagcgttggtgctctaatgaccaagctctgtggctgcactatgattccagaccgtttttctggttggcaatctgtccttggccaaagtgctaacctccgtggagaaccagttctggtcgtggacaataatgagctgggcaatgatcagacattatcgagctttcttgggcgcaagcgagattacgtcggtctcggtctagcgcttcagtgcatctgttaccctgcatgtctgaaggttgctgagttcccccagaagaatctcagcttcagcaggcagtggatgcgaagtggccatgacacgagcgcaatctggagggccatggcgaggaatgagcaatacctggcattcgtcgtagtcctggcggccttgcagctcttcctgcggctagcccgggtgaacgtcaccatcctgttcctgccaatgctgtcccaggccgtgagttccaggagcagcccagcggtgatcggcaacgttctgctggttctggtgacctcctgcggagttcttggatctgcactctcagtgaaacagttcggccgggaggtgacgttcgctatcggtgccatcgtgatggtaatttgccaggtcgcgattccactgatcatggaagtccagatcggggttggcggaggaacgcgcatgccggtgggttacacggccgcgacgttcgccctgacgtgcgtcgtgtcctgcggcctcagctggtcgtggggctcgttcttctggaccttacctggcaggaaggttcactcggccggacacgttctggccgtggctctgaacctgggcgtctgcttcgcccagatgcggtacttcctgctgatgctgtgcaggctgaagaacgccacccttgcgtactatgcgctgtggatctggtcgtgattgggattcagctgagggagaatgcgtagctagatgagtgcgtgttaactctggttacttgagtaggaggctagtttggtggatgtaaatacttctcttggcttggcttgtacagagttctggcgctatttctgatggctccgtagatagcaactgtagggcttggttgcacttcctatgctaatggctgttctactaactgtgtggcgctcaataaagctgttatggttggcatggtcgctacagggttatcaattaagcggatatgtggctgaccaatcggacactttcaaattcagggatgggatataattttttttctcccacgggtaattttttatgtctaag

SEQ ID NO: 55047 - DNA, 2044 bp, Zea Mays
cgcccatcgaaacccgcttgctcgcctccgctgtctgctctatccaccacccccgcccacatcaccagagcacccgaggcttgtcttccttcctctcacatccgtacatagaaaaaaaaagaagaaatagggataccggagccgaactccggcggaccatctggtattctggtctggcactctggcgtgagaaaaggaaactgaattgaagcacagatcgatcgagagaggcgaacggcagtcggcaggcgagaaagaagtgctgacgcctcgtttccgtcgcacgcaccactactactcgcccagtccgccgctctcccgcggatccttcacctccactccattccgaggatctcattagcacgctctccggcgcggcggcggcccttcctccgagaccaggagctcgccgccggagtcagtgagtgaggggtacgtggtcgccgtccgtttccgacagtccgcggggcccgcggagcgtaaagcaaggacgcagccaagggagagagggggagggaagcaagtggatctgtgctagctgttgcggtattctccggaacactctccaccaggcacagagcaggtgtgctcagaatatgcagtcatctgcgatggcgttcttccctagcgttgccacggcgaagctggagctgaactctctgtacaggaagtacgtggacatgttcggtgtatcatcaaacaactctaccgttggctctcacaccatccacaagatgtcgcaccttcctgtcctgctggtcgatcgtacattcttcagcaccggtactgctattcagagcattgccatcagctatggagctcttattcgtaggtggttactgggcggaacttctgttgcacagaccgtttttctggttggcaatctgtccttggccaaagtgctaacctccgtggagaaccagttctggtcgtggacaataatgagctgggcaatgatcagacattatcgagctttcttgggcgcaagcgagattacgtcggtctcggtctagcgcttcagtgcatctgttaccctgcatgtctgaaggttgctgagttcccccagaagaatctcagcttcagcaggcagtggatgcgaagtggccatgacacgagcgcaatctggagggccatggcgaggaatgagcaatacctggcattcgtcgtagtcctggcggccttgcagctcttcctgcggctagcccgggtgaacgtcaccatcctgttcctgccaatgctgtcccaggccgtgagttccaggagcagcccagcggtgatcggcaacgttctgctggttctggtgacctcctgcggagttcttggatctgcactctcagtgaaacagttcggccgggaggtgacgttcgctatcggtgccatcgtgatggtaatttgccaggtcgcgattccactgatcatggaagtccagatcggggttggcggaggaacgcgcatgccggtgggttacacggccgcgacgttcgccctgacgtgcgtcgtgtcctgcggcctcagctggtcgtggggctcgttcttctggaccttacctggcaggaaggttcactcggccggacacgttctggccgtggctctgaacctgggcgtctgcttcgcccagatgcggtacttcctgctgatgctgtgcaggctgaagaacgccacccttgcgtactatgcgctgtggatctggtcgtgattgggattcagctgagggagaatgcgtagctagatgagtgcgtgttaactctggttacttgagtaggaggctagtttggtggatgtaaatacttctcttggcttggcttgtacagagttctggcgctatttctgatggctccgtagatagcaactgtagggcttggttgcacttcctatgctaatggctgttctactaactgtgtggcgctcaataaagctgttatggttggcatggtcgctacagggttatcaattaagcggatatgtggctgaccaatcggacactttcaaattcagggatgggatataattttttttctcccacgggtaattttttatgtctaag

SEQ ID NO: 55048 - DNA, 2162 bp, Zea Mays
cgcccatcgaaacccgcttgctcgcctccgctgtctgctctatccaccacccccgcccacatcaccagagcacccgaggcttgtcttccttcctctcacatccgtacatagaaaaaaaaagaagaaatagggataccggagccgaactccggcggaccatctggtattctggtctggcactctggcgtgagaaaaggaaactgaattgaagcacagatcgatcgagagaggcgaacggcagtcggcaggcgagaaagaagtgctgacgcctcgtttccgtcctgttgctgacaggcacgcaccactactactcgcccagtccgccgctctcccgcggatccttcacctccactccattccgaggatctcattagcacgctctccggcgcggcggcggcccttcctccgagaccaggagctcgccgccggagtcagtgagtgaggggtacgtggtcgccgtccgtttccgacagtccgcggggcccgcggagcgtaaagcaaggacgcagccaagggagagagggggagggaagcaagtggatctgtgctagctgttgcggtattctccggaacactctccaccaggcacagagcagaatatgcagtcatctgcgatggcgttcttccctagcgttgccacggcgaagctggagctgaactctctgtacaggaagtacgtggacatgttcggtgtatcatcaaacaactctaccgttggctctcacaccatccacaagatgtcgcaccttcctgtcctgctggtcgatcgtacattcttcagcaccggtactgctattcagagcattgccatcagctatggagctcttattcgtaggtggttactgggcggaacttctgttgcacagcacgcgatgatatcccgtgctgctatgaactcgcttccttgctgtgccttcctgccattctttgccagcgttggtgctctaatgaccaagctctgtggctgcactatgattccagaccgtttttctggttggcaatctgtccttggccaaagtgctaacctccgtggagaaccagttctggtcgtggacaataatgagctgggcaatgatcagacattatcgagctttcttgggcgcaagcgagattacgtcggtctcggtctagcgcttcagtgcatctgttaccctgcatgtctgaaggttgctgagttcccccagaagaatctcagcttcagcaggcagtggatgcgaagtggccatgacacgagcgcaatctggagggccatggcgaggaatgagcaatacctggcattcgtcgtagtcctggcggccttgcagctcttcctgcggctagcccgggtgaacgtcaccatcctgttcctgccaatgctgtcccaggccgtgagttccaggagcagcccagcggtgatcggcaacgttctgctggttctggtgacctcctgcggagttcttggatctgcactctcagtgaaacagttcggccgggaggtgacgttcgctatcggtgccatcgtgatggtaatttgccaggtcgcgattccactgatcatggaagtccagatcggggttggcggaggaacgcgcatgccggtgggttacacggccgcgacgttcgccctgacgtgcgtcgtgtcctgcggcctcagctggtcgtggggctcgttcttctggaccttacctggcaggaaggttcactcggccggacacgttctggccgtggctctgaacctgggcgtctgcttcgcccagatgcggtacttcctgctgatgctgtgcaggctgaagaacgccacccttgcgtactatgcgctgtggatctggtcgtgattgggattcagctgagggagaatgcgtagctagatgagtgcgtgttaactctggttacttgagtaggaggctagtttggtggatgtaaatacttctcttggcttggcttgtacagagttctggcgctatttctgatggctccgtagatagcaactgtagggcttggttgcacttcctatgctaatggctgttctactaactgtgtggcgctcaataaagctgttatggttggcatggtcgctacagggttatcaattaagcggatatgtggctgaccaatcggacactttcaaattcagggatgggatataattttttttctcccacgggtaattttttatgtctaag

SEQ ID NO: 55049 - DNA, 1767 bp, Zea Mays
cagctttacagtacctcgctcggcacgcccatcgaaacccgcttgctcgcctccgctgtctgctctatccaccacccccgcccacatcaccagagcacccgaggcttgtcttccttcctctcacatccgtacatagaaaaaaaaagaagaaatagggataccggagccgaactccggcggaccatctggtattctggtctggcactctggcgtgagaaaaggaaactgaattgaagcacagatcgatcgagagaggcgaacggcagtcggcaggcgagaaagaagtgctgacgcctcgtttccgtcgtgtgctcagaatatgcagtcatctgcgatggcgttcttccctagcgttgccacggcgaagctggagctgaactctctgtacaggaagtacgtggacatgttcggtgtatcatcaaacaactctaccgttggctctcacaccatccacaagatgtcgcaccttcctgtcctgctggtcgatcgtacattcttcagcaccggtactgctattcagagcattgccatcagctatggagctcttattcgtaggtggttactgggcggaacttctgttgcacagaccgtttttctggttggcaatctgtccttggccaaagtgctaacctccgtggagaaccagttctggtcgtggacaataatgagctgggcaatgatcagacattatcgagctttcttgggcgcaagcgagattacgtcggtctcggtctagcgcttcagtgcatctgttaccctgcatgtctgaaggttgctgagttcccccagaagaatctcagcttcagcaggcagtggatgcgaagtggccatgacacgagcgcaatctggagggccatggcgaggaatgagcaatacctggcattcgtcgtagtcctggcggccttgcagctcttcctgcggctagcccgggtgaacgtcaccatcctgttcctgccaatgctgtcccaggccgtgagttccaggagcagcccagcggtgatcggcaacgttctgctggttctggtgacctcctgcggagttcttggatctgcactctcagtgaaacagttcggccgggaggtgacgttcgctatcggtgccatcgtgatggtaatttgccaggtcgcgattccactgatcatggaagtccagatcggggttggcggaggaacgcgcatgccggtgggttacacggccgcgacgttcgccctgacgtgcgtcgtgtcctgcggcctcagctggtcgtggggctcgttcttctggaccttacctggcaggaaggttcactcggccggacacgttctggccgtggctctgaacctgggcgtctgcttcgcccagatgcggtacttcctgctgatgctgtgcaggctgaagaacgccacccttgcgtactatgcgctgtggatctggtcgtgattgggattcagctgagggagaatgcgtagctagatgagtgcgtgttaactctggttacttgagtaggaggctagtttggtggatgtaaatacttctcttggcttggcttgtacagagttctggcgctatttctgatggctccgtagatagcaactgtagggcttggttgcacttcctatgctaatggctgttctactaactgtgtggcgctcaataaagctgttatggttggcatggtcgctacagggttatcaattaagcggatatgtggctgaccaatcggacactttcaaattcagggatgggatataattttttttctcccacgggtaattttttatgtctaag

SEQ ID NO: 55050 - DNA, 2200 bp, Zea Mays
cgccagctttacagtacctcgctcggcacgcccatcgaaacccgcttgctcgcctccgctgtctgctctatccaccacccccgcccacatcaccagagcacccgaggcttgtcttccttcctctcacatccgtacatagaaaaaaaaagaagaaatagggataccggagccgaactccggcggaccatctggtattctggtctggcactctggcgtgagaaaaggaaactgaattgaagcacagatcgatcgagagaggcgaacggcagtcggcaggcgagaaagaagtgctgacgcctcgtttccgtcctgttgctgacaggcacgcaccactactactcgcccagtccgccgctctcccgcggatccttcacctccactccattccgaggatctcattagcacgctctccggcgcggcggcggcccttcctccgagaccaggagctcgccgccggagtcagtgagtgaggggtacgtggtcgccgtccgtttccgacagtccgcggggcccgcggagcgtaaagcaaggacgcagccaagggagagagggggagggaagcaagtggatctgtgctagctgttgcggtattctccggaacactctccaccaggcacagagcaggtgtgctcagaatatgcagtcatctgcgatggcgttcttccctagcgttgccacggcgaagctggagctgaactctctgtacaggaagtacgtggacatgttcggtgtatcatcaaacaactctaccgttggctctcacaccatccacaagatgtcgcaccttcctgtcctgctggtcgatcgtacattcttcagcaccggtactgctattcagagcattgccatcagctatggagctcttattcgtaggtggttactgggcggaacttctgttgcacagcacgcgatgatatcccgtgctgctatgaactcgcttccttgctgtgccttcctgccattctttgccagcgttggtgctctaatgaccaagctctgtggctgcactatgattccagaccgtttttctggttggcaatctgtccttggccaaagtgctaacctccgtggagaaccagttctggtcgtggacaataatgagctgggcaatgatcagacattatcgagctttcttgggcgcaagcgagattacgtcggtctcggtctagcgcttcagtgcatctgttaccctgcatgtctgaaggttgctgagttcccccagaagaatctcagcttcagcaggcagtggatgcgaagtggccatgacacgagcgcaatctggagggccatggcgaggaatgagcaatacctggcattcgtcgtagtcctggcggccttgcagctcttcctgcggctagcccgggtgaacgtcaccatcctgttcctgccaatgctgtcccaggccgtgagttccaggagcagcccagcggtgatcggcaacgttctgctggttctggtgacctcctgcggagttcttggatctgcactctcagtgaaacagttcggccgggaggtgacgttcgctatcggtgccatcgtgatggtaatttgccaggtcgcgattccactgatcatggaagtccagatcggggttggcggaggaacgcgcatgccggtgggttacacggccgcgacgttcgccctgacgtgcgtcgtgtcctgcggcctcagctggtcgtggggctcgttcttctggaccttacctggcaggaaggttcactcggccggacacgttctggccgtggctctgaacctgggcgtctgcttcgcccagatgcggtacttcctgctgatgctgtgcaggctgaagaacgccacccttgcgtactatgcgctgtggatctggtcgtgattgggattcagctgagggagaatgcgtagctagatgagtgcgtgttaactctggttacttgagtaggaggctagtttggtggatgtaaatacttctcttggcttggcttgtacagagttctggcgctatttctgatggctccgtagatagcaactgtagggcttggttgcacttcctatgctaatggctgttctactaactgtgtggcgctcaataaagctgttatggttggcatggtcgctacagggttatcaattaagcggatatgtggctgaccaatcggacactttcaaattcagggatgggatataattttttttctcccacgggtaattttttatgtctaag

SEQ ID NO: 55051 - DNA, 1711 bp, Zea Mays
cggacacgccagctttacagtacctcgctcggcacgcccatcgaaacccgcttgctcgcctccgctgtctgctctatccaccacccccgcccacatcaccagagcacccgaggcttgtcttccttcctctcacatccgtacatagaaaaaaaaagaagaaatagggataccggagccgaactccggcggaccatctggtattctggtctggcactctggcgtgagaaaaggaaactgaattgaagcacaggtgtgctcagaatatgcagtcatctgcgatggcgttcttccctagcgttgccacggcgaagctggagctgaactctctgtacaggaagtacgtggacatgttcggtgtatcatcaaacaactctaccgttggctctcacaccatccacaagatgtcgcaccttcctgtcctgctggtcgatcgtacattcttcagcaccggtactgctattcagagcattgccatcagctatggagctcttattcgtaggtggttactgggcggaacttctgttgcacagaccgtttttctggttggcaatctgtccttggccaaagtgctaacctccgtggagaaccagttctggtcgtggacaataatgagctgggcaatgatcagacattatcgagctttcttgggcgcaagcgagattacgtcggtctcggtctagcgcttcagtgcatctgttaccctgcatgtctgaaggttgctgagttcccccagaagaatctcagcttcagcaggcagtggatgcgaagtggccatgacacgagcgcaatctggagggccatggcgaggaatgagcaatacctggcattcgtcgtagtcctggcggccttgcagctcttcctgcggctagcccgggtgaacgtcaccatcctgttcctgccaatgctgtcccaggccgtgagttccaggagcagcccagcggtgatcggcaacgttctgctggttctggtgacctcctgcggagttcttggatctgcactctcagtgaaacagttcggccgggaggtgacgttcgctatcggtgccatcgtgatggtaatttgccaggtcgcgattccactgatcatggaagtccagatcggggttggcggaggaacgcgcatgccggtgggttacacggccgcgacgttcgccctgacgtgcgtcgtgtcctgcggcctcagctggtcgtggggctcgttcttctggaccttacctggcaggaaggttcactcggccggacacgttctggccgtggctctgaacctgggcgtctgcttcgcccagatgcggtacttcctgctgatgctgtgcaggctgaagaacgccacccttgcgtactatgcgctgtggatctggtcgtgattgggattcagctgagggagaatgcgtagctagatgagtgcgtgttaactctggttacttgagtaggaggctagtttggtggatgtaaatacttctcttggcttggcttgtacagagttctggcgctatttctgatggctccgtagatagcaactgtagggcttggttgcacttcctatgctaatggctgttctactaactgtgtggcgctcaataaagctgttatggttggcatggtcgctacagggttatcaattaagcggatatgtggctgaccaatcggacactttcaaattcagggatgggatataattttttttctcccacgggtaattttttatgtctaag

SEQ ID NO: 55052 - DNA, 2040 bp, Zea Mays
tacatctgcactcaccgaaagtggcaacttgttttcagtgtgcgtgttgggggtggggggagcagccttggagggagctttacagcaacaacataagtgggacaataccccctgaactggggaacctgactaacctggtcagtttggatctgtatatgaacaacttctctggcaatatccctgacagcctggggaatctagtgaagctgcgtttcctgatagacgtcttaacaacaatagcttggttggtccgattcccgtatccttgaccaatatctccactctccaagtactggatctctcgaacaacaacctctcaggacaagtcccatcgactggctccttttcactcttcacccctataagttttgccaacaatccaaatctttgtggccctggtacttcgaagccctgccctggggctcctcccttttccccacctcctccattcaatcctccatctcccccaactcaatctactggtgcttctagcactggagcaatagctggaggtgttgctgctggtgcagcattggtgtttgctgttcctgcaattgcatttgcaatgtggcgccgtcgtaaacctgaagagcatttcttcgatgttcctgccgaggaggatccagaagtccatcttggtcagctcaaaaagttttcattgcgggagcttcaagttgcaactgataatttcagtaacaagaacattttaggaagaggcggttttggaaaagtgtacaaaggaaggcttgctgatggctcattggtagcagtgaaaagactaaaagaggagcgtacacctggtggtgagcttcagttccaaacagaggttgagatgattagcatggcggtgcacaagaaccttctccgacttcgtggtttctgcatgacacctactgaaaggttgttagtctacccatacatggctaacgggagtgtggcatcacgtttacgagagcggcagccatctgagccacctcttagctgggaaccaagaagacggattgcactgggatctgcaagaggactttcttacttgcatgatcactgcgatcccaaaatcatccatcgggatgtcaaagctgcaaatattcttttggatgaggacttcgaggcagttgtgggtgatttcgggcttgccaagcttatggactacaaggatacccatgtcacaacagctgttcgtggaacaattgggcacattgctcccgagtacctatctaccggcaagtcttctgagaagactgatgtttttggctatgggatcatgcttctggagcttattactggccagagggcatttgatctagctcgtcttgcaaatgatgacgatgttatgcttcttgactgggtgaaaggactgttgaaggagaagaaggtggagatgctggtggacccagatctgcagaaagcctacgaggaggtcgaggtggagagccttattcaggtggcactcctctgcacgcagggctcccccctggaccgtccaaagatgtcggaggtggtgaggatgctcgaaggtgacgggctggcagagcgttgggacgaatggcagaaagtagaggtggtgaggcaggaggctgagtcggcaccgctccgcaatgactggatcgtcgattccacgtacaaccttcgtgccgtggagctgtccggcccaaggtagccactccacgactccgatgaaagaaaacactgaattggccaagattcagtctaattgctgcttgtgtatatgaaaggtagcttttggaattgttagcgacaatttgaaaggatcgatcttttttttttggattcctcgctagctcagatgttggttacgctgaggttgtgttaaggtgaaaattcgtatatctaagggtgaatttctaaagcattcttgcaatagtccagcagcgaatgtagcagctattgtactacgtggtatgcagaaccgtgttacgttttgccatagcttagttctggttcagctttctaagccacggtcaaaagtttggaatcttacttagggctagcttagaaactcaaatctcctttccttct

SEQ ID NO: 55053 - DNA, 2231 bp, Zea Mays
ccatggtgtaccatgaatagaagaacgtcggacactgttgtactaacaatggatggggccaacagtgatgccctgtacagcctgcgtcagagcttgaaagatgctaacaatgtcttgcagagttgggatcccactcttgttaatccatgtacatggttccatgttacgtgtaacaacgataacagtgttatcagagttgaccttggaaatgcacaattatctggcgttctagtgccacaacttggccagctgaaaaatctccaatatttggagctttacagcaacaacataagtgggacaataccccctgaactggggaacctgactaacctggtcagtttggatctgtatatgaacaacttctctggcaatatccctgacagcctggggaatctagtgaagctgcgtttcctacgtcttaacaacaatagcttggttggtccgattcccgtatccttgaccaatatctccactctccaagtactggatctctcgaacaacaacctctcaggacaagtcccatcgactggctccttttcactcttcacccctataagttttgccaacaatccaaatctttgtggccctggtacttcgaagccctgccctggggctcctcccttttccccacctcctccattcaatcctccatctcccccaactcaatctactggtgcttctagcactggagcaatagctggaggtgttgctgctggtgcagcattggtgtttgctgttcctgcaattgcatttgcaatgtggcgccgtcgtaaacctgaagagcatttcttcgatgttcctgccgaggaggatccagaagtccatcttggtcagctcaaaaagttttcattgcgggagcttcaagttgcaactgataatttcagtaacaagaacattttaggaagaggcggttttggaaaagtgtacaaaggaaggcttgctgatggctcattggtagcagtgaaaagactaaaagaggagcgtacacctggtggtgagcttcagttccaaacagaggttgagatgattagcatggcggtgcacaagaaccttctccgacttcgtggtttctgcatgacacctactgaaaggttgttagtctacccatacatggctaacgggagtgtggcatcacgtttacgagagcggcagccatctgagccacctcttagctgggaaccaagaagacggattgcactgggatctgcaagaggactttcttacttgcatgatcactgcgatcccaaaatcatccatcgggatgtcaaagctgcaaatattcttttggatgaggacttcgaggcagttgtgggtgatttcgggcttgccaagcttatggactacaaggatacccatgtcacaacagctgttcgtggaacaattgggcacattgctcccgagtacctatctaccggcaagtcttctgagaagactgatgtttttggctatgggatcatgcttctggagcttattactggccagagggcatttgatctagctcgtcttgcaaatgatgacgatgttatgcttcttgactgggtgaaaggactgttgaaggagaagaaggtggagatgctggtggacccagatctgcagaaagcctacgaggaggtcgaggtggagagccttattcaggtggcactcctctgcacgcagggctcccccctggaccgtccaaagatgtcggaggtggtgaggatgctcgaaggtgacgggctggcagagcgttgggacgaatggcagaaagtagaggtggtgaggcaggaggctgagtcggcaccgctccgcaatgactggatcgtcgattccacgtacaaccttcgtgccgtggagctgtccggcccaaggtagccactccacgactccgatgaaagaaaacactgaattggccaagattcagtctaattgctgcttgtgtatatgaaaggtagcttttggaattgttagcgacaatttgaaaggatcgatcttttttttttggattcctcgctagctcagatgttggttacgctgaggttgtgttaaggtgaaaattcgtatatctaagggtgaatttctaaagcattcttgcaatagtccagcagcgaatgtagcagctattgtactacgtggtatgcagaaccgtgttacgttttgccatagcttagttctggttcagctttctaagccacggtcaaaagtttggaatcttacttagggctagcttagaaactcaaatctcctttccttct

SEQ ID NO: 55054 - DNA, 2671 bp, Zea Mays
ctccccccgagaccgagagcacgccgcctgcgcccgcaaccgggtagcactctcacttccacgtgggccggagagatcactggtcccgcacgtcggtgacgtcctgcggtggggcgccccttcttccgcgagcgtagggcgacggtcccaccgcggagtagaagaacaatttaggtcgcgacatacacacatatacacacgcgcacaggcacagccggactcggtttcgactttcgagctacagagaattcgtcccggaaaagaaaaaaaaatcacccttccatccgccagagagagagagagaggagtgggaggaccggaggaggagttcaggagggagaggtcggcggcggcgcggcagatcgggtagcaccgtgcagctcgggccttaggcgcaccagcggtggggggatccgcgcgcccatgcgccggtgaggtggtgggcggtggtccttgcggtcgcggtgctgctcgggccgggacgggtcgtcgccaacaccgagggtgatgccctgtacagcctgcgtcagagcttgaaagatgctaacaatgtcttgcagagttgggatcccactcttgttaatccatgtacatggttccatgttacgtgtaacaacgataacagtgttatcagagttgaccttggaaatgcacaattatctggcgttctagtgccacaacttggccagctgaaaaatctccaatatttggagctttacagcaacaacataagtgggacaataccccctgaactggggaacctgactaacctggtcagtttggatctgtatatgaacaacttctctggcaatatccctgacagcctggggaatctagtgaagctgcgtttcctacgtcttaacaacaatagcttggttggtccgattcccgtatccttgaccaatatctccactctccaagtactggatctctcgaacaacaacctctcaggacaagtcccatcgactggctccttttcactcttcacccctataagttttgccaacaatccaaatctttgtggccctggtacttcgaagccctgccctggggctcctcccttttccccacctcctccattcaatcctccatctcccccaactcaatctactggtgcttctagcactggagcaatagctggaggtgttgctgctggtgcagcattggtgtttgctgttcctgcaattgcatttgcaatgtggcgccgtcgtaaacctgaagagcatttcttcgatgttcctgccgaggaggatccagaagtccatcttggtcagctcaaaaagttttcattgcgggagcttcaagttgcaactgataatttcagtaacaagaacattttaggaagaggcggttttggaaaagtgtacaaaggaaggcttgctgatggctcattggtagcagtgaaaagactaaaagaggagcgtacacctggtggtgagcttcagttccaaacagaggttgagatgattagcatggcggtgcacaagaaccttctccgacttcgtggtttctgcatgacacctactgaaaggttgttagtctacccatacatggctaacgggagtgtggcatcacgtttacgagagcggcagccatctgagccacctcttagctgggaaccaagaagacggattgcactgggatctgcaagaggactttcttacttgcatgatcactgcgatcccaaaatcatccatcgggatgtcaaagctgcaaatattcttttggatgaggacttcgaggcagttgtgggtgatttcgggcttgccaagcttatggactacaaggatacccatgtcacaacagctgttcgtggaacaattgggcacattgctcccgagtacctatctaccggcaagtcttctgagaagactgatgtttttggctatgggatcatgcttctggagcttattactggccagagggcatttgatctagctcgtcttgcaaatgatgacgatgttatgcttcttgactgggtgaaaggactgttgaaggagaagaaggtggagatgctggtggacccagatctgcagaaagcctacgaggaggtcgaggtggagagccttattcaggtggcactcctctgcacgcagggctcccccctggaccgtccaaagatgtcggaggtggtgaggatgctcgaaggtgacgggctggcagagcgttgggacgaatggcagaaagtagaggtggtgaggcaggaggctgagtcggcaccgctccgcaatgactggatcgtcgattccacgtacaaccttcgtgccgtggagctgtccggcccaaggtagccactccacgactccgatgaaagaaaacactgaattggccaagattcagtctaattgctgcttgtgtatatgaaaggtagcttttggaattgttagcgacaatttgaaaggatcgatcttttttttttggattcctcgctagctcagatgttggttacgctgaggttgtgttaaggtgaaaattcgtatatctaagggtgaatttctaaagcattcttgcaatagtccagcagcgaatgtagcagctattgtactacgtggtatgcagaaccgtgttacgttttgccatagcttagttctggttcagctttctaagccacggtcaaaagtttggaatcttacttagggctagcttagaaactcaaatctcctttccttct

SEQ ID NO: 55055 - DNA, 2881 bp, Zea Mays
ccgaggaccgcgtccacgagatccccagcggccagcgcccgcacgccgccatgtcagcagatgcccgccgcggcggggccagcacgtcccccctgctcccctccctcctcctccccactacactacttccatcaagtcacccaccccactccccccgagaccgagagcacgccgcctgcgcccgcaaccgggtagcactctcacttccacgtgggccggagagatcactggtcccgcacgtcggtgacgtcctgcggtggggcgccccttcttccgcgagcgtagggcgacggtcccaccgcggagtagaagaacaatttaggtcgcgacatacacacatatacacacgcgcacaggcacagccggactcggtttcgactttcgagctacagagaattcgtcccggaaaagaaaaaaaaatcacccttccatccgccagagagagagagagaggagtgggaggaccggaggaggagttcaggagggagaggtcggcggcggcgcggcagatcgggtagcaccgtgcagctcgggccttaggcgcaccagcggtggggggatccgcgcgcccatgcgccggtgaggtggtggggcccgcttggcgctcgagttggaatggcggcgtcggcgtcggctgggaggtggtgggcggtggtccttgcggtcgcggtgctgctcgggccgggacgggtcgtcgccaacaccgagggtgatgccctgtacagcctgcgtcagagcttgaaagatgctaacaatgtcttgcagagttgggatcccactcttgttaatccatgtacatggttccatgttacgtgtaacaacgataacagtgttatcagagttgaccttggaaatgcacaattatctggcgttctagtgccacaacttggccagctgaaaaatctccaatatttggagctttacagcaacaacataagtgggacaataccccctgaactggggaacctgactaacctggtcagtttggatctgtatatgaacaacttctctggcaatatccctgacagcctggggaatctagtgaagctgcgtttcctgatagacgtcttaacaacaatagcttggttggtccgattcccgtatccttgaccaatatctccactctccaagtactggatctctcgaacaacaacctctcaggacaagtcccatcgactggctccttttcactcttcacccctataagttttgccaacaatccaaatctttgtggccctggtacttcgaagccctgccctggggctcctcccttttccccacctcctccattcaatcctccatctcccccaactcaatctactggtgcttctagcactggagcaatagctggaggtgttgctgctggtgcagcattggtgtttgctgttcctgcaattgcatttgcaatgtggcgccgtcgtaaacctgaagagcatttcttcgatgttcctgccgaggaggatccagaagtccatcttggtcagctcaaaaagttttcattgcgggagcttcaagttgcaactgataatttcagtaacaagaacattttaggaagaggcggttttggaaaagtgtacaaaggaaggcttgctgatggctcattggtagcagtgaaaagactaaaagaggagcgtacacctggtggtgagcttcagttccaaacagaggttgagatgattagcatggcggtgcacaagaaccttctccgacttcgtggtttctgcatgacacctactgaaaggttgttagtctacccatacatggctaacgggagtgtggcatcacgtttacgagagcggcagccatctgagccacctcttagctgggaaccaagaagacggattgcactgggatctgcaagaggactttcttacttgcatgatcactgcgatcccaaaatcatccatcgggatgtcaaagctgcaaatattcttttggatgaggacttcgaggcagttgtgggtgatttcgggcttgccaagcttatggactacaaggatacccatgtcacaacagctgttcgtggaacaattgggcacattgctcccgagtacctatctaccggcaagtcttctgagaagactgatgtttttggctatgggatcatgcttctggagcttattactggccagagggcatttgatctagctcgtcttgcaaatgatgacgatgttatgcttcttgactgggtgaaaggactgttgaaggagaagaaggtggagatgctggtggacccagatctgcagaaagcctacgaggaggtcgaggtggagagccttattcaggtggcactcctctgcacgcagggctcccccctggaccgtccaaagatgtcggaggtggtgaggatgctcgaaggtgacgggctggcagagcgttgggacgaatggcagaaagtagaggtggtgaggcaggaggctgagtcggcaccgctccgcaatgactggatcgtcgattccacgtacaaccttcgtgccgtggagctgtccggcccaaggtagccactccacgactccgatgaaagaaaacactgaattggccaagattcagtctaattgctgcttgtgtatatgaaaggtagcttttggaattgttagcgacaatttgaaaggatcgatcttttttttttggattcctcgctagctcagatgttggttacgctgaggttgtgttaaggtgaaaattcgtatatctaagggtgaatttctaaagcattcttgcaatagtccagcagcgaatgtagcagctattgtactacgtggtatgcagaaccgtgttacgttttgccatagcttagttctggttcagctttctaagccacggtcaaaagtttggaatcttacttagggctagcttagaaactcaaatctcctttccttct

SEQ ID NO: 55056 - DNA, 706 bp, Zea Mays
aacgctctcatttcccctccctctctcattcttacaggtggaccccatgtgtcatttcctccactcttccctctccacaaccgtctccaattagtgcttgctgcacgatcagagaaaccggcatctcccccacgttgcttggcctctcgccttaggccctgtagcactaccccgccaaccctccagggaacgcactcgcttctgctcatccaacacccttctcctaggcggtcctgcatcccccatatggcgcttttcccctttgtccttggtcagcggcggtgctgcagcccggtgcaatactcgtatcctcgacgctcgccaagtgcttgacgaaaggccagcaagctctgctccctttcccgcgatcctcagtcggcgcttcctctctcctccatgattgagtgcgtccgtgctgcagcctcgacgtcgtccgcctcctggtgccccattgtgcggtcgtgacgttcactgtccgcatccgcgtttcgccgttcgtcgttggctcgcctcgccgtcgcttcgcgtcatgcgcgcagcacgttgtcgtgcctcgccactagcttgtttggccgtctgccgtcgttgcaagactgcgatctatttccgagcttcaaagaatcgacagtcaagcttggcgaccaacggatcgaactcttcgagttctacgaggctgaagatcctgagcatctgtttggtgaaggca

SEQ ID NO: 55057 - DNA, 824 bp, Zea Mays
ccatgtgtcatttcctccactcttccctctccacaaccgtctccaattagtgcttgctgcacgatcagagaaaccggcatctcccccacgttgcttggcctctcgccttaggccctgtagcactaccccgccaaccctccagggaacgcactcgcttctgctcatccaacacccttctcctaggcggtcctgcatcccccatacggtgagcccccctacagttttccccaatacgctgcaagctctaggagccggcgccccctctggttcctccctcggctgctcctgaccgcgagctatccgagtccatggtccgactctgcaacctcgctacttcctaatcactcgcccctctcccatggcacatgcgcttttcccctttgtccttggtcagcggcggtgctgcagcccggtgcaatactcgtatcctcgacgctcgccaagtgcttgacgaaaggccagcaagctctgctccctttcccgcgatcctcggtcggcgcttcctctctcctccatgattgagtgcgtccgtgctgcagcctcgacgtcgtccgcctcctggtgcgccattgcgcggccgtgacgttcactgtccgcatcctcgttttgccgttcgtcgttggctcgcctcgccgtcgcttcgcgtcatgcgcgcatcacgttgtcgtgcctcgccactagcttgtttggccgtctgccgtcgttgcaagactgcgatctatttccgagcttcaaagaatcgacagtcaagcttggcgaccaacggatcgaactcttcgagttctacgaggctgaagatcctgagcatctgtttggtgaaggca

SEQ ID NO: 55058 - DNA, 5120 bp, Zea Mays
cagccacatctactagctctccccaatccgaaccgaagccacacacccacaccatatctgcaccagccatcctcgtgatctctctgtctcccatcgccagccgccaccgcgccctcctcccaccggatttagaggcgattcatgggagtggtgcgcaggctgctactgcggtatcaatggaggctgactgccatggaggatctgagcatcgaggcgaaggaggccgcgaggacatgttgatggtctccatgatggaaggaccacgccgcacggagaagcccaccggtgtcatcttccgcaaggtttgcttttactcttggatcaagactcacctggctagccgagtagtcgtccatcgcgttttgaaggcagacaggaagttatggttagctgcaggttaaagcgaatgaaatgaaccatcatctgtaacaaggtgctatatcaatgacaagcagcaacaaagcgtaacacactaaaggcaagtttttttaacaacctttggtctaatatttgccattataatagcatatagttgtacttgtagaatataaatagcagatacaaaacataacaaagcatacctttagtatatcttgaaactatttagtgtataaataaaagtaccaattattcaaaacatatatcaaagtttcattccaacatctggcttgaatatgtagacaaaatgatttaaatagactaaccaatgatcaatgttagtggttctacttcagcaattgtaaagggatgcttattttttggtcacgatgcggtgtcgtgctttcagccgtggaattatgtttaatggagtggtcaaaatttatgccgccatgtcagtccactagatcagaagcatctgtgtcctgcggcagcatgatgggctcacctataaacaaatggataagccttccctgacccagaacagaagaggttcaatggttcggcatataacattagaagtcgattgttttttcctttattttttggagggcagattcatatttgggcgtttggcacaggctttggctcaagtctacgacatcttaaaccattttgtttgcagtcatgcacggagaagacagaggaattgcacccaacaagcccttgatatccaaggaccacgagcgtacctaatttgattctacagactgggtcgatctctctatgattaacaaacacaataaaaaaactatatctgctaggaaaaattcagaactgaaataaaggacacaacaatttttgccacttcagcaacttcatagcatgttttccaacaaggatacaactccaagaagaacgatgttggtctgttatgaccggtcgccactacaggcgccgggcaacagcataggcatgcagataaggattataagatgataatgattagaagattaaggagataagatttgttagagagaaaagagggaatttatctcattagataaggacaagaagggagtataaataattgtaagcaccactctatagggattaagcagaaacaagattgttctggcttcctagagggagccgggagattactgtgacctagccgcccctttcctcgcgtctctcatctcgcgcgcggtgaacacggcgccccgccgttgtgcatcgcgcctcaaaccccggccaccaatcacccaccactacaacctgagatcgatcagggaatccgccccgattcctatcatggtcattgtggatgagatggactatttaataacaagagattgtgttgtgctacatgatcttttaatgcttacaatttgttctatctctagatgcatattcataggtgaagtttattttctgtactgtttaatttctaaaaactagatgaactatcttgttcggttaattttctgtactattaaatttctgaaaactggagtttttgcatgtactaatttctatgtgatggtttctatgtgtgctatctgcatgtctctttaattatctctatatatctggttagacgacaaccttctatctatgaattatatgtcatgtctctttaattatctctatatcaatgtctacctatgtgatataagataccgtagcaacgcgcgtgcacctaattagtgaatttggaagtgtgactttataaaaacaaatgagttatatgttcaagataatgttaatagtcatactatttaaagtccttttactttcttatttggatgagtcttttttcacatatcttccttcttaatgtaccattcatggttctattgatagctcaaggtcgtgtgaatgttgccgctgagtactacaaacaacaggtagagatgttagagggttttagtgagatgggcgcatttacagatcatgctttcctacctgtaatgtccaaggaagaacacgaaaaagttatcaggagtgaaccattagccatatggttgtctaatattgcaaatatggttctctttgctgcaaaagtgtatgctttagtaaggagtggttcacttgctattatcgcatcaactttggattctcttctagactttttgtcacgatatatcttgtggtttactgccttttcaatgcaaacgccaaatccctatagaaacccaattggaaaaagcgtatgcagccgctggtgagttcttttttgccataacctgtacttccaaaaatgatggttgatgttgacatctagatctattgtccagaatgttttgtactcttttctgcgaaaatgatttacttatcttttacgtaatctgaattattgtctctgcattttgaatagaatgagcattgctttccatgtttctttctgaggcaaacaataaagatctgaattgacaggaaatcaataaacttactcaacactgtgtgctcactactcagtaattcttacttactggaatataaattacctgtctataaatactaattgttgagttcatgattgaagtcatagaaccatggaccctttttatccagtcacctctgtttgaattttctttaagttaatgatgaacttgttatgacttccaatttgacatttgcttttgagatgcgttgtcacttgttggggcaacttccatgtgtcaaacttttgtttgtcatgcctttttttcatattcttttttctttcaactttactgggattttctaatagatcgcctcttagttatattgttgatttgtgatccttccaaaaccatactatcacctaaaaatgatcagttcatccagcaatgttttgtttgtctatttcttgtcatggtgcacttattagaattgttgcccacttttactttttacatctgataatatgtttaagaaactatttttacttgattcttgacttgtagatacctttttatttctgtattgtatcccacaaactttcctgctagatattcagttgatgttttgtacttgtatataccttgtccacataaaacttgtgtgatatacttttatgaaattgatacatatgataggttgtttaatgttttagagaaatgctcttgataaccatagttggtcatatattatagttcatctacttaaacatattgtaccttttttacatctctcatttgagtacaactgtagtatttgttcataacatattgtagcttaaccagaacactaaagttcaaattccttacctttcaatgctcaaggtttttatgtcttgtacagtaaatgcggccatttttgtttggtttgagaaaaaaagatttttttgttttgtttgaggcaaattctcaactgtgctgcagtgtagtactgtagtggcaacattttacttctgtcacgttgcagcaggtggccccaaagatctgagcagcaattgtgatttagtgaattaatggtaaccctgcaataataatatctgttttatgacaacaactattgctaaagaattagatattgatgaatatcgtattgatatactatcaaattttagaaatatatttcgtttttcagaattattgttgaatgcaaacaaaacaatgagatatctatatatgtaacacaatttttcgtcatacttatttggttcagttgtgctctacgtttcaaagcagggctgtgatgattggttgttaaatgatgtaggttaagaccatataaacagttgtaattaaattctttgctatatagaaatcatagcaacgcacgggcacttaagaaacggagagggggaggccgttgtggctttgtgaagcgcttcgtcccgagcgggcgtgggcgggtatggcaccacacgtatcagccggctctgttgtggtattttaaaaaatattttaatttaatcaataacattcttaatttcttacgtacccattttaacctatatatctatactatattaaagcatcagtttcaacggtcgttctgcgtcatatttttacagataatccctcacatctatttcaaattaatacgctgcacgtctgtctgctctgcgcaaccaacctccacgttacaaaacacaactccatatatagatggctaaacagcggttcggcacggtcctgacgcccacgggccacaactctggcctaggcatggcgtgccggcctgctgactgtatcaggtcatttggttaaatcagtgtaaaatgttaaaaaagtagtgaggaggtggggttcgaacccacacattgatggaagaagggcggaagacactgagtgaagctatctaagcattagaacatcatgctcagatgtttttattattaaatataaattgtgtgtatatatatatatatatatatatatatatatatatatatatatatatacgttttttgtaaaataaaaaatatactcgtgtcgggtccggccagcactaccggacaaggctacaacccaagcacgacacgatgttcttggttcttgcaaccattatgtcgtttttgagaccacattggtgcaatggactccatggtgtttgaggttgctgaattggacggagcaacaatgatttgtcacactaacagtaaaaggaaaggttatttattggttttaaacgttagtaattgctacgatgtaccataatttatatggagcgcgttcagtttttattgatgcctgactttagttgtcactccatatttttatctatcttttttataagtttgagttcat

SEQ ID NO: 55059 - DNA, 4510 bp, Zea Mays
ctctgaaccacgttgccacagccacatctactagctctccccaatccgaaccgaagccacacacccacaccatatctgcaccagccatcctcgtgatctctctgtctcccatcgccagccgccaccgcgccctcctcccaccggatttagaggcgattcatgggagtggtgcgcaggctgctactgcggtatcaatggaggctgactgccatggaggatctgagcatcgaggcgaaggaggccgcggtacgcataccccatcctccgtgtggcggcctccctccgagcacccacccgccccaccccctttcttctccctccatcgcgtcgtcatcatactacagaaagtacaaggaggacatgttgatggtctccatgatggaaggaccacgccgcacggagaagcccaccggtgtcatcttccgcaaggtccgctcggtcgtccatgtccgttcgtcctcttcctgggcggttggcgcgtgatctggcgagacctcccaatgggtcaaaatctattttgtgcttggcgatgtattccttaaggaccgccatgctcttctcctttggcgcggtcagctgcttcgacaaaggataccatactcattgttgatagcaaatgattgggttccctaaaccaggtttgcttttactcttggatcaagactcacctggctagccgagtagtcgtccatcgcgttttgaaggcagacaggaagttatggttagctgcaggttaaagcgaatgaaatgaaccatcatctgtaacaaggtgctatatcaatgacaagcagcaacaaagcgtaacacactaaaggcaagtttttttaacaacctttggtctaatatttgccattataatagcatatagttgtacttgtagaatataaatagcagatacaaaacataacaaagcatacctttagtatatcttgaaactatttagtgtataaataaaagtaccaattattcaaaacatatatcaaagtttcattccaacatctggcttgaatatgtagacaaaatgatttaaatagactaaccaatgatcaatgttagtggttctacttcagcaattgtaaagggatgcttattttttggtcacgatgcggtgtcgtgctttcagccgtggaattatgtttaatggagtggtcaaaatttatgccgccatgtcagtccactagatcagaagcatctgtgtcctgcggcagcatgatgggctcacctataaacaaatggataagccttccctgacccagaacagaagaggttcaatggctttggctcaagtctacgacatcttaaaccattttgtttgcagtcatgcacggagaagacagaggaattgcacccaacaagcccttgatatccaaggaccacgagcgtacctaatttgattctacagactgggtcgatctctctatgattaacaaacacaataaaaaaactatatgtactaatcgatttataatgtttgtatgtactaatcgatttataaggcttgtatatactaatcgattttataatgtagctgctaggaaaaattcagaactgaaataaaggacacaacaatttttgccacttcagcaacttcatagcatgttttccaacaaggatacaactccaagaagaacgatctcaaggtcgtgtgaatgttgccgctgagtactacaaacaacaggtagagatgttagagggttttagtgagatgggcgcatttacagatcatgctttcctacctgtaatgtccaaggaagaacacgaaaaagttatcaggagtgaaccattagccatatggttgtctaatattgcaaatatggttctctttgctgcaaaagtgtatgctttagtaaggagtggttcacttgctattatcgcatcaactttggattctcttctagactttttgtcacgatatatcttgtggtttactgccttttcaatgcaaacgccaaatccctatagaaacccaattggaaaaagcgtatgcagccgctggtgagttcttttttgccataacctgtacttccaaaaatgatggttgatgttgacatctagatctattgtccagaatgttttgtactcttttctgcgaaaatgatttacttatcttttacgtaatctgaattattgtctctgcattttgaatagaatgagcattgctttccatgtttctttctgaggcaaacaataaagatctgaattgacaggaaatcaataaacttactcaacactgtgtgctcactactcagtaattcttacttactggaatataaattacctgtctataaatactaattgttgagttcatgattgaagtcatagaaccatggaccctttttatccagtcacctctgtttgaattttctttaagttaatgatgaacttgttatgacttccaatttgacatttgcttttgagatgcgttgtcacttgttggggcaacttccatgtgtcaaacttttgtttgtcatgcctttttttcatattcttttttctttcaactttactgggattttctaatagatcgcctcttagttatattgttgatttgtgatccttccaaaaccatactatcacctaaaaatgatcagttcatccagcaatgttttgtttgtctatttcttgtcatggtgcacttattagaattgttgcccacttttactttttacatctgataatatgtttaagaaactatttttacttgattcttgacttgtagatacctttttatttctgtattgtatcccacaaactttcctgctagatattcagttgatgttttgtacttgtatataccttgtccacataaaacttgtgtgatatacttttatgaaattgatacatatgataggttgtttaatgttttagagaaatgctcttgataaccatagttggtcatatattatagttcatctacttaaacatattgtaccttttttacatctctcatttgagtacaactgtagtatttgttcataacatattgtagcttaaccagaacactaaagttcaaattccttacctttcaatgctcaaggtttttatgtcttgtacagtaaatgcggccatttttgtttggtttgagaaaaaaagatttttttgttttgtttgaggcaaattctcaactgtgctgcagtgtagtactgtagtggcaacattttacttctgtcacgttgcagcaggtggccccaaagatctgagcagcaattgtgatttagtgaattaatggtaaccctgcaataataatatctgttttatgacaacaactattgctaaagaattagatattgatgaatatcgtattgatatactatcaaattttagaaatatatttcgtttttcagaattattgttgaatgcaaacaaaacaatgagatatctatatatgtaacacaatttttcgtcatacttatttggttcagttgtgctctacgtttcaaagcagggctgtgatgattggttgttaaatgatgtaggttaagaccatataaacagttgtaattaaattctttgctatatagaaatcatagcaacgcacgggcacttaagaaacggagagggggaggccgttgtggctttgtgaagcgcttcgtcccgagcgggcgtgggcgggtatggcaccacacgtatcagccggctctgttgtggtattttaaaaaatattttaatttaatcaataacattcttaatttcttacgtacccattttaacctatatatctatactatattaaagcatcagtttcaacggtcgttctgcgtcatatttttacagataatccctcacatctatttcaaattaatacgctgcacgtctgtctgctctgcgcaaccaacctccacgttacaaaacacaactccatatatagatggctaaacagcggttcggcacggtcctgacgcccacgggccacaactctggcctaggcatggcgtgccggcctgctgactgtatcaggtcatttggttaaatcagtgtaaaatgttaaaaaagtagtgaggaggtggggttcgaacccacacattgatggaagaagggcggaagacactgagtgaagctatctaagcattagaacatcatgctcagatgtttttattattaaatataaattgtgtgtatatatatatatatatatatatatatatatatatatatatatatatacgttttttgtaaaataaaaaatatactcgtgtcgggtccggccagcactaccggacaaggctacaacccaagcacgacacgatgttcttggttcttgcaaccattatgtcgtttttgagaccacattggtgcaatggactccatggtgtttgaggttgctgaattggacggagcaacaatgatttgtcacactaacagtaaaaggaaaggttatttattggttttaaacgttagtaattgctacgatgtaccataatttatatggagcgcgttcagtttttattgatgcctgactttagttgtcactccatatttttatctatcttttttataagtttgagttcat

SEQ ID NO: 55060 - DNA, 5093 bp, Zea Mays
ctctgaaccacgttgccacagccacatctactagctctccccaatccgaaccgaagccacacacccacaccatatctgcaccagccatcctcgtgatctctctgtctcccatcgccagccgccaccgcgccctcctcccaccggatttagaggcgattcatgggagtggtgcgcaggctgctactgcggtatcaatggaggctgactgccatggaggatctgagcatcgaggcgaaggaggccgcgaggacatgttgatggtctccatgatggaaggaccacgccgcacggagaagcccaccggtgtcatcttccgcaaggtccgctcggtcgtccatgtccgttcgtcctcttcctgggcggttggcgcgtgatctggcgagacctcccaatgggtcaaaatctattttgtgcttggcgatgtattccttaaggaccgccatgctcttctcctttggcgcggtcagctgcttcgacaaaggataccatactcattgttgatagcaaatgattgggttccctaaaccaggtttgcttttactcttggatcaagactcacctggctagccgagtagtcgtccatcgcgttttgaaggcagacaggaagttatggttagctgcaggttaaagcgaatgaaatgaaccatcatctgtaacaaggtgctatatcaatgacaagcagcaacaaagcgtaacacactaaagccgtggaattatgtttaatggagtggtcaaaatttatgccgccatgtcagtccactagatcagaagcatctgtgtcctgcggcagcatgatgggctcacctataaacaaatggataagccttccctgacccagaacagaagaggctttggctcaagtctacgacatcttaaaccattttgtttgcagtcatgcacggagaagacagaggaattgcacccaacaagcccttgatatccaaggaccacgagcgtacctaatttgattctacagactgggtcgatctctctatgattaacaaacacaataaaaaaactatatctgctaggaaaaattcagaactgaaataaaggacacaacaatttttgccacttcagcaacttcatagcatgttttccaacaaggatacaactccaagaagaacgatgttggtctgttatgaccggtcgccactacaggcgccgggcaacagcataggcatgcagataaggattataagatgataatgattagaagattaaggagataagatttgttagagagaaaagagggaatttatctcattagataaggacaagaagggagtataaataattgtaagcaccactctatagggattaagcagaaacaagattgttctggcttcctagagggagccgggagattactgtgacctagccgcccctttcctcgcgtctctcatctcgcgcgcggtgaacacggcgccccgccgttgtgcatcgcgcctcaaaccccggccaccaatcacccaccactacaacctgagatcgatcagggaatccgccccgattcctatcatggtcattgtggatgagatggactatttaataacaagagattgtgttgtgctacatgatcttttaatgcttacaatttgttctatctctagatgcatattcataggtgaagtttattttctgtactgtttaatttctaaaaactagatgaactatcttgttcggttaattttctgtactattaaatttctgaaaactggagtttttgcatgtactaatttctatgtgatggtttctatgtgtgctatctgcatgtctctttaattatctctatatatctggttagacgacaaccttctatctatgaattatatgtcatgtctctttaattatctctatatcaatgtctacctatgtgatataagataccgtagcaacgcgcgtgcacctaattagtgaatttggaagtgtgactttataaaaacaaatgagttatatgttcaagataatgttaatagtcatactatttaaagtccttttactttcttatttggatgagtcttttttcacatatcttccttcttaatgtaccattcatggttctattgatagctcaaggtcgtgtgaatgttgccgctgagtactacaaacaacaggtagagatgttagagggttttagtgagatgggcgcatttacagatcatgctttcctacctgtaatgtccaaggtatgttatatatggactttctgtttgaacattagggaaggtaacttatgtggatgttaataatcaaattttcttcactatattttttcttctttttaatagtgacgacatcaatagatatctggccactttattgacctgcaggaagaacacgaaaaagttatcaggagtgaaccattagccatatggttgtctaatattgcaaatatggttctctttgctgcaaaagtgtatgctttagtaaggagtggttcacttgctattatcgcatcaactttggattctcttctagactttttgtcacgatatatcttgtggtttactgccttttcaatgcaaacgccaaatccctatagaaacccaattggaaaaagcgtatgcagccgctggtgagttcttttttgccataacctgtacttccaaaaatgatggttgatgttgacatctagatctattgtccagaatgttttgtactcttttctgcgaaaatgatttacttatcttttacgtaatctgaattattgtctctgcattttgaatagaatgagcattgctttccatgtttctttctgaggcaaacaataaagatctgaattgacaggaaatcaataaacttactcaacactgtgtgctcactactcagtaattcttacttactggaatataaattacctgtctataaatactaattgttgagttcatgattgaagtcatagaaccatggaccctttttatccagtcacctctgtttgaattttctttaagttaatgatgaacttgttatgacttccaatttgacatttgcttttgagatgcgttgtcacttgttggggcaacttccatgtgtcaaacttttgtttgtcatgcctttttttcatattcttttttctttcaactttactgggattttctaatagatcgcctcttagttatattgttgatttgtgatccttccaaaaccatactatcacctaaaaatgatcagttcatccagcaatgttttgtttgtctatttcttgtcatggtgcacttattagaattgttgcccacttttactttttacatctgataatatgtttaagaaactatttttacttgattcttgacttgtagatacctttttatttctgtattgtatcccacaaactttcctgctagatattcagttgatgttttgtacttgtatataccttgtccacataaaacttgtgtgatatacttttatgaaattgatacatatgataggttgtttaatgttttagagaaatgctcttgataaccatagttggtcatatattatagttcatctacttaaacatattgtaccttttttacatctctcatttgagtacaactgtagtatttgttcataacatattgtagcttaaccagaacactaaagttcaaattccttacctttcaatgctcaaggtttttatgtcttgtacagtaaatgcggccatttttgtttggtttgagaaaaaaagatttttttgttttgtttgaggcaaattctcaactgtgctgcagtgtagtactgtagtggcaacattttacttctgtcacgttgcagcaggtggccccaaagatctgagcagcaattgtgatttagtgaattaatggtaaccctgcaataataatatctgttttatgacaacaactattgctaaagaattagatattgatgaatatcgtattgatatactatcaaattttagaaatatatttcgtttttcagaattattgttgaatgcaaacaaaacaatgagatatctatatatgtaacacaatttttcgtcatacttatttggttcagttgtgctctacgtttcaaagcagggctgtgatgattggttgttaaatgatgtaggttaagaccatataaacagttgtaattaaattctttgctatatagaaatcatagcaacgcacgggcacttaagaaacggagagggggaggccgttgtggctttgtgaagcgcttcgtcccgagcgggcgtgggcgggtatggcaccacacgtatcagccggctctgttgtggtattttaaaaaatattttaatttaatcaataacattcttaatttcttacgtacccattttaacctatatatctatactatattaaagcatcagtttcaacggtcgttctgcgtcatatttttacagataatccctcacatctatttcaaattaatacgctgcacgtctgtctgctctgcgcaaccaacctccacgttacaaaacacaactccatatatagatggctaaacagcggttcggcacggtcctgacgcccacgggccacaactctggcctaggcatggcgtgccggcctgctgactgtatcaggtcatttggttaaatcagtgtaaaatgttaaaaaagtagtgaggaggtggggttcgaacccacacattgatggaagaagggcggaagacactgagtgaagctatctaagcattagaacatcatgctcagatgtttttattattaaatataaattgtgtgtatatatatatatatatatatatatatatatatatatatatatatatacgttttttgtaaaataaaaaatatactcgtgtcgggtccggccagcactaccggacaaggctacaacccaagcacgacacgatgttcttggttcttgcaaccattatgtcgtttttgagaccacattggtgcaatggactccatggtgtttgaggttgctgaattggacggagcaacaatgatttgtcacactaacagtaaaaggaaaggttatttattggttttaaacgttagtaattgctacgatgtaccataatttatatggagcgcgttcagtttttattgatgcctgactttagttgtcactccatatttttatctatcttttttataagtttgagttcat

SEQ ID NO: 55061 - DNA, 4662 bp, Zea Mays
ttgccctcatcgctgactctgaaccacgttgccacagccacatctactagctctccccaatccgaaccgaagccacacacccacaccatatctgcaccagccatcctcgtgatctctctgtctcccatcgccagccgccaccgcgccctcctcccaccggatttagaggcgattcatgggagtggtgcgcaggctgctactgcggtatcaatggaggctgactgccatggaggatctgagcatcgaggcgaaggaggccgcggtacgcataccccatcctccgtgtggcggcctccctccgagcacccacccgccccaccccctttcttctccctccatcgcgtcgtcatcatactacagaaagtacaaggaggacatgttgatggtctccatgatggaaggaccacgccgcacggagaagcccaccggtgtcatcttccgcaaggtccgctcggtcgtccatgtccgttcgtcctcttcctgggcggttggcgcgtgatctggcgagacctcccaatgggtcaaaatctattttgtgcttggcgatgtattccttaaggaccgccatgctcttctcctttggcgcggtcagctgcttcgacaaaggataccatactcattgttgatagcaaatgattgggttccctaaaccaggtttgcttttactcttggatcaagactcacctggctagccgagtagtcgtccatcgcgttttgaaggcagacaggaagttatggttagctgcaggttaaagcgaatgaaatgaaccatcatctgtaacaaggtgctatatcaatgacaagcagcaacaaagcgtaacacactaaaggcaagtttttttaacaacctttggtctaatatttgccattataatagcatatagttgtacttgtagaatataaatagcagatacaaaacataacaaagcatacctttagtatatcttgaaactatttagtgtataaataaaagtaccaattattcaaaacatatatcaaagtttcattccaacatctggcttgaatatgtagacaaaatgatttaaatagactaaccaatgatcaatgttagtggttctacttcagcaattgtaaagggatgcttattttttggtcacgatgcggtgtcgtgctttcagccgtggaattatgtttaatggagtggtcaaaatttatgccgccatgtcagtccactagatcagaagcatctgtgtcctgcggcagcatgatgggctcacctataaacaaatggataagccttccctgacccagaacagaagaggctttggctcaagtctacgacatcttaaaccattttgtttgcagtcatgcacggagaagacagaggaattgcacccaacaagcccttgatatccaaggaccacgagcgtacctaatttgattctacagactgggtcgatctctctatgattaacaaacacaataaaaaaactatatgtactaatcgatttataatgtttgtatgtactaatcgatttataaggcttgtatatactaatcgattttataatgtagctgctaggaaaaattcagaactgaaataaaggacacaacaatttttgccacttcagcaacttcatagcatgttttccaacaaggatacaactccaagaagaacgatctcaaggtcgtgtgaatgttgccgctgagtactacaaacaacaggtagagatgttagagggttttagtgagatgggcgcatttacagatcatgctttcctacctgtaatgtccaaggtatgttatatatggactttctgtttgaacattagggaaggtaacttatgtggatgttaataatcaaattttcttcactatattttttcttctttttaatagtgacgacatcaatagatatctggccactttattgacctgcaggaagaacacgaaaaagttatcaggagtgaaccattagccatatggttgtctaatattgcaaatatggttctctttgctgcaaaagtgtatgctttagtaaggagtggttcacttgctattatcgcatcaactttggattctcttctagactttttgtcacgatatatcttgtggtttactgccttttcaatgcaaacgccaaatccctatagaaacccaattggaaaaagcgtatgcagccgctggtgagttcttttttgccataacctgtacttccaaaaatgatggttgatgttgacatctagatctattgtccagaatgttttgtactcttttctgcgaaaatgatttacttatcttttacgtaatctgaattattgtctctgcattttgaatagaatgagcattgctttccatgtttctttctgaggcaaacaataaagatctgaattgacaggaaatcaataaacttactcaacactgtgtgctcactactcagtaattcttacttactggaatataaattacctgtctataaatactaattgttgagttcatgattgaagtcatagaaccatggaccctttttatccagtcacctctgtttgaattttctttaagttaatgatgaacttgttatgacttccaatttgacatttgcttttgagatgcgttgtcacttgttggggcaacttccatgtgtcaaacttttgtttgtcatgcctttttttcatattcttttttctttcaactttactgggattttctaatagatcgcctcttagttatattgttgatttgtgatccttccaaaaccatactatcacctaaaaatgatcagttcatccagcaatgttttgtttgtctatttcttgtcatggtgcacttattagaattgttgcccacttttactttttacatctgataatatgtttaagaaactatttttacttgattcttgacttgtagatacctttttatttctgtattgtatcccacaaactttcctgctagatattcagttgatgttttgtacttgtatataccttgtccacataaaacttgtgtgatatacttttatgaaattgatacatatgataggttgtttaatgttttagagaaatgctcttgataaccatagttggtcatatattatagttcatctacttaaacatattgtaccttttttacatctctcatttgagtacaactgtagtatttgttcataacatattgtagcttaaccagaacactaaagttcaaattccttacctttcaatgctcaaggtttttatgtcttgtacagtaaatgcggccatttttgtttggtttgagaaaaaaagatttttttgttttgtttgaggcaaattctcaactgtgctgcagtgtagtactgtagtggcaacattttacttctgtcacgttgcagcaggtggccccaaagatctgagcagcaattgtgatttagtgaattaatggtaaccctgcaataataatatctgttttatgacaacaactattgctaaagaattagatattgatgaatatcgtattgatatactatcaaattttagaaatatatttcgtttttcagaattattgttgaatgcaaacaaaacaatgagatatctatatatgtaacacaatttttcgtcatacttatttggttcagttgtgctctacgtttcaaagcagggctgtgatgattggttgttaaatgatgtaggttaagaccatataaacagttgtaattaaattctttgctatatagaaatcatagcaacgcacgggcacttaagaaacggagagggggaggccgttgtggctttgtgaagcgcttcgtcccgagcgggcgtgggcgggtatggcaccacacgtatcagccggctctgttgtggtattttaaaaaatattttaatttaatcaataacattcttaatttcttacgtacccattttaacctatatatctatactatattaaagcatcagtttcaacggtcgttctgcgtcatatttttacagataatccctcacatctatttcaaattaatacgctgcacgtctgtctgctctgcgcaaccaacctccacgttacaaaacacaactccatatatagatggctaaacagcggttcggcacggtcctgacgcccacgggccacaactctggcctaggcatggcgtgccggcctgctgactgtatcaggtcatttggttaaatcagtgtaaaatgttaaaaaagtagtgaggaggtggggttcgaacccacacattgatggaagaagggcggaagacactgagtgaagctatctaagcattagaacatcatgctcagatgtttttattattaaatataaattgtgtgtatatatatatatatatatatatatatatatatatatatatatatatacgttttttgtaaaataaaaaatatactcgtgtcgggtccggccagcactaccggacaaggctacaacccaagcacgacacgatgttcttggttcttgcaaccattatgtcgtttttgagaccacattggtgcaatggactccatggtgtttgaggttgctgaattggacggagcaacaatgatttgtcacactaacagtaaaaggaaaggttatttattggttttaaacgttagtaattgctacgatgtaccataatttatatggagcgcgttcagtttttattgatgcctgactttagttgtcactccatatttttatctatcttttttataagtttgagttcat

SEQ ID NO: 55062 - DNA, 5156 bp, Zea Mays
caagattgccctcatcgctgactctgaaccacgttgccacagccacatctactagctctccccaatccgaaccgaagccacacacccacaccatatctgcaccagccatcctcgtgatctctctgtctcccatcgccagccgccaccgcgccctcctcccaccggatttagaggcgattcatgggagtggtgcgcaggctgctactgcggtatcaatggaggctgactgccatggaggatctgagcatcgaggcgaaggaggccgcgaggacatgttgatggtctccatgatggaaggaccacgccgcacggagaagcccaccggtgtcatcttccgcaaggtttgcttttactcttggatcaagactcacctggctagccgagtagtcgtccatcgcgttttgaaggcagacaggaagttatggttagctgcaggttaaagcgaatgaaatgaaccatcatctgtaacaaggtgctatatcaatgacaagcagcaacaaagcgtaacacactaaagccgtggaattatgtttaatggagtggtcaaaatttatgccgccatgtcagtccactagatcagaagcatctgtgtcctgcggcagcatgatgggctcacctataaacaaatggataagccttccctgacccagaacagaagaggttcaatggttcggcatataacattagaagtcgattgttttttcctttattttttggagggcagattcatatttgggcgtttggcacaggctttggctcaagtctacgacatcttaaaccattttgtttgcagtcatgcacggagaagacagaggaattgcacccaacaagcccttgatatccaaggaccacgagcgtacctaatttgattctacagactgggtcgatctctctatgattaacaaacacaataaaaaaactatatgtactaatcgatttataatgtttgtatgtactaatcgatttataaggcttgtatatactaatcgattttataatgtagctgctaggaaaaattcagaactgaaataaaggacacaacaatttttgccacttcagcaacttcatagcatgttttccaacaaggatacaactccaagaagaacgatgtaataatcgcttgtatccgctatgattattgggattttcttgctatttggtcttgttatctgacttgcatggtgctgttgcaggttggtctgttatgaccggtcgccactacaggcgccgggcaacagcataggcatgcagataaggattataagatgataatgattagaagattaaggagataagatttgttagagagaaaagagggaatttatctcattagataaggacaagaagggagtataaataattgtaagcaccactctatagggattaagcagaaacaagattgttctggcttcctagagggagccgggagattactgtgacctagccgcccctttcctcgcgtctctcatctcgcgcgcggtgaacacggcgccccgccgttgtgcatcgcgcctcaaaccccggccaccaatcacccaccactacaacctgagatcgatcagggaatccgccccgattcctatcatggtcattgtggatgagatggactatttaataacaagagattgtgttgtgctacatgatcttttaatgcttacaatttgttctatctctagatgcatattcataggtgaagtttattttctgtactgtttaatttctaaaaactagatgaactatcttgttcggttaattttctgtactattaaatttctgaaaactggagtttttgcatgtactaatttctatgtgatggtttctatgtgtgctatctgcatgtctctttaattatctctatatatctggttagacgacaaccttctatctatgaattatatgtcatgtctctttaattatctctatatcaatgtctacctatgtgatataagataccgtagcaacgcgcgtgcacctaattagtgaatttggaagtgtgactttataaaaacaaatgagttatatgttcaagataatgttaatagtcatactatttaaagtccttttactttcttatttggatgagtcttttttcacatatcttccttcttaatgtaccattcatggttctattgatagctcaaggtcgtgtgaatgttgccgctgagtactacaaacaacaggtagagatgttagagggttttagtgagatgggcgcatttacagatcatgctttcctacctgtaatgtccaaggtatgttatatatggactttctgtttgaacattagggaaggtaacttatgtggatgttaataatcaaattttcttcactatattttttcttctttttaatagtgacgacatcaatagatatctggccactttattgacctgcaggaagaacacgaaaaagttatcaggagtgaaccattagccatatggttgtctaatattgcaaatatggttctctttgctgcaaaagtgtatgctttagtaaggagtggttcacttgctattatcgcatcaactttggattctcttctagactttttgtcacgatatatcttgtggtttactgccttttcaatgcaaacgccaaatccctatagaaacccaattggaaaaagcgtatgcagccgctggtgagttcttttttgccataacctgtacttccaaaaatgatggttgatgttgacatctagatctattgtccagaatgttttgtactcttttctgcgaaaatgatttacttatcttttacgtaatctgaattattgtctctgcattttgaatagaatgagcattgctttccatgtttctttctgaggcaaacaataaagatctgaattgacaggaaatcaataaacttactcaacactgtgtgctcactactcagtaattcttacttactggaatataaattacctgtctataaatactaattgttgagttcatgattgaagtcatagaaccatggaccctttttatccagtcacctctgtttgaattttctttaagttaatgatgaacttgttatgacttccaatttgacatttgcttttgagatgcgttgtcacttgttggggcaacttccatgtgtcaaacttttgtttgtcatgcctttttttcatattcttttttctttcaactttactgggattttctaatagatcgcctcttagttatattgttgatttgtgatccttccaaaaccatactatcacctaaaaatgatcagttcatccagcaatgttttgtttgtctatttcttgtcatggtgcacttattagaattgttgcccacttttactttttacatctgataatatgtttaagaaactatttttacttgattcttgacttgtagatacctttttatttctgtattgtatcccacaaactttcctgctagatattcagttgatgttttgtacttgtatataccttgtccacataaaacttgtgtgatatacttttatgaaattgatacatatgataggttgtttaatgttttagagaaatgctcttgataaccatagttggtcatatattatagttcatctacttaaacatattgtaccttttttacatctctcatttgagtacaactgtagtatttgttcataacatattgtagcttaaccagaacactaaagttcaaattccttacctttcaatgctcaaggtttttatgtcttgtacagtaaatgcggccatttttgtttggtttgagaaaaaaagatttttttgttttgtttgaggcaaattctcaactgtgctgcagtgtagtactgtagtggcaacattttacttctgtcacgttgcagcaggtggccccaaagatctgagcagcaattgtgatttagtgaattaatggtaaccctgcaataataatatctgttttatgacaacaactattgctaaagaattagatattgatgaatatcgtattgatatactatcaaattttagaaatatatttcgtttttcagaattattgttgaatgcaaacaaaacaatgagatatctatatatgtaacacaatttttcgtcatacttatttggttcagttgtgctctacgtttcaaagcagggctgtgatgattggttgttaaatgatgtaggttaagaccatataaacagttgtaattaaattctttgctatatagaaatcatagcaacgcacgggcacttaagaaacggagagggggaggccgttgtggctttgtgaagcgcttcgtcccgagcgggcgtgggcgggtatggcaccacacgtatcagccggctctgttgtggtattttaaaaaatattttaatttaatcaataacattcttaatttcttacgtacccattttaacctatatatctatactatattaaagcatcagtttcaacggtcgttctgcgtcatatttttacagataatccctcacatctatttcaaattaatacgctgcacgtctgtctgctctgcgcaaccaacctccacgttacaaaacacaactccatatatagatggctaaacagcggttcggcacggtcctgacgcccacgggccacaactctggcctaggcatggcgtgccggcctgctgactgtatcaggtcatttggttaaatcagtgtaaaatgttaaaaaagtagtgaggaggtggggttcgaacccacacattgatggaagaagggcggaagacactgagtgaagctatctaagcattagaacatcatgctcagatgtttttattattaaatataaattgtgtgtatatatatatatatatatatatatatatatatatatatatatatatacgttttttgtaaaataaaaaatatactcgtgtcgggtccggccagcactaccggacaaggctacaacccaagcacgacacgatgttcttggttcttgcaaccattatgtcgtttttgagaccacattggtgcaatggactccatggtgtttgaggttgctgaattggacggagcaacaatgatttgtcacactaacagtaaaaggaaaggttatttattggttttaaacgttagtaattgctacgatgtaccataatttatatggagcgcgttcagtttttattgatgcctgactttagttgtcactccatatttttatctatcttttttataagtttgagttcat

SEQ ID NO: 55063 - DNA, 3837 bp, Zea Mays
ctccacgccgcaccgcagacaagattgccctcatcgctgactctgaaccacgttgccacagccacatctactagctctccccaatccgaaccgaagccacacacccacaccatatctgcaccagccatcctcgtgatctctctgtctcccatcgccagccgccaccgcgccctcctcccaccggatttagaggcgattcatgggagtggtgcgcaggctgctactgcggtatcaatggaggctgactgccatggaggatctgagcatcgaggcgaaggaggccgcggtacgcataccccatcctccgtgtggcggcctccctccgagcacccacccgccccaccccctttcttctccctccatcgcgtcgtcatcatactacagaaagtacaaggaggacatgttgatggtctccatgatggaaggaccacgccgcacggagaagcccaccggtgtcatcttccgcaaggtccgctcggtcgtccatgtccgttcgtcctcttcctgggcggttggcgcgtgatctggcgagacctcccaatgggtcaaaatctattttgtgcttggcgatgtattccttaaggaccgccatgctcttctcctttggcgcggtcagctgcttcgacaaaggataccatactcattgttgatagcaaatgattgggttccctaaaccaggttaaagcgaatgaaatgaaccatcatctgtaacaaggtgctatatcaatgacaagcagcaacaaagcgtaacacactaaaggcaagtttttttaacaacctttggtctaatatttgccattataatagcatatagttgtacttgtagaatataaatagcagatacaaaacataacaaagcatacctttagtatatcttgaaactatttagtgtataaataaaagtaccaattattcaaaacatatatcaaagtttcattccaacatctggcttgaatatgtagacaaaatgatttaaatagactaaccaatgatcaatgttagtggttctacttcagcaattgtaaagggatgcttattttttggtcacgatgcggtgtcgtgctttcagccgtggaattatgtttaatggagtggtcaaaatttatgccgccatgtcagtccactagatcagaagcatctgtgtcctgcggcagcatgatgggctcacctataaacaaatggataagccttccctgacccagaacagaagaggttcaatggctttggctcaagtctacgacatcttaaaccattttgtttgcagtcatgcacggagaagacagaggaattgcacccaacaagcccttgatatccaaggaccacgagcgtacctaatttgattctacagactgggtcgatctctctatgattaacaaacacaataaaaaaactatatctgctaggaaaaattcagaactgaaataaaggacacaacaatttttgccacttcagcaacttcatagcatgttttccaacaaggatacaactccaagaagaacgatgttggtctgttatgaccggtcgccactacaggcgccgggcaacagcataggcatgcagataaggattataagatgataatgattagaagattaaggagataagatttgttagagagaaaagagggaatttatctcattagataaggacaagaagggagtataaataattgtaagcaccactctatagggattaagcagaaacaagattgttctggcttcctagagggagccgggagattactgtgacctagccgcccctttcctcgcgtctctcatctcgcgcgcggtgaacacggcgccccgccgttgtgcatcgcgcctcaaaccccggccaccaatcacccaccactacaacctgagatcgatcagggaatccgccccgattcctatcatggtcattgtggatgagatggactatttaataacaagagattgtgttgtgctacatgatcttttaatgcttacaatttgttctatctctagatgcatattcataggtgaagtttattttctgtactgtttaatttctaaaaactagatgaactatcttgttcggttaattttctgtactattaaatttctgaaaactggagtttttgcatgtactaatttctatgtgatggtttctatgtgtgctatctgcatgtctctttaattatctctatatatctggttagacgacaaccttctatctatgaattatatgtcatgtctctttaattatctctatatcaatgtctacctatgtgatataagataccgtagcaacgcgcgtgcacctaattagtgaatttggaagtgtgactttataaaaacaaatgagttatatgttcaagataatgttaatagtcatactatttaaagtccttttactttcttatttggatgagtcttttttcacatatcttccttcttaatgtaccattcatggttctattgatagctcaaggtcgtgtgaatgttgccgctgagtactacaaacaacaggtagagatgttagagggttttagtgagatgggcgcatttacagatcatgctttcctacctgtaatgtccaagtgacgacatcaatagatatctggccactttattgacctgcaggaagaacacgaaaaagttatcaggagtgaaccattagccatatggttgtctaatattgcaaatatggttctctttgctgcaaaagtgtatgctttagtaaggagtggttcacttgctattatcgcatcaactttggattctcttctagactttttgtcacgatatatcttgtggtttactgccttttcaatgcaaacgccaaatccctatagaaacccaattggaaaaagcgtatgcagccgctgaaatcatagcaacgcacgggcacttaagaaacggagagggggaggccgttgtggctttgtgaagcgcttcgtcccgagcgggcgtgggcgggtatggcaccacacgtatcagccggctctgttgtggtattttaaaaaatattttaatttaatcaataacattcttaatttcttacgtacccattttaacctatatatctatactatattaaagcatcagtttcaacggtcgttctgcgtcatatttttacagataatccctcacatctatttcaaattaatacgctgcacgtctgtctgctctgcgcaaccaacctccacgttacaaaacacaactccatatatagatggctaaacagcggttcggcacggtcctgacgcccacgggccacaactctggcctaggcatggcgtgccggcctgctgactgtatcaggtcatttggttaaatcagtgtaaaatgttaaaaaagtagtgaggaggtggggttcgaacccacacattgatggaagaagggcggaagacactgagtgaagctatctaagcattagaacatcatgctcagatgtttttattattaaatataaattgtgtgtatatatatatatatatatatatatatatatatatatatatatatatacgttttttgtaaaataaaaaatatactcgtgtcgggtccggccagcactaccggacaaggctacaacccaagcacgacacgatgttcttggttcttgcaaccattatgtcgtttttgagaccacattggtgcaatggactccatggtgtttgaggttgctgaattggacggagcaacaatgatttgtcacactaacagtaaaaggaaaggttatttattggttttaaacgttagtaattgctacgatgtaccataatttatatggagcgcgttcagtttttattgatgcctgactttagttgtcactccatatttttatctatcttttttataagtttgagttcat

SEQ ID NO: 55064 - DNA, 5321 bp, Zea Mays
ctccacgccgcaccgcagacaagattgccctcatcgctgactctgaaccacgttgccacagccacatctactagctctccccaatccgaaccgaagccacacacccacaccatatctgcaccagccatcctcgtgatctctctgtctcccatcgccagccgccaccgcgccctcctcccaccggatttagaggcgattcatgggagtggtgcgcaggctgctactgcggtatcaatggaggctgactgccatggaggatctgagcatcgaggcgaaggaggccgcggtacgcataccccatcctccgtgtggcggcctccctccgagcacccacccgccccaccccctttcttctccctccatcgcgtcgtcatcatactacagaaagtacaaggaggacatgttgatggtctccatgatggaaggaccacgccgcacggagaagcccaccggtgtcatcttccgcaaggtccgctcggtcgtccatgtccgttcgtcctcttcctgggcggttggcgcgtgatctggcgagacctcccaatgggtcaaaatctattttgtgcttggcgatgtattccttaaggaccgccatgctcttctcctttggcgcggtcagctgcttcgacaaaggataccatactcattgttgatagcaaatgattgggttccctaaaccaggttaaagcgaatgaaatgaaccatcatctgtaacaaggtgctatatcaatgacaagcagcaacaaagcgtaacacactaaaggcaagtttttttaacaacctttggtctaatatttgccattataatagcatatagttgtacttgtagaatataaatagcagatacaaaacataacaaagcatacctttagtatatcttgaaactatttagtgtataaataaaagtaccaattattcaaaacatatatcaaagtttcattccaacatctggcttgaatatgtagacaaaatgatttaaatagactaaccaatgatcaatgttagtggttctacttcagcaattgtaaagggatgcttattttttggtcacgatgcggtgtcgtgctttcagccgtggaattatgtttaatggagtggtcaaaatttatgccgccatgtcagtccactagatcagaagcatctgtgtcctgcggcagcatgatgggctcacctataaacaaatggataagccttccctgacccagaacagaagaggttcaatggctttggctcaagtctacgacatcttaaaccattttgtttgcagtcatgcacggagaagacagaggaattgcacccaacaagcccttgatatccaaggaccacgagcgtacctaatttgattctacagactgggtcgatctctctatgattaacaaacacaataaaaaaactatatctgctaggaaaaattcagaactgaaataaaggacacaacaatttttgccacttcagcaacttcatagcatgttttccaacaaggatacaactccaagaagaacgatgttggtctgttatgaccggtcgccactacaggcgccgggcaacagcataggcatgcagataaggattataagatgataatgattagaagattaaggagataagatttgttagagagaaaagagggaatttatctcattagataaggacaagaagggagtataaataattgtaagcaccactctatagggattaagcagaaacaagattgttctggcttcctagagggagccgggagattactgtgacctagccgcccctttcctcgcgtctctcatctcgcgcgcggtgaacacggcgccccgccgttgtgcatcgcgcctcaaaccccggccaccaatcacccaccactacaacctgagatcgatcagggaatccgccccgattcctatcatggtcattgtggatgagatggactatttaataacaagagattgtgttgtgctacatgatcttttaatgcttacaatttgttctatctctagatgcatattcataggtgaagtttattttctgtactgtttaatttctaaaaactagatgaactatcttgttcggttaattttctgtactattaaatttctgaaaactggagtttttgcatgtactaatttctatgtgatggtttctatgtgtgctatctgcatgtctctttaattatctctatatatctggttagacgacaaccttctatctatgaattatatgtcatgtctctttaattatctctatatcaatgtctacctatgtgatataagataccgtagcaacgcgcgtgcacctaattagtgaatttggaagtgtgactttataaaaacaaatgagttatatgttcaagataatgttaatagtcatactatttaaagtccttttactttcttatttggatgagtcttttttcacatatcttccttcttaatgtaccattcatggttctattgatagctcaaggtcgtgtgaatgttgccgctgagtactacaaacaacaggtagagatgttagagggttttagtgagatgggcgcatttacagatcatgctttcctacctgtaatgtccaaggaagaacacgaaaaagttatcaggagtgaaccattagccatatggttgtctaatattgcaaatatggttctctttgctgcaaaagtgtatgctttagtaaggagtggttcacttgctattatcgcatcaactttggattctcttctagactttttgtcacgatatatcttgtggtttactgccttttcaatgcaaacgccaaatccctatagaaacccaattggaaaaagcgtatgcagccgctggtgagttcttttttgccataacctgtacttccaaaaatgatggttgatgttgacatctagatctattgtccagaatgttttgtactcttttctgcgaaaatgatttacttatcttttacgtaatctgaattattgtctctgcattttgaatagaatgagcattgctttccatgtttctttctgaggcaaacaataaagatctgaattgacaggaaatcaataaacttactcaacactgtgtgctcactactcagtaattcttacttactggaatataaattacctgtctataaatactaattgttgagttcatgattgaagtcatagaaccatggaccctttttatccagtcacctctgtttgaattttctttaagttaatgatgaacttgttatgacttccaatttgacatttgcttttgagatgcgttgtcacttgttggggcaacttccatgtgtcaaacttttgtttgtcatgcctttttttcatattcttttttctttcaactttactgggattttctaatagatcgcctcttagttatattgttgatttgtgatccttccaaaaccatactatcacctaaaaatgatcagttcatccagcaatgttttgtttgtctatttcttgtcatggtgcacttattagaattgttgcccacttttactttttacatctgataatatgtttaagaaactatttttacttgattcttgacttgtagatacctttttatttctgtattgtatcccacaaactttcctgctagatattcagttgatgttttgtacttgtatataccttgtccacataaaacttgtgtgatatacttttatgaaattgatacatatgataggttgtttaatgttttagagaaatgctcttgataaccatagttggtcatatattatagttcatctacttaaacatattgtaccttttttacatctctcatttgagtacaactgtagtatttgttcataacatattgtagcttaaccagaacactaaagttcaaattccttacctttcaatgctcaaggtttttatgtcttgtacagtaaatgcggccatttttgtttggtttgagaaaaaaagatttttttgttttgtttgaggcaaattctcaactgtgctgcagtgtagtactgtagtggcaacattttacttctgtcacgttgcagcaggtggccccaaagatctgagcagcaattgtgatttagtgaattaatggtaaccctgcaataataatatctgttttatgacaacaactattgctaaagaattagatattgatgaatatcgtattgatatactatcaaattttagaaatatatttcgtttttcagaattattgttgaatgcaaacaaaacaatgagatatctatatatgtaacacaatttttcgtcatacttatttggttcagttgtgctctacgtttcaaagcagggctgtgatgattggttgttaaatgatgtaggttaagaccatataaacagttgtaattaaattctttgctatatagaaatcatagcaacgcacgggcacttaagaaacggagagggggaggccgttgtggctttgtgaagcgcttcgtcccgagcgggcgtgggcgggtatggcaccacacgtatcagccggctctgttgtggtattttaaaaaatattttaatttaatcaataacattcttaatttcttacgtacccattttaacctatatatctatactatattaaagcatcagtttcaacggtcgttctgcgtcatatttttacagataatccctcacatctatttcaaattaatacgctgcacgtctgtctgctctgcgcaaccaacctccacgttacaaaacacaactccatatatagatggctaaacagcggttcggcacggtcctgacgcccacgggccacaactctggcctaggcatggcgtgccggcctgctgactgtatcaggtcatttggttaaatcagtgtaaaatgttaaaaaagtagtgaggaggtggggttcgaacccacacattgatggaagaagggcggaagacactgagtgaagctatctaagcattagaacatcatgctcagatgtttttattattaaatataaattgtgtgtatatatatatatatatatatatatatatatatatatatatatatatacgttttttgtaaaataaaaaatatactcgtgtcgggtccggccagcactaccggacaaggctacaacccaagcacgacacgatgttcttggttcttgcaaccattatgtcgtttttgagaccacattggtgcaatggactccatggtgtttgaggttgctgaattggacggagcaacaatgatttgtcacactaacagtaaaaggaaaggttatttattggttttaaacgttagtaattgctacgatgtaccataatttatatggagcgcgttcagtttttattgatgcctgactttagttgtcactccatatttttatctatcttttttataagtttgagttcat

SEQ ID NO: 55065 - DNA, 5350 bp, Zea Mays
ctccacgccgcaccgcagacaagattgccctcatcgctgactctgaaccacgttgccacagccacatctactagctctccccaatccgaaccgaagccacacacccacaccatatctgcaccagccatcctcgtgatctctctgtctcccatcgccagccgccaccgcgccctcctcccaccggatttagaggcgattcatgggagtggtgcgcaggctgctactgcggtatcaatggaggctgactgccatggaggatctgagcatcgaggcgaaggaggccgcggtacgcataccccatcctccgtgtggcggcctccctccgagcacccacccgccccaccccctttcttctccctccatcgcgtcgtcatcatactacagaaagtacaaggaggacatgttgatggtctccatgatggaaggaccacgccgcacggagaagcccaccggtgtcatcttccgcaaggtttgcttttactcttggatcaagactcacctggctagccgagtagtcgtccatcgcgttttgaaggcagacaggaagttatggttagctgcaggttaaagcgaatgaaatgaaccatcatctgtaacaaggtgctatatcaatgacaagcagcaacaaagcgtaacacactaaaggcaagtttttttaacaacctttggtctaatatttgccattataatagcatatagttgtacttgtagaatataaatagcagatacaaaacataacaaagcatacctttagtatatcttgaaactatttagtgtataaataaaagtaccaattattcaaaacatatatcaaagtttcattccaacatctggcttgaatatgtagacaaaatgatttaaatagactaaccaatgatcaatgttagtggttctacttcagcaattgtaaagggatgcttattttttggtcacgatgcggtgtcgtgctttcagccgtggaattatgtttaatggagtggtcaaaatttatgccgccatgtcagtccactagatcagaagcatctgtgtcctgcggcagcatgatgggctcacctataaacaaatggataagccttccctgacccagaacagaagaggttcaatggctttggctcaagtctacgacatcttaaaccattttgtttgcagtcatgcacggagaagacagaggaattgcacccaacaagcccttgatatccaaggaccacgagcgtacctaatttgattctacagactgggtcgatctctctatgattaacaaacacaataaaaaaactatatctgctaggaaaaattcagaactgaaataaaggacacaacaatttttgccacttcagcaacttcatagcatgttttccaacaaggatacaactccaagaagaacgatgttggtctgttatgaccggtcgccactacaggcgccgggcaacagcataggcatgcagataaggattataagatgataatgattagaagattaaggagataagatttgttagagagaaaagagggaatttatctcattagataaggacaagaagggagtataaataattgtaagcaccactctatagggattaagcagaaacaagattgttctggcttcctagagggagccgggagattactgtgacctagccgcccctttcctcgcgtctctcatctcgcgcgcggtgaacacggcgccccgccgttgtgcatcgcgcctcaaaccccggccaccaatcacccaccactacaacctgagatcgatcagggaatccgccccgattcctatcatggtcattgtggatgagatggactatttaataacaagagattgtgttgtgctacatgatcttttaatgcttacaatttgttctatctctagatgcatattcataggtgaagtttattttctgtactgtttaatttctaaaaactagatgaactatcttgttcggttaattttctgtactattaaatttctgaaaactggagtttttgcatgtactaatttctatgtgatggtttctatgtgtgctatctgcatgtctctttaattatctctatatatctggttagacgacaaccttctatctatgaattatatgtcatgtctctttaattatctctatatcaatgtctacctatgtgatataagataccgtagcaacgcgcgtgcacctaattagtgaatttggaagtgtgactttataaaaacaaatgagttatatgttcaagataatgttaatagtcatactatttaaagtccttttactttcttatttggatgagtcttttttcacatatcttccttcttaatgtaccattcatggttctattgatagctcaaggtcgtgtgaatgttgccgctgagtactacaaacaacaggtagagatgttagagggttttagtgagatgggcgcatttacagatcatgctttcctacctgtaatgtccaaggtatgttatatatggactttctgtttgaacattagggaaggtaacttatgtggatgttaataatcaaattttcttcactatattttttcttctttttaatagtgacgacatcaatagatatctggccactttattgacctgcaggaagaacacgaaaaagttatcaggagtgaaccattagccatatggttgtctaatattgcaaatatggttctctttgctgcaaaagtgtatgctttagtaaggagtggttcacttgctattatcgcatcaactttggattctcttctagactttttgtcacgatatatcttgtggtttactgccttttcaatgcaaacgccaaatccctatagaaacccaattggaaaaagcgtatgcagccgctggtgagttcttttttgccataacctgtacttccaaaaatgatggttgatgttgacatctagatctattgtccagaatgttttgtactcttttctgcgaaaatgatttacttatcttttacgtaatctgaattattgtctctgcattttgaatagaatgagcattgctttccatgtttctttctgaggcaaacaataaagatctgaattgacaggaaatcaataaacttactcaacactgtgtgctcactactcagtaattcttacttactggaatataaattacctgtctataaatactaattgttgagttcatgattgaagtcatagaaccatggaccctttttatccagtcacctctgtttgaattttctttaagttaatgatgaacttgttatgacttccaatttgacatttgcttttgagatgcgttgtcacttgttggggcaacttccatgtgtcaaacttttgtttgtcatgcctttttttcatattcttttttctttcaactttactgggattttctaatagatcgcctcttagttatattgttgatttgtgatccttccaaaaccatactatcacctaaaaatgatcagttcatccagcaatgttttgtttgtctatttcttgtcatggtgcacttattagaattgttgcccacttttactttttacatctgataatatgtttaagaaactatttttacttgattcttgacttgtagatacctttttatttctgtattgtatcccacaaactttcctgctagatattcagttgatgttttgtacttgtatataccttgtccacataaaacttgtgtgatatacttttatgaaattgatacatatgataggttgtttaatgttttagagaaatgctcttgataaccatagttggtcatatattatagttcatctacttaaacatattgtaccttttttacatctctcatttgagtacaactgtagtatttgttcataacatattgtagcttaaccagaacactaaagttcaaattccttacctttcaatgctcaaggtttttatgtcttgtacagtaaatgcggccatttttgtttggtttgagaaaaaaagatttttttgttttgtttgaggcaaattctcaactgtgctgcagtgtagtactgtagtggcaacattttacttctgtcacgttgcagcaggtggccccaaagatctgagcagcaattgtgatttagtgaattaatggtaaccctgcaataataatatctgttttatgacaacaactattgctaaagaattagatattgatgaatatcgtattgatatactatcaaattttagaaatatatttcgtttttcagaattattgttgaatgcaaacaaaacaatgagatatctatatatgtaacacaatttttcgtcatacttatttggttcagttgtgctctacgtttcaaagcagggctgtgatgattggttgttaaatgatgtaggttaagaccatataaacagttgtaattaaattctttgctatatagaaatcatagcaacgcacgggcacttaagaaacggagagggggaggccgttgtggctttgtgaagcgcttcgtcccgagcgggcgtgggcgggtatggcaccacacgtatcagccggctctgttgtggtattttaaaaaatattttaatttaatcaataacattcttaatttcttacgtacccattttaacctatatatctatactatattaaagcatcagtttcaacggtcgttctgcgtcatatttttacagataatccctcacatctatttcaaattaatacgctgcacgtctgtctgctctgcgcaaccaacctccacgttacaaaacacaactccatatatagatggctaaacagcggttcggcacggtcctgacgcccacgggccacaactctggcctaggcatggcgtgccggcctgctgactgtatcaggtcatttggttaaatcagtgtaaaatgttaaaaaagtagtgaggaggtggggttcgaacccacacattgatggaagaagggcggaagacactgagtgaagctatctaagcattagaacatcatgctcagatgtttttattattaaatataaattgtgtgtatatatatatatatatatatatatatatatatatatatatatatatacgttttttgtaaaataaaaaatatactcgtgtcgggtccggccagcactaccggacaaggctacaacccaagcacgacacgatgttcttggttcttgcaaccattatgtcgtttttgagaccacattggtgcaatggactccatggtgtttgaggttgctgaattggacggagcaacaatgatttgtcacactaacagtaaaaggaaaggttatttattggttttaaacgttagtaattgctacgatgtaccataatttatatggagcgcgttcagtttttattgatgcctgactttagttgtcactccatatttttatctatcttttttataagtttgagttcat

SEQ ID NO: 55066 - DNA, 4379 bp, Zea Mays
cctgtcttcgcctccacgccgcaccgcagacaagattgccctcatcgctgactctgaaccacgttgccacagccacatctactagctctccccaatccgaaccgaagccacacacccacaccatatctgcaccagccatcctcgtgatctctctgtctcccatcgccagccgccaccgcgccctcctcccaccggatttagaggcgattcatgggagtggtgcgcaggctgctactgcggtatcaatggaggctgactgccatggaggatctgagcatcgaggcgaaggaggccgcggtacgcataccccatcctccgtgtggcggcctccctccgagcacccacccgccccaccccctttcttctccctccatcgcgtcgtcatcatactacagaaagtacaaggaggacatgttgatggtctccatgatggaaggaccacgccgcacggagaagcccaccggtgtcatcttccgcaaggtccgctcggtcgtccatgtccgttcgtcctcttcctgggcggttggcgcgtgatctggcgagacctcccaatgggtcaaaatctattttgtgcttggcgatgtattccttaaggaccgccatgctcttctcctttggcgcggtcagctgcttcgacaaaggataccatactcattgttgatagcaaatgattgggttccctaaaccaggtttgcttttactcttggatcaagactcacctggctagccgagtagtcgtccatcgcgttttgaaggcagacaggaagttatggttagctgcaggttaaagcgaatgaaatgaaccatcatctgtaacaaggtgctatatcaatgacaagcagcaacaaagcgtaacacactaaaggcaagtttttttaacaacctttggtctaatatttgccattataatagcatatagttgtacttgtagaatataaatagcagatacaaaacataacaaagcatacctttagtatatcttgaaactatttagtgtataaataaaagtaccaattattcaaaacatatatcaaagtttcattccaacatctggcttgaatatgtagacaaaatgatttaaatagactaaccaatgatcaatgttagtggttctacttcagcaattgtaaagggatgcttattttttggtcacgatgcggtgtcgtgctttcagccgtggaattatgtttaatggagtggtcaaaatttatgccgccatgtcagtccactagatcagaagcatctgtgtcctgcggcagcatgatgggctcacctataaacaaatggataagccttccctgacccagaacagaagaggttcaatggttcggcatataacattagaagtcgattgttttttcctttattttttggagggcagattcatatttgggcgtttggcacaggctttggctcaagtctacgacatcttaaaccattttgtttgcagtcatgcacggagaagacagaggaattgcacccaacaagcccttgatatccaagctcaaggtcgtgtgaatgttgccgctgagtactacaaacaacaggtagagatgttagagggttttagtgagatgggcgcatttacagatcatgctttcctacctgtaatgtccaaggaagaacacgaaaaagttatcaggagtgaaccattagccatatggttgtctaatattgcaaatatggttctctttgctgcaaaagtgtatgctttagtaaggagtggttcacttgctattatcgcatcaactttggattctcttctagactttttgtcacgatatatcttgtggtttactgccttttcaatgcaaacgccaaatccctatagaaacccaattggaaaaagcgtatgcagccgctggtgagttcttttttgccataacctgtacttccaaaaatgatggttgatgttgacatctagatctattgtccagaatgttttgtactcttttctgcgaaaatgatttacttatcttttacgtaatctgaattattgtctctgcattttgaatagaatgagcattgctttccatgtttctttctgaggcaaacaataaagatctgaattgacaggaaatcaataaacttactcaacactgtgtgctcactactcagtaattcttacttactggaatataaattacctgtctataaatactaattgttgagttcatgattgaagtcatagaaccatggaccctttttatccagtcacctctgtttgaattttctttaagttaatgatgaacttgttatgacttccaatttgacatttgcttttgagatgcgttgtcacttgttggggcaacttccatgtgtcaaacttttgtttgtcatgcctttttttcatattcttttttctttcaactttactgggattttctaatagatcgcctcttagttatattgttgatttgtgatccttccaaaaccatactatcacctaaaaatgatcagttcatccagcaatgttttgtttgtctatttcttgtcatggtgcacttattagaattgttgcccacttttactttttacatctgataatatgtttaagaaactatttttacttgattcttgacttgtagatacctttttatttctgtattgtatcccacaaactttcctgctagatattcagttgatgttttgtacttgtatataccttgtccacataaaacttgtgtgatatacttttatgaaattgatacatatgataggttgtttaatgttttagagaaatgctcttgataaccatagttggtcatatattatagttcatctacttaaacatattgtaccttttttacatctctcatttgagtacaactgtagtatttgttcataacatattgtagcttaaccagaacactaaagttcaaattccttacctttcaatgctcaaggtttttatgtcttgtacagtaaatgcggccatttttgtttggtttgagaaaaaaagatttttttgttttgtttgaggcaaattctcaactgtgctgcagtgtagtactgtagtggcaacattttacttctgtcacgttgcagcaggtggccccaaagatctgagcagcaattgtgatttagtgaattaatggtaaccctgcaataataatatctgttttatgacaacaactattgctaaagaattagatattgatgaatatcgtattgatatactatcaaattttagaaatatatttcgtttttcagaattattgttgaatgcaaacaaaacaatgagatatctatatatgtaacacaatttttcgtcatacttatttggttcagttgtgctctacgtttcaaagcagggctgtgatgattggttgttaaatgatgtaggttaagaccatataaacagttgtaattaaattctttgctatatagaaatcatagcaacgcacgggcacttaagaaacggagagggggaggccgttgtggctttgtgaagcgcttcgtcccgagcgggcgtgggcgggtatggcaccacacgtatcagccggctctgttgtggtattttaaaaaatattttaatttaatcaataacattcttaatttcttacgtacccattttaacctatatatctatactatattaaagcatcagtttcaacggtcgttctgcgtcatatttttacagataatccctcacatctatttcaaattaatacgctgcacgtctgtctgctctgcgcaaccaacctccacgttacaaaacacaactccatatatagatggctaaacagcggttcggcacggtcctgacgcccacgggccacaactctggcctaggcatggcgtgccggcctgctgactgtatcaggtcatttggttaaatcagtgtaaaatgttaaaaaagtagtgaggaggtggggttcgaacccacacattgatggaagaagggcggaagacactgagtgaagctatctaagcattagaacatcatgctcagatgtttttattattaaatataaattgtgtgtatatatatatatatatatatatatatatatatatatatatatatatacgttttttgtaaaataaaaaatatactcgtgtcgggtccggccagcactaccggacaaggctacaacccaagcacgacacgatgttcttggttcttgcaaccattatgtcgtttttgagaccacattggtgcaatggactccatggtgtttgaggttgctgaattggacggagcaacaatgatttgtcacactaacagtaaaaggaaaggttatttattggttttaaacgttagtaattgctacgatgtaccataatttatatggagcgcgttcagtttttattgatgcctgactttagttgtcactccatatttttatctatcttttttataagtttgagttcat

SEQ ID NO: 55067 - DNA, 5105 bp, Zea Mays
cctgtcttcgcctccacgccgcaccgcagacaagattgccctcatcgctgactctgaaccacgttgccacagccacatctactagctctccccaatccgaaccgaagccacacacccacaccatatctgcaccagccatcctcgtgatctctctgtctcccatcgccagccgccaccgcgccctcctcccaccggatttagaggcgattcatgggagtggtgcgcaggctgctactgcggtatcaatggaggctgactgccatggaggatctgagcatcgaggcgaaggaggccgcgaggacatgttgatggtctccatgatggaaggaccacgccgcacggagaagcccaccggtgtcatcttccgcaaggtttgcttttactcttggatcaagactcacctggctagccgagtagtcgtccatcgcgttttgaaggcagacaggaagttatggttagctgcaggttaaagcgaatgaaatgaaccatcatctgtaacaaggtgctatatcaatgacaagcagcaacaaagcgtaacacactaaagccgtggaattatgtttaatggagtggtcaaaatttatgccgccatgtcagtccactagatcagaagcatctgtgtcctgcggcagcatgatgggctcacctataaacaaatggataagccttccctgacccagaacagaagaggttcaatggctttggctcaagtctacgacatcttaaaccattttgtttgcagtcatgcacggagaagacagaggaattgcacccaacaagcccttgatatccaaggaccacgagcgtacctaatttgattctacagactgggtcgatctctctatgattaacaaacacaataaaaaaactatatgtactaatcgatttataatgtttgtatgtactaatcgatttataaggcttgtatatactaatcgattttataatgtagctgctaggaaaaattcagaactgaaataaaggacacaacaatttttgccacttcagcaacttcatagcatgttttccaacaaggatacaactccaagaagaacgatgtaataatcgcttgtatccgctatgattattgggattttcttgctatttggtcttgttatctgacttgcatggtgctgttgcaggttggtctgttatgaccggtcgccactacaggcgccgggcaacagcataggcatgcagataaggattataagatgataatgattagaagattaaggagataagatttgttagagagaaaagagggaatttatctcattagataaggacaagaagggagtataaataattgtaagcaccactctatagggattaagcagaaacaagattgttctggcttcctagagggagccgggagattactgtgacctagccgcccctttcctcgcgtctctcatctcgcgcgcggtgaacacggcgccccgccgttgtgcatcgcgcctcaaaccccggccaccaatcacccaccactacaacctgagatcgatcagggaatccgccccgattcctatcatggtcattgtggatgagatggactatttaataacaagagattgtgttgtgctacatgatcttttaatgcttacaatttgttctatctctagatgcatattcataggtgaagtttattttctgtactgtttaatttctaaaaactagatgaactatcttgttcggttaattttctgtactattaaatttctgaaaactggagtttttgcatgtactaatttctatgtgatggtttctatgtgtgctatctgcatgtctctttaattatctctatatatctggttagacgacaaccttctatctatgaattatatgtcatgtctctttaattatctctatatcaatgtctacctatgtgatataagataccgtagcaacgcgcgtgcacctaattagtgaatttggaagtgtgactttataaaaacaaatgagttatatgttcaagataatgttaatagtcatactatttaaagtccttttactttcttatttggatgagtcttttttcacatatcttccttcttaatgtaccattcatggttctattgatagctcaaggtcgtgtgaatgttgccgctgagtactacaaacaacaggtagagatgttagagggttttagtgagatgggcgcatttacagatcatgctttcctacctgtaatgtccaaggtatgttatatatggactttctgtttgaacattagggaaggtaacttatgtggatgttaataatcaaattttcttcactatattttttcttctttttaatagtgacgacatcaatagatatctggccactttattgacctgcaggaagaacacgaaaaagttatcaggagtgaaccattagccatatggttgtctaatattgcaaatatggttctctttgctgcaaaagtgtatgctttagtaaggagtggttcacttgctattatcgcatcaactttggattctcttctagactttttgtcacgatatatcttgtggtttactgccttttcaatgcaaacgccaaatccctatagaaacccaattggaaaaagcgtatgcagccgctggtgagttcttttttgccataacctgtacttccaaaaatgatggttgatgttgacatctagatctattgtccagaatgttttgtactcttttctgcgaaaatgatttacttatcttttacgtaatctgaattattgtctctgcattttgaatagaatgagcattgctttccatgtttctttctgaggcaaacaataaagatctgaattgacaggaaatcaataaacttactcaacactgtgtgctcactactcagtaattcttacttactggaatataaattacctgtctataaatactaattgttgagttcatgattgaagtcatagaaccatggaccctttttatccagtcacctctgtttgaattttctttaagttaatgatgaacttgttatgacttccaatttgacatttgcttttgagatgcgttgtcacttgttggggcaacttccatgtgtcaaacttttgtttgtcatgcctttttttcatattcttttttctttcaactttactgggattttctaatagatcgcctcttagttatattgttgatttgtgatccttccaaaaccatactatcacctaaaaatgatcagttcatccagcaatgttttgtttgtctatttcttgtcatggtgcacttattagaattgttgcccacttttactttttacatctgataatatgtttaagaaactatttttacttgattcttgacttgtagatacctttttatttctgtattgtatcccacaaactttcctgctagatattcagttgatgttttgtacttgtatataccttgtccacataaaacttgtgtgatatacttttatgaaattgatacatatgataggttgtttaatgttttagagaaatgctcttgataaccatagttggtcatatattatagttcatctacttaaacatattgtaccttttttacatctctcatttgagtacaactgtagtatttgttcataacatattgtagcttaaccagaacactaaagttcaaattccttacctttcaatgctcaaggtttttatgtcttgtacagtaaatgcggccatttttgtttggtttgagaaaaaaagatttttttgttttgtttgaggcaaattctcaactgtgctgcagtgtagtactgtagtggcaacattttacttctgtcacgttgcagcaggtggccccaaagatctgagcagcaattgtgatttagtgaattaatggtaaccctgcaataataatatctgttttatgacaacaactattgctaaagaattagatattgatgaatatcgtattgatatactatcaaattttagaaatatatttcgtttttcagaattattgttgaatgcaaacaaaacaatgagatatctatatatgtaacacaatttttcgtcatacttatttggttcagttgtgctctacgtttcaaagcagggctgtgatgattggttgttaaatgatgtaggttaagaccatataaacagttgtaattaaattctttgctatatagaaatcatagcaacgcacgggcacttaagaaacggagagggggaggccgttgtggctttgtgaagcgcttcgtcccgagcgggcgtgggcgggtatggcaccacacgtatcagccggctctgttgtggtattttaaaaaatattttaatttaatcaataacattcttaatttcttacgtacccattttaacctatatatctatactatattaaagcatcagtttcaacggtcgttctgcgtcatatttttacagataatccctcacatctatttcaaattaatacgctgcacgtctgtctgctctgcgcaaccaacctccacgttacaaaacacaactccatatatagatggctaaacagcggttcggcacggtcctgacgcccacgggccacaactctggcctaggcatggcgtgccggcctgctgactgtatcaggtcatttggttaaatcagtgtaaaatgttaaaaaagtagtgaggaggtggggttcgaacccacacattgatggaagaagggcggaagacactgagtgaagctatctaagcattagaacatcatgctcagatgtttttattattaaatataaattgtgtgtatatatatatatatatatatatatatatatatatatatatatatatacgttttttgtaaaataaaaaatatactcgtgtcgggtccggccagcactaccggacaaggctacaacccaagcacgacacgatgttcttggttcttgcaaccattatgtcgtttttgagaccacattggtgcaatggactccatggtgtttgaggttgctgaattggacggagcaacaatgatttgtcacactaacagtaaaaggaaaggttatttattggttttaaacgttagtaattgctacgatgtaccataatttatatggagcgcgttcagtttttattgatgcctgactttagttgtcactccatatttttatctatcttttttataagtttgagttcat

SEQ ID NO: 55068 - DNA, 5138 bp, Zea Mays
ctcctgtcttcgcctccacgccgcaccgcagacaagattgccctcatcgctgactctgaaccacgttgccacagccacatctactagctctccccaatccgaaccgaagccacacacccacaccatatctgcaccagccatcctcgtgatctctctgtctcccatcgccagccgccaccgcgccctcctcccaccggatttagaggcgattcatgggagtggtgcgcaggctgctactgcggtatcaatggaggctgactgccatggaggatctgagcatcgaggcgaaggaggccgcgaggacatgttgatggtctccatgatggaaggaccacgccgcacggagaagcccaccggtgtcatcttccgcaaggtccgctcggtcgtccatgtccgttcgtcctcttcctgggcggttggcgcgtgatctggcgagacctcccaatgggtcaaaatctattttgtgcttggcgatgtattccttaaggaccgccatgctcttctcctttggcgcggtcagctgcttcgacaaaggataccatactcattgttgatagcaaatgattgggttccctaaaccaggttaaagcgaatgaaatgaaccatcatctgtaacaaggtgctatatcaatgacaagcagcaacaaagcgtaacacactaaagccgtggaattatgtttaatggagtggtcaaaatttatgccgccatgtcagtccactagatcagaagcatctgtgtcctgcggcagcatgatgggctcacctataaacaaatggataagccttccctgacccagaacagaagaggttcaatggctttggctcaagtctacgacatcttaaaccattttgtttgcagtcatgcacggagaagacagaggaattgcacccaacaagcccttgatatccaaggaccacgagcgtacctaatttgattctacagactgggtcgatctctctatgattaacaaacacaataaaaaaactatatgtactaatcgatttataatgtttgtatgtactaatcgatttataaggcttgtatatactaatcgattttataatgtagctgctaggaaaaattcagaactgaaataaaggacacaacaatttttgccacttcagcaacttcatagcatgttttccaacaaggatacaactccaagaagaacgatgttggtctgttatgaccggtcgccactacaggcgccgggcaacagcataggcatgcagataaggattataagatgataatgattagaagattaaggagataagatttgttagagagaaaagagggaatttatctcattagataaggacaagaagggagtataaataattgtaagcaccactctatagggattaagcagaaacaagattgttctggcttcctagagggagccgggagattactgtgacctagccgcccctttcctcgcgtctctcatctcgcgcgcggtgaacacggcgccccgccgttgtgcatcgcgcctcaaaccccggccaccaatcacccaccactacaacctgagatcgatcagggaatccgccccgattcctatcatggtcattgtggatgagatggactatttaataacaagagattgtgttgtgctacatgatcttttaatgcttacaatttgttctatctctagatgcatattcataggtgaagtttattttctgtactgtttaatttctaaaaactagatgaactatcttgttcggttaattttctgtactattaaatttctgaaaactggagtttttgcatgtactaatttctatgtgatggtttctatgtgtgctatctgcatgtctctttaattatctctatatatctggttagacgacaaccttctatctatgaattatatgtcatgtctctttaattatctctatatcaatgtctacctatgtgatataagataccgtagcaacgcgcgtgcacctaattagtgaatttggaagtgtgactttataaaaacaaatgagttatatgttcaagataatgttaatagtcatactatttaaagtccttttactttcttatttggatgagtcttttttcacatatcttccttcttaatgtaccattcatggttctattgatagctcaaggtcgtgtgaatgttgccgctgagtactacaaacaacaggtagagatgttagagggttttagtgagatgggcgcatttacagatcatgctttcctacctgtaatgtccaaggtatgttatatatggactttctgtttgaacattagggaaggtaacttatgtggatgttaataatcaaattttcttcactatattttttcttctttttaatagtgacgacatcaatagatatctggccactttattgacctgcaggaagaacacgaaaaagttatcaggagtgaaccattagccatatggttgtctaatattgcaaatatggttctctttgctgcaaaagtgtatgctttagtaaggagtggttcacttgctattatcgcatcaactttggattctcttctagactttttgtcacgatatatcttgtggtttactgccttttcaatgcaaacgccaaatccctatagaaacccaattggaaaaagcgtatgcagccgctggtgagttcttttttgccataacctgtacttccaaaaatgatggttgatgttgacatctagatctattgtccagaatgttttgtactcttttctgcgaaaatgatttacttatcttttacgtaatctgaattattgtctctgcattttgaatagaatgagcattgctttccatgtttctttctgaggcaaacaataaagatctgaattgacaggaaatcaataaacttactcaacactgtgtgctcactactcagtaattcttacttactggaatataaattacctgtctataaatactaattgttgagttcatgattgaagtcatagaaccatggaccctttttatccagtcacctctgtttgaattttctttaagttaatgatgaacttgttatgacttccaatttgacatttgcttttgagatgcgttgtcacttgttggggcaacttccatgtgtcaaacttttgtttgtcatgcctttttttcatattcttttttctttcaactttactgggattttctaatagatcgcctcttagttatattgttgatttgtgatccttccaaaaccatactatcacctaaaaatgatcagttcatccagcaatgttttgtttgtctatttcttgtcatggtgcacttattagaattgttgcccacttttactttttacatctgataatatgtttaagaaactatttttacttgattcttgacttgtagatacctttttatttctgtattgtatcccacaaactttcctgctagatattcagttgatgttttgtacttgtatataccttgtccacataaaacttgtgtgatatacttttatgaaattgatacatatgataggttgtttaatgttttagagaaatgctcttgataaccatagttggtcatatattatagttcatctacttaaacatattgtaccttttttacatctctcatttgagtacaactgtagtatttgttcataacatattgtagcttaaccagaacactaaagttcaaattccttacctttcaatgctcaaggtttttatgtcttgtacagtaaatgcggccatttttgtttggtttgagaaaaaaagatttttttgttttgtttgaggcaaattctcaactgtgctgcagtgtagtactgtagtggcaacattttacttctgtcacgttgcagcaggtggccccaaagatctgagcagcaattgtgatttagtgaattaatggtaaccctgcaataataatatctgttttatgacaacaactattgctaaagaattagatattgatgaatatcgtattgatatactatcaaattttagaaatatatttcgtttttcagaattattgttgaatgcaaacaaaacaatgagatatctatatatgtaacacaatttttcgtcatacttatttggttcagttgtgctctacgtttcaaagcagggctgtgatgattggttgttaaatgatgtaggttaagaccatataaacagttgtaattaaattctttgctatatagaaatcatagcaacgcacgggcacttaagaaacggagagggggaggccgttgtggctttgtgaagcgcttcgtcccgagcgggcgtgggcgggtatggcaccacacgtatcagccggctctgttgtggtattttaaaaaatattttaatttaatcaataacattcttaatttcttacgtacccattttaacctatatatctatactatattaaagcatcagtttcaacggtcgttctgcgtcatatttttacagataatccctcacatctatttcaaattaatacgctgcacgtctgtctgctctgcgcaaccaacctccacgttacaaaacacaactccatatatagatggctaaacagcggttcggcacggtcctgacgcccacgggccacaactctggcctaggcatggcgtgccggcctgctgactgtatcaggtcatttggttaaatcagtgtaaaatgttaaaaaagtagtgaggaggtggggttcgaacccacacattgatggaagaagggcggaagacactgagtgaagctatctaagcattagaacatcatgctcagatgtttttattattaaatataaattgtgtgtatatatatatatatatatatatatatatatatatatatatatatatacgttttttgtaaaataaaaaatatactcgtgtcgggtccggccagcactaccggacaaggctacaacccaagcacgacacgatgttcttggttcttgcaaccattatgtcgtttttgagaccacattggtgcaatggactccatggtgtttgaggttgctgaattggacggagcaacaatgatttgtcacactaacagtaaaaggaaaggttatttattggttttaaacgttagtaattgctacgatgtaccataatttatatggagcgcgttcagtttttattgatgcctgactttagttgtcactccatatttttatctatcttttttataagtttgagttcat

SEQ ID NO: 55069 - DNA, 5150 bp, Zea Mays
ctcatctcctgtcttcgcctccacgccgcaccgcagacaagattgccctcatcgctgactctgaaccacgttgccacagccacatctactagctctccccaatccgaaccgaagccacacacccacaccatatctgcaccagccatcctcgtgatctctctgtctcccatcgccagccgccaccgcgccctcctcccaccggatttagaggcgattcatgggagtggtgcgcaggctgctactgcggtatcaatggaggctgactgccatggaggatctgagcatcgaggcgaaggaggccgcggtacgcataccccatcctccgtgtggcggcctccctccgagcacccacccgccccaccccctttcttctccctccatcgcgtcgtcatcatactacagaaagtacaaggaggacatgttgatggtctccatgatggaaggaccacgccgcacggagaagcccaccggtgtcatcttccgcaaggtccgctcggtcgtccatgtccgttcgtcctcttcctgggcggttggcgcgtgatctggcgagacctcccaatgggtcaaaatctattttgtgcttggcgatgtattccttaaggaccgccatgctcttctcctttggcgcggtcagctgcttcgacaaaggataccatactcattgttgatagcaaatgattgggttccctaaaccaggttaaagcgaatgaaatgaaccatcatctgtaacaaggtgctatatcaatgacaagcagcaacaaagcgtaacacactaaagccgtggaattatgtttaatggagtggtcaaaatttatgccgccatgtcagtccactagatcagaagcatctgtgtcctgcggcagcatgatgggctcacctataaacaaatggataagccttccctgacccagaacagaagaggttcaatggctttggctcaagtctacgacatcttaaaccattttgtttgcagtcatgcacggagaagacagaggaattgcacccaacaagcccttgatatccaaggaccacgagcgtacctaatttgattctacagactgggtcgatctctctatgattaacaaacacaataaaaaaactatatgtactaatcgatttataatgtttgtatgtactaatcgatttataaggcttgtatatactaatcgattttataatgtagctgctaggaaaaattcagaactgaaataaaggacacaacaatttttgccacttcagcaacttcatagcatgttttccaacaaggatacaactccaagaagaacgatgttggtctgttatgaccggtcgccactacaggcgccgggcaacagcataggcatgcagataaggattataagatgataatgattagaagattaaggagataagatttgttagagagaaaagagggaatttatctcattagataaggacaagaagggagtataaataattgtaagcaccactctatagggattaagcagaaacaagattgttctggcttcctagagggagccgggagattactgtgacctagccgcccctttcctcgcgtctctcatctcgcgcgcggtgaacacggcgccccgccgttgtgcatcgcgcctcaaaccccggccaccaatcacccaccactacaacctgagatcgatcagggaatccgccccgattcctatcatggtcattgtggatgagatggactatttaataacaagagattgtgttgtgctacatgatcttttaatgcttacaatttgttctatctctagatgcatattcataggtgaagtttattttctgtactgtttaatttctaaaaactagatgaactatcttgttcggttaattttctgtactattaaatttctgaaaactggagtttttgcatgtactaatttctatgtgatggtttctatgtgtgctatctgcatgtctctttaattatctctatatatctggttagacgacaaccttctatctatgaattatatgtcatgtctctttaattatctctatatcaatgtctacctatgtgatataagataccgtagcaacgcgcgtgcacctaattagtgaatttggaagtgtgactttataaaaacaaatgagttatatgttcaagataatgttaatagtcatactatttaaagtccttttactttcttatttggatgagtcttttttcacatatcttccttcttaatgtaccattcatggttctattgatagctcaaggtcgtgtgaatgttgccgctgagtactacaaacaacaggtagagatgttagagggttttagtgagatgggcgcatttacagatcatgctttcctacctgtaatgtccaagtgacgacatcaatagatatctggccactttattgacctgcaggaagaacacgaaaaagttatcaggagtgaaccattagccatatggttgtctaatattgcaaatatggttctctttgctgcaaaagtgtatgctttagtaaggagtggttcacttgctattatcgcatcaactttggattctcttctagactttttgtcacgatatatcttgtggtttactgccttttcaatgcaaacgccaaatccctatagaaacccaattggaaaaagcgtatgcagccgctggtgagttcttttttgccataacctgtacttccaaaaatgatggttgatgttgacatctagatctattgtccagaatgttttgtactcttttctgcgaaaatgatttacttatcttttacgtaatctgaattattgtctctgcattttgaatagaatgagcattgctttccatgtttctttctgaggcaaacaataaagatctgaattgacaggaaatcaataaacttactcaacactgtgtgctcactactcagtaattcttacttactggaatataaattacctgtctataaatactaattgttgagttcatgattgaagtcatagaaccatggaccctttttatccagtcacctctgtttgaattttctttaagttaatgatgaacttgttatgacttccaatttgacatttgcttttgagatgcgttgtcacttgttggggcaacttccatgtgtcaaacttttgtttgtcatgcctttttttcatattcttttttctttcaactttactgggattttctaatagatcgcctcttagttatattgttgatttgtgatccttccaaaaccatactatcacctaaaaatgatcagttcatccagcaatgttttgtttgtctatttcttgtcatggtgcacttattagaattgttgcccacttttactttttacatctgataatatgtttaagaaactatttttacttgattcttgacttgtagatacctttttatttctgtattgtatcccacaaactttcctgctagatattcagttgatgttttgtacttgtatataccttgtccacataaaacttgtgtgatatacttttatgaaattgatacatatgataggttgtttaatgttttagagaaatgctcttgataaccatagttggtcatatattatagttcatctacttaaacatattgtaccttttttacatctctcatttgagtacaactgtagtatttgttcataacatattgtagcttaaccagaacactaaagttcaaattccttacctttcaatgctcaaggtttttatgtcttgtacagtaaatgcggccatttttgtttggtttgagaaaaaaagatttttttgttttgtttgaggcaaattctcaactgtgctgcagtgtagtactgtagtggcaacattttacttctgtcacgttgcagcaggtggccccaaagatctgagcagcaattgtgatttagtgaattaatggtaaccctgcaataataatatctgttttatgacaacaactattgctaaagaattagatattgatgaatatcgtattgatatactatcaaattttagaaatatatttcgtttttcagaattattgttgaatgcaaacaaaacaatgagatatctatatatgtaacacaatttttcgtcatacttatttggttcagttgtgctctacgtttcaaagcagggctgtgatgattggttgttaaatgatgtaggttaagaccatataaacagttgtaattaaattctttgctatatagaaatcatagcaacgcacgggcacttaagaaacggagagggggaggccgttgtggctttgtgaagcgcttcgtcccgagcgggcgtgggcgggtatggcaccacacgtatcagccggctctgttgtggtattttaaaaaatattttaatttaatcaataacattcttaatttcttacgtacccattttaacctatatatctatactatattaaagcatcagtttcaacggtcgttctgcgtcatatttttacagataatccctcacatctatttcaaattaatacgctgcacgtctgtctgctctgcgcaaccaacctccacgttacaaaacacaactccatatatagatggctaaacagcggttcggcacggtcctgacgcccacgggccacaactctggcctaggcatggcgtgccggcctgctgactgtatcaggtcatttggttaaatcagtgtaaaatgttaaaaaagtagtgaggaggtggggttcgaacccacacattgatggaagaagggcggaagacactgagtgaagctatctaagcattagaacatcatgctcagatgtttttattattaaatataaattgtgtgtatatatatatatatatatatatatatatatatatatatatatatatacgttttttgtaaaataaaaaatatactcgtgtcgggtccggccagcactaccggacaaggctacaacccaagcacgacacgatgttcttggttcttgcaaccattatgtcgtttttgagaccacattggtgcaatggactccatggtgtttgaggttgctgaattggacggagcaacaatgatttgtcacactaacagtaaaaggaaaggttatttattggttttaaacgttagtaattgctacgatgtaccataatttatatggagcgcgttcagtttttattgatgcctgactttagttgtcactccatatttttatctatcttttttataagtttgagttcat

SEQ ID NO: 55070 - DNA, 4966 bp, Zea Mays
ctctcatctcctgtcttcgcctccacgccgcaccgcagacaagattgccctcatcgctgactctgaaccacgttgccacagccacatctactagctctccccaatccgaaccgaagccacacacccacaccatatctgcaccagccatcctcgtgatctctctgtctcccatcgccagccgccaccgcgccctcctcccaccggatttagaggcgattcatgggagtggtgcgcaggctgctactgcggtatcaatggaggctgactgccatggaggatctgagcatcgaggcgaaggaggccgcgaggacatgttgatggtctccatgatggaaggaccacgccgcacggagaagcccaccggtgtcatcttccgcaaggtccgctcggtcgtccatgtccgttcgtcctcttcctgggcggttggcgcgtgatctggcgagacctcccaatgggtcaaaatctattttgtgcttggcgatgtattccttaaggaccgccatgctcttctcctttggcgcggtcagctgcttcgacaaaggataccatactcattgttgatagcaaatgattgggttccctaaaccaggtttgcttttactcttggatcaagactcacctggctagccgagtagtcgtccatcgcgttttgaaggcagacaggaagttatggttagctgcaggttaaagcgaatgaaatgaaccatcatctgtaacaaggtgctatatcaatgacaagcagcaacaaagcgtaacacactaaagtcatgcacggagaagacagaggaattgcacccaacaagcccttgatatccaaggaccacgagcgtacctaatttgattctacagactgggtcgatctctctatgattaacaaacacaataaaaaaactatatctgctaggaaaaattcagaactgaaataaaggacacaacaatttttgccacttcagcaacttcatagcatgttttccaacaaggatacaactccaagaagaacgatgttggtctgttatgaccggtcgccactacaggcgccgggcaacagcataggcatgcagataaggattataagatgataatgattagaagattaaggagataagatttgttagagagaaaagagggaatttatctcattagataaggacaagaagggagtataaataattgtaagcaccactctatagggattaagcagaaacaagattgttctggcttcctagagggagccgggagattactgtgacctagccgcccctttcctcgcgtctctcatctcgcgcgcggtgaacacggcgccccgccgttgtgcatcgcgcctcaaaccccggccaccaatcacccaccactacaacctgagatcgatcagggaatccgccccgattcctatcatggtcattgtggatgagatggactatttaataacaagagattgtgttgtgctacatgatcttttaatgcttacaatttgttctatctctagatgcatattcataggtgaagtttattttctgtactgtttaatttctaaaaactagatgaactatcttgttcggttaattttctgtactattaaatttctgaaaactggagtttttgcatgtactaatttctatgtgatggtttctatgtgtgctatctgcatgtctctttaattatctctatatatctggttagacgacaaccttctatctatgaattatatgtcatgtctctttaattatctctatatcaatgtctacctatgtgatataagataccgtagcaacgcgcgtgcacctaattagtgaatttggaagtgtgactttataaaaacaaatgagttatatgttcaagataatgttaatagtcatactatttaaagtccttttactttcttatttggatgagtcttttttcacatatcttccttcttaatgtaccattcatggttctattgatagctcaaggtcgtgtgaatgttgccgctgagtactacaaacaacaggtagagatgttagagggttttagtgagatgggcgcatttacagatcatgctttcctacctgtaatgtccaaggtatgttatatatggactttctgtttgaacattagggaaggtaacttatgtggatgttaataatcaaattttcttcactatattttttcttctttttaatagtgacgacatcaatagatatctggccactttattgacctgcaggaagaacacgaaaaagttatcaggagtgaaccattagccatatggttgtctaatattgcaaatatggttctctttgctgcaaaagtgtatgctttagtaaggagtggttcacttgctattatcgcatcaactttggattctcttctagactttttgtcacgatatatcttgtggtttactgccttttcaatgcaaacgccaaatccctatagaaacccaattggaaaaagcgtatgcagccgctggtgagttcttttttgccataacctgtacttccaaaaatgatggttgatgttgacatctagatctattgtccagaatgttttgtactcttttctgcgaaaatgatttacttatcttttacgtaatctgaattattgtctctgcattttgaatagaatgagcattgctttccatgtttctttctgaggcaaacaataaagatctgaattgacaggaaatcaataaacttactcaacactgtgtgctcactactcagtaattcttacttactggaatataaattacctgtctataaatactaattgttgagttcatgattgaagtcatagaaccatggaccctttttatccagtcacctctgtttgaattttctttaagttaatgatgaacttgttatgacttccaatttgacatttgcttttgagatgcgttgtcacttgttggggcaacttccatgtgtcaaacttttgtttgtcatgcctttttttcatattcttttttctttcaactttactgggattttctaatagatcgcctcttagttatattgttgatttgtgatccttccaaaaccatactatcacctaaaaatgatcagttcatccagcaatgttttgtttgtctatttcttgtcatggtgcacttattagaattgttgcccacttttactttttacatctgataatatgtttaagaaactatttttacttgattcttgacttgtagatacctttttatttctgtattgtatcccacaaactttcctgctagatattcagttgatgttttgtacttgtatataccttgtccacataaaacttgtgtgatatacttttatgaaattgatacatatgataggttgtttaatgttttagagaaatgctcttgataaccatagttggtcatatattatagttcatctacttaaacatattgtaccttttttacatctctcatttgagtacaactgtagtatttgttcataacatattgtagcttaaccagaacactaaagttcaaattccttacctttcaatgctcaaggtttttatgtcttgtacagtaaatgcggccatttttgtttggtttgagaaaaaaagatttttttgttttgtttgaggcaaattctcaactgtgctgcagtgtagtactgtagtggcaacattttacttctgtcacgttgcagcaggtggccccaaagatctgagcagcaattgtgatttagtgaattaatggtaaccctgcaataataatatctgttttatgacaacaactattgctaaagaattagatattgatgaatatcgtattgatatactatcaaattttagaaatatatttcgtttttcagaattattgttgaatgcaaacaaaacaatgagatatctatatatgtaacacaatttttcgtcatacttatttggttcagttgtgctctacgtttcaaagcagggctgtgatgattggttgttaaatgatgtaggttaagaccatataaacagttgtaattaaattctttgctatatagaaatcatagcaacgcacgggcacttaagaaacggagagggggaggccgttgtggctttgtgaagcgcttcgtcccgagcgggcgtgggcgggtatggcaccacacgtatcagccggctctgttgtggtattttaaaaaatattttaatttaatcaataacattcttaatttcttacgtacccattttaacctatatatctatactatattaaagcatcagtttcaacggtcgttctgcgtcatatttttacagataatccctcacatctatttcaaattaatacgctgcacgtctgtctgctctgcgcaaccaacctccacgttacaaaacacaactccatatatagatggctaaacagcggttcggcacggtcctgacgcccacgggccacaactctggcctaggcatggcgtgccggcctgctgactgtatcaggtcatttggttaaatcagtgtaaaatgttaaaaaagtagtgaggaggtggggttcgaacccacacattgatggaagaagggcggaagacactgagtgaagctatctaagcattagaacatcatgctcagatgtttttattattaaatataaattgtgtgtatatatatatatatatatatatatatatatatatatatatatatatacgttttttgtaaaataaaaaatatactcgtgtcgggtccggccagcactaccggacaaggctacaacccaagcacgacacgatgttcttggttcttgcaaccattatgtcgtttttgagaccacattggtgcaatggactccatggtgtttgaggttgctgaattggacggagcaacaatgatttgtcacactaacagtaaaaggaaaggttatttattggttttaaacgttagtaattgctacgatgtaccataatttatatggagcgcgttcagtttttattgatgcctgactttagttgtcactccatatttttatctatcttttttataagtttgagttcat

SEQ ID NO: 55071 - DNA, 5340 bp, Zea Mays
ctctcatctcctgtcttcgcctccacgccgcaccgcagacaagattgccctcatcgctgactctgaaccacgttgccacagccacatctactagctctccccaatccgaaccgaagccacacacccacaccatatctgcaccagccatcctcgtgatctctctgtctcccatcgccagccgccaccgcgccctcctcccaccggatttagaggcgattcatgggagtggtgcgcaggctgctactgcggtatcaatggaggctgactgccatggaggatctgagcatcgaggcgaaggaggccgcggtacgcataccccatcctccgtgtggcggcctccctccgagcacccacccgccccaccccctttcttctccctccatcgcgtcgtcatcatactacagaaagtacaaggaggacatgttgatggtctccatgatggaaggaccacgccgcacggagaagcccaccggtgtcatcttccgcaaggtccgctcggtcgtccatgtccgttcgtcctcttcctgggcggttggcgcgtgatctggcgagacctcccaatgggtcaaaatctattttgtgcttggcgatgtattccttaaggaccgccatgctcttctcctttggcgcggtcagctgcttcgacaaaggataccatactcattgttgatagcaaatgattgggttccctaaaccaggttaaagcgaatgaaatgaaccatcatctgtaacaaggtgctatatcaatgacaagcagcaacaaagcgtaacacactaaaggcaagtttttttaacaacctttggtctaatatttgccattataatagcatatagttgtacttgtagaatataaatagcagatacaaaacataacaaagcatacctttagtatatcttgaaactatttagtgtataaataaaagtaccaattattcaaaacatatatcaaagtttcattccaacatctggcttgaatatgtagacaaaatgatttaaatagactaaccaatgatcaatgttagtggttctacttcagcaattgtaaagggatgcttattttttggtcacgatgcggtgtcgtgctttcagccgtggaattatgtttaatggagtggtcaaaatttatgccgccatgtcagtccactagatcagaagcatctgtgtcctgcggcagcatgatgggctcacctataaacaaatggataagccttccctgacccagaacagaagaggttcaatggctttggctcaagtctacgacatcttaaaccattttgtttgcagtcatgcacggagaagacagaggaattgcacccaacaagcccttgatatccaaggaccacgagcgtacctaatttgattctacagactggctgctaggaaaaattcagaactgaaataaaggacacaacaatttttgccacttcagcaacttcatagcatgttttccaacaaggatacaactccaagaagaacgatgttggtctgttatgaccggtcgccactacaggcgccgggcaacagcataggcatgcagataaggattataagatgataatgattagaagattaaggagataagatttgttagagagaaaagagggaatttatctcattagataaggacaagaagggagtataaataattgtaagcaccactctatagggattaagcagaaacaagattgttctggcttcctagagggagccgggagattactgtgacctagccgcccctttcctcgcgtctctcatctcgcgcgcggtgaacacggcgccccgccgttgtgcatcgcgcctcaaaccccggccaccaatcacccaccactacaacctgagatcgatcagggaatccgccccgattcctatcatggtcattgtggatgagatggactatttaataacaagagattgtgttgtgctacatgatcttttaatgcttacaatttgttctatctctagatgcatattcataggtgaagtttattttctgtactgtttaatttctaaaaactagatgaactatcttgttcggttaattttctgtactattaaatttctgaaaactggagtttttgcatgtactaatttctatgtgatggtttctatgtgtgctatctgcatgtctctttaattatctctatatatctggttagacgacaaccttctatctatgaattatatgtcatgtctctttaattatctctatatcaatgtctacctatgtgatataagataccgtagcaacgcgcgtgcacctaattagtgaatttggaagtgtgactttataaaaacaaatgagttatatgttcaagataatgttaatagtcatactatttaaagtccttttactttcttatttggatgagtcttttttcacatatcttccttcttaatgtaccattcatggttctattgatagctcaaggtcgtgtgaatgttgccgctgagtactacaaacaacaggtagagatgttagagggttttagtgagatgggcgcatttacagatcatgctttcctacctgtaatgtccaagtgacgacatcaatagatatctggccactttattgacctgcaggaagaacacgaaaaagttatcaggagtgaaccattagccatatggttgtctaatattgcaaatatggttctctttgctgcaaaagtgtatgctttagtaaggagtggttcacttgctattatcgcatcaactttggattctcttctagactttttgtcacgatatatcttgtggtttactgccttttcaatgcaaacgccaaatccctatagaaacccaattggaaaaagcgtatgcagccgctggtgagttcttttttgccataacctgtacttccaaaaatgatggttgatgttgacatctagatctattgtccagaatgttttgtactcttttctgcgaaaatgatttacttatcttttacgtaatctgaattattgtctctgcattttgaatagaatgagcattgctttccatgtttctttctgaggcaaacaataaagatctgaattgacaggaaatcaataaacttactcaacactgtgtgctcactactcagtaattcttacttactggaatataaattacctgtctataaatactaattgttgagttcatgattgaagtcatagaaccatggaccctttttatccagtcacctctgtttgaattttctttaagttaatgatgaacttgttatgacttccaatttgacatttgcttttgagatgcgttgtcacttgttggggcaacttccatgtgtcaaacttttgtttgtcatgcctttttttcatattcttttttctttcaactttactgggattttctaatagatcgcctcttagttatattgttgatttgtgatccttccaaaaccatactatcacctaaaaatgatcagttcatccagcaatgttttgtttgtctatttcttgtcatggtgcacttattagaattgttgcccacttttactttttacatctgataatatgtttaagaaactatttttacttgattcttgacttgtagatacctttttatttctgtattgtatcccacaaactttcctgctagatattcagttgatgttttgtacttgtatataccttgtccacataaaacttgtgtgatatacttttatgaaattgatacatatgataggttgtttaatgttttagagaaatgctcttgataaccatagttggtcatatattatagttcatctacttaaacatattgtaccttttttacatctctcatttgagtacaactgtagtatttgttcataacatattgtagcttaaccagaacactaaagttcaaattccttacctttcaatgctcaaggtttttatgtcttgtacagtaaatgcggccatttttgtttggtttgagaaaaaaagatttttttgttttgtttgaggcaaattctcaactgtgctgcagtgtagtactgtagtggcaacattttacttctgtcacgttgcagcaggtggccccaaagatctgagcagcaattgtgatttagtgaattaatggtaaccctgcaataataatatctgttttatgacaacaactattgctaaagaattagatattgatgaatatcgtattgatatactatcaaattttagaaatatatttcgtttttcagaattattgttgaatgcaaacaaaacaatgagatatctatatatgtaacacaatttttcgtcatacttatttggttcagttgtgctctacgtttcaaagcagggctgtgatgattggttgttaaatgatgtaggttaagaccatataaacagttgtaattaaattctttgctatatagaaatcatagcaacgcacgggcacttaagaaacggagagggggaggccgttgtggctttgtgaagcgcttcgtcccgagcgggcgtgggcgggtatggcaccacacgtatcagccggctctgttgtggtattttaaaaaatattttaatttaatcaataacattcttaatttcttacgtacccattttaacctatatatctatactatattaaagcatcagtttcaacggtcgttctgcgtcatatttttacagataatccctcacatctatttcaaattaatacgctgcacgtctgtctgctctgcgcaaccaacctccacgttacaaaacacaactccatatatagatggctaaacagcggttcggcacggtcctgacgcccacgggccacaactctggcctaggcatggcgtgccggcctgctgactgtatcaggtcatttggttaaatcagtgtaaaatgttaaaaaagtagtgaggaggtggggttcgaacccacacattgatggaagaagggcggaagacactgagtgaagctatctaagcattagaacatcatgctcagatgtttttattattaaatataaattgtgtgtatatatatatatatatatatatatatatatatatatatatatatatacgttttttgtaaaataaaaaatatactcgtgtcgggtccggccagcactaccggacaaggctacaacccaagcacgacacgatgttcttggttcttgcaaccattatgtcgtttttgagaccacattggtgcaatggactccatggtgtttgaggttgctgaattggacggagcaacaatgatttgtcacactaacagtaaaaggaaaggttatttattggttttaaacgttagtaattgctacgatgtaccataatttatatggagcgcgttcagtttttattgatgcctgactttagttgtcactccatatttttatctatcttttttataagtttgagttcat

SEQ ID NO: 55072 - DNA, 4216 bp, Zea Mays
ctttctctcatctcctgtcttcgcctccacgccgcaccgcagacaagattgccctcatcgctgactctgaaccacgttgccacagccacatctactagctctccccaatccgaaccgaagccacacacccacaccatatctgcaccagccatcctcgtgatctctctgtctcccatcgccagccgccaccgcgccctcctcccaccggatttagaggcgattcatgggagtggtgcgcaggctgctactgcggtatcaatggaggctgactgccatggaggatctgagcatcgaggcgaaggaggccgcggtacgcataccccatcctccgtgtggcggcctccctccgagcacccacccgccccaccccctttcttctccctccatcgcgtcgtcatcatactacagaaagtacaaggaggacatgttgatggtctccatgatggaaggaccacgccgcacggagaagcccaccggtgtcatcttccgcaaggtccgctcggtcgtccatgtccgttcgtcctcttcctgggcggttggcgcgtgatctggcgagacctcccaatgggtcaaaatctattttgtgcttggcgatgtattccttaaggaccgccatgctcttctcctttggcgcggtcagctgcttcgacaaaggataccatactcattgttgatagcaaatgattgggttccctaaaccaggttaaagcgaatgaaatgaaccatcatctgtaacaaggtgctatatcaatgacaagcagcaacaaagcgtaacacactaaagccgtggaattatgtttaatggagtggtcaaaatttatgccgccatgtcagtccactagatcagaagcatctgtgtcctgcggcagcatgatgggctcacctataaacaaatggataagccttccctgacccagaacagaagaggttcaatggttcggcatataacattagaagtcgattgttttttcctttattttttggagggcagattcatatttgggcgtttggcacaggctttggctcaagtctacgacatcttaaaccattttgtttgcagtcatgcacggagaagacagaggaattgcacccaacaagcccttgatatccaaggaccacgagcgtacctaatttgattctacagactgggtcgatctctctatgattaacaaacacaataaaaaaactatatctgctaggaaaaattcagaactgaaataaaggacacaacaatttttgccacttcagcaacttcatagcatgttttccaacaaggatacaactccaagaagaacgatctcaaggtcgtgtgaatgttgccgctgagtactacaaacaacaggtagagatgttagagggttttagtgagatgggcgcatttacagatcatgctttcctacctgtaatgtccaagtgacgacatcaatagatatctggccactttattgacctgcaggaagaacacgaaaaagttatcaggagtgaaccattagccatatggttgtctaatattgcaaatatggttctctttgctgcaaaagtgtatgctttagtaaggagtggttcacttgctattatcgcatcaactttggattctcttctagactttttgtcacgatatatcttgtggtttactgccttttcaatgcaaacgccaaatccctatagaaacccaattggaaaaagcgtatgcagccgctggtgagttcttttttgccataacctgtacttccaaaaatgatggttgatgttgacatctagatctattgtccagaatgttttgtactcttttctgcgaaaatgatttacttatcttttacgtaatctgaattattgtctctgcattttgaatagaatgagcattgctttccatgtttctttctgaggcaaacaataaagatctgaattgacaggaaatcaataaacttactcaacactgtgtgctcactactcagtaattcttacttactggaatataaattacctgtctataaatactaattgttgagttcatgattgaagtcatagaaccatggaccctttttatccagtcacctctgtttgaattttctttaagttaatgatgaacttgttatgacttccaatttgacatttgcttttgagatgcgttgtcacttgttggggcaacttccatgtgtcaaacttttgtttgtcatgcctttttttcatattcttttttctttcaactttactgggattttctaatagatcgcctcttagttatattgttgatttgtgatccttccaaaaccatactatcacctaaaaatgatcagttcatccagcaatgttttgtttgtctatttcttgtcatggtgcacttattagaattgttgcccacttttactttttacatctgataatatgtttaagaaactatttttacttgattcttgacttgtagatacctttttatttctgtattgtatcccacaaactttcctgctagatattcagttgatgttttgtacttgtatataccttgtccacataaaacttgtgtgatatacttttatgaaattgatacatatgataggttgtttaatgttttagagaaatgctcttgataaccatagttggtcatatattatagttcatctacttaaacatattgtaccttttttacatctctcatttgagtacaactgtagtatttgttcataacatattgtagcttaaccagaacactaaagttcaaattccttacctttcaatgctcaaggtttttatgtcttgtacagtaaatgcggccatttttgtttggtttgagaaaaaaagatttttttgttttgtttgaggcaaattctcaactgtgctgcagtgtagtactgtagtggcaacattttacttctgtcacgttgcagcaggtggccccaaagatctgagcagcaattgtgatttagtgaattaatggtaaccctgcaataataatatctgttttatgacaacaactattgctaaagaattagatattgatgaatatcgtattgatatactatcaaattttagaaatatatttcgtttttcagaattattgttgaatgcaaacaaaacaatgagatatctatatatgtaacacaatttttcgtcatacttatttggttcagttgtgctctacgtttcaaagcagggctgtgatgattggttgttaaatgatgtaggttaagaccatataaacagttgtaattaaattctttgctatatagaaatcatagcaacgcacgggcacttaagaaacggagagggggaggccgttgtggctttgtgaagcgcttcgtcccgagcgggcgtgggcgggtatggcaccacacgtatcagccggctctgttgtggtattttaaaaaatattttaatttaatcaataacattcttaatttcttacgtacccattttaacctatatatctatactatattaaagcatcagtttcaacggtcgttctgcgtcatatttttacagataatccctcacatctatttcaaattaatacgctgcacgtctgtctgctctgcgcaaccaacctccacgttacaaaacacaactccatatatagatggctaaacagcggttcggcacggtcctgacgcccacgggccacaactctggcctaggcatggcgtgccggcctgctgactgtatcaggtcatttggttaaatcagtgtaaaatgttaaaaaagtagtgaggaggtggggttcgaacccacacattgatggaagaagggcggaagacactgagtgaagctatctaagcattagaacatcatgctcagatgtttttattattaaatataaattgtgtgtatatatatatatatatatatatatatatatatatatatatatatatacgttttttgtaaaataaaaaatatactcgtgtcgggtccggccagcactaccggacaaggctacaacccaagcacgacacgatgttcttggttcttgcaaccattatgtcgtttttgagaccacattggtgcaatggactccatggtgtttgaggttgctgaattggacggagcaacaatgatttgtcacactaacagtaaaaggaaaggttatttattggttttaaacgttagtaattgctacgatgtaccataatttatatggagcgcgttcagtttttattgatgcctgactttagttgtcactccatatttttatctatcttttttataagtttgagttcat

SEQ ID NO: 55073 - DNA, 4883 bp, Zea Mays
ctttctctcatctcctgtcttcgcctccacgccgcaccgcagacaagattgccctcatcgctgactctgaaccacgttgccacagccacatctactagctctccccaatccgaaccgaagccacacacccacaccatatctgcaccagccatcctcgtgatctctctgtctcccatcgccagccgccaccgcgccctcctcccaccggatttagaggcgattcatgggagtggtgcgcaggctgctactgcggtatcaatggaggctgactgccatggaggatctgagcatcgaggcgaaggaggccgcggtacgcataccccatcctccgtgtggcggcctccctccgagcacccacccgccccaccccctttcttctccctccatcgcgtcgtcatcatactacagaaagtacaaggaggacatgttgatggtctccatgatggaaggaccacgccgcacggagaagcccaccggtgtcatcttccgcaaggtccgctcggtcgtccatgtccgttcgtcctcttcctgggcggttggcgcgtgatctggcgagacctcccaatgggtcaaaatctattttgtgcttggcgatgtattccttaaggaccgccatgctcttctcctttggcgcggtcagctgcttcgacaaaggataccatactcattgttgatagcaaatgattgggttccctaaaccaggttaaagcgaatgaaatgaaccatcatctgtaacaaggtgctatatcaatgacaagcagcaacaaagcgtaacacactaaagtcatgcacggagaagacagaggaattgcacccaacaagcccttgatatccaaggaccacgagcgtacctaatttgattctacagactgggtcgatctctctatgattaacaaacacaataaaaaaactatatctgctaggaaaaattcagaactgaaataaaggacacaacaatttttgccacttcagcaacttcatagcatgttttccaacaaggatacaactccaagaagaacgatgttggtctgttatgaccggtcgccactacaggcgccgggcaacagcataggcatgcagataaggattataagatgataatgattagaagattaaggagataagatttgttagagagaaaagagggaatttatctcattagataaggacaagaagggagtataaataattgtaagcaccactctatagggattaagcagaaacaagattgttctggcttcctagagggagccgggagattactgtgacctagccgcccctttcctcgcgtctctcatctcgcgcgcggtgaacacggcgccccgccgttgtgcatcgcgcctcaaaccccggccaccaatcacccaccactacaacctgagatcgatcagggaatccgccccgattcctatcatggtcattgtggatgagatggactatttaataacaagagattgtgttgtgctacatgatcttttaatgcttacaatttgttctatctctagatgcatattcataggtgaagtttattttctgtactgtttaatttctaaaaactagatgaactatcttgttcggttaattttctgtactattaaatttctgaaaactggagtttttgcatgtactaatttctatgtgatggtttctatgtgtgctatctgcatgtctctttaattatctctatatatctggttagacgacaaccttctatctatgaattatatgtcatgtctctttaattatctctatatcaatgtctacctatgtgatataagataccgtagcaacgcgcgtgcacctaattagtgaatttggaagtgtgactttataaaaacaaatgagttatatgttcaagataatgttaatagtcatactatttaaagtccttttactttcttatttggatgagtcttttttcacatatcttccttcttaatgtaccattcatggttctattgatagctcaaggtcgtgtgaatgttgccgctgagtactacaaacaacaggtagagatgttagagggttttagtgagatgggcgcatttacagatcatgctttcctacctgtaatgtccaagtgacgacatcaatagatatctggccactttattgacctgcaggaagaacacgaaaaagttatcaggagtgaaccattagccatatggttgtctaatattgcaaatatggttctctttgctgcaaaagtgtatgctttagtaaggagtggttcacttgctattatcgcatcaactttggattctcttctagactttttgtcacgatatatcttgtggtttactgccttttcaatgcaaacgccaaatccctatagaaacccaattggaaaaagcgtatgcagccgctggtgagttcttttttgccataacctgtacttccaaaaatgatggttgatgttgacatctagatctattgtccagaatgttttgtactcttttctgcgaaaatgatttacttatcttttacgtaatctgaattattgtctctgcattttgaatagaatgagcattgctttccatgtttctttctgaggcaaacaataaagatctgaattgacaggaaatcaataaacttactcaacactgtgtgctcactactcagtaattcttacttactggaatataaattacctgtctataaatactaattgttgagttcatgattgaagtcatagaaccatggaccctttttatccagtcacctctgtttgaattttctttaagttaatgatgaacttgttatgacttccaatttgacatttgcttttgagatgcgttgtcacttgttggggcaacttccatgtgtcaaacttttgtttgtcatgcctttttttcatattcttttttctttcaactttactgggattttctaatagatcgcctcttagttatattgttgatttgtgatccttccaaaaccatactatcacctaaaaatgatcagttcatccagcaatgttttgtttgtctatttcttgtcatggtgcacttattagaattgttgcccacttttactttttacatctgataatatgtttaagaaactatttttacttgattcttgacttgtagatacctttttatttctgtattgtatcccacaaactttcctgctagatattcagttgatgttttgtacttgtatataccttgtccacataaaacttgtgtgatatacttttatgaaattgatacatatgataggttgtttaatgttttagagaaatgctcttgataaccatagttggtcatatattatagttcatctacttaaacatattgtaccttttttacatctctcatttgagtacaactgtagtatttgttcataacatattgtagcttaaccagaacactaaagttcaaattccttacctttcaatgctcaaggtttttatgtcttgtacagtaaatgcggccatttttgtttggtttgagaaaaaaagatttttttgttttgtttgaggcaaattctcaactgtgctgcagtgtagtactgtagtggcaacattttacttctgtcacgttgcagcaggtggccccaaagatctgagcagcaattgtgatttagtgaattaatggtaaccctgcaataataatatctgttttatgacaacaactattgctaaagaattagatattgatgaatatcgtattgatatactatcaaattttagaaatatatttcgtttttcagaattattgttgaatgcaaacaaaacaatgagatatctatatatgtaacacaatttttcgtcatacttatttggttcagttgtgctctacgtttcaaagcagggctgtgatgattggttgttaaatgatgtaggttaagaccatataaacagttgtaattaaattctttgctatatagaaatcatagcaacgcacgggcacttaagaaacggagagggggaggccgttgtggctttgtgaagcgcttcgtcccgagcgggcgtgggcgggtatggcaccacacgtatcagccggctctgttgtggtattttaaaaaatattttaatttaatcaataacattcttaatttcttacgtacccattttaacctatatatctatactatattaaagcatcagtttcaacggtcgttctgcgtcatatttttacagataatccctcacatctatttcaaattaatacgctgcacgtctgtctgctctgcgcaaccaacctccacgttacaaaacacaactccatatatagatggctaaacagcggttcggcacggtcctgacgcccacgggccacaactctggcctaggcatggcgtgccggcctgctgactgtatcaggtcatttggttaaatcagtgtaaaatgttaaaaaagtagtgaggaggtggggttcgaacccacacattgatggaagaagggcggaagacactgagtgaagctatctaagcattagaacatcatgctcagatgtttttattattaaatataaattgtgtgtatatatatatatatatatatatatatatatatatatatatatatatacgttttttgtaaaataaaaaatatactcgtgtcgggtccggccagcactaccggacaaggctacaacccaagcacgacacgatgttcttggttcttgcaaccattatgtcgtttttgagaccacattggtgcaatggactccatggtgtttgaggttgctgaattggacggagcaacaatgatttgtcacactaacagtaaaaggaaaggttatttattggttttaaacgttagtaattgctacgatgtaccataatttatatggagcgcgttcagtttttattgatgcctgactttagttgtcactccatatttttatctatcttttttataagtttgagttcat

SEQ ID NO: 55074 - DNA, 5309 bp, Zea Mays
cctctttctctcatctcctgtcttcgcctccacgccgcaccgcagacaagattgccctcatcgctgactctgaaccacgttgccacagccacatctactagctctccccaatccgaaccgaagccacacacccacaccatatctgcaccagccatcctcgtgatctctctgtctcccatcgccagccgccaccgcgccctcctcccaccggatttagaggcgattcatgggagtggtgcgcaggctgctactgcggtatcaatggaggctgactgccatggaggatctgagcatcgaggcgaaggaggccgcgaggacatgttgatggtctccatgatggaaggaccacgccgcacggagaagcccaccggtgtcatcttccgcaaggtccgctcggtcgtccatgtccgttcgtcctcttcctgggcggttggcgcgtgatctggcgagacctcccaatgggtcaaaatctattttgtgcttggcgatgtattccttaaggaccgccatgctcttctcctttggcgcggtcagctgcttcgacaaaggataccatactcattgttgatagcaaatgattgggttccctaaaccaggttaaagcgaatgaaatgaaccatcatctgtaacaaggtgctatatcaatgacaagcagcaacaaagcgtaacacactaaaggcaagtttttttaacaacctttggtctaatatttgccattataatagcatatagttgtacttgtagaatataaatagcagatacaaaacataacaaagcatacctttagtatatcttgaaactatttagtgtataaataaaagtaccaattattcaaaacatatatcaaagtttcattccaacatctggcttgaatatgtagacaaaatgatttaaatagactaaccaatgatcaatgttagtggttctacttcagcaattgtaaagggatgcttattttttggtcacgatgcggtgtcgtgctttcagccgtggaattatgtttaatggagtggtcaaaatttatgccgccatgtcagtccactagatcagaagcatctgtgtcctgcggcagcatgatgggctcacctataaacaaatggataagccttccctgacccagaacagaagaggctttggctcaagtctacgacatcttaaaccattttgtttgcagtcatgcacggagaagacagaggaattgcacccaacaagcccttgatatccaaggaccacgagcgtacctaatttgattctacagactgggtcgatctctctatgattaacaaacacaataaaaaaactatatgtactaatcgatttataatgtttgtatgtactaatcgatttataaggcttgtatatactaatcgattttataatgtagctgctaggaaaaattcagaactgaaataaaggacacaacaatttttgccacttcagcaacttcatagcatgttttccaacaaggatacaactccaagaagaacgatgttggtctgttatgaccggtcgccactacaggcgccgggcaacagcataggcatgcagataaggattataagatgataatgattagaagattaaggagataagatttgttagagagaaaagagggaatttatctcattagataaggacaagaagggagtataaataattgtaagcaccactctatagggattaagcagaaacaagattgttctggcttcctagagggagccgggagattactgtgacctagccgcccctttcctcgcgtctctcatctcgcgcgcggtgaacacggcgccccgccgttgtgcatcgcgcctcaaaccccggccaccaatcacccaccactacaacctgagatcgatcagggaatccgccccgattcctatcatggtcattgtggatgagatggactatttaataacaagagattgtgttgtgctacatgatcttttaatgcttacaatttgttctatctctagatgcatattcataggtgaagtttattttctgtactgtttaatttctaaaaactagatgaactatcttgttcggttaattttctgtactattaaatttctgaaaactggagtttttgcatgtactaatttctatgtgatggtttctatgtgtgctatctgcatgtctctttaattatctctatatatctggttagacgacaaccttctatctatgaattatatgtcatgtctctttaattatctctatatcaatgtctacctatgtgatataagataccgtagcaacgcgcgtgcacctaattagtgaatttggaagtgtgactttataaaaacaaatgagttatatgttcaagataatgttaatagtcatactatttaaagtccttttactttcttatttggatgagtcttttttcacatatcttccttcttaatgtaccattcatggttctattgatagctcaaggtcgtgtgaatgttgccgctgagtactacaaacaacaggtagagatgttagagggttttagtgagatgggcgcatttacagatcatgctttcctacctgtaatgtccaaggaagaacacgaaaaagttatcaggagtgaaccattagccatatggttgtctaatattgcaaatatggttctctttgctgcaaaagtgtatgctttagtaaggagtggttcacttgctattatcgcatcaactttggattctcttctagactttttgtcacgatatatcttgtggtttactgccttttcaatgcaaacgccaaatccctatagaaacccaattggaaaaagcgtatgcagccgctggtgagttcttttttgccataacctgtacttccaaaaatgatggttgatgttgacatctagatctattgtccagaatgttttgtactcttttctgcgaaaatgatttacttatcttttacgtaatctgaattattgtctctgcattttgaatagaatgagcattgctttccatgtttctttctgaggcaaacaataaagatctgaattgacaggaaatcaataaacttactcaacactgtgtgctcactactcagtaattcttacttactggaatataaattacctgtctataaatactaattgttgagttcatgattgaagtcatagaaccatggaccctttttatccagtcacctctgtttgaattttctttaagttaatgatgaacttgttatgacttccaatttgacatttgcttttgagatgcgttgtcacttgttggggcaacttccatgtgtcaaacttttgtttgtcatgcctttttttcatattcttttttctttcaactttactgggattttctaatagatcgcctcttagttatattgttgatttgtgatccttccaaaaccatactatcacctaaaaatgatcagttcatccagcaatgttttgtttgtctatttcttgtcatggtgcacttattagaattgttgcccacttttactttttacatctgataatatgtttaagaaactatttttacttgattcttgacttgtagatacctttttatttctgtattgtatcccacaaactttcctgctagatattcagttgatgttttgtacttgtatataccttgtccacataaaacttgtgtgatatacttttatgaaattgatacatatgataggttgtttaatgttttagagaaatgctcttgataaccatagttggtcatatattatagttcatctacttaaacatattgtaccttttttacatctctcatttgagtacaactgtagtatttgttcataacatattgtagcttaaccagaacactaaagttcaaattccttacctttcaatgctcaaggtttttatgtcttgtacagtaaatgcggccatttttgtttggtttgagaaaaaaagatttttttgttttgtttgaggcaaattctcaactgtgctgcagtgtagtactgtagtggcaacattttacttctgtcacgttgcagcaggtggccccaaagatctgagcagcaattgtgatttagtgaattaatggtaaccctgcaataataatatctgttttatgacaacaactattgctaaagaattagatattgatgaatatcgtattgatatactatcaaattttagaaatatatttcgtttttcagaattattgttgaatgcaaacaaaacaatgagatatctatatatgtaacacaatttttcgtcatacttatttggttcagttgtgctctacgtttcaaagcagggctgtgatgattggttgttaaatgatgtaggttaagaccatataaacagttgtaattaaattctttgctatatagaaatcatagcaacgcacgggcacttaagaaacggagagggggaggccgttgtggctttgtgaagcgcttcgtcccgagcgggcgtgggcgggtatggcaccacacgtatcagccggctctgttgtggtattttaaaaaatattttaatttaatcaataacattcttaatttcttacgtacccattttaacctatatatctatactatattaaagcatcagtttcaacggtcgttctgcgtcatatttttacagataatccctcacatctatttcaaattaatacgctgcacgtctgtctgctctgcgcaaccaacctccacgttacaaaacacaactccatatatagatggctaaacagcggttcggcacggtcctgacgcccacgggccacaactctggcctaggcatggcgtgccggcctgctgactgtatcaggtcatttggttaaatcagtgtaaaatgttaaaaaagtagtgaggaggtggggttcgaacccacacattgatggaagaagggcggaagacactgagtgaagctatctaagcattagaacatcatgctcagatgtttttattattaaatataaattgtgtgtatatatatatatatatatatatatatatatatatatatatatatatacgttttttgtaaaataaaaaatatactcgtgtcgggtccggccagcactaccggacaaggctacaacccaagcacgacacgatgttcttggttcttgcaaccattatgtcgtttttgagaccacattggtgcaatggactccatggtgtttgaggttgctgaattggacggagcaacaatgatttgtcacactaacagtaaaaggaaaggttatttattggttttaaacgttagtaattgctacgatgtaccataatttatatggagcgcgttcagtttttattgatgcctgactttagttgtcactccatatttttatctatcttttttataagtttgagttcat

SEQ ID NO: 55075 - DNA, 4637 bp, Zea Mays
cctctttctctcatctcctgtcttcgcctccacgccgcaccgcagacaagattgccctcatcgctgactctgaaccacgttgccacagccacatctactagctctccccaatccgaaccgaagccacacacccacaccatatctgcaccagccatcctcgtgatctctctgtctcccatcgccagccgccaccgcgccctcctcccaccggatttagaggcgattcatgggagtggtgcgcaggctgctactgcggtatcaatggaggctgactgccatggaggatctgagcatcgaggcgaaggaggccgcgaggacatgttgatggtctccatgatggaaggaccacgccgcacggagaagcccaccggtgtcatcttccgcaaggtccgctcggtcgtccatgtccgttcgtcctcttcctgggcggttggcgcgtgatctggcgagacctcccaatgggtcaaaatctattttgtgcttggcgatgtattccttaaggaccgccatgctcttctcctttggcgcggtcagctgcttcgacaaaggataccatactcattgttgatagcaaatgattgggttccctaaaccaggtttgcttttactcttggatcaagactcacctggctagccgagtagtcgtccatcgcgttttgaaggcagacaggaagttatggttagctgcaggttaaagcgaatgaaatgaaccatcatctgtaacaaggtgctatatcaatgacaagcagcaacaaagcgtaacacactaaaggcaagtttttttaacaacctttggtctaatatttgccattataatagcatatagttgtacttgtagaatataaatagcagatacaaaacataacaaagcatacctttagtatatcttgaaactatttagtgtataaataaaagtaccaattattcaaaacatatatcaaagtttcattccaacatctggcttgaatatgtagacaaaatgatttaaatagactaaccaatgatcaatgttagtggttctacttcagcaattgtaaagggatgcttattttttggtcacgatgcggtgtcgtgctttcagccgtggaattatgtttaatggagtggtcaaaatttatgccgccatgtcagtccactagatcagaagcatctgtgtcctgcggcagcatgatgggctcacctataaacaaatggataagccttccctgacccagaacagaagaggttcaatggctttggctcaagtctacgacatcttaaaccattttgtttgcagtcatgcacggagaagacagaggaattgcacccaacaagcccttgatatccaaggaccacgagcgtacctaatttgattctacagactgggtcgatctctctatgattaacaaacacaataaaaaaactatatgtactaatcgatttataatgtttgtatgtactaatcgatttataaggcttgtatatactaatcgattttataatgtagctgctaggaaaaattcagaactgaaataaaggacacaacaatttttgccacttcagcaacttcatagcatgttttccaacaaggatacaactccaagaagaacgatgttggtctgttatgaccggtcgccactacaggcgccgggcaacagcataggcatgcagataaggattataagatgataatgattagaagattaaggagataagatttgttagagagaaaagagggaatttatctcattagataaggacaagaagggagtataaataattctcaaggtcgtgtgaatgttgccgctgagtactacaaacaacaggtagagatgttagagggttttagtgagatgggcgcatttacagatcatgctttcctacctgtaatgtccaaggaagaacacgaaaaagttatcaggagtgaaccattagccatatggttgtctaatattgcaaatatggttctctttgctgcaaaagtgtatgctttagtaaggagtggttcacttgctattatcgcatcaactttggattctcttctagactttttgtcacgatatatcttgtggtttactgccttttcaatgcaaacgccaaatccctatagaaacccaattggaaaaagcgtatgcagccgctggtgagttcttttttgccataacctgtacttccaaaaatgatggttgatgttgacatctagatctattgtccagaatgttttgtactcttttctgcgaaaatgatttacttatcttttacgtaatctgaattattgtctctgcattttgaatagaatgagcattgctttccatgtttctttctgaggcaaacaataaagatctgaattgacaggaaatcaataaacttactcaacactgtgtgctcactactcagtaattcttacttactggaatataaattacctgtctataaatactaattgttgagttcatgattgaagtcatagaaccatggaccctttttatccagtcacctctgtttgaattttctttaagttaatgatgaacttgttatgacttccaatttgacatttgcttttgagatgcgttgtcacttgttggggcaacttccatgtgtcaaacttttgtttgtcatgcctttttttcatattcttttttctttcaactttactgggattttctaatagatcgcctcttagttatattgttgatttgtgatccttccaaaaccatactatcacctaaaaatgatcagttcatccagcaatgttttgtttgtctatttcttgtcatggtgcacttattagaattgttgcccacttttactttttacatctgataatatgtttaagaaactatttttacttgattcttgacttgtagatacctttttatttctgtattgtatcccacaaactttcctgctagatattcagttgatgttttgtacttgtatataccttgtccacataaaacttgtgtgatatacttttatgaaattgatacatatgataggttgtttaatgttttagagaaatgctcttgataaccatagttggtcatatattatagttcatctacttaaacatattgtaccttttttacatctctcatttgagtacaactgtagtatttgttcataacatattgtagcttaaccagaacactaaagttcaaattccttacctttcaatgctcaaggtttttatgtcttgtacagtaaatgcggccatttttgtttggtttgagaaaaaaagatttttttgttttgtttgaggcaaattctcaactgtgctgcagtgtagtactgtagtggcaacattttacttctgtcacgttgcagcaggtggccccaaagatctgagcagcaattgtgatttagtgaattaatggtaaccctgcaataataatatctgttttatgacaacaactattgctaaagaattagatattgatgaatatcgtattgatatactatcaaattttagaaatatatttcgtttttcagaattattgttgaatgcaaacaaaacaatgagatatctatatatgtaacacaatttttcgtcatacttatttggttcagttgtgctctacgtttcaaagcagggctgtgatgattggttgttaaatgatgtaggttaagaccatataaacagttgtaattaaattctttgctatatagaaatcatagcaacgcacgggcacttaagaaacggagagggggaggccgttgtggctttgtgaagcgcttcgtcccgagcgggcgtgggcgggtatggcaccacacgtatcagccggctctgttgtggtattttaaaaaatattttaatttaatcaataacattcttaatttcttacgtacccattttaacctatatatctatactatattaaagcatcagtttcaacggtcgttctgcgtcatatttttacagataatccctcacatctatttcaaattaatacgctgcacgtctgtctgctctgcgcaaccaacctccacgttacaaaacacaactccatatatagatggctaaacagcggttcggcacggtcctgacgcccacgggccacaactctggcctaggcatggcgtgccggcctgctgactgtatcaggtcatttggttaaatcagtgtaaaatgttaaaaaagtagtgaggaggtggggttcgaacccacacattgatggaagaagggcggaagacactgagtgaagctatctaagcattagaacatcatgctcagatgtttttattattaaatataaattgtgtgtatatatatatatatatatatatatatatatatatatatatatatatacgttttttgtaaaataaaaaatatactcgtgtcgggtccggccagcactaccggacaaggctacaacccaagcacgacacgatgttcttggttcttgcaaccattatgtcgtttttgagaccacattggtgcaatggactccatggtgtttgaggttgctgaattggacggagcaacaatgatttgtcacactaacagtaaaaggaaaggttatttattggttttaaacgttagtaattgctacgatgtaccataatttatatggagcgcgttcagtttttattgatgcctgactttagttgtcactccatatttttatctatcttttttataagtttgagttcat

SEQ ID NO: 55076 - DNA, 1033 bp, Zea Mays
cgagccgggagaatgggaatccagctcagatttcgcttgtctccctccgccgtggtgagccccccgcgggcgacgtgtgtcccgttgcctttccttcgcttcgacggccaggccacctgttggcctcgcatggctctgcgtcctgccaagcatccaagctccctctcgcccggcggcccagcgccgcggcgtctatatagagccagatccgcgcgatccccgccaatcggcaatcgctgcaccctgcctcaacttctctagctcacccgcatccctgctcggcactgccttgtgccttctcctcgcacttcccttcttcttgtatctagccccccttcatcacaatcaccggcagcggcgcgccgtcgtctcagattgatgcaaggggcggtgacgagctagaggcagcaactgcatatcttgcaagaaaattggttttcgaaccataccgataattttcttgcaagttgtgcagttgttgtctcaagcttgctgcctccctttgccaaaactatgaagaaacaggttatgttatcaatgaacacattggcacagattttaactggtatatgttgaagacgactggtatatttgagggcagcttctggcatgtaaactatacggcctgcggcctggtacttcggagttcatgggatgttctgcaacagcactagaattctgacaatccagtgtcatgtgacacaactgaagtggcaaaaagaattcctaacatttactggataaagcatctgctgacatattgttttcgtgatgcaatatgagttccagataacatacagcagtagaattcaagttcgtaagacacactgttctctgttggatctcctaattaacttctgtgaaaaggctaactggtgtgttaaggattcctagtcaccaacatgtaaattttgatttgagaacatgtaaataagatgcattgatgttttattactaatgactagcaaacatgcctgcgttgcaacgggaaaaaaactagcaaatattcatgagaaaaaagctatcaaatgtt

SEQ ID NO: 55077 - DNA, 1631 bp, Zea Mays
accacatcgagccgagccgggagaatgggaatccagctcagatttcgcttgtctccctccgccgtggtgagccccccgcgggcgacgtgtgtcccgttgcctttccttcgcttcgacggccaggccacctgttggcctcgcatggctctgcgtcctgccaagcatccaagctccctctcgcccggcggcccagcgccgcggcgtctatatagagccagatccgcgcgatccccgccaatcggcaatcgctgcaccctgcctcaacttctctagctcacccgcatccctgctcggcactgccttgtgccttctcctcgcacttcccttcttcttgtatctagccccccttcatcacaatcaccggcagcggcgcgccgtcgtctcagattgatgcaaggggcggtgacgagctagaggcagcaactgcatatcttgcaagaaaattggttttcgaaccataccgataattttcttgcaagttgtgcagttgttgtctcaagcttgctgcctccctttgccaaaactatgaagaaacaggttatgttatcaatgaacacattggcacagattttaactggtatatgttggtaagacatgacgtttagttggaatcttgcagcatgatacacaattacacacagcagctcttaggtacttcattcataccaaattataagatgttttaggtattatgaggtgctttgggttttctagatacattgattttactacgcatctagacatggtatatatctaagtgcatggcaaaaattaatgtctagaaaagccaaaacatcttataaattggaatggaaagagtacaaaactaagagggaacaatatttattactagaactagaaattgcaatctgacatgtccaattttgcaacgtggaggctattttaatgcgccttcgtttactttctggataaacaagcagtacggtacgatattacagcgggtactgttgtgttaggatgttgcaagcagacttcatgaagtcataacaaggcgagtgctaattcttacaagaacatgtcagtataagtaaatgatctcctgattttatgatttgaagggtgccgagtgccttttagtcaattagtcaatgctggttcttctaccgttacgtgttcagagtgttcagtatctattctacgacaacctttgataagacgactggtatatttgagggcagcttctggcatgtaaactatacggcctgcggcctggtacttcggagttcatgggatgttctgcaacagcactagaattctgacaatccagtgtcatgtgacacaactgaagtggcaaaaagaattcctaacatttactggataaagcatctgctgacatattgttttcgtgatgcaatatgagttccagataacatacagcagtagaattcaagttcgtaagacacactgttctctgttggatctcctaattaacttctgtgaaaaggctaactggtgtgttaaggattcctagtcaccaacatgtaaattttgatttgagaacatgtaaataagatgcattgatgttttattactaatgactagcaaacatgcctgcgttgcaacgggaaaaaaactagcaaatattcatgagaaaaaagctatcaaatgtt

SEQ ID NO: 55078 - DNA, 1649 bp, Zea Mays
aacagttcaacaccacatcgagccgagccgggagaatgggaatccagctcagatttcgcttgtctccctccgccgtggtgagccccccgcgggcgacgtgtgtcccgttgcctttccttcgcttcgacggccaggccacctgttggcctcgcatggctctgcgtcctgccaagcatccaagctccctctcgcccggcggcccagcgccgcggcgtctatatagagccagatccgcgcgatccccgccaatcggcaatcgctgcaccctgcctcaacttctctagctcacccgcatccctgctcggcactgccttgtgccttctcctcgcacttcccttcttcttgtatctagccccccttcatcacaatcaccggcagcggcgcgccgtcgtctcagattgatgcaaggggcggtgacgagctagaggcagcaactgcatatcttgcaagaaaattggttttcgaaccataccgataattttcttgcaagttgtgcagttgttgtctcaagcttgctgcctccctttgccaaaactatgaagaaacaggttatgttatcaatgaacacattggcacagattttaactggtatatgttggtaagacatgacgtttagttggaatcttgcagcatgatacacaattacacacagcagctcttaggtacttcattcataccaaattataagatgttttaggtattatgaggtgctttgggttttctagatacattgattttactacgcatctagacatggtatatatctaagtgcatggcaaaaattaatgtctagaaaagccaaaacatcttataaattggaatggaaagagtacaaaactaagagggaacaatatttattactagaactagaaattgcaatctgacatgtccaattttgcaacgtggaggctattttaatgcgccttcgtttactttctggataaacaagcagtacggtacgatattacagcgggtactgttgtgttaggatgttgcaagcagacttcatgaagtcataacaaggcgagtgctaattcttacaagaacatgtcagtataagtaaatgatctcctgattttatgatttgaagggtgccgagtgccttttagtcaattagtcaatgctggttcttctaccgttacgtgttcagagtgttcagtatctattctacgacaacctttgatgttgtagaagacgactggtatatttgagggcagcttctggcatgtaaactatacggcctgcggcctggtacttcggagttcatgggatgttctgcaacagcactagaattctgacaatccagtgtcatgtgacacaactgaagtggcaaaaagaattcctaacatttactggataaagcatctgctgacatattgttttcgtgatgcaatatgagttccagataacatacagcagtagaattcaagttcgtaagacacactgttctctgttggatctcctaattaacttctgtgaaaaggctaactggtgtgttaaggattcctagtcaccaacatgtaaattttgatttgagaacatgtaaataagatgcattgatgttttattactaatgactagcaaacatgcctgcgttgcaacgggaaaaaaactagcaaatattcatgagaaaaaagctatcaaatgtt

SEQ ID NO: 55079 - DNA, 1089 bp, Zea Mays
ccgccccgcaacctcccgggcgcaccaacagttcaacaccacatcgagccgagccgggagaatgggaatccagctcagatttcgcttgtctccctccgccgtggtgagccccccgcgggcgacgtgtgtcccgttgcctttccttcgcttcgacggccaggccacctgttggcctcgcatggctctgcgtcctgccaagcatccaagctccctctcgcccggcggcccagcgccgcggcgtctatatagagccagatccgcgcgatccccgccaatcggcaatcgctgcaccctgcctcaacttctctagctcacccgcatccctgctcggcactgccttgtgccttctcctcgcacttcccttcttcttgtatctagccccccttcatcacaatcaccggcagcggcgcgccgtcgtctcagattgatgcaaggggcggtgacgagctagaggcagcaactgcatatcttgcaagaaaattggttttcgaaccataccgataattttcttgcaagttgtgcagttgttgtctcaagcttgctgcctccctttgccaaaactatgaagaaacaggttatgttatcaatgaacacattggcacagattttaactggtatatgttggttgtagaagacgactggtatatttgagggcagcttctggcatgtaaactatacggcctgcggcctggtacttcggagttcatgggatgttctgcaacagcactagaattctgacaatccagtgtcatgtgacacaactgaagtggcaaaaagaattcctaacatttactggataaagcatctgctgacatattgttttcgtgatgcaatatgagttccagataacatacagcagtagaattcaagttcgtaagacacactgttctctgttggatctcctaattaacttctgtgaaaaggctaactggtgtgttaaggattcctagtcaccaacatgtaaattttgatttgagaacatgtaaataagatgcattgatgttttattactaatgactagcaaacatgcctgcgttgcaacgggaaaaaaactagcaaatattcatgagaaaaaagctatcaaatgtt

SEQ ID NO: 55080 - DNA, 323 bp, Zea Mays
ccaagctccctctcgcccggcggcccagcgccgcggcgtctatatagagccagatccgcgcgatccccgccaatcggcaatcgctgcaccctgcctcaacttctctagctcacccgcatccctgctcggcactgccttgtgccttctcctcgcacttcccttcttcttgtatctagccccccttcatcacaatcaccggcagcggcgcgccgtcgtctcagattgatgcaaggggcggtgacgagctagaggcagcaactgcatatcttgcaagaaaattatgtttgacgccacttcatccaacttgctttgattctatggct

SEQ ID NO: 55081 - DNA, 3178 bp, Zea Mays
caagcagctatcctcgcgtccaaagtgcccacggcgctcccaggccccagccggacgccggacgccggtcgcgctccgccccaacacgaaaaccccgaaccctctccgtggctgtttctgcaacttggttgggcttcccattcgtcgcgtactcgcgttgccagccgcctccctcagtcgctcctccgaaagtccaaaccgcgtccgcttccggcttcccttgctcccctggaattccgcgcgacgtcgccgtcagtcacccggcagttcgctcgcgcaggtcatcgtctccccgatgaccgaaacggttactccccctagtcgcaccagtcaccaccaccaccagtccaccaccagcgccgagcagttagccagttgccactactccccgcatcgctaattgctctaggacgtgtctcgttaatcctccccattcctcataccgcccgatcctacctccccaaccgccaatcgcagccatgtcctcttcctccacctcctcctgccacggcagcgggaaccctagcccccccgcagcggcgggggccgtgtcggtggcggcggcggcggcgggccccgcggcgtggcccaggcggcagtgccgggacgtgttctggctggtggtcttcctcctccacctgctcgtcttcggcgccgcgctcgcgctcttcggcctcaaccgcttccaccaggccgaccgcttcaacatcggccgctacgccaacctcaccgcggagccctggggcacccccgcaggcccgccggaccccgcgcccgcgccgccgccgccctccgtctaccgctccgaggacccctccgtgccgccgtccgagctcaccgagacgtactggaagtactacggcgccgcgggggctgtcggggccgcgctcgcgtgcgcgtggctggcggcggcggcctggaggaaggatggcggcaaggtggtcatgcggaccgccgtgcactgcctcacggcgtacctcgcggtcgtcagcgtcctgtgcttctgggggaagcacttcttctggggcgtcgctctggccgtcggcgccggcctgcacttcctctacgtcatgtctgtgctcgataggtttcccttcacaatgctagtactgcagaaggcagtaagaatggtacgggaacttcctgatgttatgagaattgcttatgcatttgtgctagtcatgctttgttggatggcattatggtcctttggaatttctggcattgttgcctttggcataccaaatggtgggcaatggtggcttcttttggtgagctgattttttcagtcagtttattttggactggagctgttcttagcaatacagtccatgtcattgtctcagggatggttttcctcgttctcattcatggtggtccagctgctgcaacaatgcccccaaaacctcttctgaaatctcttcagtatgctgtgacaacttcatttggaagcatttgctatggatcgctttttaccgctgctattaggactttgcgatgggagattcgtggaattcgttctaaaattggcagcaatgagtgtttgctatgttgtattgattttttgtttcatattgtggagacccttgttcgcttcttcaacaaatatgcatatgtacaggtgagtatgtttatctcttcagtagttttcaagatgtagaccatgcctatttgaaaaaactacatgttccagctgttttctctttctcatttgtttgttgacactgacagtgtttttcttattgttttaagctataaggtttagtttctgccaatcaaagtaccttagtttgcctggatatttttgcacaaatgcatgtgatttgtgacccattcgctgcttttattgaaatgtgaaaacttattattgtaacaatttgtctatatttcatggtatgaaatattgactgttgatatcatgctatcgaatcaatgccctaaaaatagtttgccattttcagatagcagttaatggacagagtttcaatcgctcagctagggatgcttgggagctgtttcaatccacaggcatcgaatcacttgttgcttatgactgttcaggtgctatccttctaatgagcaccattttaggtggattgattactggaacctgcatgggcgtttggacatatttcaaacaaagtgataaagctgttatggttggttcaacatccatgctgatgggtatgatactggttggactaactgttgtggttgtggaaagtgctgttacatcaatatacatatgctatgccgaggatccccttttgattcagagatgggatcccgaattttttgaacaaatgtcagaagcgctacaccagcggctgcagtaccgaagcgcgcgagctcgtcaaatattgaatgggcggcttgatcatttgccacatacgtccagtatttgaatgaattgcgtgccagatattgattatctctgtgaatccattgatacgtgggcagacatttacagaagatttggatctccctgccattgaaatatatagaccaaggaagatattcgaagccattgacgttccgagaactggagtgccccagcaatcttgtacgccttcaagaacaaaatgttttcaaatccaaatgaagccgtaatgtggatgctcatgcttctttggtactgcaccatcgttttttttatttgtgtaaggcttttctggtaaggtagatactattaaatccatttcgagatttgtgatgcagaatgtgtccggtttcaacatcagtgcgggttagtgtggcaatgtgataggtttttgtcttccttttgtagccttagcgctacaatacgataaactatggagaggaacagcatcatggtcgctacttggccggttgtacataacagtgttgcttagtgctcatatactaaggccctgtttcaatctcgcgagataaactttagcagcttttttttagctacttttagccgtttataatctaaacaggagagctaatggtggtaattgaagctaaactttagcacttcaattcatatagctaaagtttagcaggaagctaaagtttatcccgtgagattgaaacggggcctaactaggtggtctgactgattaaatctttcatttactccatgtaccacagaaagaatgtatttgacttttctgagatcaagtttgaccggcttgttttatttaaaaaaatt

SEQ ID NO: 55082 - DNA, 2823 bp, Zea Mays
caagcagctatcctcgcgtccaaagtgcccacggcgctcccaggccccagccggacgccggacgccggtcgcgctccgccccaacacgaaaaccccgaaccctctccgtggctgtttctgcaacttggttgggcttcccattcgtcgcgtactcgcgttgccagccgcctccctcagtcgctcctccgaaagtccaaaccgcgtccgcttccggcttcccttgctcccctggaattccgcgcgacgtcgccgtcagtcacccggcagttcgctcgcgcaggtcatcgtctccccgatgaccgaaacggttactccccctagtcgcaccagtcaccaccaccaccagtccaccaccagcgccgagcagttagccagttgccactactccccgcatcgctaattgctctaggacgtgtctcgttaatcctccccattcctcataccgcccgatcctacctccccaaccgccaatcgcagccatgtcctcttcctccacctcctcctgccacggcagcgggaaccctagcccccccgcagcggcgggggccgtgtcggtggcggcggcggcggcgggccccgcggcgtggcccaggcggcagtgccgggacgtgttctggctggtggtcttcctcctccacctgctcgtcttcggcgccgcgctcgcgctcttcggcctcaaccgcttccaccaggccgaccgcttcaacatcggccgctacgccaacctcaccgcggagccctggggcacccccgcaggcccgccggaccccgcgcccgcgccgccgccgccctccgtctaccgctccgaggacccctccgtgccgccgtccgagctcaccgagacgtactggaagtactacggcgccgcgggggctgtcggggccgcgctcgcgtgcgcgtggctggcggcggcggcctggaggaaggatggcggcaaggtggtcatgcggaccgccgtgcactgcctcacggcgtacctcgcggtcgtcagcgtcctgtgcttctgggggaagcacttcttctggggcgtcgctctggccgtcggcgccggcctgcacttcctctacgtcatgtctgtgctcgataggtttcccttcacaatgctagtactgcagaaggcagtaagaatggtacgggaacttcctgatgttatgagaattgcttatgcatttgtgctagtcatgctttgttggatggcattatggtcctttggaatttctggcattgttgcctttggcataccaaatggtgggcaatggtggcttcttttgattttttcagtcagtttattttggactggagctgttcttagcaatacagtccatgtcattgtctcagggatggttttcctcgttctcattcatggtggtccagctgctgcaacaatgcccccaaaacctcttctgaaatctcttcagtatgctgtgacaacttcatttggaagcatttgctatggatcgctttttaccgctgctattaggactttgcgatgggagattcgtggaattcgttctaaaattggcagcaatgagtgtttgctatgttgtattgattttttgtttcatattgtggagacccttgttcgcttcttcaacaaatatgcatatgtacagttaatggacagagtttcaatcgctcagctagggatgcttgggagctgtttcaatccacaggcatcgaatcacttgttgcttatgactgttcaggtgctatccttctaatgagcaccattttaggtggattgattactggaacctgcatgggcgtttggacatatttcaaacaaagtgataaagctgttatggttggttcaacatccatgctgatgggtatgatactggttggactaactgttgtggttgtggaaagtgctgttacatcaatatacatatgctatgccgaggatccccttttgattcagagatgggatcccgaattttttgaacaaatgtcagaagcgctacaccagcggctgcagtaccgaagcgcgcgagctcgtcaaatattgaatgggcggcttgatcatttgccacatacgtccagtatttgaatgaattgcgtgccagatattgattatctctgtgaatccattgatacgtgggcagacatttacagaagatttggatctccctgccattgaaatatatagaccaaggaagatattcgaagccattgacgttccgagaactggagtgccccagcaatcttgtacgccttcaagaacaaaatgttttcaaatccaaatgaagccgtaatgtggatgctcatgcttctttggtactgcaccatcgttttttttatttgtgtaaggcttttctggtaaggtagatactattaaatccatttcgagatttgtgatgcagaatgtgtccggtttcaacatcagtgcgggttagtgtggcaatgtgataggtttttgtcttccttttgtagccttagcgctacaatacgataaactatggagaggaacagcatcatggtcgctacttggccggttgtacataacagtgttgcttagtgctcatatactaaggccctgtttcaatctcgcgagataaactttagcagcttttttttagctacttttagccgtttataatctaaacaggagagctaatggtggtaattgaagctaaactttagcacttcaattcatatagctaaagtttagcaggaagctaaagtttatcccgtgagattgaaacggggcctaactaggtggtctgactgattaaatctttcatttactccatgtaccacagaaagaatgtatttgacttttctgagatcaagtttgaccggcttgttttatttaaaaaaatt

SEQ ID NO: 55083 - DNA, 3184 bp, Zea Mays
atttccgtcatatccaagcagctatcctcgcgtccaaagtgcccacggcgctcccaggccccagccggacgccggacgccggtcgcgctccgccccaacacgaaaaccccgaaccctctccgtggctgtttctgcaacttggttgggcttcccattcgtcgcgtactcgcgttgccagccgcctccctcagtcgctcctccgaaagtccaaaccgcgtccgcttccggcttcccttgctcccctggaattccgcgcgacgtcgccgtcagtcacccggcagttcgctcgcgcaggtcatcgtctccccgatgaccgaaacggttactccccctagtcgcaccagtcaccaccaccaccagtccaccaccagcgccgagcagttagccagttgccactactccccgcatcgctaattgctctaggacgtgtctcgttaatcctccccattcctcataccgcccgatcctacctccccaaccgccaatcgcagccatgtcctcttcctccacctcctcctgccacggcagcgggaaccctagcccccccgcagcggcgggggccgtgtcggtggcggcggcggcggcgggccccgcggcgtggcccaggcggcagtgccgggacgtgttctggctggtggtcttcctcctccacctgctcgtcttcggcgccgcgctcgcgctcttcggcctcaaccgcttccaccaggccgaccgcttcaacatcggccgctacgccaacctcaccgcggagccctggggcacccccgcaggcccgccggaccccgcgcccgcgccgccgccgccctccgtctaccgctccgaggacccctccgtgccgccgtccgagctcaccgagacgtactggaagtactacggcgccgcgggggctgtcggggccgcgctcgcgtgcgcgtggctggcggcggcggcctggaggaaggatggcggcaaggtggtcatgcggaccgccgtgcactgcctcacggcgtacctcgcggtcgtcagcgtcctgtgcttctgggggaagcacttcttctggggcgtcgctctggccgtcggcgccggcctgcacttcctctacgtcatgtctgtgctcgataggtttcccttcacaatgctagtactgcagaaggcagtaagaatggtacgggaacttcctgatgttatgagaattgcttatgcatttgtgctagtcatgctttgttggatggcattatggtcctttggaatttctggcattgttgcctttggcataccaaatggtgggcaatggtggcttcttttgattttttcagtcagtttattttggactggagctgttcttagcaatacagtccatgtcattgtctcagggatggttttcctcgttctcattcatggtggtccagctgctgcaacaatgcccccaaaacctcttctgaaatctcttcagtatgctgtgacaacttcatttggaagcatttgctatggatcgctttttaccgctgctattaggactttgcgatgggagattcgtggaattcgttctaaaattggcagcaatgagtgtttgctatgttgtattgattttttgtttcatattgtggagacccttgttcgcttcttcaacaaatatgcatatgtacaggtgagtatgtttatctcttcagtagttttcaagatgtagaccatgcctatttgaaaaaactacatgttccagctgttttctctttctcatttgtttgttgacactgacagtgtttttcttattgttttaagctataaggtttagtttctgccaatcaaagtaccttagtttgcctggatatttttgcacaaatgcatgtgatttgtgacccattcgctgcttttattgaaatgtgaaaacttattattgtaacaatttgtctatatttcatggtatgaaatattgactgttgatatcatgctatcgaatcaatgccctaaaaatagtttgccattttcagatagcagttaatggacagagtttcaatcgctcagctagggatgcttgggagctgtttcaatccacaggcatcgaatcacttgttgcttatgactgttcaggtgctatccttctaatgagcaccattttaggtggattgattactggaacctgcatgggcgtttggacatatttcaaacaaagtgataaagctgttatggttggttcaacatccatgctgatgggtatgatactggttggactaactgttgtggttgtggaaagtgctgttacatcaatatacatatgctatgccgaggatccccttttgattcagagatgggatcccgaattttttgaacaaatgtcagaagcgctacaccagcggctgcagtaccgaagcgcgcgagctcgtcaaatattgaatgggcggcttgatcatttgccacatacgtccagtatttgaatgaattgcgtgccagatattgattatctctgtgaatccattgatacgtgggcagacatttacagaagatttggatctccctgccattgaaatatatagaccaaggaagatattcgaagccattgacgttccgagaactggagtgccccagcaatcttgtacgccttcaagaacaaaatgttttcaaatccaaatgaagccgtaatgtggatgctcatgcttctttggtactgcaccatcgttttttttatttgtgtaaggcttttctggtaaggtagatactattaaatccatttcgagatttgtgatgcagaatgtgtccggtttcaacatcagtgcgggttagtgtggcaatgtgataggtttttgtcttccttttgtagccttagcgctacaatacgataaactatggagaggaacagcatcatggtcgctacttggccggttgtacataacagtgttgcttagtgctcatatactaaggccctgtttcaatctcgcgagataaactttagcagcttttttttagctacttttagccgtttataatctaaacaggagagctaatggtggtaattgaagctaaactttagcacttcaattcatatagctaaagtttagcaggaagctaaagtttatcccgtgagattgaaacggggcctaactaggtggtctgactgattaaatctttcatttactccatgtaccacagaaagaatgtatttgacttttctgagatcaagtttgaccggcttgttttatttaaaaaaatt

SEQ ID NO: 55084 - DNA, 2852 bp, Zea Mays
atttccgtcatatccaagcagctatcctcgcgtccaaagtgcccacggcgctcccaggccccagccggacgccggacgccggtcgcgctccgccccaacacgaaaaccccgaaccctctccgtggctgtttctgcaacttggttgggcttcccattcgtcgcgtactcgcgttgccagccgcctccctcagtcgctcctccgaaagtccaaaccgcgtccgcttccggcttcccttgctcccctggaattccgcgcgacgtcgccgtcagtcacccggcagttcgctcgcgcaggtcatcgtctccccgatgaccgaaacggttactccccctagtcgcaccagtcaccaccaccaccagtccaccaccagcgccgagcagttagccagttgccactactccccgcatcgctaattgctctaggacgtgtctcgttaatcctccccattcctcataccgcccgatcctacctccccaaccgccaatcgcagccatgtcctcttcctccacctcctcctgccacggcagcgggaaccctagcccccccgcagcggcgggggccgtgtcggtggcggcggcggcggcgggccccgcggcgtggcccaggcggcagtgccgggacgtgttctggctggtggtcttcctcctccacctgctcgtcttcggcgccgcgctcgcgctcttcggcctcaaccgcttccaccaggccgaccgcttcaacatcggccgctacgccaacctcaccgcggagccctggggcacccccgcaggcccgccggaccccgcgcccgcgccgccgccgccctccgtctaccgctccgaggacccctccgtgccgccgtccgagctcaccgagacgtactggaagtactacggcgccgcgggggctgtcggggccgcgctcgcgtgcgcgtggctggcggcggcggcctggaggaaggatggcggcaaggtggtcatgcggaccgccgtgcactgcctcacggcgtacctcgcggtcgtcagcgtcctgtgcttctgggggaagcacttcttctggggcgtcgctctggccgtcggcgccggcctgcacttcctctacgtcatgtctgtgctcgataggtttcccttcacaatgctagtactgcagaaggcagtaagaatggtacgggaacttcctgatgttatgagaattgcttatgcatttgtgctagtcatgctttgttggatggcattatggtcctttggaatttctggcattgttgcctttggcataccaaatggtgggcaatggtggcttcttttggtgagctgattttttcagtcagtttattttggactggagctgttcttagcaatacagtccatgtcattgtctcagggatggttttcctcgttctcattcatggtggtccagctgctgcaacaatgcccccaaaacctcttctgaaatctcttcagtatgctgtgacaacttcatttggaagcatttgctatggatcgctttttaccgctgctattaggactttgcgatgggagattcgtggaattcgttctaaaattggcagcaatgagtgtttgctatgttgtattgattttttgtttcatattgtggagacccttgttcgcttcttcaacaaatatgcatatgtacagatagcagttaatggacagagtttcaatcgctcagctagggatgcttgggagctgtttcaatccacaggcatcgaatcacttgttgcttatgactgttcaggtgctatccttctaatgagcaccattttaggtggattgattactggaacctgcatgggcgtttggacatatttcaaacaaagtgataaagctgttatggttggttcaacatccatgctgatgggtatgatactggttggactaactgttgtggttgtggaaagtgctgttacatcaatatacatatgctatgccgaggatccccttttgattcagagatgggatcccgaattttttgaacaaatgtcagaagcgctacaccagcggctgcagtaccgaagcgcgcgagctcgtcaaatattgaatgggcggcttgatcatttgccacatacgtccagtatttgaatgaattgcgtgccagatattgattatctctgtgaatccattgatacgtgggcagacatttacagaagatttggatctccctgccattgaaatatatagaccaaggaagatattcgaagccattgacgttccgagaactggagtgccccagcaatcttgtacgccttcaagaacaaaatgttttcaaatccaaatgaagccgtaatgtggatgctcatgcttctttggtactgcaccatcgttttttttatttgtgtaaggcttttctggtaaggtagatactattaaatccatttcgagatttgtgatgcagaatgtgtccggtttcaacatcagtgcgggttagtgtggcaatgtgataggtttttgtcttccttttgtagccttagcgctacaatacgataaactatggagaggaacagcatcatggtcgctacttggccggttgtacataacagtgttgcttagtgctcatatactaaggccctgtttcaatctcgcgagataaactttagcagcttttttttagctacttttagccgtttataatctaaacaggagagctaatggtggtaattgaagctaaactttagcacttcaattcatatagctaaagtttagcaggaagctaaagtttatcccgtgagattgaaacggggcctaactaggtggtctgactgattaaatctttcatttactccatgtaccacagaaagaatgtatttgacttttctgagatcaagtttgaccggcttgttttatttaaaaaaatt

SEQ ID NO: 55085 - DNA, 2872 bp, Zea Mays
atcgccagcgccgaagcaaccactcggcatttccgtcatatccaagcagctatcctcgcgtccaaagtgcccacggcgctcccaggccccagccggacgccggacgccggtcgcgctccgccccaacacgaaaaccccgaaccctctccgtggctgtttctgcaacttggttgggcttcccattcgtcgcgtactcgcgttgccagccgcctccctcagtcgctcctccgaaagtccaaaccgcgtccgcttccggcttcccttgctcccctggaattccgcgcgacgtcgccgtcagtcacccggcagttcgctcgcgcaggtcatcgtctccccgatgaccgaaacggttactccccctagtcgcaccagtcaccaccaccaccagtccaccaccagcgccgagcagttagccagttgccactactccccgcatcgctaattgctctaggacgtgtctcgttaatcctccccattcctcataccgcccgatcctacctccccaaccgccaatcgcagccatgtcctcttcctccacctcctcctgccacggcagcgggaaccctagcccccccgcagcggcgggggccgtgtcggtggcggcggcggcggcgggccccgcggcgtggcccaggcggcagtgccgggacgtgttctggctggtggtcttcctcctccacctgctcgtcttcggcgccgcgctcgcgctcttcggcctcaaccgcttccaccaggccgaccgcttcaacatcggccgctacgccaacctcaccgcggagccctggggcacccccgcaggcccgccggaccccgcgcccgcgccgccgccgccctccgtctaccgctccgaggacccctccgtgccgccgtccgagctcaccgagacgtactggaagtactacggcgccgcgggggctgtcggggccgcgctcgcgtgcgcgtggctggcggcggcggcctggaggaaggatggcggcaaggtggtcatgcggaccgccgtgcactgcctcacggcgtacctcgcggtcgtcagcgtcctgtgcttctgggggaagcacttcttctggggcgtcgctctggccgtcggcgccggcctgcacttcctctacgtcatgtctgtgctcgataggtttcccttcacaatgctagtactgcagaaggcagtaagaatggtacgggaacttcctgatgttatgagaattgcttatgcatttgtgctagtcatgctttgttggatggcattatggtcctttggaatttctggcattgttgcctttggcataccaaatggtgggcaatggtggcttcttttgattttttcagtcagtttattttggactggagctgttcttagcaatacagtccatgtcattgtctcagggatggttttcctcgttctcattcatggtggtccagctgctgcaacaatgcccccaaaacctcttctgaaatctcttcagtatgctgtgacaacttcatttggaagcatttgctatggatcgctttttaccgctgctattaggactttgcgatgggagattcgtggaattcgttctaaaattggcagcaatgagtgtttgctatgttgtattgattttttgtttcatattgtggagacccttgttcgcttcttcaacaaatatgcatatgtacagatagcagttaatggacagagtttcaatcgctcagctagggatgcttgggagctgtttcaatccacaggcatcgaatcacttgttgcttatgactgttcaggtgctatccttctaatgagcaccattttaggtggattgattactggaacctgcatgggcgtttggacatatttcaaacaaagtgataaagctgttatggttggttcaacatccatgctgatgggtatgatactggttggactaactgttgtggttgtggaaagtgctgttacatcaatatacatatgctatgccgaggatccccttttgattcagagatgggatcccgaattttttgaacaaatgtcagaagcgctacaccagcggctgcagtaccgaagcgcgcgagctcgtcaaatattgaatgggcggcttgatcatttgccacatacgtccagtatttgaatgaattgcgtgccagatattgattatctctgtgaatccattgatacgtgggcagacatttacagaagatttggatctccctgccattgaaatatatagaccaaggaagatattcgaagccattgacgttccgagaactggagtgccccagcaatcttgtacgccttcaagaacaaaatgttttcaaatccaaatgaagccgtaatgtggatgctcatgcttctttggtactgcaccatcgttttttttatttgtgtaaggcttttctggtaaggtagatactattaaatccatttcgagatttgtgatgcagaatgtgtccggtttcaacatcagtgcgggttagtgtggcaatgtgataggtttttgtcttccttttgtagccttagcgctacaatacgataaactatggagaggaacagcatcatggtcgctacttggccggttgtacataacagtgttgcttagtgctcatatactaaggccctgtttcaatctcgcgagataaactttagcagcttttttttagctacttttagccgtttataatctaaacaggagagctaatggtggtaattgaagctaaactttagcacttcaattcatatagctaaagtttagcaggaagctaaagtttatcccgtgagattgaaacggggcctaactaggtggtctgactgattaaatctttcatttactccatgtaccacagaaagaatgtatttgacttttctgagatcaagtttgaccggcttgttttatttaaaaaaatt

SEQ ID NO: 55086 - DNA, 555 bp, Zea Mays
aatccctcgaggtgcttctgtagttgtcagaattgtgctatggctttgattttgatataaccttacagccaatgaatttgatacggcatatggtccagcttggcattgcattgttggaacaagctttggttcctatgtcactcactctctgggcggtttcttgtacttctccgtcgacaaggcctatattctcctcttcagaaccgctgtcgagccattagcccatccgcgatgaggggccatgaaacagtctactagctagcgcattctgtattcgacatttaactgtagaagggtaaggagagtagaacgatcatcgcccccaccccccaatgcaaatatgtagaactaatctgctgtagctaagtttgttccatgtactgtgcactaatcggccatgtggaccttaacattagctttcagagttgtagcttgactcagctcagttcttccgcgcgaggggaattttctttcgcatcttgtaatgccttgtagccttgttcgcaatcgcaatggaatcagtagatgcatcctgttaaatatagctgttctgat

SEQ ID NO: 55087 - DNA, 806 bp, Zea Mays
gcagcccgctccactcctcccctgccgaagcaccacacaggcacacagcagaagcgaaaactgcaggaaggccaatcgggcctggcaggcatgcttgcccgctgccgcagccggagccggagccggagcacgaggtagcgccacagaatccggagccggagccggagaccgcggttgggaagcgcgaggaggaaggtgtcagtgcgggtgcgcgcggccgacatgcccctaccgctgcagcgccgcgcggtccggctcgcctacgaagccatcgtcgccatgccgcgcctcgacagcaagcgcctcgccctcgcgctcaagaaggaatttgatacggcatatggtccagcttggcattgcattgttggaacaagctttggttcctatgtcactcactctctgggcggtttcttgtacttctccgtcgacaaggcctatattctcctcttcagaaccgctgtcgagccattagcccatccgcgatgaggggccatgaaacagtctactagctagcgcattctgtattcgacatttaactgtagaagggtaaggagagtagaacgatcatcgcccccaccccccaatgcaaatatgtagaactaatctgctgtagctaagtttgttccatgtactgtgcactaatcggccatgtggaccttaacattagctttcagagttgtagcttgactcagctcagttcttccgcgcgaggggaattttctttcgcatcttgtaatgccttgtagccttgttcgcaatcgcaatggaatcagtagatgcatcctgttaaatatagctgttctgat

SEQ ID NO: 55088 - DNA, 1218 bp, Zea Mays
gaccacggcagcacgagcagcccgctccactcctcccctgccgaagcaccacacaggcacacagcagaagcgaaaactgcaggaaggccaatcgggcctggcaggcatgcttgcccgctgccgcaggtgaggcgacccgcagccgtccgagacgcaccccggcgcaagcgcgcatccgccatggatccggtgtccgaggagctcgagcgccgcagccgctatctcaactcgctcatccgccgtactaagctcagcgccacccctgctccccctcctcagccggagccggagccggagcacgaggtagcgccacagaatccggagccggagccggagaccgcggttgggaagcgcgaggaggccaaggcggatccagtggtcgttgaggaggagaagcgggaggccaaagtggcgggggacgggaaggggaaagagatcaaggggaaggacgacgggggtcccaaggaggacaacagcaggaaggtgtcagtgcgggtgcgcgcggccgacatgcccctaccgctgcagcgccgcgcggtccggctcgcctacgaagccatcgtcgccatgccgcgcctcgacagcaagcgcctcgccctcgcgctcaagaaggtaatgtggcttggctagtctccagtctccacagtggcataaaacaaatcttattgtgaaggggtatacaatcagacatcagtttggttaaagtgataaccactaatatgcaatcagcaagcaggaatttgatacggcatatggtccagcttggcattgcattgttggaacaagctttggttcctatgtcactcactctctgggcggtttcttgtacttctccgtcgacaaggcctatattctcctcttcagaaccgctgtcgagccattagcccatccgcgatgaggggccatgaaacagtctactagctagcgcattctgtattcgacatttaactgtagaagggtaaggagagtagaacgatcatcgcccccaccccccaatgcaaatatgtagaactaatctgctgtagctaagtttgttccatgtactgtgcactaatcggccatgtggaccttaacattagctttcagagttgtagcttgactcagctcagttcttccgcgcgaggggaattttctttcgcatcttgtaatgccttgtagccttgttcgcaatcgcaatggaatcagtagatgcatcctgttaaatatagctgttctgat

SEQ ID NO: 55089 - DNA, 2835 bp, Zea Mays
cttcttccctgccaagaaaggccaaaggggaggagatgcggcgtcccgtgcacgccttaaaaacgagatccctggggtcaccactggtccactgcgtcactgcgccgaatcactagaaaccccaccaaacggaatttcacatccagcgagcaataccgcaccgcaggtaagatcaaagaggaggcgatggctggcggcgggcaggcggcgatttcgttcatgacgcggatggcgaaggtggcggcggggttgggcgtggcggcgtccgcagcctccacgtccttctacacggtggacggcggagagcgcgccgtcatcttcgatcgcgtccgcggcgtgctcccgcatggtcagcctcacgctccgcgtcctgtcgcgacccgacgtcgaacacctcccggacatcttcacctccctcgggctcgagtacgacgagaaggtcctcccatccatcggcaacgaggtgctcaaggccgtcgtcgcgcagttcaacgccgaccagctcctcaccgagcgtccccacgtctccgcgctcgtccgcgaatcgctcaccaagcgcgcccgcgagttcaacatcgtcctcgacgacgtcgccatcacccacctagcctacgggcaggagttcgcgcaggccgtcgagaagaagcaggtcgcgcaacaggaggccgagcgctccagattcctcgtcgcgcgcgctgagcaggagaggcgcgccgccatcgtccgcgcagagggggagagcgaggccgcgcgccttatctccgaggccacgaccactgcgggcaacggcctgatcgagctcaggaggatcgaggcggccaaggagatcgcaagcgttctgtcgcgcacgcccaacgtctcctacatccccgccggcgacaatggccagatgctgctcgggcttaacgccgcccggtgaatggatcgtctttttcccgcataattagttagtagtgccctattgaagtacttcagtaatttcagatgcatctacttagttatggttttgtggaacgattctatgctgggtaaagatggtgatatgcattgctcataaagttcggcagatggggaatttgccagaatactctatcgtaatcacttattgtgatatctcttgtttcatgctggttgcctgatctatatagtgttgctagcattctacaatgccttgttgatgttgtggttatcttaagtttagccgtccagattggttgtggttgtggattataactgagtatttcttgacgctgtgcttatcttaactctagtagttgtggttgtggattaactgagtacggagtactggttcgagtattgtgttctgctctgcttttttagaatcagagataaatcatagtttggagctatctgttttttaatttctttttcaatagcgaaaaggagctgctatctaactgttttttttccgcttcgcctaacagtaaaggcttgttcggttagggatgaagtgagggggattagagaggattaaatctcctcctacacaaccctcaatccactttaaaccgaacaagtcctaagggtgtttggtttgaagaatcgatcaatttcagatgagttggtgtatcatgagttcagtccataaatttggtagaaagtagaatgaactcattcctcatattattattaattatgagtttatgaggaataaaatggtgatgtattaagtgattccattccacaaaccaaacaagaaagcgaggattgagaatatgatggactatcttattcatcaaactaaacacgatataagtgtactactaggctctcataagtcttgtaaccattaggttggtttattaagacatatagctaattgctgctaatatttgctaatatttgtctagctgttgatttctttgttttgctgtaaggaactagatactgtagaaccgtttaggcaaaggcccctaaacctgtttccttgtatacagtttttgcaagcctgttttctttttgtgtcattctgaagcatgaatgctttattacccctcacagatataatgtggcgtgggatattttcggtgaatgtttgataatgtggcgttggatttaacttagtatcataatgtgtttctatagattatccctgacaggatctgtctttcctgacagacatagagctacttgataatgtgtcgttggatttaacttagattatcataatgtggagggtatcaccaatgcaggtggggttgaaggtttgatggtttgtgctcttgcatgaaatgtttgatcctccagtctggtggcgttgaataatgatttgtgtgctgttggtgtagatatcggttgttgatggtaggctgttgtatggtaggattttcttgatgatggtaggctgttgtatgtggctatagaagcgtcatcttggacctggctgttggtgaaggatttgtgcgctgttggtgaaagattcattttgtacctggctgttgatgaaggattcattttgtgcttttgttatctgttcgccatttgcccttggaatccaatcccctccaccatgcatgtctcagtctttggttgtgtttatgcttttgcaggcttcagaatttcaggacgagatgaaactgttcttggtggggaggagggaaagttgtttctgtagagcttctagaagtgttgctaagagtctgtttttgattaatgaaatggctggaagtctgtttgtgctcaatagagtgtttcttctgtgaaataaaactggtctatgagatggtgtggcgagctctttgctttgctctctgcaattcagttgtatctcatacatgctgtcttctctgaaataaaacttttcgagtgaactgg

SEQ ID NO: 55090 - DNA, 1536 bp, Zea Mays
gccgctacctcaccatcgccatctccgccacaatcgccgccacgggcgtgagcttgctgacggtggacacgacggtgccgagcatgcgtccgccggcgtgcctggacgcccgcgggccgcgcgcgcacgagtgcgtgccggcgcgcggcgggcagctggcgctgctgtacgcggcgctgtacacggtggcggcgggggccggcgggctcaaggcgaacgtgtccgggttcgggtcggaccagttcgacgggcgcgacccgcgggaggagcgcgccatggtgttcttcttcaaccgcttctacttctgcgtcagcctggggtcgctgttcgcggtcaccgtgctggtgtacgtgcaggacaacgtggggcggggctggggctacggcgtctccgcagtcgccatggcgctcgccgtcgccgtgctcgtggccggcacgccccggtacaggtaccgccgcccgcagggcagcccgctgacggcggtcggccgggtgctcgccgcggcgtggaggaagcgccggctgccgctgcccgccgacgccgccgagctccacgggttcgccgcggccaaggtcgcacacactgacaggctcaggtggcttgacaaggcggcgatcgtggaggccgagccggcggggaagcagcgggcgagcgcggcggcggcgtcgacggtgacggaggtggaggaggtgaagatggtggcgaagctgctgcccatctggtccacgtgcatcctcttctggacggtctactcccagatgaccaccttctcggtggagcaggccacgcgcatggaccgccacctgcgcccgggctccggcgccggcggcttcgccgtcccggcgggctccttctccgtcttcctattcctctccatcctgctcttcacctcgctcaacgagcgcctcctcgtgccgctggccgcccgcctcacgggccgcccgcaggggctcacctcgctgcagcgcgtcggggccgggctcgcgctctccgtcgccgccatggccgtctccgcgctcgtcgagaggaagcggcgcgacgcggccaacgggccgggccacgtcgccgtcagcgccttctggctcgtcccgcagtacttcctcgtcggcgccggcgaggccttcgcctacgtgggccagctggagttcttcatccgcgaggcgcccgagcggatgaagtccatgagcaccggcctcttcctcgtcacgctctccatgggcttcttcctcagcagcttgctcgtcttcgccgtcgacgccgccaccgcgggcacgtggatccggaacaacctcgaccgcggcaggctcgacctcttctactggatgctggccctgctcggcgtcgccaacttcgccgtcttcgtcgtcttcgccaggcggcaccagtacaaggccaccagcttgccggcgtcggtggcgcccgacggcaccgggcacaaggagatggacgacttcgtcgcagtcacggaggccgtggaaggagtggacgtgtagggcgcgcatgtcaggctcacacttcatcggccggcggtggcgg

SEQ ID NO: 55091 - DNA, 810 bp, Zea Mays
aacagccgaggcagcccagccggccagcccagcggcacagtgcccatgcggcccaaccggccatatagaaaggctaggcggttagagttaggaaaccctaaccgcccaccacatcgaccagcgcgcggcggcgcgggagcagcctaggcgcggccatggcggtcggactagcgcctgcgcggcggtcccggcccaacggcgcgagtgcgggctccagcggcggtgcgcggggcggttgcccggccacgggacgggcgctcaggcggccatggtggcacgcaggcacgacatccccggcggatcgggtgtgctgccctcggccagcgcgggtgcgcggcccccagcgcgcgactggatctccgggcggcgcgggcgcgggcgagtccccatcggcggcgtgggtgtgcgtcccccggcgcgcacgttcagcctcggtggcgtggccccgtcaggccatctctgcgtggtccagtagtcggcaacgcgaagtagcgctgtcacgcggcctctagcgcaggcgtgcatccaggcggccgcgcccagcacgtcctcggccacagccgttcatcacagaaacgagcacccgcacgttgtgaccgtgaccacatgcatgcactgtcatttcttgcacccatcgtcgagaatggcaacaagaataaaattaaacaaagatgccatagcaacgcaagaattcttactgttcttttgtgttgtgattgaaaaacccaatggtcaataacctgtgagcactgggagcatcaagtttctgaaaaattctttcgctaagagtaacttctttctccttttttc

SEQ ID NO: 55092 - DNA, 297 bp, Zea Mays
atggcgcaggaagacgtgacgacagcagcgacggagggtgtcgtctcgccctcgatggtggaggagctggagagaaaggcggcggaggccgaggcgcggctgcgggagaaggaggagaacgccgcgctgaagcgacagatcgagagctaccatgttaggtggctggagcatgagatcagggccaaggccctgacggtcgcccgtctcacgccggtggcggcagatcgagagctaccattcttggcgagggatcctgctaggatgcggtatgtggttgggaaggggagcacgggctga

SEQ ID NO: 55093 - DNA, 1328 bp, Zea Mays
aatgtttctgcacggtatcgggagtccaatgctgtgtaatggtggtcccggattccaggattattccaatgctaatgttgtgcacagaagcggccctagacatttaagattggtgggttgcaatgaggcttatacatgggcagggacatcagagagctaataatgacacagaagaggcaaggaagaagataagaaaattcaaggaatcagcttggaaatgtgtttatttcctgtctggagagcttttatctttgtctgtcacatataatgagccttggttcaccaataccagatatttttgggtaggaccaggagaacaggtctggcctgaccaaaagataaaattgaaacttaaggctgtatatatgtatgctgctggattctacacatattccatatttgcacttatgttttgggaaacaaggcgttcagactttggagtgtcaatgtcacatcatgttgctactgttgttctgattgttctatcttacgtgttcagatttgctagagttggctctatagtattggcaattcatgatgcaagtgacgttttcctggaagtagggaagatgtccaagtacagccattgtgattggcttgccaatgtttcgtttctgttttttgttatttcatgggttcttctccgtctcacatattttccgttctggattctgagaagtacaagctatgaggtcttgttgactttggacaaaaagaagcacaactttgatggtcctatatactattatgtgttcaattcccttctattttcactacttgttctccacatatattggtgggttttaatatatcggatgcttgtgagacaaatcaagacaagaaatgttggagatgatgttcgatctgattctgaaggagaagacgaccatgaagattgattgggggcatcatcttactttgtgtgttataacggtgcttatacattcttttgctggattccaacagattatgagaggacgagcattgttcctcacgagattcaccgaagccgggctatgggttagttgtgtcttggctgccaatttgtgctgtactaagtatgcattagaaacaacgctgcaatgcattagaaaaaaagctggaactggatgtcgaatataacattcttttcagtgttcacacaaagtgcagcggtaaatgtagcaccaatttagcattccggaaacaaaaggaccggttgtaaatcaaagcctttctgccgacataccatgtacattatgtttgccaggatgacaccgcttggagttttgtgaacggtagcgctggccgccggtgaaacgcttctcttgagctcctgttgttccata

SEQ ID NO: 55094 - DNA, 1980 bp, Zea Mays
atgatggtcctcacctcagttgccaccacctcgttcgccattctacttcttttctctctcccctcatgcctccacctccgcgccaccccattctcggcagagggcgtaggagcatgcgcctcctccccgtattcgttcgacaccagccctgacaccgactcgcgcagtggctattgcacgtccacgaggacgtttcacatcatgcgcgcaccatcgttttcgccgtcgtcggacgtcccgttcgtcttcccggccttcgccacgttcttcctccccaacctgctgcccccacccacggtcgcaaccgcgagccgaccgacgctcgtcgacgcagggaaagtgaaaaatcgctttcgcacaagtcgcggaacagaggcaagcgctgtgccacacagcgggagtcctccccgactccccgagagatttgctgcccagagccttcgaatcgggttcaatcccgtcgatctttctgcccgccgccgccacgggactccagaagttgccttcgattcggccggggccgtggaagcggggatggggctcggagaggcggcggggcggctcctggcggccgtggactgggagcgcgaggcctaccctgcgtacgacgacttcctcgcgctccccgccttcgttctcttcttccctaccgtccgcttcctcctcgaccgcttcgtcttcaagggacatcagagagctaataatgacacagaagaggcaaggaagaagataagaaaattcaaggaatcagcttggaaatgtgtttatttcctgtctggagagcttttatctttgtctgtcacatataatgagccttggttcaccaataccagatatttttgggtaggaccaggagaacaggtctggcctgaccaaaagataaaattgaaacttaaggctgtatatatgtatgctgctggattctacacatattccatatttgcacttatgttttgggaaacaaggcgttcagactttggagtgtcaatgtcacatcatgttgctactgttgttctgattgttctatcttacgtgttcagatttgctagagttggctctatagtattggcaattcatgatgcaagtgacgttttcctggaagtagggaagatgtccaagtacagccattgtgattggcttgccaatgtttcgtttctgttttttgttatttcatgggttcttctccgtctcacatattttccgttctggattctgagaagtacaagctatgaggtcttgttgactttggacaaaaagaagcacaactttgatggtcctatatactattatgtgttcaattcccttctattttcactacttgttctccacatatattggtgggttttaatatatcggatgcttgtgagacaaatcaagacaagaaatgttggagatgatgttcgatctgattctgaaggagaagacgaccatgaagattgattgggggcatcatcttactttgtgtgttataacggtgcttatacattcttttgctggattccaacagattatgagaggacgagcattgttcctcacgagattcaccgaagccgggctatgggttagttgtgtcttggctgccaatttgtgctgtactaagtatgcattagaaacaacgctgcaatgcattagaaaaaaagctggaactggatgtcgaatataacattcttttcagtgttcacacaaagtgcagcggtaaatgtagcaccaatttaggggccgttcgtctctttcggaatggaggcatggaacaattcctagccggttaagttttgatcagctgaaatgattcctgatctattcctggacaaacgaacaaggccttagcattccggaaacaaaaggaccggttgtaaatcaaagcctttctgccgacataccatgtacattatgtttgccaggatgacaccgcttggagttttgtgaacggtagcgctggccgccggtgaaacgcttctcttgagctcctgttgttccata

SEQ ID NO: 55095 - DNA, 2009 bp, Zea Mays
cccagcgacaggcaccatctgatgcatgcattgaagttcccttggactgtgccagtttgcttggtggaaactggaattggcgcgcatctcattccagtgcccggccagttgtgtgattgatgcgtctgttgcagttcttctacgtaaactttcgtacagatacagtgcaggacaacaccaatttgatgctttctgaaactagacaatacaacctgatggtaaaatgatacagagttatgacacggaaaatggtagaagacaagagttcatcacaagacacggtacagaaaagtgggcatgctgtacttgggaatgtttcttatgacaaggatgttgtggagataaaactggcagacgctattgattccgataactacgtcggtaattttgtcaaggatgtctgtgtcgatgacggagcactgcttcatcggacggcatcagaagaaaaaccagtagacagaaggtcatccctagatctcagttgccaaatgatcggtgcagatagtgacataagctactacgggaaggaagatcattctagaacatctgcgcacgaactaaaaccagaagcagttgcacttgcacctctttgtaacatcggtgcagatagtggcagagagtatgatcttgaagatcggaccggtactggttccatcgcaggcagtcctggtgagaagaagataagtttgcaagagctgcttctccttgaaagtgcagaagagtcccgaaatacaggcgcagtaaactccgagagcagtgaaaagcataaatgtcctctgaatgaagaagaagctgcacagacttccaaggacggcgatcctgacgctgagactgttttggccaacacctttgagcatattagtgatggcatatcaagtaaggagaaaggcagtggttgcccagcgacgatggctagagaccaggttgatacagctacggcactagatgtgcgagagccacagaaacttgatcggtacaacccttccgttgatcgtcggtcacgagagtacacatcggtgcctgagtgctctataccaggaatcacagatgctgcctcctccacgggttccatctgctcttttcacaacgcgacgagcagcaccgcaaccgcaggcttgggtgaaggtgaaacacttgaaccaggggcggatactctcagcgcaggcagctcagacatcggttcatctgaaaagagccacgacaaccacagcggaagtatgtttagcaagccaatcgctggtgcatatgggaatgggaagaagcaagaaaaacatggtcagatggatgaggagcacggcataggcacagcagacgacgcagccgccagtacgagttctgcttctaccctcgcgcaggatggctctgcgcctgcggtccaagaaaccgtgcctggtagtagtagtagtagttcgagaccggcagctcgcgccggtgacgacccggacctctctggtcccagtataatgtcaggcccggtgtcgatgtcgggtcacatagcatattctggcaacgtctctctccggtcagatagcagcacgactagcacccagtcctttgcatttccagtgttgcagagggagtggaccagcagccccgtcaggatggcgaaggcagagcgcaggcgcagcggtggacggcatcgcgtctggaggaaagggatcatctgctgtaaattctgatcgaccatggcgggcggccctgccatcttatttgaaatccagccacctcctttcttgacacctccttcctagtggcttgaccgttgagtgacaaggtgtgtatagctgtagcgtagtgacggtttttttgttttgttttgttttgtttttgtttcctccgagaatgtgcttaagtgcccacgtttttcatttgctattgttataaggcagtagagtagtagtgatcacgcttggcagaggtgattagttttgtacatccttttggtggatttaaattaaattagatgcagcgaaaattcgttcccctggtggatcgatgcctgttttttt

SEQ ID NO: 55096 - DNA, 1983 bp, Zea Mays
ctcctggtcgttgggctgcctgtgatcggcttatcccctcctcatcccattctcaccgagcttctgccaatctgcgttcgcggcggcgtttcttttggcctcgcaagcggcggaggaggagagaattccggggttttatcgcaaggacaacaccaatttgatgctttctgaaactagacaatacaacctgatggtaaaatgatacagagttatgacacggaaaatggtagaagacaagagttcatcacaagacacggtacagaaaagtgggcatgctgtacttgggaatgtttcttatgacaaggatgttgtggagataaaactggcagacgctattgattccgataactacgtcggtaattttgtcaaggatgtctgtgtcgatgacggagcactgcttcatcggacggcatcagaagaaaaaccagtagacagaaggtcatccctagatctcagttgccaaatgatcggtgcagatagtgacataagctactacgggaaggaagatcattctagaacatctgcgcacgaactaaaaccagaagcagttgcacttgcacctctttgtaacatcggtgcagatagtggcagagagtatgatcttgaagatcggaccggtactggttccatcgcaggcagtcctggtgagaagaagataagtttgcaagagctgcttctccttgaaagtgcagaagagtcccgaaatacaggcgcagtaaactccgagagcagtgaaaagcataaatgtcctctgaatgaagaagaagctgcacagacttccaaggacggcgatcctgacgctgagactgttttggccaacacctttgagcatattagtgatggcatatcaagtaaggagaaaggcagtggttgcccagcgacgatggctagagaccaggttgatacagctacggcactagatgtgcgagagccacagaaacttgatcggtacaacccttccgttgatcgtcggtcacgagagtacacatcggtgcctgagtgctctataccaggaatcacagatgctgcctcctccacgggttccatctgctcttttcacaacgcgacgagcagcaccgcaaccgcaggcttgggtgaaggtgaaacacttgaaccaggggcggatactctcagcgcaggcagctcagacatcggttcatctgaaaagagccacgacaaccacagcggaagtatgtttagcaagccaatcgctggtgcatatgggaatgggaagaagcaagaaaaacatggtcagatggatgaggagcacggcataggcacagcagacgacgcagccgccagtacgagttctgcttctaccctcgcgcaggatggctctgcgcctgcggtccaagaaaccgtgcctggtagtagtagtagtagttcgagaccggcagctcgcgccggtgacgacccggacctctctggtcccagtataatgtcaggcccggtgtcgatgtcgggtcacatagcatattctggcaacgtctctctccggtcagatagcagcacgactagcacccagtcctttgcatttccaggttgcagagggagtggaccagcagccccgtcaggatggcgaaggcagagcgcaggcgcagcggtggacggcatcgcgtctggaggaaagggatcatctgctgtaaattctgatcgaccatggcgggcggccctgccatcttatttgaaatccagccacctcctttcttgacacctccttcctagtggcttgaccgttgagtgacaaggtgtgtatagctgtagcgtagtgacggtttttttgttttgttttgttttgtttttgtttcctccgagaatgtgcttaagtgcccacgtttttcatttgctattgttataaggcagtagagtagtagtgatcacgcttggcagaggtgattagttttgtacatccttttggtggatttaaattaaattagatgcagcgaaaattcgttcccctggtggatcgatgcctgttttttt

SEQ ID NO: 55097 - DNA, 2071 bp, Zea Mays
ctgaattctcctggtcgttgggctgcctgtgatcggcttatcccctcctcatcccattctcaccgagcttctgccaatctgcgttcgcggcggcgtttcttttggcctcgcaagcggcggaggaggagagaattccggggttttatcgcaagaaggatcataagcaatgctagatgtgcgactctatctgaactctgaagttaatgaaatctccattacttcagatctgaaggacaacaccaatttgatgctttctgaaactagacaatacaacctgatggtaaaatgatacagagttatgacacggaaaatggtagaagacaagagttcatcacaagacacggtacagaaaagtgggcatgctgtacttgggaatgtttcttatgacaaggatgttgtggagataaaactggcagacgctattgattccgataactacgtcggtaattttgtcaaggatgtctgtgtcgatgacggagcactgcttcatcggacggcatcagaagaaaaaccagtagacagaaggtcatccctagatctcagttgccaaatgatcggtgcagatagtgacataagctactacgggaaggaagatcattctagaacatctgcgcacgaactaaaaccagaagcagttgcacttgcacctctttgtaacatcggtgcagatagtggcagagagtatgatcttgaagatcggaccggtactggttccatcgcaggcagtcctggtgagaagaagataagtttgcaagagctgcttctccttgaaagtgcagaagagtcccgaaatacaggcgcagtaaactccgagagcagtgaaaagcataaatgtcctctgaatgaagaagaagctgcacagacttccaaggacggcgatcctgacgctgagactgttttggccaacacctttgagcatattagtgatggcatatcaagtaaggagaaaggcagtggttgcccagcgacgatggctagagaccaggttgatacagctacggcactagatgtgcgagagccacagaaacttgatcggtacaacccttccgttgatcgtcggtcacgagagtacacatcggtgcctgagtgctctataccaggaatcacagatgctgcctcctccacgggttccatctgctcttttcacaacgcgacgagcagcaccgcaaccgcaggcttgggtgaaggtgaaacacttgaaccaggggcggatactctcagcgcaggcagctcagacatcggttcatctgaaaagagccacgacaaccacagcggaagtatgtttagcaagccaatcgctggtgcatatgggaatgggaagaagcaagaaaaacatggtcagatggatgaggagcacggcataggcacagcagacgacgcagccgccagtacgagttctgcttctaccctcgcgcaggatggctctgcgcctgcggtccaagaaaccgtgcctggtagtagtagtagtagttcgagaccggcagctcgcgccggtgacgacccggacctctctggtcccagtataatgtcaggcccggtgtcgatgtcgggtcacatagcatattctggcaacgtctctctccggtcagatagcagcacgactagcacccagtcctttgcatttccagtgttgcagagggagtggaccagcagccccgtcaggatggcgaaggcagagcgcaggcgcagcggtggacggcatcgcgtctggaggaaagggatcatctgctgtaaattctgatcgaccatggcgggcggccctgccatcttatttgaaatccagccacctcctttcttgacacctccttcctagtggcttgaccgttgagtgacaaggtgtgtatagctgtagcgtagtgacggtttttttgttttgttttgttttgtttttgtttcctccgagaatgtgcttaagtgcccacgtttttcatttgctattgttataaggcagtagagtagtagtgatcacgcttggcagaggtgattagttttgtacatccttttggtggatttaaattaaattagatgcagcgaaaattcgttcccctggtggatcgatgcctgttttttt

SEQ ID NO: 55098 - DNA, 2050 bp, Zea Mays
cttttcccagctctgaattctcctggtcgttgggctgcctgtgatcggcttatcccctcctcatcccattctcaccgagcttctgccaatctgcgttcgcggcggcgtttcttttggcctcgcaagcggcggaggaggagagaattccggggttttatcgcaaggacaacaccaatttgatgctttctgaaactagacaatacaacctgatggtaaaatgatacagagttatgacacggaaaatggtagaagacaagagttcatcacaagacacggtacagaaaagtgggcatgctgtacttgggaatgtttcttatgacaaggatgttgtggagataaaactggcagacgctattgattccgataactacgtcggtaattttgtcaaggatgtctgtgtcgatgacggagcactgcttcatcggacggcatcagaagaaaaaccagtagacagaaggtcatccctagatctcagttgccaaatgatcggtgcagatagtgacataagctactacgggaaggaagatcattctagaacatctgcgcacgaactaaaaccagaagcagttgcacttgcacctctttgtaacatcggtgcagatagtggcagagagtatgatcttgaagatcggaccggtactggttccatcgcaggcagtcctggtgagaagaagataagtttgcaagagctgcttctccttgaaagtgcagaagagtcccgaaatacaggcgcagtaaactccgagagcagtgaaaagcataaatgtcctctgaatgaagaagaagctgcacagacttccaaggacggcgatcctgacgctgagactgttttggccaacacctttgagcatattagtgatggcatatcaagtaaggagaaaggcagtggttgcccagcgacgatggctagagaccaggttgatacagctacggcactagatgtgcgagagccacagaaacttgatcggtacaacccttccgttgatcgtcggtcacgagagtacacatcggtgcctgagtgctctataccaggaatcacagatgctgcctcctccacgggttccatctgctcttttcacaacgcgacgagcagcaccgcaaccgcaggcttgggtgaaggtgaaacacttgaaccaggggcggatactctcagcgcaggcagctcagacatcggttcatctgaaaagagccacgacaaccacagcggaagtatgtttagcaagccaatcgctggtgcatatgggaatgggaagaagcaagaaaaacatggtcagatggatgaggagcacggcataggcacagcagacgacgcagccgccagtacgagttctgcttctaccctcgcgcaggatggctctgcgcctgcggtccaagaaaccgtgcctggtagtagtagtagtagttcgagaccggcagctcgcgccggtgacgacccggacctctctggtcccagtataatgtcaggcccggtgtcgatgtcgggtcacatagcatattctggcaacgtctctctccggtcagatagcagcacgactagcacccagtcctttgcatttccagtgtaagtcaaacgactctgcaatcgtctgaggggagggccaacaacgagttgcagagggagtggaccagcagccccgtcaggatggcgaaggcagagcgcaggcgcagcggtggacggcatcgcgtctggaggaaagggatcatctgctgtaaattctgatcgaccatggcgggcggccctgccatcttatttgaaatccagccacctcctttcttgacacctccttcctagtggcttgaccgttgagtgacaaggtgtgtatagctgtagcgtagtgacggtttttttgttttgttttgttttgtttttgtttcctccgagaatgtgcttaagtgcccacgtttttcatttgctattgttataaggcagtagagtagtagtgatcacgcttggcagaggtgattagttttgtacatccttttggtggatttaaattaaattagatgcagcgaaaattcgttcccctggtggatcgatgcctgttttttt

SEQ ID NO: 55099 - DNA, 2024 bp, Zea Mays
aacggcaaagggcaaagtgggaaacaatcaagttccacaaaatcgcatctcatctgcttcgactccaccgaggactcccttctttcctcccactcccatctgctctcctcgccgccacctgcgccgtcagagcacggagcagtccgcgaccacgctttcgctgccgctctccgacaggcgacggagccgcagctccagtcgcagtcggctcccctgaattcgggctcgccaaataccctccaatcgtctgcgtccgtcgtccgggacttccggtgcaactgaatccggcaccacctgtgcggcctgtcatggcacttggaagaggagggaggaaggactcaagaggttaaggtacggtatttatagatttggctgaagaaactggttgttgctattatgaagactaagacgagtaggagcttacagaagtctgggagaggtaaccatgtccaaggagaagggccaaactgggttcttgttgctggcggggttttgcttagcacgctttcagtcaaggttgtgtgcaaactaaagcagttgttagacgggaagcagcaaaataatacttccgaagctaaaggaaggcctgaagcatgcaagctgcattcagatctctaccggttcagtgaccaaactggctgctactactggcttgcaaatggtggagtggaagtcaagcaaacacctgcaagtcctgtacccaaatcagttgaatcctcacttccacttgtcaagatacccacaccagaatcaagcaaagagaacagcggtgttatgtggatatcctcacctgatcggcttgaagatcctcgaaggccatttcagtactctaacagttctggctctccctgtgtttcagaatcaggatctgacatttatagcaaaagagaggtcatacagaagctaagacagcacctcaagaaacgtgatgagatgatcatggagatgcaaactcagattgctgatcttaagaactctcttaacattcaggtgacacagtccagcaatctgcagtctcaattggatgctgccaatcgtgatctgtttgaatctgaacgagagattcagcatctaaggaagattattgcagatcattgtgtcacagaagcactctctcatgataaacctttgcaagctgcgcattggcagccagatgccgcaaatgggcattctaatggctatggtgatggttgtgttgatgatgctgacctgcattgtattagcatcgagaagaggaaggtagaagtagagagggtggagatgctcaagaaagaggtggttgaactgaaggaagtcattgagggaaaggactttgtgcttcagagctacaaggaacagaaggtggaactcttctcaaagatcagggagttgcaggaaaagctctcagcacaagtgccaatcatcttgtaggatctatctgtgatactttttagaagattgaatctaagcataatgttgccatgtcccatgagcagcagagggggtcccgcttcagtgaagattgcagaaggtcttggcatttggcaatcgtcacgcatgccaaacaccatgctaggatctttgtggaatgcttctcttttcctttgaggggagctttgcataatgttaggttgatttgtttctttcttggttgtcataatgttaggttggtttgctttcttccttcttcaatatctagcccttggttgctcaaagtttacaaagggattctttttttcagttgctaggcctcaggtaactcaattgaacttcatactcaagttgctgtacaggttctcagatttcaggagacacagaagtctgtactgtgcctctgcctcctgtttcatgcttttttttttgttaagtgatctttggaatgttaggtccatgacatttctactatgagatttgaagactatggcattgcccttttttgtgattccttctggataaaaagcaacttaggcccggtgatgcagtgtatgacattgcccgttgttcatctgatagttattgggggtgtgtgggcagttgcaaaacat

SEQ ID NO: 55100 - DNA, 823 bp, Zea Mays
cgtgtgtgcgtgtgttgtaaatggggtcttggaactgatttcttctgaagctacctccactgagcgaactctaattgtcccatacatcacaagatcgtcaagctatcatcatggaacggaacatgcaacaaaggcatcgactgtacttcatggtgctgaaataggggcaacaactgactatactcacctgttggttggtgggaccactaaacctcctacatccttgcaaatacgtagtgaaccaatattatgtttgctggaaatggtgcgtgtgttgaaggtgcctacagttcttcttgtcacttctggtggacagcagcaaggcaagagctctacagtttctgatcttgaggtactgcaatgcttaggagagcacttggccaagcacacggctttggaattttccaaaggaactgttctcaagagagggatcgaaaaatcacgaattgatcaggaaccctggcgcgagctgtatgggtgacggtgccctcatacagtttggtattagcttaattggctatacatgtttgactcggatgaatgatggtgttttatggagctggaatcacgaaggatctggtccgtcgaaaccactatatataatgtggttcctttcgcctgggtaaatcaactcatcagcaagatatcggatgtcttagaacttgtagacgctttgcagttaaacattaaacgaaatacatttacacttctaacctcttggccagtagtattcaagggttaggtttattgcctgactcgctggaatgtttatagccaaagctccaattttgctttcgaaggatatatatacatatattctcaa

SEQ ID NO: 55101 - DNA, 305 bp, Zea Mays
ctcttactgcacaggtccgggttgcctaatctttcaccggacaatgctctttgcagcttagaagactggtggagtagggctgtggagaaggttcccgagatctccaatcaggcttcaattctctagtaattcttggcgcttggagcctttggcgtcatcgcaacgactgtgtgttcaatggaaggtcgccgagcctagcaagtgttctcaccctcgctggtgatgagcttaggatgtggtgtcttgccggagctaaagggttgaacttgctttcagctctagtgtttgtgtttgaccccgggtga

SEQ ID NO: 55102 - DNA, 1504 bp, Zea Mays
gtcaatcttcatccatatagagcatctgtttcatctttatgaactttaacatatctcattcataatacccaaaatgtaggttagttcacttagttgtctcaattaccaaaaccatacatgaagcttttatacttgtggatcatgatttccttttgtgcatgctcaacaaaataaagagatcaaacaatcttttagatgaacaaacgtgtatatagctactatacattaatctctcagttacaacgaggaaagtaaatagcagcatcttgaatccacgcgtgtccttgcaaattgcgatgcactggaaaaggaaactactaatgatgatgattcagaattagaaactaaaattaagatgtcaccatgaacttagtacaactattaagaacaaacaagtacaacgtgtccactttcaggaatagcttacgatcatggttttaaccatgctttgaagctgaccccaacaggcttcaggaaatgtaaaaaatcgcttccattgcagacaatagtcagttcttccaacaggctttaggtgcctaggtaggtttgacacaaacagaacccgcttgattggttcgccaatcgccccgctctcacagccaggccagcgcgaggcttggccagatggatactattgtttcttatgtatggacggatgcagacaagtggctttaaaatggtctgttttgcatctattcctgcagcttatgtctctcgcgtgcatgcaacgtgctcatatagagtcaacacacgtggtaatgcagagcgagacgatgcgggtaaccaatcacacggaacatgaactcagtgtagctagtaaactggctactactatgaatgggctagtcttataaacttcaaactttatacaaactgaactagcattccacattttttagagtgagtacagtagagtaacatgtagctaacacgctaaactagcatacattcagcaaatgaaaatgacatatttagacatgccatttctgtgagttgataatcttattccacatttcttgtgctatcatgttccaataccgttgccttgctactggatataagctaacattcatttgaaaaagacatgccagataatcttttgacacctgggtataatggtcatcatggaccacagagcaacaaagatgatcagctaaatggtgatatcaaaggcaatatcaactagatgaaagctaacatttgactcgacgtttatttgaaaattaaaaaaaatcatataatgacatggtatcagctaagattcatttgaaaatgatgatgtatctttcaacaaaatgcacgctgtagtaaattaataaggtacagatatgaaacaagaggtgatgaacttggtagaacagatgtcgatgaacccaaataacagaaaaatctaaccatcatctatcgacgaacactaggcgcgattacccaaataacaagaggtaatgtcagataaccttaccatcagttgctaaagaaaactttcatcgattttaccattttc

SEQ ID NO: 55103 - DNA, 1733 bp, Zea Mays
gaaaccttcgcgcggtgatggagcacgcgcacgcgacctcgacacgcacgcagcagccagcaggtgaccgccgtcacgcgaccgcttcccacactcccttccccaccagccgaaaccgaggctgacgctgcgcgagccaaccggcggtgatgcaggcggcagtcggccaccgcggcgccaaccttggctccccgtcactctcgcgcttccggtatggcttccgcctccccggccggtcccgcctcttctctgagggcgtggcggcggcgtcactccgcgtcggctctctgccccagccacggacccatggcagcggcggtttcgcgcacctcggggccatgggtggggaggcgccgaggctgccgcacgccctcaggagaatgcttatcgatcatcagttgtgttgcagtgtggatgctgacctggcattatctctgcacttgaaatttgccactgcagaaaatggcatgtcccaaccttctgaaagctgctgtactttcaaccatgacattgctttctgtacctcttgaggcgtcagcggagatgtgccagccacctagttctttcgccaatatgccaatttttattgttgtagcactaataggagctgctgttggcggattattagcacgccaaagaaaggcggaattgaagcggctcaataatcaacttcgccagatcaatgcagcacttagaaggcaggcacagattgagtcatttgcgcctggccttacttatgcgccagttgggagaacaaatgaaactgatgttattgttgacccaaggaagcagcagttggtcacaaacctgagaaatgggaagaattacatgaggaatcaagatcttgataaggctatagtggagttcagaacagctctggagcttgcagagagcataggtgatcgttttgaagaaaagaaagctgcccgaggactaggcgcatcgctgcagaggctcgggaagtaccgagaagcaatgagacagtacagcaaggttctggagctgtccaaggagacaggtgaagattccggctgcaccgaggcctacggtgccatagcggactgctacaccgagctgggcgacctggagcgagcggcgaaggtgtatgacaagtacatatcgaggctgcagcccggcgagtaagatgaaaacaacgagaagatggtggcgaggagcaaggacgccgccgccggcgtgatgaagcagcaggaacggcgcggcggcggatcagacgagtacggccacgcctgcgagtacggctgctgccaccacgtattccatggaggatgccagaagtgctgcccgccgccacccggcgctgcaggtggccgaccgcaggaggttaagaactagtagacgtctacacccgccggccggccgctgccatgcatgcatgacgccgggagtggaccggagctgtaccgtacgtaccactgcgccgcgctcgcgcgcgtgccaacaacgtacgtggcgagaataatcatcatctcctttaattttgttaaataacacgtacggctcggctgtagctaggtacgtaacagcttcccttaatatataccgtcgaccgacttgcttttgtatgtgtataacgggggcgtacgtgcgtgttatatacgtatatataggcgtacatgcgtacgtctttcgcgctgctggagtgctggttcgcacgagtatatatacacaacatgcatgcatgatacatgccgtagcaccttatcccaattaat

SEQ ID NO: 55104 - DNA, 1672 bp, Zea Mays
gaaaccttcgcgcggtgatggagcacgcgcacgcgacctcgacacgcacgcagcagccagcaggtgaccgccgtcacgcgaccgcttcccacactcccttccccaccagccgaaaccgaggctgacgctgcgcgagccaaccggcggtgatgcaggcggcagtcggccaccgcggcgccaaccttggctccccgtcactctcgcgcttccggtatggcttccgcctccccggccggtcccgcctcttctctgagggcgtggcggcggcgtcactccgcgtcggctctctgccccagccacggacccatggcagcggcggtttcgcgcacctcggggccatgggtggggaggcgccgaggctgccgcacgccctcaggagaatgcttatcgatcatcagaaaatggcatgtcccaaccttctgaaagctgctgtactttcaaccatgacattgctttctgtacctcttgaggcgtcagcggagatgtgccagccacctagttctttcgccaatatgccaatttttattgttgtagcactaataggagctgctgttggcggattattagcacgccaaagaaaggcggaattgaagcggctcaataatcaacttcgccagatcaatgcagcacttagaaggcaggcacagattgagtcatttgcgcctggccttacttatgcgccagttgggagaacaaatgaaactgatgttattgttgacccaaggaagcagcagttggtcacaaacctgagaaatgggaagaattacatgaggaatcaagatcttgataaggctatagtggagttcagaacagctctggagcttgcagagagcataggtgatcgttttgaagaaaagaaagctgcccgaggactaggcgcatcgctgcagaggctcgggaagtaccgagaagcaatgagacagtacagcaaggttctggagctgtccaaggagacaggtgaagattccggctgcaccgaggcctacggtgccatagcggactgctacaccgagctgggcgacctggagcgagcggcgaaggtgtatgacaagtacatatcgaggctgcagcccggcgagtaagatgaaaacaacgagaagatggtggcgaggagcaaggacgccgccgccggcgtgatgaagcagcaggaacggcgcggcggcggatcagacgagtacggccacgcctgcgagtacggctgctgccaccacgtattccatggaggatgccagaagtgctgcccgccgccacccggcgctgcaggtggccgaccgcaggaggttaagaactagtagacgtctacacccgccggccggccgctgccatgcatgcatgacgccgggagtggaccggagctgtaccgtacgtaccactgcgccgcgctcgcgcgcgtgccaacaacgtacgtggcgagaataatcatcatctcctttaattttgttaaataacacgtacggctcggctgtagctaggtacgtaacagcttcccttaatatataccgtcgaccgacttgcttttgtatgtgtataacgggggcgtacgtgcgtgttatatacgtatatataggcgtacatgcgtacgtctttcgcgctgctggagtgctggttcgcacgagtatatatacacaacatgcatgcatgatacatgccgtagcaccttatcccaattaat

SEQ ID NO: 55105 - DNA, 2321 bp, Zea Mays
ccaaaaccgtgtatatagcccacagggccacaggcccagtcgaaaccttcgcgcggtgatggagcacgcgcacgcgacctcgacacgcacgcagcagccagcaggtgaccgccgtcacgcgaccgcttcccacactcccttccccaccagccgaaaccgaggctgacgctgcgcgagccaaccggcggtgatgcaggcggcagtcggccaccgcggcgccaaccttggctccccgtcactctcgcgcttccggtatggcttccgcctccccggccggtcccgcctcttctctgagggcgtggcggcggcgtcactccgcgtcggctctctgccccagccacggacccatggcagcggcggtttcgcgcacctcggggccatgggtggggaggcgccgaggctgccgcacgccctcaggagaatgcttatcgatcatcaggtgcgttcgattacgctttcgcttgctgcagtgagagttgaatcgatcgaaatgtgaaccaaatacttgaaatttcacgtgatgtggggtactgtggcaatgcataagcccacatggagcactgagtcttctaggtgacacacacacactgacattgcaactgaataccctgttgatgtggctatggctacggtgtacatagagtcatagattagatagcttattcaatcagaggcacttacattttgcttgttcctcggcagtttgtacgatcattttgcccaccaactgtaactagtttgtgaatcgcaaccagacagaaatatgggcttacataattgcatctgaagtaagcagaatttctgatcagcgtgaacaaagaggcttgtcgcaggattctatgcggcggtttagggcacagtgagcataatctacaaattttgcatacatttacaaaactttgagcggtttagggcatttacattccactagtggagtgtattcttgcttgtctttgctttgacatgctgttctgctctccgttcagttgtgttgcagtgtggatgctgacctggcattatctctgcacttgaaatttgccactgcagaaaatggcatgtcccaaccttctgaaagctgctgtactttcaaccatgacattgctttctgtacctcttgaggcgtcagcggagatgtgccagccacctagttctttcgccaatatgccaatttttattgttgtagcactaataggagctgctgttggcggattattagcacgccaaagaaaggcggaattgaagcggctcaataatcaacttcgccagatcaatgcagcacttagaaggcaggcacagattgagtcatttgcgcctggccttacttatgcgccagttgggagaacaaatgaaactgatgttattgttgacccaaggaagcagcagttggtcacaaacctgagaaatgggaagaattacatgaggaatcaagatcttgataaggctatagtggagttcagaacagctctggagcttgcagagagcataggtgatcgttttgaagaaaagaaagctgcccgaggactaggcgcatcgctgcagaggctcgggaagtaccgagaagcaatgagacagtacagcaaggttctggagctgtccaaggagacaggtgaagattccggctgcaccgaggcctacggtgccatagcggactgctacaccgagctgggcgacctggagcgagcggcgaaggtgtatgacaagtacatatcgaggctgcagcccggcgagtaagatgaaaacaacgagaagatggtggcgaggagcaaggacgccgccgccggcgtgatgaagcagcaggaacggcgcggcggcggatcagacgagtacggccacgcctgcgagtacggctgctgccaccacgtattccatggaggatgccagaagtgctgcccgccgccacccggcgctgcaggtggccgaccgcaggaggttaagaactagtagacgtctacacccgccggccggccgctgccatgcatgcatgacgccgggagtggaccggagctgtaccgtacgtaccactgcgccgcgctcgcgcgcgtgccaacaacgtacgtggcgagaataatcatcatctcctttaattttgttaaataacacgtacggctcggctgtagctaggtacgtaacagcttcccttaatatataccgtcgaccgacttgcttttgtatgtgtataacgggggcgtacgtgcgtgttatatacgtatatataggcgtacatgcgtacgtctttcgcgctgctggagtgctggttcgcacgagtatatatacacaacatgcatgcatgatacatgccgtagcaccttatcccaattaat

SEQ ID NO: 55106 - DNA, 5385 bp, Zea Mays
atgcttctcttgcctactacccattcgcaaatcgcaacctcaaggttcgagaccttgactcgcggacgcgttttctgttcgccgagcgctgcagccgtcgagcgggagtgcgggccgcgttactgcgttagccgccccccgccgtcgcctgcctcagcggatccacgctcggcaggttactgacgccgcccgcctaacttccaccggtctggtggagtggtggggagatctatctgccttggatcgattattctctactacttggtagaagagagtttatccacacaggcagctatgttggaaaagattgggttgccgccgaagccgtccatgcgaggcgccacctgggtggtggacgcatcccactgtcagggttgttctgttcagttctcgttgtttactaggaagcaccattgccaaagatgtgggggcttgttctgcagcagctgcacccagcagaggatggttttacgtggacagggtgattcacctgttagaatttgtgatccttgcaaaaagcttgaggaagaagcacgccatgagttgagatatgggcacaaaaatagagctacaagagctaccacaaaatctgcttcgaaaccagaggatgaaattctaagtgaaattcttggaggtggagagcgtatccaatctctggattctttgcttcctgggagaaccacaagcagtgccagtacctccagacgaacttcttctaacctcagtacggacgcaaaaggagatgaaagcctttctgctgaagcacacaattatgaacttaacaataccgcatctattttcaccccagaggagttgcgccaacatgctgtagaagagaagaaaaggtacaaaactttaaaatcagaaggtaaaccagaggaagcactgcgggctttcaagcatggtaaagaacttgagaagcaagctgcagccctggaattagaattgagaaggactaggagaatggctacaaaagcgactaacatctcttctgctgttggtacttcgatgactgctggttctgatgaggttgaaacaaaaaggtcttcaactgggaaaaagattaagaaagaaaagaatgatcttgcctctgagctcagagatctaggctggtcagatgcagaccttcgtgatgaaacaaaggctgcccctatgagtctggagggagagttgacacagattcttagagaggtggcccctaaaccattggagggcaagagaacaggtggtatcgataaatctcaggttaatgctctgaagaggcaagctttactgctaaagcgggaaggtaggcttgctgaagcaaaggaagagctcaagaaggctaaaattttggaaaaacaacttgaggaacaggagattctaggtgaagcagaaaactcagatgatgatttggctgctattattcggaacatggacgacgataagaatgatgacatatttatagatgattcaaagttcccagctttcaactttgaacaaattatggttgcctctaatgatcttgccactgatggtcactttgacgttacagatgatgacatgaatgacccagatatggctgctgctctaaaatcatttggctggagtgaggaggatgacaaacagttggaaaatctcgaacctgtttcttcaaatcaagaggggctaaaggagcaagtactttctctaaaaagagaggctgttgcaaacagaaggtctggtaatgttgtagaagccatgtcattgcttaaaaaggcaaagctactagagaaggatctcaaaactgaagagccagactcaaaggttccttctctagaaaggcagaaaactacacatgcagaagatgccacttatgcagggacgaatgtccgacctataccaacaccaaaaagtaagcttgcaattcagcgagaactgttggctctgaagaagaaggcactagctttgaggagggaagggaaggtggatgagtctgaggaagagctgagaaagggtagtgttcttgaaaagcagcttgaagagcttgaaaattcttccaaaccacctgtagcaaaggaaaccaggagctttccatctaatcccccgtacaaagttgaacccccaaatatcaatcttgctgatgaggtatatgaacctgaggttacagacaaggatatgcaggatccagcattgctgtcggtgctgaaaaatatgggatgggaagatgctggttcagattctgtggaaacaactgacaaagcatcattttctgcacatgtagttcatcataaatcatcaaaaactaagggccagcttcagaaggaattgcttggtataaaaaggaaggctcttgccctcagaaggggagggaaaaacactgaagctgaggaggaacttgagaaggctaaggtgttggagcagcaacttgcagagatggaagaatcaaataacttgagtgctagtcaaggtgttactactgctggcggggacgaaatattgctagtgcatgcatctgaatctggtacgccagtggttactctgtgtggttctccaagtaaaccgcagattgagacaaccaatcctaatcaaggtgatgtgggagaagaaagtagagctggaaggtctccagccttgtcgcagccagcttttactgatccgttgggatctgaaaaagggtcacattcaccttctgtagtacatgatcgtaatgagcatcagaaaacacaaggagatgatactcttaaagatgagatattacttcataagagaaaagcagttgcctttaagagagaagggaagatggcagaagctagagaagaattgaaactggcaaaacaattagaaaagcaccttgaaggtgctcaacaagacaccatggatggtgtgggtgactccattactcctgctgtggaacagaacagtttggtccaacaacctgctagctccagcaatcacactgacgacataacttctccccctcctgcacaagcgagcaagcggacgcaacctcagaaagcaatgtccagccgggatcgtctcaaaatccagcgtgaatccctggctcataagcgcaacgccctcaagttgcggagagaaggaaagactgcagaagcagatgcagaatttgaactggccaaggagctagagagccaactggaagagtcagacaaccaaagctcgagctccgggggaaagtcaagtgaaccaaacgacacgagcgtcgagaatctccttgatcctcagatcatgtctgccctaagatccattggttggagtgacatggatttatccatgcaatcctctagtgcacaacctctgaaacctgtgcagtcctcaagttctcaacctccgcaaaaagtggaagccaagtcatctgttgccgcgaccagcaaacctcagagcgagagaagtcaacttgaagaacagatcaaggcggagaaactgaaagcgcttaacttgaagcgggaagggaaacaagcagaggccctggaggcccttcgctcggcaaagcgactggagaagaagttgaactcagcttaagccaatcacaccctcccagattgctcttgttcttttgtcaattgttcgttttggttacctgacatcccaagcgttccagctagaacagagaatcatatcgagtcctatggccctgattggcacagcttgtgagctttgagcaccataaacttatgtcctgtttgtgttcgagctatgagcagtccctttcatgtatgtataaataaaatctgatggacggagattattttcacgaattcgtgtatacacaatgttaggggaatgtcaattaagttggaatctgaacatttcatatgttagtcatttgataataatgttttccaagctcacaacgtatgctactgtatttgacattttcacaggattctaatactaatagttcttgtgtccttgcctcgtggtattttattcaactcactttataaaatgggctgttgatctgtactaacggtgatgtaaaaaaatactattacaagaaaaatatttacaaaaagtttgtaccaaaactaaggtggtaaggcctgagctgttatctccacgggctggccaaaaccgtgtatatagcccacagggccacaggcccagtcgaaaccttcgcgcggtgatggagcacgcgcacgcgacctcgacacgcacgcagcagccagcaggtgaccgccgtcacgcgaccgcttcccacactcccttccccaccagccgaaaccgaggctgacgctgcgcgagccaaccggcggtgatgcaggcggcagtcggccaccgcggcgccaaccttggctccccgtcactctcgcgcttccggtatggcttccgcctccccggccggtcccgcctcttctctgagggcgtggcggcggcgtcactccgcgtcggctctctgccccagccacggacccatggcagcggcggtttcgcgcacctcggggccatgggtggggaggcgccgaggctgccgcacgccctcaggagaatgcttatcgatcatcagttgtgttgcagtgtggatgctgacctggcattatctctgcacttgaaatttgccactgcagaaaatggcatgtcccaaccttctgaaagctgctgtactttcaaccatgacattgctttctgtacctcttgaggcgtcagcggagatgtgccagccacctagttctttcgccaatatgccaatttttattgttgtagcactaataggagctgctgttggcggattattagcacgccaaagaaaggcggaattgaagcggctcaataatcaacttcgccagatcaatgcagcacttagaaggcaggcacagattgagtcatttgcgcctggccttacttatgcgccagttgggagaacaaatgaaactgatgttattgttgacccaaggaagcagcagttggtcacaaacctgagaaatgggaagaattacatgaggaatcaagatcttgataaggctatagtggagttcagaacagctctggagcttgcagagagcataggtgatcgttttgaagaaaagaaagctgcccgaggactagaggctcgggaagtaccgagaagcaatgagacagtacagcaaggttctggagctgtccaaggagacaggtgaagattccggctgcaccgaggcctacggtgccatagcggactgctacaccgagctgggcgacctggagcgagcggcgaaggtgtatgacaagtacatatcgaggctgcagcccggcgagtaaggtagatttctttacagacgagacagcgagttccttcccgttcgttgagttttgcgttttgtcggtcttgttaaactcactgcaggtattggattgttttgagaacgattttaatattcgtatataaataactattgatttaatcaaaaaaataaaaataaatcacaa

SEQ ID NO: 55107 - DNA, 2147 bp, Zea Mays
cgcgcccggcctctccttcctccccggttccttcccttgccacacgcgtgcgtgcgtgcgcgcgcgcgggcgcacaaataatcacgaggaccccgcgaggccgcgccaccattattccacttgcctgactcctctccctccctctctctctctctatctctcatttcctcacgcacgtctcgcaactgccgcggcacaccgcgccgcttcttctcctcctcctcctcctcctccttccgagccgagagaaaggctgctgccagagggacgaggacgagcgaggatccttccgagcgatggagcagtacgaggtggtggagcagatcggccggggcgcctacggctccgcctacctcgtcctccacaaggccgagcgcaagaggtacgtcatgaagaagatccgcctctccaagcagaacgacaagttccagcggaccgcttaccaggagatgtccctgatggcaagcctcagcaacccgtacatcgtcgagtacaaggacggatgggtggacgaggggacctccgtctgcatcgtcacaagctactgcgaaggaggggacatggccgagaggatcaagaaggcaaggggcatcctattctcagaagagagggtgtgtcggtggttcacgcaattgctcctcgccctcgactacctgcactgcaaccgtgtgctccaccgtgatctcaagtgttccaacattttattgacaagggataacaatatcagactcgctgactttgggctggcaaaactgctcatggaggaccttgcctcatcggttgtaggaaccccaaactatatgtgcccagaaatactagcagacataccttatggatacaaatccgatatatggtcacttggttgctgtatgtttgagattttagcacaccgacctgcatttaaagctacagacatggcagcattagtcaacaaaataaacagatcttcaatatctccaatgcccccaatatactcatcagcactatcgtgaagagcatgctaaggaaaaatccagaacataggcctactgctggggagctgctgaggcatccacatctgcaaccatatctttctgaatcgtccaactgttcaccgatctatcttccggtgaaacccaccaaaggtaacctggtagacaagcagtcaaagaagccaagcagtggcagaaagcgagctgtcaaagccaatggatccaatggaacattagaaactgcagcagagcacgctgtggaagcaagagacagctccacaaacttctcagatgtatcaactataggtacccaggaagccttgatattgcaaatgccggtggatcctgatgccggaagcaaagaagagcagaacgttgatgttgtaccgtttcagcatgcggcagagaatctgatggcgacaaccgatagacaggtcgatgcgaccatacgtcttaaagccataagaaccagtaacgcaaaagaggcggccccggtcacagttgcagaccaaaagttcaacgaggcgccaataccaaatgaggaactgacaatcggggtagtgcaggaacaaaggaaggacgtgaagccacgctcttaccaggcaggaaaaccagagatgtgtgacacaaccgtaacggaggaatcgtcgcccatcagcacgctaaagctggcgcacacggagagcgcgcccgcggagtgggaccacctgaacatagtccagcagagggccgacgcgctggagtcgctcctggagctctgcgcgaagctcctggagcaggagaggctcgacgagctcgcgggcgttctccggccgttcggcgagggcgccgtgtcgtctagggagacggcgatctggctgaccaagagcctgatgacccccccacccaagttcggagagtccccgacgaagcttttgtaaaacagtgattcgtttgagagtttttgtttttttttcgagtgccattttcgagagtgtacatagcatcaacagaatttgagttcaagattgctgtgcttacctaggcctgagctttatttatcttggatgtatatggtttgcatggcaccgactgttgtgagcgatgactggttatttaccagccgccttgttttatttattgtgctggaaatcatgccgagtccatttctgtttactgagtactagtagtactttc

SEQ ID NO: 55108 - DNA, 2064 bp, Zea Mays
cgcgcccggcctctccttcctccccggttccttcccttgccacacgcgtgcgtgcgtgcgcgcgcgcgggcgcacaaataatcacgaggaccccgcgaggccgcgccaccattattccacttgcctgactcctctccctccctctctctctctctatctctcatttcctcacgcacgtctcgcaactgccgcggcacaccgcgccgcttcttctcctcctcctcctcctcctccttccgagccgagagaaaggctgctgccagagggacgaggacgagcgaggatccttccgagcgatggagcagtacgaggtggtggagcagatcggccggggcgcctacggctccgcctacctcgtcctccacaaggccgagcgcaagaggtacgtcatgaagaagatccgcctctccaagcagaacgacaagttccagcggaccgcttaccaggagatgtccctgatggcaagcctcagcaacccgtacatcgtcgagtacaaggacggatgggtggacgaggggacctccgtctgcatcgtcacaagctactgcgaaggaggggacatggccgagaggatcaagaaggcaaggggcatcctattctcagaagagagggtgtgtcggtggttcacgcaattgctcctcgccctcgactacctgcactgcaaccgtgtgctccaccgtgatctcaaggttgtaggaaccccaaactatatgtgcccagaaatactagcagacataccttatggatacaaatccgatatatggtcacttggttgctgtatgtttgagattttagcacaccgacctgcatttaaagctacagacatggcagcattagtcaacaaaataaacagatcttcaatatctccaatgcccccaatatactcatcagcactgaagcagatcgtgaagagcatgctaaggaaaaatccagaacataggcctactgctggggagctgctgaggcatccacatctgcaaccatatctttctgaatcgtccaactgttcaccgatctatcttccggtgaaacccaccaaaggtaacctggtagacaagcagtcaaagaagccaagcagtggcagaaagcgagctgtcaaagccaatggatccaatggaacattagaaactgcagcagagcacgctgtggaagcaagagacagctccacaaacttctcagatgtatcaactataggtacccaggaagccttgatattgcaaatgccggtggatcctgatgccggaagcaaagaagagcagaacgttgatgttgtaccgtttcagcatgcggcagagaatctgatggcgacaaccgatagacaggtcgatgcgaccatacgtcttaaagccataagaaccagtaacgcaaaagaggcggccccggtcacagttgcagaccaaaagttcaacgaggcgccaataccaaatgaggaactgacaatcggggtagtgcaggaacaaaggaaggacgtgaagccacgctcttaccaggcaggaaaaccagagatgtgtgacacaaccgtaacggaggaatcgtcgcccatcagcacgctaaagctggcgcacacggagagcgcgcccgcggagtgggaccacctgaacatagtccagcagagggccgacgcgctggagtcgctcctggagctctgcgcgaagctcctggagcaggagaggctcgacgagctcgcgggcgttctccggccgttcggcgagggcgccgtgtcgtctagggagacggcgatctggctgaccaagagcctgatgacccccccacccaagttcggagagtccccgacgaagcttttgtaaaacagtgattcgtttgagagtttttgtttttttttcgagtgccattttcgagagtgtacatagcatcaacagaatttgagttcaagattgctgtgcttacctaggcctgagctttatttatcttggatgtatatggtttgcatggcaccgactgttgtgagcgatgactggttatttaccagccgccttgttttatttattgtgctggaaatcatgccgagtccatttctgtttactgagtactagtagtactttc

SEQ ID NO: 55109 - DNA, 2107 bp, Zea Mays
cgcgcccggcctctccttcctccccggttccttcccttgccacacgcgtgcgtgcgtgcgcgcgcgcgggcgcacaaataatcacgaggaccccgcgaggccgcgccaccattattccacttgcctgactcctctccctccctctctctctctctatctctcatttcctcacgcacgtctcgcaactgccgcggcacaccgcgccgcttcttctcctcctcctcctcctcctccttccgagccgagagaaaggctgctgccagagggacgaggacgagcgaggatccttccgagcgatggagcagtacgaggtggtggagcagatcggccggggcgcctacggctccgcctacctcgtcctccacaaggccgagcgcaagaggtacgtcatgaagaagatccgcctctccaagcagaacgacaagttccagcggaccgcttaccaggagatgtccctgatggcaagcctcagcaacccgtacatcgtcgagtacaaggacggatgggtggacgaggggacctccgtctgcatcgtcacaagctactgcgaaggaggggacatggccgagaggatcaagaaggcaaggggcatcctattctcagaagagagggtgtgtcggtggttcacgcaattgctcctcgccctcgactacctgcactgcaaccgtgtgctccaccgtgatctcaagtgttccaacattttattgacaagggataacaatatcagactcggttgtaggaaccccaaactatatgtgcccagaaatactagcagacataccttatggatacaaatccgatatatggtcacttggttgctgtatgtttgagattttagcacaccgacctgcatttaaagctacagacatggcagcattagtcaacaaaataaacagatcttcaatatctccaatgcccccaatatactcatcagcactgaagcagatcgtgaagagcatgctaaggaaaaatccagaacataggcctactgctggggagctgctgaggcatccacatctgcaaccatatctttctgaatcgtccaactgttcaccgatctatcttccggtgaaacccaccaaaggtaacctggtagacaagcagtcaaagaagccaagcagtggcagaaagcgagctgtcaaagccaatggatccaatggaacattagaaactgcagcagagcacgctgtggaagcaagagacagctccacaaacttctcagatgtatcaactataggtacccaggaagccttgatattgcaaatgccggtggatcctgatgccggaagcaaagaagagcagaacgttgatgttgtaccgtttcagcatgcggcagagaatctgatggcgacaaccgatagacaggtcgatgcgaccatacgtcttaaagccataagaaccagtaacgcaaaagaggcggccccggtcacagttgcagaccaaaagttcaacgaggcgccaataccaaatgaggaactgacaatcggggtagtgcaggaacaaaggaaggacgtgaagccacgctcttaccaggcaggaaaaccagagatgtgtgacacaaccgtaacggaggaatcgtcgcccatcagcacgctaaagctggcgcacacggagagcgcgcccgcggagtgggaccacctgaacatagtccagcagagggccgacgcgctggagtcgctcctggagctctgcgcgaagctcctggagcaggagaggctcgacgagctcgcgggcgttctccggccgttcggcgagggcgccgtgtcgtctagggagacggcgatctggctgaccaagagcctgatgacccccccacccaagttcggagagtccccgacgaagcttttgtaaaacagtgattcgtttgagagtttttgtttttttttcgagtgccattttcgagagtgtacatagcatcaacagaatttgagttcaagattgctgtgcttacctaggcctgagctttatttatcttggatgtatatggtttgcatggcaccgactgttgtgagcgatgactggttatttaccagccgccttgttttatttattgtgctggaaatcatgccgagtccatttctgtttactgagtactagtagtactttc

SEQ ID NO: 55110 - DNA, 2653 bp, Zea Mays
ccgggctcaagctcaaccgcgcgccatcattgctgcgcgcccggcctctccttcctccccggttccttcccttgccacacgcgtgcgtgcgtgcgcgcgcgcgggcgcacaaataatcacgaggaccccgcgaggccgcgccaccattattccacttgcctgactcctctccctccctctctctctctctatctctcatttcctcacgcacgtctcgcaactgccgcggcacaccgcgccgcttcttctcctcctcctcctcctcctccttccgagccgagagaaaggctgctgccagagggacgaggacgagcgaggatccttccgagcgatggagcagtacgaggtggtggagcagatcggccggggcgcctacggctccgcctacctcgtcctccacaaggccgagcgcaagaggtacgtcatgaagaagatccgcctctccaagcagaacgacaagttccagcggaccgcttaccaggagatgtccctgatggcaagcctcagcaacccgtacatcgtcgagtacaaggacggatgggtggacgaggggacctccgtctgcatcgtcacaagctactgcgaaggaggggacatggccgagaggatcaagaaggcaaggggcatcctattctcagaagagagggtgtgtcggtggttcacgcaattgctcctcgccctcgactacctgcactgcaaccgtgtgctccaccgtgatctcaagtgttccaacattttattgacaagggataacaatatcagactcggtaagatgtgaagtgctgaatcactgaactgtctttgtcagacaatgagtatcttgacacgaatgaataataattcaccatttctttgacagctgactttgggctggcaaaactgctcatggaggaccttgcctcatcggtaggaataggatccacacttttcgttggagcatttttaatgtaaatcagtatataataatacaggcaaaaaacacatttccgggttggaattaggaaactggacacaactcttccactagtcatgttttcccacaccgaatcacggcacgatgttatcaccagtatgtctgtatgacatttgatattcagtgacatttttacagctcatgttaaccaaaaaagagtagcatgaaagtaaatgccatttcaaaaattagttggcagaatttctgcatatccccactatatgctaacgtccaagagcgtgttagtaatgttttgacataaaacccataattcactgataattttaacatttaccacatttcaggttgtaggaaccccaaactatatgtgcccagaaatactagcagacataccttatggatacaaatccgatatatggtcacttggttgctgtatgtttgagattttagcacaccgacctgcatttaaagctacagacatggcagcattagtcaacaaaataaacagatcttcaatatctccaatgcccccaatatactcatcagcactgaagcagatcgtgaagagcatgctaaggaaaaatccagaacataggcctactgctggggagctgctgaggcatccacatctgcaaccatatctttctgaatcgtccaactgttcaccgatctatcttccggtgaaacccaccaaaggtaacctggtagacaagcagtcaaagaagccaagcagtggcagaaagcgagctgtcaaagccaatggatccaatggaacattagaaactgcagcagagcacgctgtggaagcaagagacagctccacaaacttctcagatgtatcaactataggtacccaggaagccttgatattgcaaatgccggtggatcctgatgccggaagcaaagaagagcagaacgttgatgttgtaccgtttcagcatgcggcagagaatctgatggcgacaaccgatagacaggtcgatgcgaccatacgtcttaaagccataagaaccagtaacgcaaaagaggcggccccggtcacagttgcagaccaaaagttcaacgaggcgccaataccaaatgaggaactgacaatcggggtagtgcaggaacaaaggaaggacgtgaagccacgctcttaccaggcaggaaaaccagagatgtgtgacacaaccgtaacggaggaatcgtcgcccatcagcacgctaaagctggcgcacacggagagcgcgcccgcggagtgggaccacctgaacatagtccagcagagggccgacgcgctggagtcgctcctggagctctgcgcgaagctcctggagcaggagaggctcgacgagctcgcgggcgttctccggccgttcggcgagggcgccgtgtcgtctagggagacggcgatctggctgaccaagagcctgatgacccccccacccaagttcggagagtccccgacgaagcttttgtaaaacagtgattcgtttgagagtttttgtttttttttcgagtgccattttcgagagtgtacatagcatcaacagaatttgagttcaagattgctgtgcttacctaggcctgagctttatttatcttggatgtatatggtttgcatggcaccgactgttgtgagcgatgactggttatttaccagccgccttgttttatttattgtgctggaaatcatgccgagtccatttctgtttactgagtactagtagtactttc

SEQ ID NO: 55111 - DNA, 819 bp, Zea Mays
ccgcatcctcctctaggcgatttcttttctcaagagcctgtaaattgcagttagtacagtagcatggtggacaagcaatttttgagtgtgcatcgacaaacaaaagcatggactacctatagtgaaatactgaaatgttagtgaacgtctaacatgatatgttattcagtgcatgatgatactgcatttacaagattgcaaagcagcaatatatattaaatggtgcaaaatatatcgataagattgaccttattgcatactgctagctacatcggtcccaaaaatgtaagtcttttatcgttctaagtcaaaccgttttaaaattgattatgcctatagaaaaacacaccaacatcacaacatcaacttaatttcattaaatccacaatgaaataagtcttaaataacgcattcattatgtaccgtaaattgtatatgttaaatattttttctataaacttgagcaaagttagaagagtttggcttaggtcaaaactaaagcaacttaattttgaaagaggggagcatcagacctttctctagttttaagcacattcatattgctgactgcataaactgagaacagcaaaatccaatcaaataaaacaaaagggtgctgattggcctaacaaaatcatcgctaatccatttgaactacaacaacttttatgttaatcactggattaagcataaaagatttgcttagcctgcaatttcatgctactgtcatcctcaatcaaatcatggttacacaatattagttctagcatggtgaagtttatggcataatattagcacagaacatacacaatattaaag

SEQ ID NO: 55112 - DNA, 722 bp, Zea Mays
attcatgccattttcggatatcaactcagaatctagaatttgatgagcacaaccacaaccaaaatctggaacaataagcaaggctaactgtatcaattgaagtgtcaagaattcaagctgttactacaactcgtaactgctctatcttttcggtgaactaaacgccacaaatatctagtacgccttactactacgcagtgaagtcttatacttcacaaacagaaagacgtgaacaacagtggttcgtttctggtgaagccaactgaagtcgtatgcagtaagcataccatggcaagttgtaccaacagatagccatgctctcaagcagagaagctagaaatccctcttttactcctaccacagtgtcctcaagcagagaaccaggaatccccatccctagacataccttgactagcggccaagaacgcagcagacaagagaaatcgttgctgagctcatcgcatggacatcagtatgcgcctttggacaactaccttggaaggctgagcagcctttggatgagtttccttcatatggcgcctcaccatcttttcaatctgctctatcgaacctgacagtttcttcaccagatcagcgggagatggatcatttggcttggatggagccacctgcaaggagcagtccgttgcctcttgcttgccctcagccacagaagtcacacggtttgcaacagctgaagttgagcttggaccagaagcaac

SEQ ID NO: 55113 - DNA, 2403 bp, Zea Mays
cttccattgcttgacacatacttgttgcagtccttctgaattttcgaatgcatgatatttttgtctgctgagaatacaattttatgtccattcaacctaggtttttgaacctccttaatccgtttttgttagtgtctactcatctctgcagaaagcatcttcttacacttggactgatgttgaaaacttttttttttttggatttttaacatccaaaaccataatctatagtggacggcttctgaatttctttaccatggtaatgagtacaaatcatttgaagtttgtgataagtatgtgtatcacctaatatttcaagtcatacatcaaagcaacaccttggattaccatactcccacgcagaaaaactgccacagagaaggaaaatctactaacacaagtttacaatcctaccattttctgttggattttggatgcaatttcctctgtactagctgaccttcaccaacaagatctcccatttaatattatcttcttcaactgtcaggtctcaccttgtaggttcagcaccttgcttgcattatgctgctgaggccttgcttgtcaaggatggaaacagcactgctgcatgcaacatggctgccccttctcgaaaatgtttatcctggggtttaatcctgccctctagcagataatctcggtgggagatttgatggttttgttttcatagtatatgcatggtgttgcttttttccctatcggccagcaaacaccagctgggctaactatatctatatggaactgtttccccatagaaaccagctatcaatccaaatatcatactacccagaaagattcagttgcacagttaagccccacatccaaaaagtattgaattgattcttcttcctcacaatcatagaaacaggatctggagcccccctgccattttcttctctttagagtgtccctggttagcgtaacattctgaaacaccaaccacgttttgttatattccaacattttcaacgaaaacattgaaatatatttgtttttagcagattacatgatataaaccagtatattttttttgcattactcataaactaaaatcgggaaccctgtctgattctgaaacatatctttttgcaaaccattgttctggcattgatatttttcaggaacaatcaaacattgtttcaagtccgattctgtcgatagacttcaaccctagttgttcatatcaattggccttccatcttgatgatggctggtctggagtcctgaatgttaacaatctcaatgtgactcatcttcactgccctcctcctgcttggttggagggcacagacttggtgctgcaaaagcaattaagaaagccaacctggctgctgacatcttcaatctatgcagttggatcttcctcatatgatggaatctatctactagactttcatccagataccagctctgcatgccatgtggactacaaagaggaaacaagagtctccggggaaaatcaacctgcaggaaacaagtttgttcctttatcccaaagggtgctttcctgtgcagcccatccactcagtcacaccataattgctggtacacagttctcatcgttgctcatgttatcacaaaagtacaagagtatcagaaatccagagccttgatgacatgccgtttcctccacgcagcatcttcaatcgtgcatctgcagaatcacaatggtgtttgttcatctccatcgtgcattaaagaattatgtgcagcatgtaaaccttgctttgctggtgcattggacactcactaggttcgaagtgctgccagcaataaccgtctttcaagaactgatgaatacgcagccattcacaaaaatgcacccatagagaagaaatctcttgctatatataaaaaagaatggcaagagatttcctcccccatagatctcttataatcctcgtcaccaaatcagctctaaagagttggatcaccaccactgtacacatcggctctgtttttcttggacatgattcttgtaatcgtcgttttcttggacatgattcttgtaatcgtcgttattcttgattagtagttcagttttcgattttggacgatggcgcgattgggagaagcaagtttattgcagggtgtttattgggattatacgattctcacccctgctgctgtcaaataagcgaaaacaaacagggtcgaattctagcctgggaacactttggtgcgcagatgatacagttcacgcaaggctctcttcagttgagcacttggtgggaggagattgcattcgcaaagaaaggtagaaggtgtttctatgacggttctagtttctatcaccggtatgcaatggcctgatgtctaggagagacgaataacttatgtggagaactccatggtcaagatatcgtgtatagagaatgaaag

SEQ ID NO: 55114 - DNA, 2395 bp, Zea Mays
cttccattgcttgacacatacttgttgcagtccttctgaattttcgaatgcatgatatttttgtctgctgagaatacaattttatgtccattcaacctaggtttttgaacctccttaatccgtttttgttagtgtctactcatctctgcagaaagcatcttcttacacttggactgatgttgaaaacttttttttttttggatttttaacatccaaaaccataatctatagtggacggcttctgaatttctttaccatggtaatgagtacaaatcatttgaagtttgtgataagtatgtgtatcacctaatatttcaagtcatacatcaaagcaacaccttggattaccatactcccacgcagaaaaactgccacagagaaggaaaatctactaacacaagtttacaatcctaccattttctgttggattttggatgcaatttcctctgtactagctgaccttcaccaacaagatctcccatttaatattatcttcttcaactgtcaggtctcaccttgtaggttcagcaccttgcttgcattatgctgctgaggccttgcttgtcaaggatggaaacagcactgctgcatgcaacatggctgccccttctcgaaaatgtttatcctggggtttaatcctgccctctagcagataatctcggtgggagatttgatggttttgttttcatagtatatgcatggtgttgcttttttccctatcggccagcaaacaccagctgggctaactatatctatatggaactgtttccccatagaaaccagctatcaatccaaatatcatactacccagaaagattcagttgcacagttaagccccacatccaaaaagtattgaattgattcttcttcctcacaatcatagaaacaggatctggagcccccctgccattttcttctctttagagtgtccctggttagcgtaacattctgaaacaccaaccacgttttgttatattccaacattttcaacgaaaacattgaaatatatttgtttttagcagattacatgatataaaccagtatattttttttgcattactcataaactaaaatcgggaaccctgtctgattctgaaacatatctttttgcaaaccattgttctggcattgatatttttcaggaacaatcaaacattgtttcaagtccgattctgtcgatagacttcaaccctagttgttcatatcaattggccttccatcttgatgatggctggtctggagtcctgaatgttaacaatctcaatgtgactcatcttcactgccctcctcctgcttggttggagggcacagacttggtgctgcaaaagcaattaagaaagccaacctggctgctgacatcttcaatctatgcagttggatcttcctcatatgatggaatctatctactagactttcatccagataccagctctgcatgccatgtggactacaaagaggaaacaagagtctccggggaaaatcaacctgcaggaaacaagtttgttcctttatcccaaagggtgctttcctgtgcagcccatccactcagtcacaccataattgctgttctcatcgttgctcatgttatcacaaaagtacaagagtatcagaaatccagagccttgatgacatgccgtttcctccacgcagcatcttcaatcgtgcatctgcagaatcacaatggtgtttgttcatctccatcgtgcattaaagaattatgtgcagcatgtaaaccttgctttgctggtgcattggacactcactaggttcgaagtgctgccagcaataaccgtctttcaagaactgatgaatacgcagccattcacaaaaatgcacccatagagaagaaatctcttgctatatataaaaaagaatggcaagagatttcctcccccatagatctcttataatcctcgtcaccaaatcagctctaaagagttggatcaccaccactgtacacatcggctctgtttttcttggacatgattcttgtaatcgtcgttttcttggacatgattcttgtaatcgtcgttattcttgattagtagttcagttttcgattttggacgatggcgcgattgggagaagcaagtttattgcagggtgtttattgggattatacgattctcacccctgctgctgtcaaataagcgaaaacaaacagggtcgaattctagcctgggaacactttggtgcgcagatgatacagttcacgcaaggctctcttcagttgagcacttggtgggaggagattgcattcgcaaagaaaggtagaaggtgtttctatgacggttctagtttctatcaccggtatgcaatggcctgatgtctaggagagacgaataacttatgtggagaactccatggtcaagatatcgtgtatagagaatgaaag

SEQ ID NO: 55115 - DNA, 826 bp, Zea Mays
agagcagactggtgtttgacgcagtgatatttgctactcctaaagatcaccgtaaagcaaaacctttccatgaccatgtatttgtcttctccattgtggatggccatgtttggtttcgaaactaccagatttctgttccccacaatgagattgataaagttgataaaggtggtatggataaaatgacacttattgaggttggccccaggttctgtttgaatccaatcaaaatatttggtggtagttttggtggtcctacatggtatgagaacccatactacatttcccccaatcagatccgtgcactagagaagaggcagaaggcaggcaaatatgccaagaaggtgaaggccaaggtgaggaggaagatgcacgagatggagaacacgctggagcctgatgagtttgctgagctctggaaaggggagtaggctttgatcgaccctgtcaatgtcgtgaagcacccgcaactcctgtcagcaagcgcagattttgtttacctgtgtggcagtgtctatgttgtggaagttttgtatgacaaggcctacgtttattttacataaaatcggattttagtgataacttatgcccatatgacattctctcttgtttgcttctagtggatgtagtgccaagtgttatatcacttatgtgattggtagctgagaatcatggggaagcgcgatcacagttcaaacctcaagatatcaatgtgatagccatagccgtgttccatatgtatactatgtacttcatttcagcaatggttttgtaaggaaaatagatcgagcttcatttaaagtaaagttttagtgtttgatgagca

SEQ ID NO: 55116 - DNA, 829 bp, Zea Mays
ccaagacccacttgtcattgcgacaccctgtggtaaaagagcagactggtgtttgacgcagtgatatttgctactcctaaagatcaccgtaaagcaaaacctttccatgaccatgtatttgtcttctccattgtggatggccatgtttggtttcgaaactaccagatttctgttccccacaatgagattgataaagttgataaaggtggtatggataaaatgacacttattgaggttggccccaggttctgtttgaatccaatcaaaatatttggtggtagttttggtggtcctacatgatccgtgcactagagaagaggcagaaggcaggcaaatatgccaagaaggtgaaggccaaggtgaggaggaagatgcacgagatggagaacacgctggagcctgatgagtttgctgagctctggaaaggggagtaggctttgatcgaccctgtcaatgtcgtgaagcacccgcaactcctgtcagcaagcgcagattttgtttacctgtgtggcagtgtctatgttgtggaagttttgtatgacaaggcctacgtttattttacataaaatcggattttagtgataacttatgcccatatgacattctctcttgtttgcttctagtggatgtagtgccaagtgttatatcacttatgtgattggtagctgagaatcatggggaagcgcgatcacagttcaaacctcaagatatcaatgtgatagccatagccgtgttccatatgtatactatgtacttcatttcagcaatggttttgtaaggaaaatagatcgagcttcatttaaagtaaagttttagtgtttgatgagca

SEQ ID NO: 55117 - DNA, 1484 bp, Zea Mays
atggatgataagcactgctaggctatcctggcctatcaggcctacttggcgcgtctctctctgtctagcggccgagtttaacagttaaaccctagctcaccgtcgtgctcgcctccccgcgcctgctccggtgctcccttcaggcactgacagttcgccgccgcggcggcgctttcgagcccacgcggaagcgcacctagtgccatggcgaagaagcggaagcacaccgacgcccaggcagagacggccggcgcagagaagccagacgactccgcaccggcgcgcccggagcgcacgctcttcggcttcaaggatccggcccccgacgccgtgcctgactccgcggcctccagggccgcggtggcgccgtttaggaacagggagaagaaggacagcaaggtcgagtcgaagcagagcaaggggaacgctctcaacgagatgctcgagctcaggagctgctccagttgtctcttcttcgagtgccgaaaacagaaggatctttacctttggatggtgaagtctcctggaggaccatcagtgaaatttctagttaatgctgttcacaccatggaggagttgaagcttacgggtaaccatctgaaagggtcacggccacttcttacattttctacaaattttgatgagcaacctcattggaagcttgtgaaggaaattataactcatatatttgctactcctaaagatcaccgtaaagcaaaacctttccatgaccatgtatttgtcttctccattgtggatggccatgtttggtttcgaaactaccagatttctgttccccacaatgagattgataaagttgataaaggtggtatggataaaatgacacttattgaggttggccccaggttctgtttgaatccaatcaaaatatttggtggtagttttggtggtcctacatggtatgagaacccatactacatttcccccaatcagatccgtgcactagagaagaggcagaaggcaggcaaatatgccaagaaggtgaaggccaaggtgaggaggaagatgcacgagatggagaacacgctggagcctgatgagtttgctgagctctggaaaggggagtaggctttgatcgaccctgtcaatgtcgtgaagcacccgcaactcctgtcagcaagcgcagattttgtttacctgtgtggcagtgtctatgttgtggaagttttgtatgacaaggcctacgtttattttacataaaatcggattttagtgataacttatgcccatatgacattctctcttgtttgcttctagtggatgtagtgccaagtgttatatcacttatgtgattggtagctgagaatcatggggaagcgcgatcacagttcaaacctcaagatatcaatgtgatagccatagccgtgttccatatgtatactatgtacttcatttcagcaatggttttgtaaggaaaatagatcgagcttcatttaaagtaaagttttagtgtttgatgagca

SEQ ID NO: 55118 - DNA, 3472 bp, Zea Mays
gtaaaaaactattagattgctctcttggaggtggagggttccttctaggcatcacaggtgttcttttatgagcacctacacaagtaaaaaagatgatcagccaataaacatcatttggacagtgatgtccaaaaacacatcagtgaaatgacctcgtcatcgtttacacattgcttgctgagaacataaggaacataaacaaggccaaaatatttagatgctccttacagaacgctacatgcagattagagacatgacagaagaaggtaagaatgataggttggtggcgattttcatagaaatttcacaggaattagttcaatttcatatgaaaaaacacaggaacaggggggatcccgttttcaaaacagaccctaagggctagtttgggaaccacattttcccaaagaaaattagttcatttttctttggaaaaatgaaaatcccttcaaaaaatgggggttcccaaactaaccctaaaaaaggatatttcaggcagtagcagaggacaggtgggaattgaggtatggcgtagacagtcaaacagaacaatgtagcatgatttatagcatagttagcaaatgaaacagcatattacagtaggtacggaagaaactcaaggtatggtaatggccccaccttgccaagaggcgagagctctgccactagttacagtagggtgttagagtatgttagtagtaattatcaaaattggaggccaggacacataaacaataaatatttaaacaggataattaagaaacaactaatgaaagtacacacagaattcttgtcaaagcccactaacccaggaaaatgaacataatgcatagcatcgaaccctgctgcattcatctatcaaagatgcaccaatttccattgttacatgtcaaattcttctataactttttccccgaaaacacaagagaactgcgcctaattatattaagaaaaagacaggaaaaaaggcttgagaagtccaaatacaaaggtctccttacggaggccaaaaacacaaaaaactgaaataatccatcagacacacacaaccactcaaaggatgttatatctagaaaaggagggcagcaaggtaagaaagccctttagcccctgccacctcccaaaacaatctctccttccctgctaacctaagagataaggccaaacttagagtccatccatcgaatacacatctgtttcgaagcttccaaattgtccaggctcccaaggcaattaaagagttgaggccttttccaagtaaaccagccgtgactcctgagatctgctcccaccaattcatgaacgaaggcatccctggttgtggagccaggctttccaagccaaaaggtctcagaagatgaaaccaaaactctcttgtaaacacacaagagacaaggagatggtccagggtttcttcttcctggtcacataagaggcatcttgtcgagtgatccatccctctcttagcaagtcagtccgcagaccaacatctcctgtgggcaaccagccaaaggaagagaaacggcactttggaggggggggggcaagtttcccataccagaggataatggccaaaaccgtaaagaacctgtaaagaaaccttcatatgttgttttggacgagtatttgccgtctctagctaaactgaaaatatgtttatggtctacttcaggttgtagcaccacttctgatagcaaatctcatagctgcaagtagtccactatggctccaactgaaagagcccctttgatgtcaaatatccattttctatcggttaaagcctctagcatagatctattgtttacactttacagttctttttggtataattgcaaacaacctaggagccagatcacttactctctgacccaagagccacttgtctgtccagaacagagtgcgggttccattccccacttctgaaatcagaacagtgtcgaaaaaagcctttgcctttcttggaacttggaaagggaggtttgcctaagaacgtcctggatcagatttatgcaaccaaagccatctcatgcgaagggcccaacacaactcctttaagctagaaattccaattcctcctaaatgtagaggccgacaacccttccccaggctatcaagcaacgtccacctttggcatctttgcgacctctctaaagaaatccccttcggatcttgtcaatagcatgtaaagcccaaggaggaatatcaatggccattgttaagtagacaaacatacctgtaagcacatgctgcaccataacttttgtcccggcccttgtcataaggtctgctttccagcttggcaggcagtcagcaaacctatcgatgaaaggttgaaactgttctttggacaatttgcgaagggagagagggattccaagatatctgcaagggaaatcaaacctctcacaaggtaacaagttctgaaccaccattagatcatcctcggagcactggatcgggaacacattggatttctgctcattattatggagctctgaagctttaccaaataaatccaagagattcatggtaatggaaatatccactgcagtggggtgcagaaagaggacatcatcgacatacaaagagatcctatgaaatttagtccttcctgacaattgtttgtagcagccctacttcttcagccctagaaaagagaaggcccagaatgtccatcaccaaaataaataacatcggggagaggggatctccctggctgagccctcttctgtgtataacggccctgtttgtttcggcttctggcagtttctggccaccaaaagctgctgcggactgccaaacgctcagcttttcagacagcttctataaaattcgttggggcaaaaaccatccaaaatcaacataaacatataatcggttgagtcgttgtaatagtaggaatccgtcattttctagatcctgaatcctatgaacaactttatattcctccacacgtaatcgtaataatactcagattctccccaaagccagattctccccacagccagattttcagaaaagctggtcagaaaaaagctgaaccaaacagacccaatatgctttccaggaaagccattaagcaagacttgagtagaagagtaggccagtaaaccacaaattatatctctccaaatttgtccaaaaccgagttgcttcatgacttcaataagaaagggccacgataccgaatcaaaagctttagtgatatccagtttaagaagcaaacaagcctttttctgatgatgaaggagcctagatgtctgctgcaccaacatgaagttagcttgaataaaacgtcctttgatgaaggcactttgatttggagagaccatctcgtcaagtttgctggccaatctgttggctaaaattttggtaatcaattttccgaaactatgcaccaggcttattggacgaaaatcctttacatggacagtatttatgtcactaggtaatgttaggttctccctgaaac

SEQ ID NO: 55119 - DNA, 857 bp, Zea Mays
agcaacgtgagaggcacgccctcgctcctggcagccgagaacgcgtctactgctcctgacggctaggtttccatcctcctctcctcagtctctcgatcttgctcttcttaggtcctgtgacaacaaatctctctatccgcatcgtcgttcttaggcgccgtcgtgaacgctacttctcttgcagttcatttgttcgataactgtggaggttcccaatcgcatattccgctcctacgaaacgacgtcgttctctatcaccgttgtcgacgctattgctgcagcaagtgaacgacaaaggaattcctactgacctacacttctacatcccacaaatgttgaaggaaacatttttggttgtctacaggtccttatgatgcatctcctccggtaatggataaaaaggaggctcgtcaagctcgaaaacgtattttaaatcagcatagactagtctcaataggcccaccacgtaatataccaatggaaatgcaatgcggctactttaacaatgagtacataaacgcgcttaaaggttagtgaaaaagatctattccatgttactgcattacgacatcagacacatctttctttcaccataatcagccactaacgcaatattctcctgaataatctatccctgccccactatgattagtttcatacaaagatagatctttctatggaacaccagatttcgaatgtcgatattgcaaggcagtcttctggtatcgtgaaagagctcgtggtaaacatattgatggatctatactatacaacaattgttgcaagggtggtaaaatagcaataccaccatacaaaccacatcctgaaccattggctacactggctagatttgatgg

SEQ ID NO: 55120 - DNA, 785 bp, Zea Mays
aaagaaagaaaagggaaggaaagcaacgtgagaggcacgccctcgctcctggcagccgagaacgcgtctactgctcctgacggctaggtttccatcctcctctcctcagtctctcgatcttgctcttcttaggtcctgtgacaacaaatctctctatccgcatcgtcgttcttaggcgccgtcgtgaacgctacttctcttgcagttcatttgttcgataactgtggaggttcccaatcgcatattccgctcctacgaaacgacgtcgttctctatcaccgttgtcgacgctattgctgcagcaagtgaacgacaaaggaattcctactgacctacacttctacatcccacaaatgttgaaggaaacatttttggttgtctacaggcccaccacgtaatataccaatggaaatgcaatgcggctactttaacaatgagtacataaacgcgcttaaaggttagtgaaaaagatctattccatgttactgcattacgacatcagacacatctttctttcaccataatcagccactaacgcaatattctcctgaataatctatccctgccccactatgattagtttcatacaaagatagatctttctatggaacaccagatttcgaatgtcgatattgcaaggcagtcttctggtatcgtgaaagagctcgtggtaaacatattgatggatctatactatacaacaattgttgcaagggtggtaaaatagcaataccaccatacaaaccacatcctgaaccattggctacactggctagatttgatgg

SEQ ID NO: 55121 - DNA, 428 bp, Zea Mays
agcaacgtgagaggcacgccctcgctcctggcagccgagaacgcgtctactgctcctgacggctaggtttccatcctcctctcctcagtctctcgatcttgctcttcttaggtcctgtgacaacaaatctctctatccgcatcgtcgttcttaggcgccgtcgtgaacgctacttctcttgcagttcatttgttcgataactgtggaggttcccaatcgcatattccgctcctacgaaacgacgtcgttctctatcaccgttgtcgacgctattgctgcagcaagtgaacgacaaaggaattcctactgacctacacttctacatcccacaaatgttgaaggaaacatttttggttgtctacagaaaatgagcggttcatccccgaatccaaatgatagctctgtcaatatgtcatccaatggagaag

SEQ ID NO: 55122 - DNA, 429 bp, Zea Mays
caatttcccaccgaacgcggctgctgcagacggggtctgagtggagtttgaataaggctacggcgtacggggatggctaagctgctagcctcacttctaaagtcacggacgccgccgaagcgcatcgattcgccgaccgcctgtttgttcccctcgtcgccgcagcacgccgccggccgacggtctggctgctccgatgggctctcccacacggccgcggaggactaccggtgtcactctcctgaatcctgatgctgctgttcctgttgcctataacaggtttggaaaggagctgttggatgagctatgatcgtatcgagtgaaagctcttttgtatatgctgtatcaagttaagttgtactgtgtcagtttttgcttaccttactgtcatatagctggttccagacgctactcccggttgttagtatg

SEQ ID NO: 55123 - DNA, 2884 bp, Zea Mays
catcatcgcggactggcccggggccgtcgccatcgcgcccacgcacgccccttcctccttcccctccgcccaactatgttccccaaaccgcacgcgcgcgctcgactccccgccgctgtcgtcgtcgtgttcgcggaggagatccaccggggtcgtcgtcaatctccctcctcccttgctcccgcagcctacccctccacgcgtgccctcgctaaaccctagcttgggcactcccccctgccccggcggcgccaccaccgcgccgcaccgaccgcgtgcgctgacacgttggaatgcattgtttgaagtgtgatcattgaggttctggttaaataagcttctagaatcgagtgactcccctcccataaatggataagatacaatctgattgcccttatccgggatgtttcttttgtgttatgaaagaggcgaaccctagtaaacgaagagcaagtgtgctaaagttttttagggaacttccttcccaagatgacgatggtcaagttctccctgtcagcggtctctggaacacagcgatggctcacccaaatgatcccgagttcatcaacttgggcatatttgaatgcatggcagctcttatatggaaagggttgaaaaataggcgttggcttgcacatgatcagaatatttacgtcccatattatgcagctcacataattggatcgtacacgatgaatatggaggaatttgcagagtgtgctgttcgtgctggtgtaatacctccattagtcgaactgttaagaggtaggttgacatgggtcgagcaaagagttgctgttagagctttggggcatttggctacgtatcctagtacattccctgcagttgccgataatggggaagtacttgaacttgccactcaacttgcttcaagctcccttgagattgtgtacactcacttttaccagtttgtggatcgaagacttgactaccattgtggccttcttactcgtggcatgggtggtgtggaaatggaatcccgcaaagctgaggaatgggcaagtcaactacagtgctggtcattgcaactcattaactgctttgcatttaagcctgaattcctccatgatatttgcaagcctgattttctagtcaagttacctggaatgtggggtggacttgtgaatgagaactcgcctgctggtgttggtttgctaagaacaatctgccagagcaaagttggccgaggtgatgctgccaacattcctggtactattgatgctttatgtaacattgctcgctcttcagatgattggcaatacatggcagttgattgtctgatctggttagtgcaggatgcaagtacttgtcataagacaaagttgcgccaacactgatagatttagcagatatttcgacactgggtgattataaaaagcttggtgacatgattgtcacagtcctccaagaatgtatgcaacaaagcgggaactcacgtggcgcaatcagtgatcagaccaaagcagaaatcgatgagctcttgagatccaagcaaagtttgaaattggaaaagagtatgccaaaggaggatcttcatataaaacaagctgcagcactggttgtcaagttggaaggcaactcactgttctcttcagggaacattgcaggagctgcagagaaatactccgaagcactggcactatgtccaatgaaatctaagaaagagcgggtggttctttacagcaaccgagctcagtgctaccttctcctgcagcagccatcggctgccataagcgatgctactcgagcgctgtgccttcatagccccgtgaatcgtcacgccaagagcctgtggagaagagctcaggcgtacgatatgctcggctttgcgaaggagagcttgctggatacgatccttttcataaacgagtgttcgcagtcgaacgatcctgacctatccctgaagcagaacaaagtccctgattatgccgagcggctggtgaagaagcagatgcgcgccgcttggctgttcagggaagcagccctgaagcacgggggcgtccgtcgcgcgggggatgctagcgacgctgcgtttggccaggaggccgacgactccgagtgggagacagctagcgaaagcgacggcgagaacggtgccgccacggggggagaagcagacggtgagactggatggaagaatggtggccgccaggaagatttctgtgagaaaagctgagcaacagccaaatgtgtattcagagtctcaaactgagctgctacagaagcagatgctgggccttctgcggtcggcacactatgaagcatcaaatctttctaacgaaacgatctggtgacgtttttattgtcctcatcaaagcaaggggggcagaggcccaattaaattagttatccacgtcttctcgctgggtcagttgagctgtgcctgtgaccattcaatatttcctctttgatgctggtcctcctctggtgtttgtaacatatttttggtcagtttgtcaagtccctgaaagaacagaactgtgtgcattgcttgttttgttttattgttttctgaagtttggtgaagaggccgtaatcctggcgctctcccctttccatttgacttgtctggaacgtgaaggccacgtttcctttcttcagggtgtcgtacctggttttcttggtgtactaatgtcaagtaggggtaggggctgtcttaggctcttacgatgaaacagtgtgctccggccctctggataacagcgccacgtcgaaacagtaaggtagcggaccaaacgctccttcgctttcacctttttcagcgcagcagccagcgggctggaggccactggccaccgcaccagcttctgctgcggcatcccccgaccattctgcgccccacccaattccgtagccccgcctg

SEQ ID NO: 55124 - DNA, 1855 bp, Zea Mays
catcatcgcggactggcccggggccgtcgccatcgcgcccacgcacgccccttcctccttcccctccgcccaactatgttccccaaaccgcacgcgcgcgctcgactccccgccgctgtcgtcgtcgtgttcgcggaggagatccaccggggtcgtcgtcaatctccctcctcccttgctcccgcagcctacccctccacgcgtgccctcgctaaaccctagcttgggcactcccccctgccccggcggcgccaccaccgcgccgcaccgaccgcgtgcgctgacacgttggaatgcattggttatagacaaagttgcgccaacactgatagatttagcagatatttcgacactgggtgattataaaaagcttggtgacatgattgtcacagtcctccaagaatgtatgcaacaaagcgggaactcacgtggcgcaatcagtgatcagaccaaagcagaaatcgatgagctcttgagatccaagcaaagtttgaaattggaaaagagtatgccaaaggaggatcttcatataaaacaagctgcagcactggttgtcaagttggaaggcaactcactgttctcttcagggaacattgcaggagctgcagagaaatactccgaagcactggcactatgtccaatgaaatctaagaaagagcgggtggttctttacagcaaccgagctcagtgctaccttctcctgcagcagccatcggctgccataagcgatgctactcgagcgctgtgccttcatagccccgtgaatcgtcacgccaagagcctgtggagaagagctcaggcgtacgatatgctcggctttgcgaaggagagcttgctggatacgatccttttcataaacgagtgttcgcagtcgaacgatcctgacctatccctgaagcagaacaaagtccctgattatgccgagcggctggtgaagaagcagatgcgcgccgcttggctgttcagggaagcagccctgaagcacgggggcgtccgtcgcgcgggggatgctagcgacgctgcgtttggccaggaggccgacgactccgagtgggagacagctagcgaaagcgacggcgagaacggtgccgccacggggggagaagcagacggtgagactggatggaagaatggtggccgccaggaagatttctgtgagaaaagctgagcaacagccaaatgtgtattcagagtctcaaactgagctgctacagaagcagatgctgggccttctgcggtcggcacactatgaagcatcaaatctttctaacgaaacgatctggtgacgtttttattgtcctcatcaaagcaaggggggcagaggcccaattaaattagttatccacgtcttctcgctgggtcagttgagctgtgcctgtgaccattcaatatttcctctttgatgctggtcctcctctggtgtttgtaacatatttttggtcagtttgtcaagtccctgaaagaacagaactgtgtgcattgcttgttttgttttattgttttctgaagtttggtgaagaggccgtaatcctggcgctctcccctttccatttgacttgtctggaacgtgaaggccacgtttcctttcttcagggtgtcgtacctggttttcttggtgtactaatgtcaagtaggggtaggggctgtcttaggctcttacgatgaaacagtgtgctccggccctctggataacagcgccacgtcgaaacagtaaggtagcggaccaaacgctccttcgctttcacctttttcagcgcagcagccagcgggctggaggccactggccaccgcaccagcttctgctgcggcatcccccgaccattctgcgccccacccaattccgtagccccgcctg

SEQ ID NO: 55125 - DNA, 358 bp, Zea Mays
gcctgtttttttgctgggatagacctccaatgctgtcaccgggctcttgcgatcatgctctttcctctcctcagtaggcttggtcaaagaataagggaagtacgtagctgagactgagggcatcaacacaagcatcgcgtgaagatcatggacagtaaattcttagatcgaagaggattaaggtaagtgattaaatcctcttctaattattttttactaacaagaaatttattttgttagtaatttaatttccttcaatcctttttaatccagtgctaaccgaacagtccattgctaaccgacgtcttgagtagtcattccaactctccaaccttatgtcaagactgcatgatggggg

SEQ ID NO: 55126 - DNA, 62 bp, Zea Mays
ttaccatcgagccgatgcagacacgctggccgtaaatcagcgatgaggtttcttatcaaaaa

SEQ ID NO: 55127 - DNA, 3381 bp, Zea Mays
ccgacttgcgcccaaagaagatacaggatcaaggatttttaaccgcagttttctattccacgaccttatccacaccagcagattcgaaattcacggacaggcccatggacccggcgaaagccagcggtggttcagcccctgacgtgcgggtcccactctccagccgcaccgcctagagaggcagaggcatcccttcgcgtggaagcaaacgaggcgtgataaagtggggctcctcggtcccggcgttggccgcatcgacactcgccgcgcaccaccaccaccgctgcggctcacggctacgcagcccgctctcccgacccccccgtgccctcctctttttgctactagcacatagagtttcgcccgaatcgatcgccgactgactccgctagggttcggcccgatcgccgcttcgtcctcccggctcccgcggggaccccgccgagatgtctgactggagctcgccggctgcgccgacgttcttcccttttggcccgcaggccgaggggtgggacgtcaccttcaaggtcaaatatggtgatacacttaaaaggttttatggttgtgccaatgggagtcattttgacatgaatttatctgctctacgggcgaggattgatactgcctttaagtttgctctccgtcagagattaaaccctctcaggattactgttcaactgaagaaaaatcaaccaactgaaaaaaaagatacttctgcaccagtgaaatccgctgctcaggatccactatcccagttaatgtcagctattgaaggtttgaagcctgttcaggaagatagtctggcccatataaaatcagctattggtgaagcaatcaagtctatcccagagccaatacctgatgcccttgcaaaactttctcatgaaatacttgatgcagcaccaccaccattagctgagctgatgaaaccttttgcacaattgatggcaccaaacaataatggcaatgggccatctgatgtgcatgctgaggggtcatctagctcttccagtgcacaggtgccagctgaagctaaaaatgagcccaaagttaggccaagtttgggtcttaagaccgtgttgaaagaggctgctggacctgttcctaatgctggagcttctcaggttcaacagccattaatgtatccatctgttgaggagatgctgttcccctgtaattcagtcgacaaatctgtttgcaaagggaagattgatgctcaaagtaagggaaaatctgttacgtcctcaggcatccaacctgctcctcattctcttcgtactcatgccccacctccaccacatccgtgcatttcagaatggtcccgagcacaaagaagccaacaccgtcaattgaaatttgaagacaatgcaaaagccactaatgattctagatggcgcattccgatgtataaaatgccctatgcaccaccacctccagcagtgccacccccaggctatgtaccttctccacattttccttatccaggccgcctcttatcttctgggcatccatacggagatctcgctggtaacatggaaaactcagcaccacatagtctgcatagatggattcagtgtgatggctgtggagcgcaaccaattgttggtccacgttataaatctaatgtgaaggaagactatgatttatgtgattcctgtttccagcgcatgggaaatgaaatggagtacaccaaaatagacaagcctattttaccccacaggtttctaagagatccccatgtgtaccggaaggtgcaccatccacgggttctaatgaagtcaagacgggagaaacttgaaagtcgcttcattttggatgtgactgttcttgatggaacactgatgacaccttctaccccgttcactaagatttggcgcatgcataacaatgggtctgttgtgtggccacggggcacacagcttgtctgggttggtggagatcagtttgcattgcagacatctgttccattagagattcctgtggatggttttcctgtggacaaagagattgatgttcctgttgattttgtggcacctacaaggccagggaggtacatatcttactggaggttggcttccccttctggtcagaaatttggtcagcgagtttgggttcatatccaggtggaagacccttcttttgttaatgacaataacaggaatgctgctattaacctgaatctgcctccagagagctatagttcaaacacaaccaacttaattgatgtgaacattgagcctgctgactcagcccttagtgcacatgctaagcgcacaaaggagttccatttctgttcaactgattttcctgaacccagtaagtctgtgccttttacgttggccactacctctttgtctgcagcagctcctacaaaccaaactggtgatgttcccatgtccagtacacctgctgctgcttgtttgccctctgttaatgtgcctatgcatgaagtcgttactactcatacaccgtcacctattacgcctgtcttgcctacaactatacacttttcagccccagtatctgctcctgcaattgcccctgagcttgcatcaggggctgttggtgtgcctccacctgttagtgctgtggtacctgagctgtcagaactggatgttcacaatgaggagaagttgctgagggagctggaggaaatgggttttaggcaggtcgatctcaacaaggaaatcctcaggcagaacaattacaatctggagcagtctgtcgatgacctatgtggcgtcaatgaatgggatcctctccttgcagagctggaagagatgggatttgatgacacagagatgaacaaggagctgcttgcgaagaatgagggaagcatcaagcgagctgtgatggagctcattgccagggagaagaaggacaagtgaagatcgtgtgctatctaagtttcttccttatatctgtcgtgtctgcggtgtcgatgaactatctagtatgtggagcgtgtgcgtctcagcagttaccctgccatgccacgtggactggctgtcgtgcctactgtctgttaccatgtatatatataaaaaatgatgcgtggaccaatgtttgatgctggcgctcttgccctcgtgataatgtattagcggttggcttgttgcttgcttgtcagccccagcgatttggtgatatgcactgccagtggagtttgcttcacaaagaatggaatggaacctggcgaccctacgtggagtttgcgcaccgatgtaaggagctggaggccggctccgaggactattgcttccacttcctatatgtggcacgctgaagggcaatgccgtgttttagttgaaattttggccagtccacgagcaatgtggtgtttctactctctgtatctctactaatattaccaaaatcaaa

SEQ ID NO: 55128 - DNA, 3543 bp, Zea Mays
ccgacttgcgcccaaagaagatacaggatcaaggatttttaaccgcagttttctattccacgaccttatccacaccagcagattcgaaattcacggacaggcccatggacccggcgaaagccagcggtggttcagcccctgacgtgcgggtcccactctccagccgcaccgcctagagaggcagaggcatcccttcgcgtggaagcaaacgaggcgtgataaagtggggctcctcggtcccggcgttggccgcatcgacactcgccgcgcaccaccaccaccgctgcggctcacggctacgcagcccgctctcccgacccccccgtgccctcctctttttgctactagcacatagagtttcgcccgaatcgatcgccgactgactccgctagggttcggcccgatcgccgcttcgtcctcccggctcccgcggggaccccgccgagatgtctgactggagctcgccggctgcgccgacgttcttcccttttggcccgcaggccgaggggtgggacgtcaccttcaaggtcaaatatggtgatacacttaaaaggttttatggttgtgccaatgggagtcattttgacatgaatttatctgctctacgggcgaggattgatactgcctttaagtttggtcctgacgttgactttgttctgacttacaccgatgaggatggtgatattgtcatgctagatgatgatgatgacttgcgtgatgcagctctccgtcagagattaaaccctctcaggattactgttcaactgaagaaaaatcaaccaactgaaaaaaaagatacttctgcaccagtgaaatccgctgctcaggatccactatcccagttaatgtcagctattgaaggtttgaagcctgttcaggaagatagtctggcccatataaaatcagctattggtgaagcaatcaagtctatcccagagccaatacctgatgcccttgcaaaactttctcatgaaatacttgatgcagcaccaccaccattagctgagctgatgaaaccttttgcacaattgatggcaccaaacaataatggcaatgggccatctgatgtgcatgctgaggggtcatctagctcttccagtgcacaggtgccagctgaagctaaaaatgagcccaaagttaggccaagtttgggtcttaagaccgtgttgaaagaggctgctggacctgttcctaatgctggagcttctcaggttcaacagccattaatgtatccatctgttgaggagatgctgttcccctgtaattcagtcgacaaatctgtttgcaaagggaagattgatgctcaaagtaagggaaaatctgttacgtcctcaggcatccaacctgctcctcattctcttcgtactcatgccccacctccaccacatccgtgcatttcagaatggtcccgagcacaaagaagccaacaccgtcaattgaaatttgaagacaatgcaaaagccactaatgattctagatggcgcattccgatgtataaaatgccctatgcaccaccacctccagcagtgccacccccaggctatgtaccttctccacattttccttatccaggccgcctcttatcttctgggcatccatacggagatctcgctggtaacatggaaaactcagcaccacatagtctgcatagatggattcagtgtgatggctgtggagcgcaaccaattgttggtccacgttataaatctaatgtgaaggaagactatgatttatgtgattcctgtttccagcgcatgggaaatgaaatggagtacaccaaaatagacaagcctattttaccccacaggtttctaagagatccccatgtgtaccggaaggtgcaccatccacgggttctaatgaagtcaagacgggagaaacttgaaagtcgcttcattttggatgtgactgttcttgatggaacactgatgacaccttctaccccgttcactaagatttggcgcatgcataacaatgggtctgttgtgtggccacggggcacacagcttgtctgggttggtggagatcagtttgcattgcagacatctgttccattagagattcctgtggatggttttcctgtggacaaagagattgatgttcctgttgattttgtggcacctacaaggccagggaggtacatatcttactggaggttggcttccccttctggtcagaaatttggtcagcgagtttgggttcatatccaggtggaagacccttcttttgttaatgacaataacaggaatgctgctattaacctgaatctgcctccagagagctatagttcaaacacaaccaacttaattgatgtgaacattgagcctgctgactcagcccttagtgcacatgctaagcgcacaaaggagttccatttctgttcaactgattttcctgaacccagtaagtctgtgccttttacgttggccactacctctttgtctgcagcagctcctacaaaccaaactggtgatgttcccatgtccagtacacctgctgctgcttgtttgccctctgttaatgtgcctatgcatgaagtcgttactactcatacaccgtcacctattacgcctgtcttgcctacaactatacacttttcagccccagtatctgctcctgcaattgcccctgagcttgcatcaggggctgttggtgtgcctccacctgttagtgctgtggtacctgagctgtcagaactggatgttcacaatgaggagaagttgctgagggagctggaggaaatgggttttaggcaggtcgatctcaacaaggaaatcctcaggcagaacaattacaatctggagcagtctgtcgatgacctatgtggcgtcaatgaatgggatcctctccttgcagagctggaagagatgagatgaacaaggagctgcttgcgaagaatgagggaagcatcaagcgagctgtgatggagctcattgccagggagaagaaggacaagtgaagatcgtgtgctatctaagtatatattcgtaaataatgagacggctgtgccactgcggtgcagccctggtgcgtctcagagcttgcttatggtgaactcttcgtgttaggtttcttccttatatctgtcgtgtctgcggtgtcgatgaactatctagtatgtggagcgtgtgcgtctcagcagttaccctgccatgccacgtggactggctgtcgtgcctactgtctgttaccatgtatatatataaaaaatgatgcgtggaccaatgtttgatgctggcgctcttgccctcgtgataatgtattagcggttggcttgttgcttgcttgtcagccccagcgatttggtgatatgcactgccagtggagtttgcttcacaaagaatggaatggaacctggcgaccctacgtggagtttgcgcaccgatgtaaggagctggaggccggctccgaggactattgcttccacttcctatatgtggcacgctgaagggcaatgccgtgttttagttgaaattttggccagtccacgagcaatgtggtgtttctactctctgtatctctactaatattaccaaaatcaaa

SEQ ID NO: 55129 - DNA, 2872 bp, Zea Mays
attgctactaccaatccctatgtgctttggtgaacacgtattttggtctgtatatggtttaaacgtgaagactatggtagtgtgagaccatgatttggatccttttctgtggcattatagttaaaatcgtcaaatatggtgatacacttaaaaggttttatggttgtgccaatgggagtcattttgacatgaatttatctgctctacgggcgaggattgatactgcctttaagtttggtcctgacgttgactttgttctgacttacaccgatgaggatggtgatattgtcatgctagatgatgatgatgacttgcgtgatgcagctctccgtcagagattaaaccctctcaggattactgttcaactgaagaaaaatcaaccaactgaaaaaaaagatacttctgcaccagtgaaatccgctgctcaggatccactatcccagttaatgtcagctattgaaggtttgaagcctgttcaggaagatagtctggcccatataaaatcagctattggtgaagcaatcaagtctatcccagagccaatacctgatgcccttgcaaaactttctcatgaaatacttgatgcagcaccaccaccattagctgagctgatgaaaccttttgcacaattgatggcaccaaacaataatggcaatgggccatctgatgtgcatgctgaggggtcatctagctcttccagtgcacaggtgccagctgaagctaaaaatgagcccaaagttaggccaagtttgggtcttaagaccgtgttgaaagaggctgctggacctgttcctaatgctggagcttctcaggttcaacagccattaatgtatccatctgttgaggagatgctgttcccctgtaattcagtcgacaaatctgtttgcaaagggaagattgatgctcaaagtaagggaaaatctgttacgtcctcaggcatccaacctgctcctcattctcttcgtactcatgccccacctccaccacatccgtgcatttcagaatggtcccgagcacaaagaagccaacaccgtcaattgaaatttgaagacaatgcaaaagccactaatgattctagatggcgcattccgatgtataaaatgccctatgcaccaccacctccagcagtgccacccccaggctatgtaccttctccacattttccttatccaggccgcctcttatcttctgggcatccatacggagatctcgctggtaacatggaaaactcagcaccacatagtctgcatagatggattcagtgtgatggctgtggagcgcaaccaattgttggtccacgttataaatctaatgtgaaggaagactatgatttatgtgattcctgtttccagcgcatgggaaatgaaatggagtacaccaaaatagacaagcctattttaccccacaggtttctaagagatccccatgtgtaccggaaggtgcaccatccacgggttctaatgaagtcaagacgggagaaacttgaaagtcgcttcattttggatgtgactgttcttgatggaacactgatgacaccttctaccccgttcactaagatttggcgcatgcataacaatgggtctgttgtgtggccacggggcacacagcttgtctgggttggtggagatcagtttgcattgcagacatctgttccattagagattcctgtggatggttttcctgtggacaaagagattgatgttcctgttgattttgtggcacctacaaggccagggaggtacatatcttactggaggttggcttccccttctggtcagaaatttggtcagcgagtttgggttcatatccaggtggaagacccttcttttgttaatgacaataacaggaatgctgctattaacctgaatctgcctccagagagctatagttcaaacacaaccaacttaattgatgtgaacattgagcctgctgactcagcccttagtgcacatgctaagcgcacaaaggagttccatttctgttcaactgattttcctgaacccagtaagtctgtgccttttacgttggccactacctctttgtctgcagcagctcctacaaaccaaactggtgatgttcccatgtccagtacacctgctgctgcttgtttgccctctgttaatgtgcctatgcatgaagtcgttactactcatacaccgtcacctattacgcctgtcttgcctacaactatacacttttcagccccagtatctgctcctgcaattgcccctgagcttgcatcaggggctgttggtgtgcctccacctgttagtgctgtggtacctgagctgtcagaactggatgttcacaatgaggagaagttgctgagggagctggaggaaatgggttttaggcaggtcgatctcaacaaggaaatcctcaggcagaacaattacaatctggagcagtctgtcgatgacctatgtggcgtcaatgaatgggatcctctccttgcagagctggaagagatgggatttgatgacacagagatgaacaaggagctgcttgcgaagaatgagggaagcatcaagcgagctgtgatggagctcattgccagggagaagaaggacaagtgaagatcgtgtgctatctaagtatatattcgtaaataatgagacggctgtgccactgcggtgcagccctggtgcgtctcagagcttgcttatggtgaactcttcgtgttaggtttcttccttatatctgtcgtgtctgcggtgtcgatgaactatctagtatgtggagcgtgtgcgtctcagcagttaccctgccatgccacgtggactggctgtcgtgcctactgtctgttaccatgtatatatataaaaaatgatgcgtggaccaatgtttgatgctggcgctcttgccctcgtga

SEQ ID NO: 55130 - DNA, 586 bp, Zea Mays
aaacatctaagagcaaccgagaatgaaaccgagagcaccgtcgtcgaagaaagcagagagtggaggaaggaagagagtccatcgcgagagggaactctggttcatcgtcgtcgcgtccgcggggttggtccggggagcttcaccgaagtgtctgcgactcaggcgtggcggtgttaggctcggggagtccttggagcgtgacaaattgctcactggaaccacgaagccgtcgcacgacgtggagagctccattgccgccataattactagacattaccaggtaccaccggagaaagattgctatgatgagtttggagaggtctaggtcgtcgtctcccagtcaactatgatggtggaggatcttgtcaccaaatggtttattttatttagttatttagtacaaagaattttacatatgtaataaaggttatgacattgatttatgtacattgagtcatcatatgtgtgagacttgatcctagcacacatgtaagttgcacttggatttatccttaaattcgggtgtgacatatatattaaggaaacatgtgtgggataaggaataagagcctatcgtcaaagatca

SEQ ID NO: 55131 - DNA, 645 bp, Zea Mays
aaactaacgaggttgttgagattcggtatcacccggtgtataaatgtgaaccccgatgaccctccccgccaaacatctaagagcaaccgagaatgaaaccgagagcaccgtcgtcgaagaaagcagagagtggaggaaggaagagagtccatcgcgagagggaactctggttcatcgtcgtcgcgtccgcggggttggtccggggagcttcaccgaagtgtctgcgactcaggcgtggcggtgttaggctcggggagtccttggagcgtgacaaattgctcactggaaccacgaagccgtcgcacgacgtggagagctccattgccgccataattactagtaccaccggagaaagattgctatgatgagtttggagaggtctaggtcgtcgtctcccagtcaactatgatggtggaggatcttgtcaccaaatggtttattttatttagttatttagtacaaagaattttacatatgtaataaaggttatgacattgatttatgtacattgagtcatcatatgtgtgagacttgatcctagcacacatgtaagttgcacttggatttatccttaaattcgggtgtgacatatatattaaggaaacatgtgtgggataaggaataagagcctatcgtcaaagatca

SEQ ID NO: 55132 - DNA, 2124 bp, Zea Mays
caggcactcaggctggcagcagccagcagcgattggggttcccgagacaaacagtcgagctcgggaccctgagaaacaaccagggagggcactagggcagggacaggacgaccagacaggctccgcgtttcccggcccgcgaacgcgagcgcgagttcatcgccttcccggttcccgccgcgccgcgggctttcccgccttccccgagccctcctcccccgcacacccacgaccagtgtgtgggtggagactagtgggagtgggaggcgttataatcggtcggcgcaaggacgtgggggagaaggggggctaatccggccgtgcacgcaaccggaccgggcgcggtagccagtgcgtaggcgccgttccgccgctgccgcctcgcccggcgttcctcgccgccagcacagggcgtggccggagtccgcgcgccaccatggcaaggtcatggctgataacttgtaggggaattgctaagaaaataaggtacacaaatcctggcgctaatcaccatataagtgaactggttgcagaagcacggagggaatgcccaaactgcagttatattattgataacagcgatgttgccatgcagtggcctgggttgcctgctggagtcaagtttgatccttctgaattggagttgcttgaacatttagaacagaaagttggcctgggagattcaagaccacatgtgctcattgatgaatttattccaactatagacaatgatgagggaatctgctattcacatcctgaaaatcttcctgatggtagcaatgctcatttctttcatagagtttcaaaagcgtatggttgtggtcagcgcaaacgtcgaaggaccatcaactgcagtgatcacactgtttctgatgagcatgtgagatggcacaagacagggagatccaaagccatatatgaaaatggtgttataaaaggttggaagaaaataatggtgctgtacaaaatttcgcaaagaggcagaaagcctgatagagctaattgggtaatgcatcagtatcatcttggagaagaggaagacgaaaaggacggggaacttgtagtatctaaaatattctgtcagttgccaaataagagtatggaaatttctgaaacagaaactgcttatgaagaacctggtgcacctgcttcggtgattggtccgaaaactccaaagacagtcacaccacagccacgccatcctaaaaatagtccatgtgaaactgagcagagtattttcatcctgcaggaccagctactactggacggtgaagacgagcctaccatgcctatcgttagtctggcggatgatgcaatgaaccctgcatggtgtgctgtagctgaagaagagcaggttgttggagaggcatctcgggctcagtcaaactcagatgaacctcttctctgtcgcgaagacccaaattccttaaacgacgaagcattgcttccctgggactatccgattctgtcgcaatgcaggagtgagatttttgatcggaacctgaatggatacgggttgcctgatctccataatgtggatctcggcacgcctccagatcttcagcttgctgatttccagtttggctctcaggaaagcctcggcagctggctggatcgcatctaggaagatactaaagtacgtatttggtagagcagctcagcaacctgatcgatgggcatcttttttgcacatgatatggtaaccggtggcagctatttttgggcttgcaacacaaagattgcattcttgcattagtgttgtattagtgttgcgctgtcaaactttatctggaaaccaaagaacctttcgctcttttctattttctttagaacctttaacagctggctatcagaacactagccttgaaatatagctgtaagttttgtggcatggttggtgcaaacctacattgccccgctgtatataagatcggtgccttgagatctttgactttatgagttcagagtgttcttgtaataacaatgcaaaactgatgaggcagtccagctgcgcctagtctaatctctagagagtgcgaagttttggacttcacacatgcaactggcaagtaaaagcattgtttagaaggtacaaacagcatattgtgaactttattagtctag

SEQ ID NO: 55133 - DNA, 1593 bp, Zea Mays
aaatctactactagtccacatgcatagcatagcagttcgcacagctgcacactctcggggcggcggcttggttcaaagtcagtcctgagcatgtcgaggctgaagtgcgcgctgcggacattcgatctgagggttctcttgattctgctgatcggtgtgccaatcctgctcttcgcgatatacgtgcacggccagaaggtgacctacttcctccggccgatatgggagaagcccccaaagcccttcaaagtactcccccactactaccacgagaacgtctcgatggccaacctctgcaagctgcacggatggagagtcagggagaccccgcgccgcgtcttcgacgccgtgctcttcagcaacgagctcgacatccttgacatccgctggcacgagctgagcccctacgtgtcggagttcgtgctgctggagtccaactcgaccttcaccggcataaggaaggacctccacttcagggagaaccggcagcggttcggcttcgccgagtcgcggctgacctacggcaccataggcgggaggttcgtgaagggagagaacccgttcgtggaggagtcgtaccagagggtcgccctcgaccagctgatcaagatcgcgggcatcgcggacgacgacctgctgatcatgtcggacgtggacgagatcccgagcgggcacaccgtgaacctcctgagatggtgcgacgacgtccccgaggtactccacctccagctccggaactacctctactcgttcgagttcctgctcgacgacaggagctggcgggcctcggtgcacaggtacagggccgggaggacgaggtacgcgcacttccggcagacggacgacctcctggccgattccgggtggcactgcagcttctgcttccgccgcatagacgacttcgtcttcaagatgaaggcctacagccacgtggaccggatcaggttcgggtacttcctgaacccgaggaggatccagcacgtgatctgcgagggggccgatctcttcgacatgctccccgaggagtacacgttccaggagatcatcgccaagctggggcctatcccgagcacgttctccgctgtccatctccccgcctatctgctggagcacaacgagcggtacaggtaccttctcccgggcaactgcgttagagagagtggctagtagctaaggctgtaaggcagctagctgtgttgctgtctgcatcgccatggcctgaggcgcaccgacgtcgctcgcggatgcatgcatgcgtggaggagcgccctgccgttgccggggttgttgtatctggatatacgactggctgggctgacttatatatttagatgatgaatgaatggtcgcttgaccgctgctggttcagttcgtatgagattttgtaccatggaaggccttcacagcagcatagcatgcttggtcgctgcttccttgttgttttgcaggcctgggtttttattcattgcttccatgattgatgtatgtatgaatgaactcaaactatttgtaggtgtcataccgagcgacattcatactctgctctcgcgttgtgatgtacattgccattcacttaccctagttacctgagtc

SEQ ID NO: 55134 - DNA, 1558 bp, Zea Mays
gtcaagtttggagtgcataagatgtttgcagcttggttcaaagtcagtcctgagcatgtcgaggctgaagtgcgcgctgcggacattcgatctgagggttctcttgattctgctgatcggtgtgccaatcctgctcttcgcgatatacgtgcacggccagaaggtgacctacttcctccggccgatatgggagaagcccccaaagcccttcaaagtactcccccactactaccacgagaacgtctcgatggccaacctctgcaagctgcacggatggagagtcagggagaccccgcgccgcgtcttcgacgccgtgctcttcagcaacgagctcgacatccttgacatccgctggcacgagctgagcccctacgtgtcggagttcgtgctgctggagtccaactcgaccttcaccggcataaggaaggacctccacttcagggagaaccggcagcggttcggcttcgccgagtcgcggctgacctacggcaccataggcgggaggttcgtgaagggagagaacccgttcgtggaggagtcgtaccagagggtcgccctcgaccagctgatcaagatcgcgggcatcgcggacgacgacctgctgatcatgtcggacgtggacgagatcccgagcgggcacaccgtgaacctcctgagatggtgcgacgacgtccccgaggtactccacctccagctccggaactacctctactcgttcgagttcctgctcgacgacaggagctggcgggcctcggtgcacaggtacagggccgggaggacgaggtacgcgcacttccggcagacggacgacctcctggccgattccgggtggcactgcagcttctgcttccgccgcatagacgacttcgtcttcaagatgaaggcctacagccacgtggaccggatcaggttcgggtacttcctgaacccgaggaggatccagcacgtgatctgcgagggggccgatctcttcgacatgctccccgaggagtacacgttccaggagatcatcgccaagctggggcctatcccgagcacgttctccgctgtccatctccccgcctatctgctggagcacaacgagcggtacaggtaccttctcccgggcaactgcgttagagagagtggctagtagctaaggctgtaaggcagctagctgtgttgctgtctgcatcgccatggcctgaggcgcaccgacgtcgctcgcggatgcatgcatgcgtggaggagcgccctgccgttgccggggttgttgtatctggatatacgactggctgggctgacttatatatttagatgatgaatgaatggtcgcttgaccgctgctggttcagttcgtatgagattttgtaccatggaaggccttcacagcagcatagcatgcttggtcgctgcttccttgttgttttgcaggcctgggtttttattcattgcttccatgattgatgtatgtatgaatgaactcaaactatttgtaggtgtcataccgagcgacattcatactctgctctcgcgttgtgatgtacattgccattcacttaccctagttacctgagtc

SEQ ID NO: 55135 - DNA, 721 bp, Zea Mays
aagttttagcgcctgccctcagtccagctcgccagcagctctctgccctcctccctcaagccctagccgagtttttccatggtgccctggatgccagcccctttactcgctgcccctgcattcctgctcgccctgcccccagccatggacaccgtcgggccacccgttcctatctcccctcaccctcatcctctggctgctgccccttcctattcctggtggttgagtcttcttccatggacgccaatagcagcagcccactccttttgttctccatggatgaaagcccaagcatctgcccctcccctaggttttttacaatcgcagcagcacgtcgaacctttgcaaccccggaaatttagatgagaagaaagctatagcgaggcgcttgccaagtgcttggtgaatcgcctcaaccggatgtggttgtcgatctcgcggagtcgagtcgagtttagtcatggttgaaattttgttctgttgtggatggtgctaagtgccggtgggctcggccttcttatataagtatatcccatctttagcttctttattgaggattgtcacttaagttagcatgtattttaaaaactataaatattttatacattttaaattataattcttttgaatcactttcttttgtaatcactccgataattgtataatgtaaacttattgtaacatgtaatcattttgcaataaagaatttatttccgctgca

SEQ ID NO: 55136 - DNA, 1537 bp, Zea Mays
cgccgaccctaccatcgcagaccccctccccattgtcagatcgatccttcatcgccccccgatgacaacggcttctcggatgctagggcacctgccacccacccatctccctcccatcccagatccctcgcgccatggccaacgcctccccccagtggcttacgctagcgcacctgcccacctccctccctctcccccgcccagccatggccatcgcctttgactctccgacctcctcccccgctgaaattcctgctctgaaatacgctcgcttctgctgcctagatctggtacccctgttgtcaccacgtttttgccaccaccgtcaccagctcagagctttccctccattgcttcctcctcgtcgtggtctcctctgtgtcactccgctcgagctcgccatcctcttgccagcgcgactccgtggagcgtgcgagacagtgccggtggccgcggagacccgccacggggacatggaggggtaggtgttgccacagttcgtagatttcaacgcctggtacacacacgcgatctccactaccgagctcgtggactacaggtttgtgcgggggatcatggtcatcctcatccaccctacagatacaccatgtgggaggccatccaagttagtgcccattcgctcctcttcccccatgcccatgttgtgcatcatcctgcattgaacgttgctggtgtaaagatgaagagagtgattacaagtgtttctgcctgcatagttgtagattttgaagcatcgtgatgttccatttgtgcatagaatggtcccgaaatggtgtttaggtaataggcacgaatagcgtgtttttgttgttctggttccttgctttatttgcatactcattccttgcagactccaaaactaaatcaacaagttggagatcctccttcctgcagcgcagaagcacagctggttctttcaggcgcagcaaactctgttcagataaaaatttgtgttaactgatgctcaaattactgaagaatggaatagaggagctgcaccaagttcacgcttcatattcgcagagaagaatgcaaactatgttctgcttacctgaacaataagtgtcttgagaagcttcttgtaagtgagcatacaagctccaatcggttggctttggtgacaatggagggaggagggaagggtagtggagtttggtatatagatccacccagatggagtggagtacagtacaatgatagacagtgaagagacgagaagattcaattttatttgagttgagcctcaaagttatctacaacagtccactctacagtactatagtgggcaacaaatgtatggacatatgcacgctttgttagtcaaaaggtttagaaatttaggtgtgggagaaagaaaaaaaataaccttgtgaactgcgaagttttttttctcttaaatctcatgataacatttagccatatacagtgactgagaggtgagagcacgctacctgcttggttcctggaacctccttgacgtggagcgaatgcaacaggttcctcaggatgcgggcgc

SEQ ID NO: 55137 - DNA, 1705 bp, Zea Mays
ccatccctcccatcctagacctgctcccccgccgccatgacgatcttgcgtcggccgtcgcacacccgccgaccctaccatcgcagaccccctccccattgtcagatcgatccttcatcgccccccgatgacaacggcttctcggatgctagggcacctgccacccacccatctccctcccatcccagatccctcgcgccatggccaacgcctccccccagtggcttacgctagcgcacctgcccacctccctccctctcccccgcccagccatggccatcgcctttgactctccgacctcctcccccgctgaaattcctgctctgaaatacgctcgcttctgctgcctagatctggtacccctgttgtcaccacgtttttgccaccaccgtcaccagctcagagctttccctccattgcttcctcctcgtcgtggtctcctctgtgtcactccgctcgagctcgccatcctcttgccagcgcgactccgtggagcgtgcgagacagtgccggtggccgcggagacccgccacggggacatggagggactccaaaactaaatcaacaagttggagatcctccttcctgcagcgcagaagcacagctggttctttcaggcgcagcaaactctgttcagataaaaatttgtgttaactgatgctcaaattactgaagaatggaatagaggagctgcaccaagttcacgcttcatattcgcagagaagaatgcaaactatgttctgcttacctgaacaataagtgtcttgagaagcttcttgtaagtgaggtgatctctacttatgcgcagtagctctttgcttgctgacttcaacatatctgttaccaaatcatcctgagcttgaaggactttaattctagaagcattgagctgcattgagtaatcactgcataagaccacacacagtaatatcagtgaattgatattttttacacaaaagaaaaatagtatggtcaccggcatatgctaaagtggggaaatatccataatggcccgtagacaatagtagctatgaagtgtgacataggtaaaacagaaacaagtcacaagaatgggaataagaaattgagttagaactgctatttacattttcttcttgatgccaataacttgctagctggattccaccgtggtcaagccttgtgatgaaatcagatgatgatgacgcaattggcttctgtgacctacaattatgggcatgctgatgctacctagaacctcactacactggatgacagggcgctactttttctagtgtagcatacaagctccaatcggttggctttggtgacaatggagggaggagggaagggtagtggagtttggtatatagatccacccagatggagtggagtacagtacaatgatagacagtgaagagacgagaagattcaattttatttgagttgagcctcaaagttatctacaacagtccactctacagtactatagtgggcaacaaatgtatggacatatgcacgctttgttagtcaaaaggtttagaaatttaggtgtgggagaaagaaaaaaaataaccttgtgaactgcgaagttttttttctcttaaatctcatgataacatttagccatatacagtgactgagaggtgagagcacgctacctgcttggttcctggaacctccttgacgtggagcgaatgcaacaggttcctcaggatgcgggcgc

SEQ ID NO: 55138 - DNA, 1780 bp, Zea Mays
cgtcacagtccctcgcgtagacgcgcacccacctccatccctcccatcctagacctgctcccccgccgccatgacgatcttgcgtcggccgtcgcacacccgccgaccctaccatcgcagaccccctccccattgtcagatcgatccttcatcgccccccgatgacaacggcttctcggatgctagggcacctgccacccacccatctccctcccatcccagatccctcgcgccatggccaacgcctccccccagtggcttacgctagcgcacctgcccacctccctccctctcccccgcccagccatggccatcgcctttgactctccgacctcctcccccgctgaaattcctgctctgaaatacgctcgcttctgctgcctagatctggtacccctgttgtcaccacgtttttgccaccaccgtcaccagctcagagctttccctccattgcttcctcctcgtcgtggtctcctctgtgtcactccgctcgagctcgccatcctcttgccagcgcgactccgtggagcgtgcgagacagtgccggtggccgcggagacccgccacggggacatggaggggtaggtgttgccacagttcgtagatttcaacgcctggtacacacacgcgatctccactaccgagctcgtggactacaggtttgtgcgggggatcatggtcatcctcatccaccctacagatacaccatgtgggaggccatccaagttagtgcccattcgctcctcttcccccatgcccatgttgtgcatcatcctgcattgaacgttgctggtgtaaagatgaagagagtgattacaagtgtttctgcctgcatagttgtagattttgaagcatcgtgatgttccatttgtgcatagaatggtcccgaaatggtgtttaggtaataggcacgaatagcgtgtttttgttgttctggttccttgctttatttgcatactcattccttgcagactccaaaactaaatcaacaagttggagatcctccttcctgcagcgcagaagcacagctggttctttcaggcgcagcaaactctgttcagataaaaatttgtgttaactgatgctcaaattactgaagaatggaatagaggagctgcaccaagttcacgcttcatattcgcagagaagaatgcaaactatgttctgcttacctgaacaataagtgtcttgagaagcttcttgtaagtgagctggattccaccgtggtcaagccttgtgatgaaatcagatgatgatgacgcaattggcttctgtgacctacaattatgggcatgctgatgctacctagaacctcactacactggatgacagggcgctactttttctagtgtagcatacaagctccaatcggttggctttggtgacaatggagggaggagggaagggtagtggagtttggtatatagatccacccagatggagtggagtacagtacaatgatagacagtgaagagacgagaagattcaattttatttgagttgagcctcaaagttatctacaacagtccactctacagtactatagtgggcaacaaatgtatggacatatgcacgctttgttagtcaaaaggtttagaaatttaggtgtgggagaaagaaaaaaaataaccttgtgaactgcgaagttttttttctcttaaatctcatgataacatttagccatatacagtgactgagaggtgagagcacgctacctgcttggttcctggaacctccttgacgtggagcgaatgcaacaggttcctcaggatgcgggcgc

SEQ ID NO: 55139 - DNA, 1510 bp, Zea Mays
gtcgtcacagtccctcgcgtagacgcgcacccacctccatccctcccatcctagacctgctcccccgccgccatgacgatcttgcgtcggccgtcgcacacccgccgaccctaccatcgcagaccccctccccattgtcagatcgatccttcatcgccccccgatgacaacggcttctcggatgctagggcacctgccacccacccatctccctcccatcccagatccctcgcgccatggccaacgcctccccccagtggcttacgctagcgcacctgcccacctccctccctctcccccgcccagccatggccatcgcctttgactctccgacctcctcccccgctgaaattcctgctctgaaatacgctcgcttctgctgcctagatctggtacccctgttgtcaccacgtttttgccaccaccgtcaccagctcagagctttccctccattgcttcctcctcgtcgtggtctcctctgtgtcactccgctcgagctcgccatcctcttgccagcgcgactccgtggagcgtgcgagacagtgccggtggccgcggagacccgccacggggacatggaggggtaggtgttgccacagttcgtagatttcaacgcctggtacacacacgcgatctccactaccgagctcgtggactacaggtttgtgcgggggatcatggtcatcctcatccaccctacagatacaccatgtgggaggccatccaaactccaaaactaaatcaacaagttggagatcctccttcctgcagcgcagaagcacagctggttctttcaggcgcagcaaactctgttcagataaaaatttgtgttaactgatgctcaaattactgaagaatggaatagaggagctgcaccaagttcacgcttcatattcgcagagaagaatgcaaactatgttctgcttacctgaacaataagtgtcttgagaagcttcttctggattccaccgtggtcaagccttgtgatgaaatcagatgatgatgacgcaattggcttctgtgacctacaattatgggcatgctgatgctacctagaacctcactacactggatgacagtgtagcatacaagctccaatcggttggctttggtgacaatggagggaggagggaagggtagtggagtttggtatatagatccacccagatggagtggagtacagtacaatgatagacagtgaagagacgagaagattcaattttatttgagttgagcctcaaagttatctacaacagtccactctacagtactatagtgggcaacaaatgtatggacatatgcacgctttgttagtcaaaaggtttagaaatttaggtgtgggagaaagaaaaaaaataaccttgtgaactgcgaagttttttttctcttaaatctcatgataacatttagccatatacagtgactgagaggtgagagcacgctacctgcttggttcctggaacctccttgacgtggagcgaatgcaacaggttcctcaggatgcgggcgc

SEQ ID NO: 55140 - DNA, 1550 bp, Zea Mays
cgacagtcgtcacagtccctcgcgtagacgcgcacccacctccatccctcccatcctagacctgctcccccgccgccatgacgatcttgcgtcggccgtcgcacacccgccgaccctaccatcgcagaccccctccccattgtcagatcgatccttcatcgccccccgatgacaacggcttctcggatgctagggcacctgccacccacccatctccctcccatcccagatccctcgcgccatggccaacgcctccccccagtggcttacgctagcgcacctgcccacctccctccctctcccccgcccagccatggccatcgcctttgactctccgacctcctcccccgctgaaattcctgctctgaaatacgctcgcttctgctgcctagatctggtacccctgttgtcaccacgtttttgccaccaccgtcaccagctcagagctttccctccattgcttcctcctcgtcgtggtctcctctgtgtcactccgctcgagctcgccatcctcttgccagcgcgactccgtggagcgtgcgagacagtgccggtggccgcggagacccgccacggggacatggagggactccaaaactaaatcaacaagttggagatcctccttcctgcagcgcagaagcacagctggttctttcaggcgcagcaaactctgttcagataaaaatttgtgttaactgatgctcaaattactgaagaatggaatagaggagctgcaccaagttcacgcttcatattcgcagagaagaatgcaaactatgttctgcttacctgaacaataagtgtcttgagaagcttcttctggattccaccgtggtcaagccttgtgatgaaatcagatgatgatgacgcaattggcttctgtgacctacaattatgggcatgctgatgctacctagaacctcactacactggatgacaggtgaataagcagacaatagttgagtgttgtcatcaggttgcatctaccatgactgagattgtgagcttatgtatctatcgatcattgtattactcactctttctcagtataagttgaatactcagcatactatatatatatatgtgatacagcgcccgatagggcgctactttttctagtgtagcatacaagctccaatcggttggctttggtgacaatggagggaggagggaagggtagtggagtttggtatatagatccacccagatggagtggagtacagtacaatgatagacagtgaagagacgagaagattcaattttatttgagttgagcctcaaagttatctacaacagtccactctacagtactatagtgggcaacaaatgtatggacatatgcacgctttgttagtcaaaaggtttagaaatttaggtgtgggagaaagaaaaaaaataaccttgtgaactgcgaagttttttttctcttaaatctcatgataacatttagccatatacagtgactgagaggtgagagcacgctacctgcttggttcctggaacctccttgacgtggagcgaatgcaacaggttcctcaggatgcgggcgc

SEQ ID NO: 55141 - DNA, 2010 bp, Zea Mays
ttcgacagtcgtcacagtccctcgcgtagacgcgcacccacctccatccctcccatcctagacctgctcccccgccgccatgacgatcttgcgtcggccgtcgcacacccgccgaccctaccatcgcagaccccctccccattgtcagatcgatccttcatcgccccccgatgacaacggcttctcggatgctagggcacctgccacccacccatctccctcccatcccagatccctcgcgccatggccaacgcctccccccagtggcttacgctagcgcacctgcccacctccctccctctcccccgcccagccatggccatcgcctttgactctccgacctcctcccccgctgaaattcctgctctgaaatacgctcgcttctgctgcctagatctggtacccctgttgtcaccacgtttttgccaccaccgtcaccagctcagagctttccctccattgcttcctcctcgtcgtggtctcctctgtgtcactccgctcgagctcgccatcctcttgccagcgcgactccgtggagcgtgcgagacagtgccggtggccgcggagacccgccacggggacatggaggggtaggtgttgccacagttcgtagatttcaacgcctggtacacacacgcgatctccactaccgagctcgtggactacaggtttgtgcgggggatcatggtcatcctcatccaccctacagatacaccatgtgggaggccatccaacgcagaagcacagctggttctttcaggcgcagcaaactctgttcagataaaaatttgtgttaactgatgctcaaattactgaagaatggaatagaggagctgcaccaagttcacgcttcatattcgcagagaagaatgcaaactatgttctgcttacctgaacaataagtgtcttgagaagcttcttgtaagtgaggtgatctctacttatgcgcagtagctctttgcttgctgacttcaacatatctgttaccaaatcatcctgagcttgaaggactttaattctagaagcattgagctgcattgagtaatcactgcataagaccacacacagtaatatcagtgaattgatattttttacacaaaagaaaaatagtatggtcaccggcatatgctaaagtggggaaatatccataatggcccgtagacaatagtagctatgaagtgtgacataggtaaaacagaaacaagtcacaagaatgggaataagaaattgagttagaactgctatttacattttcttcttgatgccaataacttgctagctggattccaccgtggtcaagccttgtgatgaaatcagatgatgatgacgcaattggcttctgtgacctacaattatgggcatgctgatgctacctagaacctcactacactggatgacaggtgaataagcagacaatagttgagtgttgtcatcaggttgcatctaccatgactgagattgtgagcttatgtatctatcgatcattgtattactcactctttctcagtataagttgaatactcagcatactatatatatatatgtgatacagcgcccgatagggcgctactttttctagtgtagcatacaagctccaatcggttggctttggtgacaatggagggaggagggaagggtagtggagtttggtatatagatccacccagatggagtggagtacagtacaatgatagacagtgaagagacgagaagattcaattttatttgagttgagcctcaaagttatctacaacagtccactctacagtactatagtgggcaacaaatgtatggacatatgcacgctttgttagtcaaaaggtttagaaatttaggtgtgggagaaagaaaaaaaataaccttgtgaactgcgaagttttttttctcttaaatctcatgataacatttagccatatacagtgactgagaggtgagagcacgctacctgcttggttcctggaacctccttgacgtggagcgaatgcaacaggttcctcaggatgcgggcgc

SEQ ID NO: 55142 - DNA, 1539 bp, Zea Mays
caggcttcgacagtcgtcacagtccctcgcgtagacgcgcacccacctccatccctcccatcctagacctgctcccccgccgccatgacgatcttgcgtcggccgtcgcacacccgccgaccctaccatcgcagaccccctccccattgtcagatcgatccttcatcgccccccgatgacaacggcttctcggatgctagggcacctgccacccacccatctccctcccatcccagatccctcgcgccatggccaacgcctccccccagtggcttacgctagcgcacctgcccacctccctccctctcccccgcccagccatggccatcgcctttgactctccgacctcctcccccgctgaaattcctgctctgaaatacgctcgcttctgctgcctagatctggtacccctgttgtcaccacgtttttgccaccaccgtcaccagctcagagctttccctccattgcttcctcctcgtcgtggtctcctctgtgtcactccgctcgagctcgccatcctcttgccagcgcgactccgtggagcgtgcgagacagtgccggtggccgcggagacccgccacggggacatggaggggtaggtgttgccacagttcgtagatttcaacgcctggtacacacacgcgatctccactaccgagctcgtggactacaggtttgtgcgggggatcatggtcatcctcatccaccctacagatacaccatgtgggaggccatccaaactccaaaactaaatcaacaagttggagatcctccttcctgcagcgcagaagcacagctggttctttcaggcgcagcaaactctgttcagataaaaatttgtgttaactgatgctcaaattactgaagaatggaatagaggagctgcaccaagttcacgcttcatattcgcagagaagaatgcaaactatgttctgcttacctgaacaataagtgtcttgagaagcttcttctggattccaccgtggtcaagccttgtgatgaaatcagatgatgatgacgcaattggcttctgtgacctacaattatgggcatgctgatgctacctagaacctcactacactggatgacagggcgctactttttctagtgtagcatacaagctccaatcggttggctttggtgacaatggagggaggagggaagggtagtggagtttggtatatagatccacccagatggagtggagtacagtacaatgatagacagtgaagagacgagaagattcaattttatttgagttgagcctcaaagttatctacaacagtccactctacagtactatagtgggcaacaaatgtatggacatatgcacgctttgttagtcaaaaggtttagaaatttaggtgtgggagaaagaaaaaaaataaccttgtgaactgcgaagttttttttctcttaaatctcatgataacatttagccatatacagtgactgagaggtgagagcacgctacctgcttggttcctggaacctccttgacgtggagcgaatgcaacaggttcctcaggatgcgggcgc

SEQ ID NO: 55143 - DNA, 2156 bp, Zea Mays
cggactcggaatacaggcttcgacagtcgtcacagtccctcgcgtagacgcgcacccacctccatccctcccatcctagacctgctcccccgccgccatgacgatcttgcgtcggccgtcgcacacccgccgaccctaccatcgcagaccccctccccattgtcagatcgatccttcatcgccccccgatgacaacggcttctcggatgctagggcacctgccacccacccatctccctcccatcccagatccctcgcgccatggccaacgcctccccccagtggcttacgctagcgcacctgcccacctccctccctctcccccgcccagccatggccatcgcctttgactctccgacctcctcccccgctgaaattcctgctctgaaatacgctcgcttctgctgcctagatctggtacccctgttgtcaccacgtttttgccaccaccgtcaccagctcagagctttccctccattgcttcctcctcgtcgtggtctcctctgtgtcactccgctcgagctcgccatcctcttgccagcgcgactccgtggagcgtgcgagacagtgccggtggccgcggagacccgccacggggacatggaggggtaggtgttgccacagttcgtagatttcaacgcctggtacacacacgcgatctccactaccgagctcgtggactacaggtttgtgcgggggatcatggtcatcctcatccaccctacagatacaccatgtgggaggccatccaagttagtgcccattcgctcctcttcccccatgcccatgttgtgcatcatcctgcattgaacgttgctggtgtaaagatgaagagagtgattacaagtgtttctgcctgcatagttgtagattttgaagcatcgtgatgttccatttgtgcatagaatggtcccgaaatggtgtttaggtaataggcacgaatagcgtgtttttgttgttctggttccttgctttatttgcatactcattccttgcagactccaaaactaaatcaacaagttggagatcctccttcctgcagcgcagaagcacagctggttctttcaggcgcagcaaactctgttcagataaaaatttgtgttaactgatgctcaaattactgaagaatggaatagaggagctgcaccaagttcacgcttcatattcgcagagaagaatgcaaactatgttctgcttacctgaacaataagtgtcttgagaagcttcttgtaagtgaggtgatctctacttatgcgcagtagctctttgcttgctgacttcaacatatctgttaccaaatcatcctgagcttgaaggactttaattctagaagcattgagctgcattgagtaatcactgcataagaccacacacagtaatatcagtgaattgatattttttacacaaaagaaaaatagtatggtcaccggcatatgctaaagtggggaaatatccataatggcccgtagacaatagtagctatgaagtgtgacataggtaaaacagaaacaagtcacaagaatgggaataagaaattgagttagaactgctatttacattttcttcttgatgccaataacttgctagctggattccaccgtggtcaagccttgtgatgaaatcagatgatgatgacgcaattggcttctgtgacctacaattatgggcatgctgatgctacctagaacctcactacactggatgacagggcgctactttttctagtgtagcatacaagctccaatcggttggctttggtgacaatggagggaggagggaagggtagtggagtttggtatatagatccacccagatggagtggagtacagtacaatgatagacagtgaagagacgagaagattcaattttatttgagttgagcctcaaagttatctacaacagtccactctacagtactatagtgggcaacaaatgtatggacatatgcacgctttgttagtcaaaaggtttagaaatttaggtgtgggagaaagaaaaaaaataaccttgtgaactgcgaagttttttttctcttaaatctcatgataacatttagccatatacagtgactgagaggtgagagcacgctacctgcttggttcctggaacctccttgacgtggagcgaatgcaacaggttcctcaggatgcgggcgc

SEQ ID NO: 55144 - DNA, 1701 bp, Zea Mays
acaacccatctgtcttcaacacgtgtgttgttctgctcggactcggaatacaggcttcgacagtcgtcacagtccctcgcgtagacgcgcacccacctccatccctcccatcctagacctgctcccccgccgccatgacgatcttgcgtcggccgtcgcacacccgccgaccctaccatcgcagaccccctccccattgtcagatcgatccttcatcgccccccgatgacaacggcttctcggatgctagggcacctgccacccacccatctccctcccatcccagatccctcgcgccatggccaacgcctccccccagtggcttacgctagcgcacctgcccacctccctccctctcccccgcccagccatggccatcgcctttgactctccgacctcctcccccgctgaaattcctgctctgaaatacgctcgcttctgctgcctagatctggtacccctgttgtcaccacgtttttgccaccaccgtcaccagctcagagctttccctccattgcttcctcctcgtcgtggtctcctctgtgtcactccgctcgagctcgccatcctcttgccagcgcgactccgtggagcgtgcgagacagtgccggtggccgcggagacccgccacggggacatggaggggtaggtgttgccacagttcgtagatttcaacgcctggtacacacacgcgatctccactaccgagctcgtggactacaggtttgtgcgggggatcatggtcatcctcatccaccctacagatacaccatgtgggaggccatccaattgtagattttgaagcatcgtgatgttccatttgtgcatagaatggtcccgaaatggtgtttaggtaataggcacgaatagcgtgtttttgttgttctggttccttgctttatttgcatactcattccttgcagactccaaaactaaatcaacaagttggagatcctccttcctgcagcgcagaagcacagctggttctttcaggcgcagcaaactctgttcagataaaaatttgtgttaactgatgctcaaattactgaagaatggaatagaggagctgcaccaagttcacgcttcatattcgcagagaagaatgcaaactatgttctgcttacctgaacaataagtgtcttgagaagcttcttctggattccaccgtggtcaagccttgtgatgaaatcagatgatgatgacgcaattggcttctgtgacctacaattatgggcatgctgatgctacctagaacctcactacactggatgacagcatacaagctccaatcggttggctttggtgacaatggagggaggagggaagggtagtggagtttggtatatagatccacccagatggagtggagtacagtacaatgatagacagtgaagagacgagaagattcaattttatttgagttgagcctcaaagttatctacaacagtccactctacagtactatagtgggcaacaaatgtatggacatatgcacgctttgttagtcaaaaggtttagaaatttaggtgtgggagaaagaaaaaaaataaccttgtgaactgcgaagttttttttctcttaaatctcatgataacatttagccatatacagtgactgagaggtgagagcacgctacctgcttggttcctggaacctccttgacgtggagcgaatgcaacaggttcctcaggatgcgggcgc

SEQ ID NO: 55145 - DNA, 1726 bp, Zea Mays
cattttcgtgcagccgcgcgctccctgccctccccgcccacccggccaggcccaattttgaaaccccaaatccccaacaccttcagcccctcgtgcgcccgtggaccgccagatccccacggccgccgaggcactctcctccttgcaccgagtactctccttgcaccccctctcatgcccgcatcttcagaagccgcgggcgctctcggcggcgggggagacgtcgagcaggactacgagattcgcaacgacgagggctttgtctacaaggttcccagagggctctaccacgaggccgcaccctccaccacccagtcggcggcgggcaccgaccccaaggccgccggcctgcgccgccgctgccgcgcgctcctccgcctccgcgccaagcgcctccgcgacctctcccgctgggaggccctcgcctccgaactcttcgccccgctttccgctccccagccaccggctccaccatcccaagcccctcccgcctcatctcattcagtcgctgcctcctcctcctcctccccgacctccgttcttgacgagctcctcgcacaggttgacattcaggcggagctgatgaagaaggtgcaccagtggtgcgacgaggccaacgccatttgcgacgcaggagagtctgccatcgttgcttctatggttgcgctgccgttgtggggtggcaacccagcggatctggtaacggcgctgtgcagccctgatgaaaaggcccatggaccataaaagaccaaaacacctctcctaatgattcctatccatgctcggcctttaccacaagccgagacttttgacaaggatcatgattggaaaattcatgcaaagaaacttcgtggtgaacgtcggccttgtgtttgctcactatgcaatagtgaccactacacccccctgtcaaattgtaacttggatggacagagtgggcgccaagtagcttctggactgtcttcagcagctgctgaaatgataaaaaatagtgccaagaaacaaacaatgggtcatgaccttcctcacaatctcactgagagcaggatgatgaaaagagtaactaacctttcaggccccaatattgttgcatcacaagcctctaatgaacgaaagaggaagaaggcgtcagggagagcatctactgcctcacgtactccaggatcaacgacgagaaggaaggccgcgtccactccaacaagagatccagcggcattttctagccctgggccactaaccaggagaagggcagcagctctaaatgtatcaccactcggggaggctcataatagtcaacaggtcttgtaatctggattggggagagtaggaaaggtgagaatatgtgtttgtacacaagtgttgtttgctgctgctgtacctagaaaactaggggattttttttgctagtgataagccatcaactgtcatcttgtgtactaccttcgttctcgaatatttgtcgtcagctagttcattttttaactaaacggcgacaaataaaaaagaacggagggagtaattgtgaagttccagccgcagatggtatttatcaagtactgctgtattggtggtgactagtgagtcgttcatataagtgcatgtctgctccttggaaacactgatcatgtatgtaatggctgttagttctctggatttcacaggacatgccaacagtgtattctatctatgtttcaaatggaggctgttgtatttctcgactccaatc

SEQ ID NO: 55146 - DNA, 2090 bp, Zea Mays
cattttcgtgcagccgcgcgctccctgccctccccgcccacccggccaggcccaattttgaaaccccaaatccccaacaccttcagcccctcgtgcgcccgtggaccgccagatccccacggccgccgaggcactctcctccttgcaccgagtactctccttgcaccccctctcatgcccgcatcttcagaagccgcgggcgctctcggcggcgggggagacgtcgagcaggactacgagattcgcaacgacgagggctttgtctacaaggttcccagagggctctaccacgaggccgcaccctccaccacccagtcggcggcgggcaccgaccccaaggccgccggcctgcgccgccgctgccgcgcgctcctccgcctccgcgccaagcgcctccgcgacctctcccgctgggaggccctcgcctccgaactcttcgccccgctttccgctccccagccaccggctccaccatcccaagcccctcccgcctcatctcattcagtcgctgcctcctcctcctcctccccgacctccgttcttgacgagctcctcgcacaggttgacattcaggcggagctgatgaagaaggtgcaccagtggtgcgacgaggccaacgccatttgcgacgcaggagagtctgccatcgttgcttctatggttgcgctgccgttgtggggtggcaacccagcggatctggtaacggcgctgtgcagccctgatgaaaaggcccatggtactactttatactaattaggcacttttggaatacgactagtgactctctagtaaaggttcactggcggtattacaactgaattgttgttagattgggaaatttttagccttttgcatttgcacagtttccttttcctggtatcacatgcattgggcattgaggttttgccatctttgttgtgtctaagatctgtctgctcagctgctctttggtcgtggacgaactgaaaattccatgaaggccctggagtaacaacctgtgactttgagaacttagagtgtctccaacaaactagccaaatggctcgtcaagtcaaatttggaccataaaagaccaaaacacctctcctaatgattcctatccatgctcggcctttaccacaagccgagacttttgacaaggatcatgattggaaaattcatgcaaagaaacttcgtggtaacttggatggacagagtgggcgccaagtagcttctggactgtcttcagcagctgctgaaatgataaaaaatagtgccaagaaacaaacaatgggtcatgaccttcctcacaatctcactgagagcaggatgatgaaaagagtaactaacctttcaggccccaatattgttgcatcacaagcctctaatgaacgaaagaggtttgagcaattgtggctcccaaatccttattttaccttttcgtttgccccttgcatgttgcactccacgtaatgctttcaatgggaactttttcctcggcaggaagaaggcgtcagggagagcatctactgcctcacgtactccaggatcaacgacgagaaggaaggccgcgtccactccaacaagagatccagcggcattttctagccctgggccactaaccaggagaagggcagcagctctaaatgtatcaccactcggggaggctcataatagtcaacaggtcttgtaatctggattggggagagtaggaaaggtgagaatatgtgtttgtacacaagtgttgtttgctgctgctgtacctagaaaactaggggattttttttgctagtgataagccatcaactgtcatcttgtgtactaccttcgttctcgaatatttgtcgtcagctagttcattttttaactaaacggcgacaaataaaaaagaacggagggagtaattgtgaagttccagccgcagatggtatttatcaagtactgctgtattggtggtgactagtgagtcgttcatataagtgcatgtctgctccttggaaacactgatcatgtatgtaatggctgttagttctctggatttcacaggacatgccaacagtgtattctatctatgtttcaaatggaggctgttgtatttctcgactccaatc

SEQ ID NO: 55147 - DNA, 1509 bp, Zea Mays
cattttcgtgcagccgcgcgctccctgccctccccgcccacccggccaggcccaattttgaaaccccaaatccccaacaccttcagcccctcgtgcgcccgtggaccgccagatccccacggccgccgaggcactctcctccttgcaccgagtactctccttgcaccccctctcatgcccgcatcttcagaagccgcgggcgctctcggcggcgggggagacgtcgagcaggactacgagattcgcaacgacgagggctttgtctacaaggttcccagagggctctaccacgaggccgcaccctccaccacccagtcggcggcgggcaccgaccccaaggccgccggcctgcgccgccgctgccgcgcgctcctccgcctccgcgccaagcgcctccgcgacctctcccgctgggaggccctcgcctccgaactcttcgccccgctttccgctccccagccaccggctccaccatcccaagcccctcccgcctcatctcattcagtcgctgcctcctcctcctcctccccgacctccgttcttgacgagctcctcgcacaggttgacattcaggcggagctgatgaagaaggtgcaccagtggtgcgacgaggccaacgccatttgcgacgcaggagagtctgccatcgttgcttctatggttgcgctgccgttgtggggtggcaacccagcggatctggtaacttggatggacagagtgggcgccaagtagcttctggactgtcttcagcagctgctgaaatgataaaaaatagtgccaagaaacaaacaatgggtcatgaccttcctcacaatctcactgagagcaggatgatgaaaagagtaactaacctttcaggccccaatattgttgcatcacaagcctctaatgaacgaaagaggaagaaggcgtcagggagagcatctactgcctcacgtactccaggatcaacgacgagaaggaaggccgcgtccactccaacaagagatccagcggcattttctagccctgggccactaaccaggagaagggcagcagctctaaatgtatcaccactcggggaggctcataatagtcaacaggtcttgtaatctggattggggagagtaggaaaggtgagaatatgtgtttgtacacaagtgttgtttgctgctgctgtacctagaaaactaggggattttttttgctagtgataagccatcaactgtcatcttgtgtactaccttcgttctcgaatatttgtcgtcagctagttcattttttaactaaacggcgacaaataaaaaagaacggagggagtaattgtgaagttccagccgcagatggtatttatcaagtactgctgtattggtggtgactagtgagtcgttcatataagtgcatgtctgctccttggaaacactgatcatgtatgtaatggctgttagttctctggatttcacaggacatgccaacagtgtattctatctatgtttcaaatggaggctgttgtatttctcgactccaatc

SEQ ID NO: 55148 - DNA, 1483 bp, Zea Mays
ctccaatgtatcgaaagtttcaattgctaggcacattttaatcagaggcattgaacaatgatggtatggttgacaaaaaaaaccctatctcctctctatctctcaatgtgaggagtagtcatgtgtaaatctatagcacattattggaaactggagcatgtactaaaatatgcactccggcactaaatcagttgcaaacttccagtaggttatgcatcaaggaaaatatataataatggtgtcagtgtgaagaaggagcaatcatgtgtacatgtgtagcacattattgaaaaatgaagcttatactaaaatctgcattccagcacattactggaaactcgagtatattatactaaaatatgtattccaaatatttatttaggcatttgatcgaacatcttgcgcgcatggtgcaccagcaacaactcgcttccaatagcagtaggagccatgtgagctctccgcccttcgccttgccgcagctccatcattcatatccgacatggactgacttcctcttgtcggggttagggagaagagcgagggcgaaggcgacattcacggcagcaaatattcgagagattggaaaaccctagataccagtatatgctactgaggaagaagaaaaggtcataataaggtgttggatgaaccagcttccgacacgggatgactccctatcgtctaggtcagagagaggagcgagggcgagtgcgacattgacggccgcgaagatcgagagactgaaaaattctagataccggtttgcgctactgaggaagaagaaaaggccataaggtgttggacgaacctgcagatgttgtggaggcgaacgcaacgcacgaggtttgaggacgcacgactactggtctccggcgtcactgtcgccctcgctggagatgccaggccgtttgagaggaggcccttttaggggacggaggtgaggtattcgtacattcctttttctcttacttttagctattgttggttcatagttggtagatttggtagtatgtattagaataaagagtaaactaaagtagtgtatgatagtttaaaatgtgacatacaaaaatgttcttcttaatgtttgaatgcacagttatggaggaactcttagctaaaactatctaaagcataataggtatttatttgtatgaaactatacatagtcttcaaaaccagaaaaccaattttaaggaacatgaaagcacattgctgaaggaaaaaaggatcccaaagaggaatcaaaaggctagatatagatcatacttaggaagcataaaatggcttacagaaaactaatagcatctagaatttcaaaagtactcttaccagtgatacatacacgacgtccgatgcaacaatgtttgaggacctttgaaggtgccaacttcctttaattccgtcgttgtaggctaaataaaaaggcaggtatattagtggttcacaaatttttaaaaatgtaataaaaattttgaag

SEQ ID NO: 55149 - DNA, 2200 bp, Zea Mays
gggttagcgtatcgaaatcaatcgtgttcctcgcctgcacgacgagagcccgagaccaatccagccgccgcctccgccttcgcctcgcctagtattccctccgattcagaggccgatggagtgcatcgccgagatgccccgcgcgccgctggacagcaggctgcgcaagcgtcagcgtctcggctgggacgtcggccctgccgagatgtataaggccgtgcggccgcggcacgggtgggacgtcggccccgccgagatgtatcagaactttgtggacaagaagttgtgaatgccatcagtgctgcagccttgggcctttcgtcgggctgtgtttcttctcaagtcaaacaagagcagcctcatgatggttcccctcctctgagagaagatgacagggatgggcattatgtttttgctgttggagataacctcacatctcgctataagatcaatgcaaaaatgggagaaggtcagtttggatggccatgtcttctgaaataattgattaaactcgcgtttggcatgctgtgcaacacatgcagcaggttatgtttgtaacgaatgtgtctggaatacattaggtacctttggtcaggtgttggagtgttgggacaaggaaaggaaagaaatggtggctatcaaaatcattaggggcattaaaaagtacagggatgctgcaatgatcgaaattggcatgctcgagcagcttggtaaatatgatgaaagtagatctaggtgagtttgctggttcggttaacacccttctgtatgctttacattcataagattgcttgtatatataagctggtctattttgcagttgtgttcaaattcggaactggtttgactatcgtaaccatatctgtattgtaagtacattgttagattgtggcaattatgaactgacccaaaaagataaccatgtggtgcttaaacattggtgaatttggatcaatggtgagcaggtctttgagaggcttggaccaagcttatatgattttctgcgggaaaacagttaccgctcattcccaattgccctagttcgggagattgccaaacaactgttggaatgtatagcatgtgtgtgcacagttcttcctattatcgctcctgcactataatgcatatacattagtttttttttgcaatatatgtgcagcattgtagcctatcattaatccatattactactcatgcttaaggaatatctaacatcatgggatgtttatgtatttaccctctctctgtaatgtgttgcagttatgcacgaattgtgtctcatacacactgatttaaagcctgagaacattctccttgtttctccggagtacattaaagtgcctgattacaaagtttcatcccgatccccaaaggagggatcctattacaagcgggtgcccaagtctagtgctatcaaggtgattgattttggtagcactacctatgatcaacaggatcagagttatgttgtgtcgacgaggcattatcgggctccagaagttatactgggacttggatggagttacccatgtgatatctggagtgttggttgtattcttgttgagctttgcacgggtgaggcgatattccagactcacgaaaacttggaacatctggctatgatggagagggttcttggacctttgccataccatatgttcaagagggcagatcggcactctgacaaatacatcagaaaaggacgcctgaattggcctgagggttgcacttcgcgtgaaagcatgaaagctgtgatgaaattgtccaggcttcagaacctggtgatgcaaaatgtggatcaagctgcaggagatttcattgaccttttgcaagggctgctgaagtatgatccatcaagccgtttaacagcacgagaggccctgaggcatcccttctttacccaagggttttggcgaagatgatgatactccttgcattctaccttgtttgtctgacttgatgtcttgcatttgacagtctgtacttttcagtggtgtatgtaggcggtagatcaatctgtataaagccgttgtagagttgtttcagtcttgtttggaacgtcgtgcagattaagttgtagcataatggaagtcaaatggatgcatttgactttaaatcctgacttgtttgaatttggaatgtcaatggaaatctggtttgaggagaaagtgaacatcatatattaaggccctgtttgatt

SEQ ID NO: 55150 - DNA, 1475 bp, Zea Mays
gggttagcgtatcgaaatcaatcgtgttcctcgcctgcacgacgagagcccgagaccaatccagccgccgcctccgccttcgcctcgcctagtattccctccgattcagaggccgatggagtgcatcgccgagatgccccgcgcgccgctggacagcaggctgcgcaagcgtcagcgtctcggctgggacgtcggccctgccgagatgtataaggccgtgcggccgcggcacgggtgggacgtcggccccgccgagatgtatcagttagaactttgtggacaagaagttgtgaatgccatcagtgctgcagccttgggcctttcgtcgggctgtgtttcttctcaagtcaaacaagagcagcctcatgatggttcccctcctctgagagaagatgacagggatgggcattatgtttttgctgttggagataacctcacatctcgctataagatcaatgcaaaaatgggagaaggtacctttggtcaggtgttggagtgttgggacaaggaaaggaaagaaatggtggctatcaaaatcattaggggcattaaaaagtacagggatgctgcaatgatcgaaattggcatgctcgagcagcttggtaaatatgatgaaagtagatctaggtttcatcccgatccccaaaggagggatcctattacaagcgggtgcccaagtctagtgctatcaaggtgattgattttggtagcactacctatgatcaacaggatcagagttatgttgtgtcgacgaggcattatcgggctccagaagttatactgggacttggatggagttacccatgtgatatctggagtgttggttgtattcttgttgagctttgcacgggtgaggcgatattccagactcacgaaaacttggaacatctggctatgatggagagggttcttggacctttgccataccatatgttcaagagggcagatcggcactctgacaaatacatcagaaaaggacgcctgaattggcctgagggttgcacttcgcgtgaaagcatgaaagctgtgatgaaattgtccaggcttcagaacctggtgatgcaaaatgtggatcaagctgcaggagatttcattgaccttttgcaagggctgctgaagtatgatccatcaagccgtttaacagcacgagaggccctgaggcatcccttctttacccaagggttttggcgaagatgatgatactccttgcattctaccttgtttgtctgacttgatgtcttgcatttgacagtctgtacttttcagtggtgtatgtaggcggtagatcaatctgtataaagccgttgtagagttgtttcagtcttgtttggaacgtcgtgcagattaagttgtagcataatggaagtcaaatggatgcatttgactttaaatcctgacttgtttgaatttggaatgtcaatggaaatctggtttgaggagaaagtgaacatcatatattaaggccctgtttgatt

SEQ ID NO: 55151 - DNA, 930 bp, Zea Mays
ctcaaatctcgtacaaaaaaaatgctcaaaaagaagtttcgagtcgatggcagtgggtataccaccggagcacgacacggccagcagaccctgccccggttcaactgccgtggccgtctcgtccccgtccagtccacctttccctcttcatctccgactccgccggcggcggaaccccaaccggcgaggatggggaacatcttcgtgaagaagcccaagatcaccgaagtggacagggccatcctcaccctcaagacgcagcgccgcaagctcgcccagttccagcagcagcttgagaaggtaattgaagcagaaaaggaagctgcacggcagttggttcaacagaagaagagagacagagctttgattgcactgaagaagaagaaagctcaggaagagctgttgaaacaagttgacacatggcaaatgaatgttgaacaacagctctcagatattgaactagcaagtaaacaaaaggctgtatttgaaagcctgaaggctggaaacgctgcccttaagtctatacagaatgagataaacattgatgatgtccaaaagctgatggatgacacagccgaggctaaggcttatcaagatgaaataaatgctgttctgggtgagcagctctcggctgaggatgaagaagctgttatggctgagtttgaaaacctagaagctcagcttgccgtcgagtctttgccagacactcctgttactgaagtaagacctgaagagaaaatgaaagctccggctgacacagaagctgtgcctgaggacatagatgaggctattgagctccctgatgtgcctatgaaagcgccagagaggcctgaagctccagaaaaaaccaaaggtaccatatgctatggattatcttctagctgacttcaacatctgcatggtgtaatgcacaatcacggaatagggaac

SEQ ID NO: 55152 - DNA, 1153 bp, Zea Mays
ctcaaatctcgtacaaaaaaaatgctcaaaaagaagtttcgagtcgatggcagtgggtataccaccggagcacgacacggccagcagaccctgccccggttcaactgccgtggccgtctcgtccccgtccagtccacctttccctcttcatctccgactccgccggcggcggaaccccaaccggcgaggatggggaacatcttcgtgaagaagcccaagatcaccgaagtggacagggccatcctcaccctcaagacgcagcgccgcaagctcgcccagttccagcagcagctctcagatattgaactagcaagtaaacaaaaggctgtatttgaaagcctgaaggctggaaacgctgcccttaagtctatacagaatgagataaacattgatgatgtccaaaagctgatggatgacacagccgaggctaaggcttatcaagatgaaataaatgctgttctgggtgagcagctctcggctgaggatgaagaagctgttatggctgagtttgaaaacctagaagctcagcttgccgtcgagtctttgccagacactcctgttactgaagtaagacctgaagagaaaatgaaagctccggctgacacagaagctgtgcctgaggacatagatgaggctattgagctccctgatgtgcctatgaaagcgccagagaggcctgaagctccagaaaaaaccaaagttttggaggagccactgcctgcttagtggatgaaactgagattagtaggacacacttagtttgcaggaattgtaacatacccactatttcattgtactatcttattttcagccatatcagaattttattgtgtacagcaagaaaatttggtgtttttgcaccatcaactatcactagtttggatttctcagtgccaatttatagtcacattctacgggtggggggtaagcataatattttcattgcgtttatttgaaggcagaaatgctgaagtttgcaggcgcatacctcgttccgtatgaacacacgtatgtttttgccaaagctgtaaaatatacgccatttgtaggtgctacttgttgcttgaatttttttatggggcgtgtacaataaaatattcaaacatgtatgcggttctggcactcaatcagagcagtctgtatcgagtaaggt

SEQ ID NO: 55153 - DNA, 1299 bp, Zea Mays
ctcaaatctcgtacaaaaaaaatgctcaaaaagaagtttcgagtcgatggcagtgggtataccaccggagcacgacacggccagcagaccctgccccggttcaactgccgtggccgtctcgtccccgtccagtccacctttccctcttcatctccgactccgccggcggcggaaccccaaccggcgaggatggggaacatcttcgtgaagaagcccaagatcaccgaagtggacagggccatcctcaccctcaagacgcagcgccgcaagctcgcccagttccagcagcagcttgagaaggtaattgaagcagaaaaggaagctgcacggcagttggttcaacagaagaagagagacagagctttgattgcactgaagaagaagaaagctcaggaagagctgttgaaacaagttgacacatggcaaatgaatgttgaacaacagatattgaactagcaagtaaacaaaaggctgtatttgaaagcctgaaggctggaaacgctgcccttaagtctatacagaatgagataaacattgatgatgtccaaaagctgatggatgacacagccgaggctaaggcttatcaagatgaaataaatgctgttctgggtgagcagctctcggctgaggatgaagaagctgttatggctgagtttgaaaacctagaagctcagcttgccgtcgagtctttgccagacactcctgttactgaagtaagacctgaagagaaaatgaaagctccggctgacacagaagctgtgcctgaggacatagatgaggctattgagctccctgatgtgcctatgaaagcgccagagaggcctgaagctccagaaaaaaccaaagttttggaggagccactgcctgcttagtggatgaaactgagattagtaggacacacttagtttgcaggaattgtaacatacccactatttcattgtactatcttattttcagccatatcagaattttattgtgtacagcaagaaaatttggtgtttttgcaccatcaactatcactagtttggatttctcagtgccaatttatagtcacattctacgggtggggggtaagcataatattttcattgcgtttatttgaaggcagaaatgctgaagtttgcaggcgcatacctcgttccgtatgaacacacgtatgtttttgccaaagctgtaaaatatacgccatttgtaggtgctacttgttgcttgaatttttttatggggcgtgtacaataaaatattcaaacatgtatgcggttctggcactcaatcagagcagtctgtatcgagtaaggt

SEQ ID NO: 55154 - DNA, 1980 bp, Zea Mays
cttcttttttaaaaaataaaaacgagtgctatcacagcggtgtgcgcaaacggctgcgcacatgtttgggaatgcagttttgaaatattataattttaagataccatagtttacaattgtaaatgatataaatactacggtattgctttaccacagtaaaactacagtattgcttaaaaccgagatatgtttggttctattggaaaaacaaagtatatgtagagagaagagaagagaactgaggccctgagtggagtttcgaaaactccaaaaataccatagttttaggtaaaccatggtatttaaaactaagttttggctgtacaaaccaaacaacttttaaccttcaatactatagtatcatcaaataccatagtattgtttcaaaactgcaaaaattctacaattccaaacagggcctaagggtttaaccattatatatattggctataatgtaatctataaagacttttatagccacagttagctatattattaacctaggtgctgtttggttcaaaaaatgtaacgcaaatggtaatggtaatggtttcgactcgattactcgcggtaacaaatttgaataggctggtatcaaattttagtgtgatatctgattacggttggactaaaacaaacatgatttaacgttatccgttactcattacgttacaaatatgtgaaccaaacggcaccctagttcatggatgatgacgtgtaaaatgaacgttcgtctgtcgtcttcccgtaccccgtgtcggcgggtcgacgggtttctctctccctcacctgagagcgtcctcttttctacaagctcgcatctaccatgtactatgcacatccactacccgctggagataacacatgcactttcaggactcaggagtagccatggccctccagcctccagtttctttttttctttcatgccgttcacgtgctgctgtacgcctgtaccaaaaagaacttggagtacatacatctccagggacgaaacacttgcagccacagaatcgtgcgctgttccctcgtgttgtgttggtaccaataccaactgcgcgagactacagcttgttcacattgatgcacaccaaaaagaaacgaaaagggatctttttctttacacgacattgatgtgtggtaatccgtctgcactgcatttacctgcacaagggaacgttgcaaggctcgccgccggcgcggtcgcagactgaggcgtggagccggaggagctggagcgcgcgcctgcagcgcgggcaggcggcgggcttcctggtcctgccgccgcacgcggccaagtgtcgcatgagctgctcgagcccccggcggacgccgccgtcctcgcgcgacgaggctgcactggcgcacgcggaccatccctccccatcgccggcgaagatgcggtccaggaaggccatggcgtcgctgagctgcccgtacacgtgctgcgacgcgcgctccctctcccacctctcctttctctgtcagggcaaagggaggcggacgtgtccgcgtcaggaaatgggaaggggtgtgtggactcgtggtacacgtggtcgatttggatttctgtactgccactgccagcacccagcagtgtgtgtgtttggtgcacactgcacagtagcgtttggactgtgcgtctgtaccacaggatggggacaaagacaaactctagtgtcaagttgaattgatttcaggatcgcatcactctgtatgtttctgtcaggcaatgggataccgctagggtgcaaattcaatagattttaggtgggcaggaactatctcatacagaagctgctgtgtcatggaactgtcggcattcagctgtgaacttgtcatgtagattgttcccaggggaaaaaaaagaacagacacttgttctaaaaaaaatgctagttctgacgctgccatgacttggaaacttgtttcttcctaatcccaaaaacaatgcatttcctaacttgtttcttaattaat

SEQ ID NO: 55155 - DNA, 300 bp, Zea Mays
cgacctagtacaaatatagagggcattcttgtctttctcatacaaaagaatcctattaacaactcaaataatctgggtaaacaaacatgactactcctccaaaaataatccagattatataatccatgggggtaaacaaacaggccctaagaatcaaggatgccacataatatgcaggcatcaggcttatttgggtacacacaaactgtaaaccaagattgcgttggcctcgtacagaacaactagtatttgcttcatgtttcccccttttttattttatctaattcttgaagctctact

SEQ ID NO: 55156 - DNA, 984 bp, Zea Mays
caacatcattgcttaatgccacccttcttcaagctgcagtactatgcttttccacctgtcatattcttgattaccttggcaagtcctctgatagtgacccgtcttcaccagtggagcacttggcctccagatcaagccggaaaacattgatatatctagttctcactcttggccacatatatccagattatgatttcagtgctgttcgggcacacttgttcttccaagaagaggagttggaaagtttcaagcagatggtagacacctacttatctgatgcctctaggcaatgggcagccacaaatgaaggcagttctcttctggacagtatgactaaagcaattgatgaggttatcaaaattaaagagtgtgacatctacagctataatccagactctgacgcagatccagttcttgagaaaggggccatatggtcgttcaactactacttctacaataggaagctaaagcgagttgtgagctttcgatgttactgcactagcaaattatcaggagatgacttcttaaccggtgttgcgtctgatggtgaagaggaagatgccttgattgacatggacatatgactgaccgtgttctgctagctacctgatgtgcgtataatatagaacatgtatgctcattcctggtagggaactttcaatatgacgcacttttaccgtttcctgtaaaaaccatggcacggtttagctttgtctgtatatgcggatttgagatttggtggcgggaaacttccaatcccctaggcttgaactgccacggtaattcggtactctgttgtttgctagacctgcaatgaataatgttgcgccaactgaattgttcaatttgatcaattgtgaattcacctctctggaacctggcgagactttactatctgtcctataagtgcgtgcgagaagttggatgcatgccgtgtggtggctcgtcgttaggctatgtcgttggttggttgatgggaacagc

SEQ ID NO: 55157 - DNA, 1787 bp, Zea Mays
atataaaactatattagcttaattgttctttatctaaattattattattagaatgaaatttaaggatccaaacaaagctattttaatatcctgggtctatactcaactgagttagttaaaaaaacataaaaataagacatttttaatattttaatcctattttttcatttggtaagttaacaaacacgcctgtcacgtgggtccatctgtcggcctataatctttccatttctttcttctctctccttactcggttcttcctactcccgatccatccgcagagggcggtgtcggcctcctctccacccgacagcttggccggcgacgagcaccaccaggacaccagatttgactattttatgagttcacaagccacccagcatgaagtttttagaatacacccccttcgacagtataaatttgttcctcgagcagctcgaccttggtgattgtacaatcagagggaaccttgaggccttctcatgcaagcacactgcgacagaccgccggctttcaataagcctagaacatgagattcttgattaccttggcaagtcctctgatagtgacccgtcttcaccagtggagcacttggcctccagatcaagccggaaaacattgatatatctagttctcactcttggccacatatatccagattatgatttcaggtaatattgtctttgtagcaagtgtgttctaatattatctgggaggaaggatattgggtaatgccatagtcagctttctctgggcgatatggcaaacccgcttttgtcctttccgaccagcctaagggggtgttgtcagatggtatgacagacggattaataaccgttgctctttgagctgagagttcaattctctccatttcccttggtctttggtatttgatatatctgactttcttaaggtctcctgactatcatgttacacattcatgatagcacgaccttcagattaaatttaacatccttttgtcaacatctgttcacttatcagtgctgttcgggcacacttgttcttccaagaagaggagttggaaagtttcaagcagatggtagacacctacttatctgatgcctctaggcaatgggcagccacaaatgaaggcagttctcttctggacagtatgactaaagcaattgatgaggttatcaaaattaaagagtgtgacatctacagctataatccagactctgacgcagatccagttcttgagaaaggggccatatggtcgttcaactactacttctacaataggaagctaaagcgagttgtgagctttcgatgttactgcactagcaaattatcaggagatgacttcttaaccggtgttgcgtctgatggtgaagaggaagatgccttgattgacatggacatatgactgaccgtgttctgctagctacctgatgtgcgtataatatagaacatgtatgctcattcctggtagggaactttcaatatgacgcacttttaccgtttcctgtaaaaaccatggcacggtttagctttgtctgtatatgcggatttgagatttggtggcgggaaacttccaatcccctaggcttgaactgccacggtaattcggtactctgttgtttgctagacctgcaatgaataatgttgcgccaactgaattgttcaatttgatcaattgtgaattcacctctctggaacctggcgagactttactatctgtcctataagtgcgtgcgagaagttggatgcatgccgtgtggtggctcgtcgttaggctatgtcgttggttggttgatgggaacagc

SEQ ID NO: 55158 - DNA, 2023 bp, Zea Mays
atataaaactatattagcttaattgttctttatctaaattattattattagaatgaaatttaaggatccaaacaaagctattttaatatcctgggtctatactcaactgagttagttaaaaaaacataaaaataagacatttttaatattttaatcctattttttcatttggtaagttaacaaacacgcctgtcacgtgggtccatctgtcggcctataatctttccatttctttcttctctctccttactcggttcttcctactcccgatccatccgcagagggcggtgtcggcctcctctccacccgacagcttggccggcgacgagcaccaccaggacaccaggtattttctcccccttggtctttcctccctgctgtacgaagacgtgcgcccgtgattcgtaggtaaaaccgtgcgcccgaaccctaacatactattcgtagtcggatctgaatctaattacaagtgtatatgcatgtatcatggctgctaacttcgattgctttgcaaaaactattgggtgtatcctttgctgggcccgcccctgttctgaatcccaattcgcgagacacgtccagatttgactattttatgagttcacaagccacccagcatgaagtttttagaatacacccccttcgacagtataaatttgttcctcgagcagctcgaccttggtgattgtacaatcagagggaaccttgaggccttctcatgcaagcacactgcgacagaccgccggctttcaataagcctagaacatgagattcttgattaccttggcaagtcctctgatagtgacccgtcttcaccagtggagcacttggcctccagatcaagccggaaaacattgatatatctagttctcactcttggccacatatatccagattatgatttcaggtaatattgtctttgtagcaagtgtgttctaatattatctgggaggaaggatattgggtaatgccatagtcagctttctctgggcgatatggcaaacccgcttttgtcctttccgaccagcctaagggggtgttgtcagatggtatgacagacggattaataaccgttgctctttgagctgagagttcaattctctccatttcccttggtctttggtatttgatatatctgactttcttaaggtctcctgactatcatgttacacattcatgatagcacgaccttcagattaaatttaacatccttttgtcaacatctgttcacttatcagtgctgttcgggcacacttgttcttccaagaagaggagttggaaagtttcaagcagatggtagacacctacttatctgatgcctctaggcaatgggcagccacaaatgaaggcagttctcttctggacagtatgactaaagcaattgatgaggttatcaaaattaaagagtgtgacatctacagctataatccagactctgacgcagatccagttcttgagaaaggggccatatggtcgttcaactactacttctacaataggaagctaaagcgagttgtgagctttcgatgttactgcactagcaaattatcaggagatgacttcttaaccggtgttgcgtctgatggtgaagaggaagatgccttgattgacatggacatatgactgaccgtgttctgctagctacctgatgtgcgtataatatagaacatgtatgctcattcctggtagggaactttcaatatgacgcacttttaccgtttcctgtaaaaaccatggcacggtttagctttgtctgtatatgcggatttgagatttggtggcgggaaacttccaatcccctaggcttgaactgccacggtaattcggtactctgttgtttgctagacctgcaatgaataatgttgcgccaactgaattgttcaatttgatcaattgtgaattcacctctctggaacctggcgagactttactatctgtcctataagtgcgtgcgagaagttggatgcatgccgtgtggtggctcgtcgttaggctatgtcgttggttggttgatgggaacagc

SEQ ID NO: 55159 - DNA, 1518 bp, Zea Mays
atataaaactatattagcttaattgttctttatctaaattattattattagaatgaaatttaaggatccaaacaaagctattttaatatcctgggtctatactcaactgagttagttaaaaaaacataaaaataagacatttttaatattttaatcctattttttcatttggtaagttaacaaacacgcctgtcacgtgggtccatctgtcggcctataatctttccatttctttcttctctctccttactcggttcttcctactcccgatccatccgcagagggcggtgtcggcctcctctccacccgacagcttggccggcgacgagcaccaccaggacaccaggtattttctcccccttggtctttcctccctgctgtacgaagacgtgcgcccgtgattcgtagatttgactattttatgagttcacaagccacccagcatgaagtttttagaatacacccccttcgacagtataaatttgttcctcgagcagctcgaccttggtgattgtacaatcagagggaaccttgaggccttctcatgcaagcacactgcgacagaccgccggctttcaataagcctagaacatgagattcttgattaccttggcaagtcctctgatagtgacccgtcttcaccagtggagcacttggcctccagatcaagccggaaaacattgatatatctagttctcactcttggccacatatatccagattatgatttcagtgctgttcgggcacacttgttcttccaagaagaggagttggaaagtttcaagcagatggtagacacctacttatctgatgcctctaggcaatgggcagccacaaatgaaggcagttctcttctggacagtatgactaaagcaattgatgaggttatcaaaattaaagagtgtgacatctacagctataatccagactctgacgcagatccagttcttgagaaaggggccatatggtcgttcaactactacttctacaataggaagctaaagcgagttgtgagctttcgatgttactgcactagcaaattatcaggagatgacttcttaaccggtgttgcgtctgatggtgaagaggaagatgccttgattgacatggacatatgactgaccgtgttctgctagctacctgatgtgcgtataatatagaacatgtatgctcattcctggtagggaactttcaatatgacgcacttttaccgtttcctgtaaaaaccatggcacggtttagctttgtctgtatatgcggatttgagatttggtggcgggaaacttccaatcccctaggcttgaactgccacggtaattcggtactctgttgtttgctagacctgcaatgaataatgttgcgccaactgaattgttcaatttgatcaattgtgaattcacctctctggaacctggcgagactttactatctgtcctataagtgcgtgcgagaagttggatgcatgccgtgtggtggctcgtcgttaggctatgtcgttggttggttgatgggaacagc

SEQ ID NO: 55160 - DNA, 676 bp, Zea Mays
caaatatgtagaggttgcttcgaacctgtgacctcaatgagacagttctcatcgctgcaccaggtgcccttatacgtggcgacaaagatggcatccatcaggaagtcttccttcatggtcccatctgctgacacctatgctcgtgctgccgttcgtcacattggatacgagcctaggtgcacaccatactggccacactctgtcgtgtggttcttgatctccattcttcccgagtcccttatcgacagcgtgcgcctgggcatgtgcattaagatccgcaagaaggggctggccaaggacgccaagaagaaggcgctgtgattgatgtttcagaatgcatgttcagattcgcacatttcctcatcacctgtagtagacacgtgccttgctgtagtcactttattagctaccattacctcctgagtctgttaagaatcgagaatgtcattgttccatccgcggttatgatgatgaaaaatacgattcttcaattcaaaatgtaacactaatacgagtaatgatgcatgaaattaacttgaagaagttgtgcaactcagttgtttttctgaaccatttcacatttttgtgaagtctctttgcctgcacacggcttcaaatggaatttcctttgccacacttaaacctaatgataatgttgtttatggagaatttaata

SEQ ID NO: 55161 - DNA, 850 bp, Zea Mays
cttgcgtgttggtcatgccagattctgatgcaatcatagggggagttagttagatatgcattcagatgctagaattagttgggtactgaaattccatcagtctaggattactcgaaatgtctagatctgacgtatgatccttctccttaggggaaagaaaaagataggtatgttgaccaattctcaagatgcctctatgttgagtacaagagcaagggtattgatgtgcaatgccaggtgcccttatacgtggcgacaaagatggcatccatcaggaagtcttccttcatggtcccatctgctgacacctatgctcgtgctgccgttcgtcacattggatacgagcctaggtgcacaccatactggccacactctgtcgtgtggttcttgatctccattcttcccgagtcccttatcgacagcgtgcgcctgggcatgtgcattaagatccgcaagaaggggctggccaaggacgccaagaagaaggcgctgtgattgatgtttcagaatgcatgttcagattcgcacatttcctcatcacctgtagtagacacgtgccttgctgtagtcactttattagctaccattacctcctgagtctgttaagaatcgagaatgtcattgttccatccgcggttatgatgatgaaaaatacgattcttcaattcaaaatgtaacactaatacgagtaatgatgcatgaaattaacttgaagaagttgtgcaactcagttgtttttctgaaccatttcacatttttgtgaagtctctttgcctgcacacggcttcaaatggaatttcctttgccacacttaaacctaatgataatgttgtttatggagaatttaata

SEQ ID NO: 55162 - DNA, 2188 bp, Zea Mays
actttgaaatttgtccgtccatacgaactctacgactacgagcctactactctactactgcctacggaggagagagagagatttcatgagttcgtgttcagttagtcttggtgcaccagttccacccaccaccggatataggtcatgccccttataagctcgacacaggggcaggcacaccgcacagcaccgcaccgcactgcatcggtcgccagccgagccgagccgagccctgctctctcctccagctccccaaatcacactccgccatggccggcacgtgcgctcacgtcgagttcctccgcgcgcagccggcgtgggcgctggcgctggccgcggtgggcctgctcgtggccgtgcgcgccgccgcccgcttcgcgctctgggtctacgccgcgttcctccgcccgggcaagcccctgcgccgccgctacggcgcctgggccgtcgtgacgggcgccaccgacggcatcggccgcgccgtcgccttccgcctcgccgcgtccgggctcgggctcgtcctcgtcggccgcaaccaggagaagctggccgccgtcgccgccgagatcaaggccaggcaccccaaggtccccgaggtgcggactttcgtgctcgacttcgccggcgaggggctggccgccgccgtcgaggcgctcaaggactccatccggggcctcgacgtcggcgtgctcgtcaacaacgccggcgtgtcctacccgtacgcgcgctacttccacgaggtggacgaggagctgatgcgcaccctcatccgggtcaacgtcgagggcgtcacgcgtgtcacgcacgccgtgctgccggccatggtcgagaggaagcgcggcgccattgtcaacatcggctccggcgccgcctccgtcgtgccttctgatccgctctactccgtctacgccgctaccaaagcgtatgttgaccaattctcaagatgcctctatgttgagtacaagagcaagggtattgatgtgcaatgccaggtaacaaatctatctttgcatcgaatgtatcttgtctcaaattatcaaccatttatacagttatcttaacttagttttgtgctattgaaatgatttattgcctctcaccaaattccaattttccatttcaactatagtttctcgatctctgttctctttctaaagaattaaaagaaattttgatgaaacactctagttgtttcaggctcatgttagtcctcacaaactatcacacatgagaggtatcttgggaagggataaagtgaggcgagcctttcccctgcaaatatgtagaggttgcttcgaacctgtgacctcaatgagacagttctcatcgctgcaccaggcctgccctttagccctcacaaactgaagtgattctgaaatttccaaacgtctaaaattaaccatcttgaagcatcatttcacatgttctactaaacttggttgagcttgtttatttgctgaactgatttgtgtctaccttttgataatgcttcttgatcaattggagaattagtgcttttgcaagtaattgcaacggttttgtcagtaatatgttgtatttcttcaatctatccaggtgcccttatacgtggcgacaaagatggcatccatcaggaagtcttccttcatggtcccatctgctgacacctatgctcgtgctgccgttcgtcacattggatacgagcctaggtgcacaccatactggccacactctgtcgtgtggttcttgatctccattcttcccgagtcccttatcgacagcgtgcgcctgggcatgtgcattaagatccgcaagaaggggctggccaaggacgccaagaagaaggcgctgtgattgatgtttcagaatgcatgttcagattcgcacatttcctcatcacctgtagtagacacgtgccttgctgtagtcactttattagctaccattacctcctgagtctgttaagaatcgagaatgtcattgttccatccgcggttatgatgatgaaaaatacgattcttcaattcaaaatgtaacactaatacgagtaatgatgcatgaaattaacttgaagaagttgtgcaactcagttgtttttctgaaccatttcacatttttgtgaagtctctttgcctgcacacggcttcaaatggaatttcctttgccacacttaaacctaatgataatgttgtttatggagaatttaata

SEQ ID NO: 55163 - DNA, 3226 bp, Zea Mays
tggagagcgagcttacacatgggccccaggtggcagtgggagagttggcgggtggtgatttgtcaaattggtgctggccattgcgctattgtcagcgactcggcgacctagggcccacctgtcggtgaccgagtacgtgctcggtgccgcattcatgactgcgacgggaaagccagtgccgtgcgcgagcgatccgagcaagagcaaccgagcgggacggtgggagactgggaggtgctccatctcgcgcgccttccatcacaaggatctccacgcgtcgaccatccgaggtgctcgaggatcggggtccacgtgaacccaccggcaccttctgcagtttctgcttcctagccctaggtcgaagtcttctttgatcaatcgagtcaatcagagaagttgcattttgttgtcgtctcatcaggcaggcgatctgatcggcgacatgtctgaatgtcgtatcggactttatcgatcatctccacagtgccatgccttcctcttctctagtgcctgagccctgaagtgaccaatattgtcggtggtttaaccatgggaggaggaaacgaattcttggtggggatgaccggctctgctcctgattctgcccgccagaagcggtgtcacgacactgccaacggtgaggtgcgggacggcgacactgtggtaaagaacgggaagacgtccgatgctgcctccgtagagaagagggagaaaaaggaacatctgtttaaatgcagtgcctaccatgggaaggatacggacatgtggagtggcgaccagaggataaacaagagcagggtgcctgccgcattatgtgagcagggaagggaaatggatgatgacctgaacaaaaccaacagcaaggagaggatgatgggtgttgaactggacaaggaaaagacgattacatcggatgactgcagtaaggttgagggtaagaaaaagttcaacaccgcatcccctgaggaggagaggaagaagaaacctcacaatgccagcactgggaagaatatgcaaagggatgatgacaaggaggtggtaaggattatgagtaactctgatactaaggtgaagatcaagaaggtgtccaccccattacctaagaaggagaagaataaggaaaagctaaacaaaacctaccgagagaagaagatgcaggctgctgacagcaagatgcggagttgttacagtggagtgaagaaggggaaggtgataccacgaattgttgcacccagactggagtatttgactaatcaacttgtgtatcttaaagattcaaagggaaaatgtttaaaggtcctggtatcgaaggtggttgattcccttgcttttgatcagggatgggatgtttttgtctcaaaccatttgattaaatggggtgaatttctgttgtttgagtatattgctgagcgtacattttctgtgcgggtttttggtacggattcttgtgaaagactcgacttcaatcctgagagcacaaataaaggtgaaactaagaaacaggcatggagtaatatgccacctgatgatttggtcgtcacagatggtatttcagaaaacagtggctactatgtttctggcgaatgtcctaggaccaaagtgcctcaaacatgtcatgtaacttgcaatacaaaaaaagaccctaaacgagttgaacgtgtggttggatctggaccagtggcacaagatatcagtggtaatttgattggtccacagtgcaaaacaaagggtactccactgtgcagcaaaggaaaaacagtaattatgattatagattctgaagattctgaaccttccgcgcatgaaaaagaggatacaatgaagctagccacatcaggaccagattcagatataagtcttgtggctgttaataccaatgaggaccctataagagctcaaagtggcattgggaatggaccctcagctgtactagctgacgagaaggggaatttccctgaaattgagtgtggaaccaagtgcatttcagcaacatgcagtgaagtaaaaacagtatctcaaattataagtgctacagctctcttagatttacatgattcagatgaaaatttaggcagaaaacaaagaacaaatgccattcctttagattctaggacaaccgcggaagattatcataattatagcaagatgatcattatccaaaactttaatagaaaatatgaagctcctggaggtttccgatgcttggagaagtggaggaaggatgttgtgaacaatcaaacagctcttgattgcactgcaccgattaaacatgaaaacccacaaaaaactgacggcatgttggttgatggttacggtttgattgaactgaacccagtagatgagtacatttgttccgagggaaatcatgaatgtgtccaaccagtattcacaatgcccatcaaagaaccatcaagtgctgacagagtaatcgattgcggacgtgatgggacagagatcaactatagcatcaatgagaaagatggagggtccattgagaaaacctcaagtcctgacgaaatatctaaatgcaagaatagcatgatggagactgcacataatgtcaatggaaaaggaactactgctcaatttgaaaccaaaatggatcaagcggagccagcgaggagcggtgtacgcagcaaaatttgcaacagtgttgtacctgccaacgagtcagaacaccgttccaccaaacaggaaggcagaatgtctagtaaccgtgaggtcccagagtctttgttgcctacaaaggacgaaattccggagccggatcatcattctccaccagagatcaacttccaactgtgcattcctgatactactcagaaatggcttgacctatccaagtcgctttccaatgcagttagacgacagagaaggcatgactatgatgtcataatgctgaaggaccccaagaagagactatggcctgtcgtttaccacgacagcctgttatttgtgggattcaccgcgggctggaaacatttcgtggcatcaaacgaccttcgggctggggatgtttgcgaacttgttaaggagccagacgatggtgagccggtgtactctgtccggatgtctgatcacaaaatttaaagccgccccggctttatctgtgcgcttctcttctgttagacctccaagaagcatggtgcagccgacttgcggaccttgtgaaaagcatgtgggtctgcccccccttttttttgctggaagtcatggagaaaccatg

SEQ ID NO: 55164 - DNA, 1225 bp, Zea Mays
tggagagcgagcttacacatgggccccaggtggcagtgggagagttggcgggtggtgatttgtcaaattggtgctggccattgcgctattgtcagcgactcggcgacctagggcccacctgtcggtgaccgagtacgtgctcggtgccgcattcatgactgcgacgggaaagccagtgccgtgcgcgagcgatccgagcaagagcaaccgagcgggacggtgggagactgggaggtgctccatctcgcgcgccttccatcacaaggatctccacgcgtcgaccatccgaggtgctcgaggatcggggtccacgtgaacccaccggcaccttctgcagtttctgcttcctagccctaggtcgaagtcttctttgatcaatcgagtcaatcagagaagttgcattttgttgtcgtctcatcaggcaggcgatctgatcggcgacatgtctgaatgtcgtatcggactttatcgatcatctccacagggtccattgagaaaacctcaagtcctgacgaaatatctaaatgcaagaatagcatgatggagactgcacataatgtcaatggaaaaggaactactgctcaatttgaaaccaaaatggatcaagcggagccagcgaggagcggtgtacgcagcaaaatttgcaacagtgttgtacctgccaacgagtcagaacaccgttccaccaaacaggaaggcagaatgtctagtaaccgtgaggtcccagagtctttgttgcctacaaaggacgaaattccggagccggatcatcattctccaccagagatcaacttccaactgtgcattcctgatactactcagaaatggcttgacctatccaagtcgctttccaatgcagttagacgacagagaaggcatgactatgatgtcataatgctgaaggaccccaagaagagactatggcctgtcgtttaccacgacagcctgttatttgtgggattcaccgcgggctggaaacatttcgtggcatcaaacgaccttcgggctggggatgtttgcgaacttgttaaggagccagacgatggtgagccggtgtactctgtccggatgtctgatcacaaaatttaaagccgccccggctttatctgtgcgcttctcttctgttagacctccaagaagcatggtgcagccgacttgcggaccttgtgaaaagcatgtgggtctgcccccccttttttttgctggaagtcatggagaaaccatg

SEQ ID NO: 55165 - DNA, 3139 bp, Zea Mays
tggagagcgagcttacacatgggccccaggtggcagtgggagagttggcgggtggtgatttgtcaaattggtgctggccattgcgctattgtcagcgactcggcgacctagggcccacctgtcggtgaccgagtacgtgctcggtgccgcattcatgactgcgacgggaaagccagtgccgtgcgcgagcgatccgagcaagagcaaccgagcgggacggtgggagactgggaggtgctccatctcgcgcgccttccatcacaaggatctccacgcgtcgaccatccgaggtgctcgaggatcggggtccacgtgaacccaccggcaccttctgcagtttctgcttcctagccctaggtcgaagtcttctttgatcaatcgagtcaatcagagaagttgcattttgttgtcgtctcatcaggcaggcgatctgatcggcgacatgtctgaatgtcgtatcggactttatcgatcatctccacagtgccatgccttcctcttctctagtgcctgagccctgaagtgaccaatattgtcggtggtttaaccatgggaggaggaaacgaattcttggtggggatgaccggctctgctcctgattctgcccgccagaagcggtgtcacgacactgccaacggtgaggtgcgggacggcgacactgtggtaaagaacgggaagacgtccgatgctgcctccgtagagaagagggagaaaaaggaacatctgtttaaatgcagtgcctaccatgggaaggatacggacatgtggagtggcgaccagaggataaacaagagcagggtgcctgccgcattatgtgagcagggaagggaaatggatgatgacctgaacaaaaccaacagcaaggagaggatgatgggtgttgaactggacaaggaaaagacgattacatcggatgactgcagtaaggttgagggtaagaaaaagttcaacaccgcatcccctgaggaggagaggaagaagaaacctcacaatgccagcactgggaagaatatgcaaagggatgatgacaaggaggtggtaaggattatgagtaactctgatactaaggtgaagatcaagaaggtgtccaccccattacctaagaaggagaagaataaggaaaagctaaacaaaacctaccgagagaagaagatgcaggctgctgacagcaagatgcggagttgttacagtggagtgaagaaggggaaggtgataccacgaattgttgcacccagactggagtatttgactaatcaacttgtgtatcttaaagattcaaagggaaaatgtttaaaggtcctggtatcgaaggtggttgattcccttgcttttgatcagggatgggatgtttttgtctcaaaccatttgattaaatggggtgaatttctgttgtttgagtatattgctgagcgtacattttctgtgcgggtttttggtacggattcttgtgaaagactcgacttcaatcctgagagcacaaataaaggtgaaactaagaaacaggcatggagtaatatgccacctgatgatttggtcgtcacagatggtatttcagaaaacagtggctactatgtttctggcgaatgtcctaggaccaaagtgcctcaaacatgtcatgtaacttgcaatacaaaaaaagaccctaaacgagttgaacgtgtggttggatctggaccagtggcacaagatatcagtggtaatttgattggtccacagtgcaaaacaaagggtactccactgtgcagcaaaggaaaaacagtaattatgattatagattctgaagattctgaaccttccgcgcatgaaaaagaggatacaatgaagctagccacatcaggaccagattcagatataagtcttgtggctgttaataccaatgaggaccctataagagctcaaagtggcattgggaatggaccctcagctgtactagctgacgagaaggggaatttccctgaaattgagtgtggaaccaagtgcatttcagcaacatgcagtgaagtaaaaacagtatctcaaattataagtgctacagctctcttagatttacatgattcagatgaaaatttaggcagaaaacaaagaacaaatgccattcctttagattctaggacaaccgcggaagattatcataattatagcaagatgatcattatccaaaactttaatagaaaatatgaagctcctggaggtttccgatgcttggagaagtggaggaaggatgttgtgaacaatcaaacagctcttgattgcactgcaccgattaaacatgaaaacccacaaaaaactgacggcatgttggttgatggttacggtttgattgaactgaacccagtagatgagtacatttgttccgagggaaatcatgaatgtgtccaaccagtattcacaatgcccatcaaagaaccatcaagtgctgacagagtaatcgattgcggacgtgatgggacagagatcaactatagcatcaatgagaaagatggaggaactactgctcaatttgaaaccaaaatggatcaagcggagccagcgaggagcggtgtacgcagcaaaatttgcaacagtgttgtacctgccaacgagtcagaacaccgttccaccaaacaggaaggcagaatgtctagtaaccgtgaggtcccagagtctttgttgcctacaaaggacgaaattccggagccggatcatcattctccaccagagatcaacttccaactgtgcattcctgatactactcagaaatggcttgacctatccaagtcgctttccaatgcagttagacgacagagaaggcatgactatgatgtcataatgctgaaggaccccaagaagagactatggcctgtcgtttaccacgacagcctgttatttgtgggattcaccgcgggctggaaacatttcgtggcatcaaacgaccttcgggctggggatgtttgcgaacttgttaaggagccagacgatggtgagccggtgtactctgtccggatgtctgatcacaaaatttaaagccgccccggctttatctgtgcgcttctcttctgttagacctccaagaagcatggtgcagccgacttgcggaccttgtgaaaagcatgtgggtctgcccccccttttttttgctggaagtcatggagaaaccatg

SEQ ID NO: 55166 - DNA, 3227 bp, Zea Mays
tggagagcgagcttacacatgggccccaggtggcagtgggagagttggcgggtggtgatttgtcaaattggtgctggccattgcgctattgtcagcgactcggcgacctagggcccacctgtcggtgaccgagtacgtgctcggtgccgcattcatgactgcgacgggaaagccagtgccgtgcgcgagcgatccgagcaagagcaaccgagcgggacggtgggagactgggaggtgctccatctcgcgcgccttccatcacaaggatctccacgcgtcgaccatccgaggtgctcgaggatcggggtccacgtgaacccaccggcaccttctgcagtttctgcttcctagccctaggtcgaagtcttctttgatcaatcgagtcaatcagagaagttgcattttgttgtcgtctcatcaggcaggcgatctgatcggcgacatgtctgaatgtcgtatcggactttatcgatcatctccacaggtgccatgccttcctcttctctagtgcctgagccctgaagtgaccaatattgtcggtggtttaaccatgggaggaggaaacgaattcttggtggggatgaccggctctgctcctgattctgcccgccagaagcggtgtcacgacactgccaacggtgaggtgcgggacggcgacactgtggtaaagaacgggaagacgtccgatgctgcctccgtagagaagagggagaaaaaggaacatctgtttaaatgcagtgcctaccatgggaaggatacggacatgtggagtggcgaccagaggataaacaagagcagggtgcctgccgcattatgtgagcagggaagggaaatggatgatgacctgaacaaaaccaacagcaaggagaggatgatgggtgttgaactggacaaggaaaagacgattacatcggatgactgcagtaaggttgagggtaagaaaaagttcaacaccgcatcccctgaggaggagaggaagaagaaacctcacaatgccagcactgggaagaatatgcaaagggatgatgacaaggaggtggtaaggattatgagtaactctgatactaaggtgaagatcaagaaggtgtccaccccattacctaagaaggagaagaataaggaaaagctaaacaaaacctaccgagagaagaagatgcaggctgctgacagcaagatgcggagttgttacagtggagtgaagaaggggaaggtgataccacgaattgttgcacccagactggagtatttgactaatcaacttgtgtatcttaaagattcaaagggaaaatgtttaaaggtcctggtatcgaaggtggttgattcccttgcttttgatcagggatgggatgtttttgtctcaaaccatttgattaaatggggtgaatttctgttgtttgagtatattgctgagcgtacattttctgtgcgggtttttggtacggattcttgtgaaagactcgacttcaatcctgagagcacaaataaaggtgaaactaagaaacaggcatggagtaatatgccacctgatgatttggtcgtcacagatggtatttcagaaaacagtggctactatgtttctggcgaatgtcctaggaccaaagtgcctcaaacatgtcatgtaacttgcaatacaaaaaaagaccctaaacgagttgaacgtgtggttggatctggaccagtggcacaagatatcagtggtaatttgattggtccacagtgcaaaacaaagggtactccactgtgcagcaaaggaaaaacagtaattatgattatagattctgaagattctgaaccttccgcgcatgaaaaagaggatacaatgaagctagccacatcaggaccagattcagatataagtcttgtggctgttaataccaatgaggaccctataagagctcaaagtggcattgggaatggaccctcagctgtactagctgacgagaaggggaatttccctgaaattgagtgtggaaccaagtgcatttcagcaacatgcagtgaagtaaaaacagtatctcaaattataagtgctacagctctcttagatttacatgattcagatgaaaatttaggcagaaaacaaagaacaaatgccattcctttagattctaggacaaccgcggaagattatcataattatagcaagatgatcattatccaaaactttaatagaaaatatgaagctcctggaggtttccgatgcttggagaagtggaggaaggatgttgtgaacaatcaaacagctcttgattgcactgcaccgattaaacatgaaaacccacaaaaaactgacggcatgttggttgatggttacggtttgattgaactgaacccagtagatgagtacatttgttccgagggaaatcatgaatgtgtccaaccagtattcacaatgcccatcaaagaaccatcaagtgctgacagagtaatcgattgcggacgtgatgggacagagatcaactatagcatcaatgagaaagatggagggtccattgagaaaacctcaagtcctgacgaaatatctaaatgcaagaatagcatgatggagactgcacataatgtcaatggaaaaggaactactgctcaatttgaaaccaaaatggatcaagcggagccagcgaggagcggtgtacgcagcaaaatttgcaacagtgttgtacctgccaacgagtcagaacaccgttccaccaaacaggaaggcagaatgtctagtaaccgtgaggtcccagagtctttgttgcctacaaaggacgaaattccggagccggatcatcattctccaccagagatcaacttccaactgtgcattcctgatactactcagaaatggcttgacctatccaagtcgctttccaatgcagttagacgacagagaaggcatgactatgatgtcataatgctgaaggaccccaagaagagactatggcctgtcgtttaccacgacagcctgttatttgtgggattcaccgcgggctggaaacatttcgtggcatcaaacgaccttcgggctggggatgtttgcgaacttgttaaggagccagacgatggtgagccggtgtactctgtccggatgtctgatcacaaaatttaaagccgccccggctttatctgtgcgcttctcttctgttagacctccaagaagcatggtgcagccgacttgcggaccttgtgaaaagcatgtgggtctgcccccccttttttttgctggaagtcatggagaaaccatg

SEQ ID NO: 55167 - DNA, 1028 bp, Zea Mays
tggagagcgagcttacacatgggccccaggtggcagtgggagagttggcgggtggtgatttgtcaaattggtgctggccattgcgctattgtcagcgactcggcgacctagggcccacctgtcggtgaccgagtacgtgctcggtgccgcattcatgactgcgacgggaaagccagtgccgtgcgcgagcgatccgagcaagagcaaccgagcgggacggtgggagactgggaggtgctccatctcgcgcgccttccatcacaaggatctccacgcgtcgaccatccgaggtgctcgaggatcggggtccacgtgaacccaccggcaccttctgcagtttctgcttcctagccctaggtcgaagtcttctttgatcaatcgagtcaatcagagaagttgcattttgttgtcgtctcatcaggcaggcgatctgatcggcgacatgtctgaatgtcgtatcggactttatcgatcatctccacaggaactactgctcaatttgaaaccaaaatggatcaagcggagccagcgaggagcggtgtacgcagcaaaatttgcaacagtgttgtacctgccaacgagtcagaacaccgttccaccaaacaggaaggcagaatgtctagtaaccgtgaggtcccagagtctttgttgcctacaaaggacgaaattccggagccggatcatcattctccaccagagatcaacttccaactgtgcattcctgatactactcagaaatggcttgacctatccaagtcgctttccaatgcagttagacgacagagaaggcatgactatgatgtcataatgctgaaggaccccaagaagagactatggcctgtcgtttaccacgacagcctgttatttgtgggattcaccgcgggctggaaacatttcgtggcatcaaacgaccttcgggctggggatgtttgcgaacttgttaaggagccagacgatggtgagccggtgtactctgtccggatgtctgatcacaaaatttaaagccgccccggctttatctgtgcgct

SEQ ID NO: 55168 - DNA, 3294 bp, Zea Mays
gttccaaactgacacctcaaagactcgtctattcgaactgtccctccccatggcgagcacgcgaagcagctcattgccctctcgcggcgccaccgatggagagaagcgcctcgaagcactggccctgggcagggtagcggaggctgccgacgcagttgcctccgctgcttgcgccggcgaggtggtccgcgcgattcacgctgtcgcatccctcctcttccccgtggactctgaggccgtcgccggtaccgtcgaggaaccattcaggagccagattcttgatgctgtaactgtaaccctcagcaatgaggagagggaatcttggaggcatgccttttatcatggtcctgcatttcctactatgtctaagatattgcttggcaatgttgccttgaagtggttgccgaagattaatgtctctgcaaggcaagagatttacgactcattttttgtcaaagggcctccaactgaagtgattcaagctcttgttccagcgctatctgaaaaagaattttctaaggaggaccaccagactttttgcttgaaccttgaaaggctactgattctatggttacttgataataagggtgttttccaaattgttgtggacttcatttgttctaaaaagcatggtgaagatattctcagcccagataaaacaatatccgtatcaagggttgcacaactacttgcatctgttccagataaagcaagattgggagcttcagctgcacttacatcaccctcattcttcaagcatgttgtcagccaacttcttgctggtgcagaagcaacaactattgagttggctgctgacaaagaagctaatgaacattatgtcttgagttctatgtttcactttgtgggcgaagtgctatctcgtgtttgtcgtcgtgggtctactggtgttttagttgctgaattgattcctaaggttcgcaatcacatacatagatgtgtgccaccagatcatagggccacaattcctgagatggtccaacatgtttgccagtctcaattttggttcaatatggttgaagcaatgagagatcagcattctattgaaaggttgacagaagagctgttgcgtcaacttgcgtcacaacatataagcgatgaagaggcttattggattctgtggaccctctttaatcagagcttcaagcgtttaactgtcatgagggcgatgtttgttgacaaatttttgctctggaaaacatttcctttatgctgcctgagatggattcttcactatgctgtctttgaatgtccaccaaattcaaccacagaaattctgatgcaaaggacaccaaacttttttggtatattgcaaagtttggttagtatttggtccaggaaagagtttattcagtcatattcagtggagcaacaagcttatatcactgcagcaattggattatgtttggaaaagctaacaaaaaaagaattagaaacaactaaagatgtattgaattctattcttcaaggagtaagctgcaggttagagagcccaattgatttattacggaagatggctagtgctgttgcattgacattctctaaagttgttgatccgaaaaatcctctgtaccttgatgacaactgttgtgaaaatgttgattgggactttggggttctatctccaaaggagtttaaagctcctttagatgctgtagaaactaaaactaaaccaaaaacacgtgagaacaagaaaaaagcaggtgagaagaagacaaaagcaataaaacgtgatattccagacgtcagagcgaaaatcgtagagatcaattctatagatcatgatcaaatgtctgatactgctacgaatgggcagtttgaggaggaagaatgtgatgaagaagacatgaacatggatgcatacagtgattcatccctcgagccatatgatctatcagacgatgacacagatttgcaaaaaaaaattagccacctgagtgatcttgcagcagcactaagaaaacctgatgatccagatggtgtcgaaaatgctcttaattatgcggaaaagcttgtgagagcatcacctgatgaattacgctacaactctggtgaccttgttagagcactggtgcatgttcgctgttctgacgtggcaatggaaggagaggaagattctgctgaagaaaagagacagaaggcattggtttccttgttggtaacctgcccatttgaatctctagatgttctgacaaaattgctatattcatctagtgtggatattggtcagcgcattttgattattgatgctatgactgaggcggcacaggagcttgctgaaactaaaactgtgaagatagaacagcgacgtggtaacttgataactgacacttctccttcttggctggttccgagtaatataggacctcctggggcaggcccttggagagaggtatctgaaccaggcacacttctaagttggtcacaccgttatgaaagagaggttccatctaaatcgggtcaattgaaatcaggaaaatctcgtaaatggggtcttggaaaagcgaaagacttgcaggttgagtggtctaaaaatagatttcctttgtatgccgctgcttttatgctccctgtgatgcaaggatatgataaaaggtcacatggtgttgacttgcttaatcgggactttgttgtcctcggtaaattgatatatatgcttggtgtctgtatgaagtctatggccatgcacccagaagcatcagctctagctcctgctctccttgacatgataagatctagagatatttcacgacatgctgaagcatatgtcagaaggtccgtattgtttgcagcgtcttgcatattgatatctttgcatccgtcatatgtggcgtcatctcttattgaaggcaaccaggacatttctactggattagagtggatacgcacatgggctcttcaaattgctgaagctgatcctgatacagaatgctcatcgatggccatgacctgcctgcggctccattctgagatggctcttcagacatcgcgcgcactggaatctgcaaatcactccaagactggcagagccataccttctaagctcgacagcattattctaccattcggcaacatgatgtgataggtaaactatatataagttgtgcagggatgtgtcctgctgttgtacagaacttacgtagcaaattctggttatttagaaggtggaccgtcaagttgtaccagctggttcctgtggttgtctgaaaggtgagagtgagagattggaactctgcatttcttttggtaacaactgtggtctttggcgaaaaaaaa

SEQ ID NO: 55169 - DNA, 3648 bp, Zea Mays
caacctgttaggatctatctgggagcaagagaatcctcagccgctaccctaccttgcatccaaagttccaaactgacacctcaaagactcgtctattcgaactgtccctccccatggcgagcacgcgaagcagctcattgccctctcgcggcgccaccgatggagagaagcgcctcgaagcactggccctgggcagggtagcggaggctgccgacgcagttgcctccgctgcttgcgccggcgaggtggtccgcgcgattcacgctgtcgcatccctcctcttccccgtggactctgaggccgtcgccggtaccgtcgaggaaccattcaggagccagattcttgatgctgtaactgtaaccctcagcaatgaggagagggaatcttggaggcatgccttttatcatggtcctgcatttcctactatgtctaagatattgcttggcaatgttgccttgaagtggttgccgaagattaatgtctctgcaaggcaagagatttacgactcattttttgtcaaagggcctccaactgaagtgattcaagctcttgttccagcgctatctgaaaaagaattttctaaggaggaccaccagactttttgcttgaaccttgaaaggctactgattctatggttacttgataataagggtgttttccaaattgttgtggacttcatttgttctaaaaagcatggtgaagatattctcagcccagataaaacaatatccgtatcaagggttgcacaactacttgcatctgttccagataaagcaagattgggagcttcagctgcacttacatcaccctcattcttcaagcatgttgtcagccaacttcttgctggtgcagaagcaacaactattgagttggctgctgacaaagaagctaatgaacattatgtcttgagttctatgtttcactttgtgggcgaagtgctatctcgtgtttgtcgtcgtgggtctactggtgttttagttgctgaattgattcctaaggttcgcaatcacatacatagatgtgtgccaccagatcatagggccacaattcctgagatggtccaacatgtttgccagtctcaattttggttcaatatggttgaagcaatgagagatcagcattctattgaaaggttgacagaagagctgttgcgtcaacttgcgtcacaacatataagcgatgaagaggcttattggattctgtggaccctctttaatcagagcttcaagcgtttaactgtcatgagggcgatgtttgttgacaaatttttgctctggaaaacatttcctttatgctgcctgagatggattcttcactatgctgtctttgaatgtccaccaaattcaaccacagaaattctgatgcaaaggacaccaaacttttttggtatattgcaaagtttggttagtatttggtccaggaaagagtttattcagtcatattcagtggagcaacaagcttatatcactgcagcaattggattatgtttggaaaagctaacaaaaaaagaattagaaacaactaaagatgtattgaattctattcttcaaggagtaagctgttagagagcccaattgatttattacggaagatggctagtgctgttgcattgacattctctaaagttgttgatccgaaaaatcctctgtaccttgatgacaactgttgtgaaaatgttgattgggactttggggttctatctccaaaggagtttaaagctcctttagatgctgtagaaactaaaactaaaccaaaaacacgtgagaacaagaaaaaagcagtttgaggaggaagaatgtgatgaagaagacatgaacatggatgcatacagtgattcatccctcgagccatatgatctatcagacgatgacacagatttgcaaaaaaaaattagccacctgagtgatcttgcagcagcactaagaaaacctgatgatccagatggtgtcgaaaatgctcttaattatgcggaaaagcttgtgagagcatcacctgatgaattacgctacaactctggtgaccttgttagagcactggtgcatgttcgctgttctgacgtggcaatggaaggagaggaagattctgctgaagaaaagagacagaaggcattggtttccttgttggtaacctgcccatttgaatctctagatgttctgacaaaattgctatattcatctagtgtggatattggtcagcgcattttgattattgatgctatgactgaggcggcacaggagcttgctgaaactaaaactgtgaagatagaacagcgacgtggtaacttgataactgacacttctccttcttggctggttccgagtaatataggacctcctggggcaggcccttggagagaggtatctgaaccaggcacacttctaagttggtcacaccgttatgaaagagaggttccatctaaatcgggtcaattgaaatcaggaaaatctcgtaaatggggtcttggaaaagcgaaagacttgcaggttgagtggtctaaaaatagatttcctttgtatgccgctgcttttatgctccctgtgatgcaaggatatgataaaaggtcacatggtgttgacttgcttaatcgggactttgttgtcctcggtaaattgatatatatgcttggtgtctgtatgaagtctatggccatgcacccagaagcatcagctctagctcctgctctccttgacatgataagatctagagatatttcacgacatgctgaagcatatgtcagaaggtccgtattgtttgcagcgtcttgcatattgatatctttgcatccgtcatatgtggcgtcatctcttattgaaggcaaccaggacatttctactggattagagtggatacgcacatgggctcttcaaattgctgaagctgatcctgatacagaatgctcatcgatggccatgacctgcctgcggctccattctgagatggctcttcagacatcgcgcgcactggaatctgcaaatcactccaagactggcagagccataccttctaagctcgacagcattattctaccattcggcaacatgatgtgataggtaaactatatataagttgtgcagggatgtgtcctgctgttgtacagaacttacgtagcaaattctggttatttagaaggtggaccgtcaagttgtaccagctggttcctgtggttgtctgaaaggtgagagtgagagattggaactctgcatttcttttggtaacaactgtggtctttggcgtattcagtgtcagatttgtcaaaagccaacatttttacggtgttattttgtttccagtccagtttaaatgagcagccccaccgtaaaaatgttagtatgttaaggatgtatttaaatcttttttgtttcttgttgtttggttgaaacaccctacattcttttgcattacaaattgtgtggaaaaacacaaatgatgccatgaagatttatgccttatcccttatgaaactacacagattcatgataacaaatacatattcactcctttatttatgttttttggaggaaagatttgtgactgtataaccagtcacctccaatcgaaaattattcatggaggagcgaaaagtgtaaccaactatatacgtttctattcatacgtcaaaggtcgacccataaggcctctacattgtca

SEQ ID NO: 55170 - DNA, 1066 bp, Zea Mays
ctcgaagcccacttctggttccggtggacccgcgtacatcgctaaggaacgcagcagctcccccgacaaccaccagataaagctgcaagctgcttatcttctcccgtcccataggttgctaggctcggccgtgtagagcagcaagagcacgccgcgccaagcaacaaagagggaccccgcatccatggaggtggtgggcggcgtgtcgctgaggccgtcgccagcgccggcgcgtatccggactaccctgccacccgtcgacgtaggcggacgcttccttctccgccgggtcgcggggcgccagccggcgaggcgcgcgctggtcgtggaggcccggggcggcaggggctggtcggagcggcagatgcagcagcagcgccgcgcgccgctgctgccgaaaatcgaggacgacggcaacccgcgattcgtcatcttcatccgcaccgccaatgtctacttctggtacccgctcaacatcatcacgggcggtacgacggcgaagatcatgctcgccgccaaggacaacttcctcggcaagtacatctacaaggacacgctcgccaggaacctcgccgccgtcatttacaaagacgaggacgtgatcatagacacagcgaaagagcagtaccgtgtgctcaagaccgaaaatcagtttcggtatggctacaaagttgtggagaaagggaacataaggtctgctctgacgacaagcaatgtgatcgaacttccaaagaaggacgagctcaaaaccgtggttgacaaggtgaaggacttctttggcgacgtgactgccggcgccaaagaatcctttgcgcagataacagggtctgctgtcagcaaggaggaagaggaagcagagagcaaagagaagttccgctccaagagacgaaagaagcagcggaagtcgaaggagggcctcaagacggagaaatgattcagtcagtcacacaagtaaagcaccggctgtagtttcgctatcgatgtccgagaactgttctgtaatttctccagcttccttttttttgaaactcgaaatgacaggacagcgtttactgattaaaacaca

SEQ ID NO: 55171 - DNA, 842 bp, Zea Mays
tggaggtggtgggcggcgtgtcgctgaggccgtcgccagcgccggcgcgtatccggactaccctgccacccgtcgacgtaggcggacgcttccttctccgccgggtcgcggggcgccagccggcgaggcgcgcgctggtcgtggaggcccggggcggcaggggctggtcggagcggcagatgcagcagcagcgccgcgcgccgctgctgccgaaaatcgaggacgacggcaacccgcgattcgtcatcttcatccgcaccgccaatgtctacttctggtacccgctcaacatcatcacgggcggtacgacggcgaagatcatgctcgccgccaaggacaacttcctcggcaagtacatctacaaggacacgctcgccaggaacctcgccgccgtcatttacaaagacgaggacgtgatcatagacacagcgaaagagcagtaccgtgtgctcaagaccgaaaatcagtttcggtatggctacaaagttgtggagaaagggaacataaggtctgctctgacgacaagcaatgtgatcgaacttccaaagaaggacgagctcaaaaccgtggttgacaaggtgaaggacttctttggcgacgtgactgccggcgccaaagaatcctttgcgcagagacggagaaatgattcagtcagtcacacaagtaaagcaccggctgtagtttcgctatcgatgtccgagaactgttctgtaatttctccagcttccttttttttgtttgttttgtaaaaagacgtcgtgtaacttcattgcgactaacgtgtgctatgccttctcagtaaatctcacaaaatgtgaaggtactccctacgttctgaatca

SEQ ID NO: 55172 - DNA, 1398 bp, Zea Mays
gttaaatgtgattataccattagctgtagatgtggttgctattgttgagaggttggctactgtgaaacacaaattgttagttttgtctggaaagggaggtgttggaaaaagcacattctcagcccaactctcgtttgccctagctgaaatggaccatcaggttggccttcttgacatagatatatgtggccctagcatccctaaaatgctaggccttgaaggacaagatattcatcaaagcaaccttggctggtcacctgtgtatgttgagtccaaccttggtgtgatgtcgattggtttcatgctgcctaatccagacgatgctgtcatatggaggggtccccgcaagaatggactgatcaagcagttcttaaaggatgtcgattggggggagattgactatcttgttgtggacgctcctccaggaacatctgatgagcacatctcgatcgtgcaataccttcaagccacaggaatcgatggcgcgataatcgtcacgactccgcagcaggtctctctgattgatgtgaggaaggagataaacttctgcaagaaggtcggtgttcctgtcctaggtgttgtggagaacatgagtggtctgaggcagccgctttcagacctcagattcatcaagtcagatgaggcgggcaagacagatgcgacagaatgggccctgaactacatcaaggagaaagcccctgagcttctgtcggtcatggcctgcagtgaggtatttgatagcagcaagggaggcgccgagaagatgtgccatgaaatgggggttcctttccttggtaaggtgcccatggatccgcagctgtgcaaggcggctgaggaagggaggtcatgctttgctgatcagaaatgcagtgccagtgcgccggctcttcgaaacatcgtgaagaagctgatcaaggccgagtgagaaaataatgttggcctgctggggaatctggtagtgagaaatgagatgaaatgacagatgccagagttctcgttaccaatatatatatatgttacggcgttacacactgaatctgtattagtgcttgtgttggacctgtaagtttttgttcgtgaataatcagtgggtgcacagactattaaaagcttagtttctgctctaccaagtggactatgtttgcttgaacgatatgtactgtacgcaccagaactgaatgagagtgtacggtgttagcaatatccctggctgcgcttcattgatctctcgtggcacgagcacgacatgtttgtaagaaaattatccggtagtggggcttagggcaaaaaatcaggacagcacctcagacctttcatcgcaaaagctgatgatgagtcacgaacaataagcgtcttctttatttatcttaacactgacggctgaacagtggacacgac

SEQ ID NO: 55173 - DNA, 1501 bp, Zea Mays
ctcgttcttcctcctctgcctttctgcttaattgccctggaacacagtctgaggaggcaggcaaggcagatgcctgcgctgggtgccccaaccagcagatttgcgccaccgcccccaaggggcctgatcccgatgtggttgctattgttgagaggttggctactgtgaaacacaaattgttagttttgtctggaaagggaggtgttggaaaaagcacattctcagcccaactctcgtttgccctagctgaaatggaccatcaggttggccttcttgacatagatatatgtggccctagcatccctaaaatgctaggccttgaaggacaagatattcatcaaagcaaccttggctggtcacctgtgtatgttgagtccaaccttggtgtgatgtcgattggtttcatgctgcctaatccagacgatgctgtcatatggaggggtccccgcaagaatggactgatcaagcagttcttaaaggatgtcgattggggggagattgactatcttgttgtggacgctcctccaggaacatctgatgagcacatctcgatcgtgcaataccttcaagccacaggaatcgatggcgcgataatcgtcacgactccgcagcaggtctctctgattgatgtgaggaaggagataaacttctgcaagaaggtcggtgttcctgtcctaggtgttgtggagaacatgagtggtctgaggcagccgctttcagacctcagattcatcaagtcagatgaggcgggcaagacagatgcgacagaatgggccctgaactacatcaaggagaaagcccctgagcttctgtcggtcatggcctgcagtgaggtatttgatagcagcaagggaggcgccgagaagatgtgccatgaaatgggggttcctttccttggtaaggtgcccatggatccgcagctgtgcaaggcggctgaggaagggaggtcatgctttgctgatcagaaatgcagtgccagtgcgccggctcttcgaaacatcgtgaagaagctgatcaaggccgagtgagaaaataatgttggcctgctggggaatctggtagtgagaaatgagatgaaatgacagatgccagagttctcgttaccaatatatatatatgttacggcgttacacactgaatctgtattagtgcttgtgttggacctgtaagtttttgttcgtgaataatcagtgggtgcacagactattaaaagcttagtttctgctctaccaagtggactatgtttgcttgaacgatatgtactgtacgcaccagaactgaatgagagtgtacggtgttagcaatatccctggctgcgcttcattgatctctcgtggcacgagcacgacatgtttgtaagaaaattatccggtagtggggcttagggcaaaaaatcaggacagcacctcagacctttcatcgcaaaagctgatgatgagtcacgaacaataagcgtcttctttatttatcttaacactgacggctgaacagtggacacgac

SEQ ID NO: 55174 - DNA, 2048 bp, Zea Mays
ttgatattttggtacatgaaaaatagcaacgaggctcgaggcaggagaatgacggaagcgacgacggtgagaggcacagaagcaaacttgtgatcgtacacgatatgcggacaacgccgcacccttctatctaggccagactagaagggtagaagaagcaacaacggtcaagggcctagctatttgttaactctggcccctcacctgctccccttctgtccagcccacgggagggcgactagggttaggggcgaccggaggtccccgcgcctgcccaaatccacccatcccttccgttcaagccgccggagctcccaggccgctggtgtcgaagccgtcgccccttccttccaggcccgcctcctctctgtccgttctgtcttggtcgccgaagctcaagaccacagtaatcactccacgagaggatcagctttcgaagctagagaagcagagctctaccaaacaggccaggacgtctctcaaatccccagttcagtaactggctaactgtaggagaaggagagagagatggagaacggcggcgctaaaggcgacgtccccgacgatgcgaacgagcattgccctggaacacagtctgaggaggcaggcaaggcagatgcctgcgctgggtgccccaaccagcagatttgcgccaccgcccccaaggggcctgatcccgatgtggttgctattgttgagaggttggctactgtgaaacacaaattgttagttttgtctggaaagggaggtgttggaaaaagcacattctcagcccaactctcgtttgccctagctgaaatggaccatcaggttggccttcttgacatagatatatgtggccctagcatccctaaaatgctaggccttgaaggacaagatattcatcaaagcaaccttggctggtcacctgtgtatgttgagtccaaccttggtgtgatgtcgattggtttcatgctgcctaatccagacgatgctgtcatatggaggggtccccgcaagaatggactgatcaagcagttcttaaaggatgtcgattggggggagattgactatcttgttgtggacgctcctccaggaacatctgatgagcacatctcgatcgtgcaataccttcaagccacaggaatcgatggcgcgataatcgtcacgactccgcagcaggtctctctgattgatgtgaggaaggagataaacttctgcaagaaggtcggtgttcctgtcctaggtgttgtggagaacatgagtggtctgaggcagccgctttcagacctcagattcatcaagtcagatgaggcgggcaagacagatgcgacagaatgggccctgaactacatcaaggagaaagcccctgagcttctgtcggtcatggcctgcagtgaggtatttgatagcagcaagggaggcgccgagaagatgtgccatgaaatgggggttcctttccttggtaaggtgcccatggatccgcagctgtgcaaggcggctgaggaagggaggtcatgctttgctgatcagaaatgcagtgccagtgcgccggctcttcgaaacatcgtgaagaagctgatcaaggccgagtgagaaaataatgttggcctgctggggaatctggtagtgagaaatgagatgaaatgacagatgccagagttctcgttaccaatatatatatatgttacggcgttacacactgaatctgtattagtgcttgtgttggacctgtaagtttttgttcgtgaataatcagtgggtgcacagactattaaaagcttagtttctgctctaccaagtggactatgtttgcttgaacgatatgtactgtacgcaccagaactgaatgagagtgtacggtgttagcaatatccctggctgcgcttcattgatctctcgtggcacgagcacgacatgtttgtaagaaaattatccggtagtggggcttagggcaaaaaatcaggacagcacctcagacctttcatcgcaaaagctgatgatgagtcacgaacaataagcgtcttctttatttatcttaacactgacggctgaacagtggacacgac

SEQ ID NO: 55175 - DNA, 3657 bp, Zea Mays
cccgcgcgtcacgttcgcatcgcttctggttcgggtctcacctctcgcgatcaaagcagtagcgggttcagtggcttggcgaaggaaaaaaaaggaggaaaaaaaaatagcaaggctgtgcagcgaggagacgactcgactccaactgggaggcgaaaaataaaaaagaggataaggcgaggcccgaccgggcggccaccgcgctcccagatccgctccgctgccgtggagatccagctcccttgcgcgcctgagcgtggacgccggcgtctcgctcccggatcccgaccttggggttgcagctgcttcagatccagcgttaccagatctgtgacccgctggcgcctgggcacatgacaccgacggttttaatggagtttgggcagcagaggccaatgaaacggggatacgaggaaatggtcttcagggcagcctcttcccgtggttatgcagagactgttggcgagtcgggagttgcagctggtagtcctcttcgtgttgattctgaggactcatctgtgccaaagcgcaagtgcatcagcctgaacagcgttggctttgatgtgaagcgggagatcttggtgccctctaagatgtcgtcatctgaacggcggtaccttcgaaagagattccgggcagagcttgattcggtgcgggatctcctcaagaagccagagtttgcagcccctgttcctctcaatcgggcacctgctttgtcatcctcagctgcacctcgagctaagaagccacagaagtctcagcgtggtgggaccaatgttatacgtggtgcaaagggacgattcttgcctacaaaaccgcggccggagacttccactgtgttatctgaagctgcagcgtttaagcagtgtgaagctattttgaagaagcttatgactcaaaagtatagtcatatattcaatgttccagttgatattgtgaagctgcaaattcctgattattttgacattgtgaagaccccaatggatcttggtactgtcaagaaaaagcttgaatctggttcatacacaagtccatcagattttgctgctgatgtccggctgacctttaacaacgctatggcttataatccgcgggggcatgctgtgcacgacatggccatccagctgaacaagatgtttgagagtcgatggaggccaattgagaagaaattggcttctgctgccactgagaaacatgttgaggttgacagggctgactcgaagaggaggaagacacctcctgtggaccgcagtgatgtgtcaatggagtgtgcacgacagacagagccagaaacaccgaagatgacagctgaagagagggaagcctttgggaactgcttggcatccatatctgatgagttacctcctcacatatttgaactgctacaacaatgcatcgacagcaatgcagatttgtctggggatggagagatagagattgacatccatgctgtcagtgatgacttgttatttgagctgaagaaacatgttgacaagtatttgcaagagaaagagcagagccagcaggtgaaatctgagccctccgagaatgaagctgtgaatgtatctggccttagccactcttctacaaatccttgcaaaggcggcgaacctatcgaagaggatgtggacatctgtggcaatgcctcacctatcatgctagacaaagatgcacaaatcaggaatagcaagtgtggtagtccaagtagttccagcagcgactctgaatcatcttctagcggtctgtgtctcatggtgtttatctgcatctctttatatcattatagacaattcttgtgtaaagaaagtgatgcttttcttcccagttttgtattgtaaattctttgagaacatggatattatctcttcatgtgttttttgggggttcttggtatcatattcctgtattagttggactctgggcagtgacatacaaatttggcaaggaactaaaagtagagcaatggtactctataaatgccatgaataccatgttttcccttttagcaattgtttagcaggatcttgaagttttttgaattgggctgttaaatttcaatgaagttgatgcaggacatcatgctgcataacccccatggccccatcctactataatttctatcagactaaaccctttagtaatagtataagctcctgcaaactaatacagaaccttaatagcatatataattctcctgaaacttttcctgttttgagatgttgaaacttgaaagtccaagatatttacaatgttgtcggtaatgcagattctgattcaggcagtgactctgaaagcgaatcagaaaaagttggcagccctggaaagcttgcgaaggggactaagaaacctgatcagctggtggagcaagaaaagagtgatgttattagtccagctgatgccaaccgtcctgctgctattgtggggcttcatggggaggacagtgagtcaaagcctgcaccagggggggaaaactcagaacccgatacacaagtctcaccagacaggctattgcgagcagcccttttgaggagccgttatgctgatgtgattgtcaaagctcgtggcattcttagtcagggtggagacaaacaggaggagctggaaaagctacagaaggaagagaaagagcgcttgttggctgaaggtactgcagccatggaggcttgtagagccgaagctgaagctgaaaagaagcgtaaacggaattttgagagggagaaggctcgtcaggccctacaggagatggagagaactgtagaaattaatgataacctccatctcaaggatttggaattgcttggaacagccacaacagaacatattgtaagctctgttgatgagactagtccagaacgctctcatgatggcatggccggctatcatccaggagctgtcaatcctttggagcaacttggactgttcataaaggtagacgatgaggaagacgacgagcagtgttccctgcattaaagaaagaagagaaaggagaaatcagctgatggtgctgtgtttttccatgccctgtcacgggctaggggctggtgccaacctattgatccaaagtgatcacctgttgcgggccatcatgtgtggcaatggttctaaactggggtggtgagagccgtccattttgttaaaaatatgcatgggaaggatgaagatcatcttgcatagtcatttgcttccaggaggcgcacaggaggtggagtaaaaacgaacgtatttatggtgcctagaggacggttttttcagccactgccaaaacggcttgaatgacgccaccgaagtagtggagttcaaatggctcattgtttgccgcaacctcaatttcaagcgggtttgttcagcggcttatagcttcttctctccttttgttgtctcatctgttttagattgtagaatttgggctagttgcttcctgctgtaaatccgaattttgatgtagtgacggaagtgctacctttttgttgagcatgatcgaaaagtttacaagaaaaatcgtttttttgtagatgaacgtccagtcttgtctgtagctacaatttcttgcgcaatcagtgtaacatccgttgtgtttatattctgctcgacaacgagtacggatttaagcacgtgatatcagtgaataagacagacattagggtctaatcgttttta

SEQ ID NO: 55176 - DNA, 3705 bp, Zea Mays
cccgcgcgtcacgttcgcatcgcttctggttcgggtctcacctctcgcgatcaaagcagtagcgggttcagtggcttggcgaaggaaaaaaaaggaggaaaaaaaaatagcaaggctgtgcagcgaggagacgactcgactccaactgggaggcgaaaaataaaaaagaggataaggcgaggcccgaccgggcggccaccgcgctcccagatccgctccgctgccgtggagatccagctcccttgcgcgcctgagcgtggacgccggcgtctcgctcccggatcccgaccttggggttgcagctgcttcagatccagcgttaccagatctgtgacccgctggcgcctgggcacatgacaccgacggttttaatggagtttgggcagcagaggccaatgaaacggggatacgaggaaatggtcttcagggcagcctcttcccgtggttatgcagagactgttggcgagtcgggagttgcagctggtagtcctcttcgtgttgattctgaggactcatctgtgccaaagcgcaagtgcatcagcctgaacagcgttggctttgatgtgaagcgggagatcttggtgccctctaagatgtcgtcatctgaacggcggtaccttcgaaagagattccgggcagagcttgattcggtgcgggatctcctcaagaagccagagtttgcagcccctgttcctctcaatcgggcacctgctttgtcatcctcagctgcacctcgagctaagaagccacagaagtctcagcgtggtgggaccaatgttatacgtggtgcaaagggacgattcttgcctacaaaaccgcggccggagacttccactgtgttatctgaagctgcagcgtttaagcagtgtgaagctattttgaagaagcttatgactcaaaagtatagtcatatattcaatgttccagttgatattgtgaagctgcaaattcctgattattttgacattgtgaagaccccaatggatcttggtactgtcaagaaaaagcttgaatctggttcatacacaagtccatcagattttgctgctgatgtccggctgacctttaacaacgctatggcttataatccgcgggggcatgctgtgcacgacatggccatccagctgaacaagatgtttgagagtcgatggaggccaattgagaagaaattggcttctgctgccactgagaaacatgttgaggttgacagggctgactcgaagaggaggaagacacctcctgtggaccgcagtgatgtgtcaatggagtgtgcacgacagacagagccagaaacaccgaagatgacagctgaagagagggaagcctttgggaactgcttggcatccatatctgatgagttacctcctcacatatttgaactgctacaacaatgcatcgacagcaatgcagatttgtctggggatggagagatagagattgacatccatgctgtcagtgatgacttgttatttgagctgaagaaacatgttgacaagtatttgcaagagaaagagcagagccagcaggtgaaatctgagccctccgagaatgaagctgtgaatgtatctggccttagccactcttctacaaatccttgcaaaggcggcgaacctatcgaagaggatgtggacatctgtggcaatgcctcacctatcatgctagacaaagatgcacaaatcaggaatagcaagtgtggtagtccaagtagttccagcagcgactctgaatcatcttctagcggtctgtgtctcatggtgtttatctgcatctctttatatcattatagacaattcttgtgtaaagaaagtgatgcttttcttcccagttttgtattgtaaattctttgagaacatggatattatctcttcatgtgttttttgggggttcttggtatcatattcctgtattagttggactctgggcagtgacatacaaatttggcaaggaactaaaagtagagcaatggtactctataaatgccatgaataccatgttttcccttttagcaattgtttagcaggatcttgaagttttttgaattgggctgttaaatttcaatgaagttgatgcaggacatcatgctgcataacccccatggccccatcctactataatttctatcagactaaaccctttagtaatagtataagctcctgcaaactaatacagaaccttaatagcatatataattctcctgaaacttttcctgttttgagatgttgaaacttgaaagtccaagatatttacaatgttgtcggtaatgcagattctgattcaggcagtgactctgaaagcgaatcagaaaaagttggcagccctggaaagcttgcgaaggggactaagaaacctgatcagctggtggagcaagaaaagagtgatgttattagtccagctgatgccaaccgtcctgctgctattgtggggcttcatggggaggacagtgagtcaaagcctgcaccagggggggaaaactcagaacccgatacacaagtctcaccagacaggctattgcgagcagcccttttgaggagccgttatgctgatgtgattgtcaaagctcgtggcattcttagtcagggtggagacaaacaggaggagctggaaaagctacagaaggaagagaaagagcgcttgttggctgaaggtactgcagccatggaggcttgtagagccgaagctgaagctgaaaagaagcgtaaacggaattttgagagggagaaggctcgtcaggccctacaggaggcaagtgttgaccttacccaccagcagttgcaatttctcattcttattatggagagaactgtagaaattaatgataacctccatctcaaggatttggaattgcttggaacagccacaacagaacatattgtaagctctgttgatgagactagtccagaacgctctcatgatggcatggccggctatcatccaggagctgtcaatcctttggagcaacttggactgttcataaaggtagacgatgaggaagacgacgagcagtgttccctgcattaaagaaagaagagaaaggagaaatcagctgatggtgctgtgtttttccatgccctgtcacgggctaggggctggtgccaacctattgatccaaagtgatcacctgttgcgggccatcatgtgtggcaatggttctaaactggggtggtgagagccgtccattttgttaaaaatatgcatgggaaggatgaagatcatcttgcatagtcatttgcttccaggaggcgcacaggaggtggagtaaaaacgaacgtatttatggtgcctagaggacggttttttcagccactgccaaaacggcttgaatgacgccaccgaagtagtggagttcaaatggctcattgtttgccgcaacctcaatttcaagcgggtttgttcagcggcttatagcttcttctctccttttgttgtctcatctgttttagattgtagaatttgggctagttgcttcctgctgtaaatccgaattttgatgtagtgacggaagtgctacctttttgttgagcatgatcgaaaagtttacaagaaaaatcgtttttttgtagatgaacgtccagtcttgtctgtagctacaatttcttgcgcaatcagtgtaacatccgttgtgtttatattctgctcgacaacgagtacggatttaagcacgtgatatcagtgaataagacagacattagggtctaatcgttttta

SEQ ID NO: 55177 - DNA, 3419 bp, Zea Mays
cccgcgcgtcacgttcgcatcgcttctggttcgggtctcacctctcgcgatcaaagcagtagcgggttcagtggcttggcgaaggaaaaaaaaggaggaaaaaaaaatagcaaggctgtgcagcgaggagacgactcgactccaactgggaggcgaaaaataaaaaagaggataaggcgaggcccgaccgggcggccaccgcgctcccagatccgctccgctgccgtggagatccagctcccttgcgcgcctgagcgtggacgccggcgtctcgctcccggatcccgaccttggggttgcagctgcttcagatccagcgttaccaggttccgagctcgcatcctcttctttcgaatttggactacctttggatttcgggggtttcttcgattgacgcggtgaggtgtctgattcgggcgcgaattggaggatttgagggctgcgctgttggattcgtgcgcggttggtggttcgtattggtgttaagattcccgtttaggattagggttttggagaggatattgttatttttttgccttttgtgctttatttctgttgcttctgtagcttgaatttggtgtgtgccactgaaaatggttgtaaatgctgaacagatctgtgacccgctggcgcctgggcacatgacaccgacggttttaatggagtttgggcagcagaggccaatgaaacggggatacgaggaaatggtcttcagggcagcctcttcccgtggttatgcagagactgttggcgagtcgggagttgcagctggtagtcctcttcgtgttgattctgaggactcatctgtgccaaagcgcaagtgcatcagcctgaacagcgttggctttgatgtgaagcgggagatcttggtgccctctaagatgtcgtcatctgaacggcggtaccttcgaaagagattccgggcagagcttgattcggtgcgggatctcctcaagaagccagagtttgcagcccctgttcctctcaatcgggcacctgctttgtcatcctcagctgcacctcgagctaagaagccacagaagtctcagcgtggtgggaccaatgttatacgtggtgcaaagggacgattcttgcctacaaaaccgcggccggagacttccactgtgttatctgaagctgcagcgtttaagcagtgtgaagctattttgaagaagcttatgactcaaaagtatagtcatatattcaatgttccagttgatattgtgaagctgcaaattcctgattattttgacattgtgaagaccccaatggatcttggtactgtcaagaaaaagcttgaatctggttcatacacaagtccatcagattttgctgctgatgtccggctgacctttaacaacgctatggcttataatccgcgggggcatgctgtgcacgacatggccatccagctgaacaagatgtttgagagtcgatggaggccaattgagaagaaattggcttctgctgccactgagaaacatgttgaggttgacagggctgactcgaagaggaggaagacacctcctgtggaccgcagtgatgtgtcaatggagtgtgcacgacagacagagccagaaacaccgaagatgacagctgaagagagggaagcctttgggaactgcttggcatccatatctgatgagttacctcctcacatatttgaactgctacaacaatgcatcgacagcaatgcagatttgtctggggatggagagatagagattgacatccatgctgtcagtgatgacttgttatttgagctgaagaaacatgttgacaagtatttgcaagagaaagagcagagccagcaggtgaaatctgagccctccgagaatgaagctgtgaatgtatctggccttagccactcttctacaaatccttgcaaaggcggcgaacctatcgaagaggatgtggacatctgtggcaatgcctcacctatcatgctagacaaagatgcacaaatcaggaatagcaagtgtggtagtccaagtagttccagcagcgactctgaatcatcttctagcgattctgattcaggcagtgactctgaaagcgaatcagaaaaagttggcagccctggaaagcttgcgaaggggactaagaaacctgatcagctggtggagcaagaaaagagtgatgttattagtccagctgatgccaaccgtcctgctgctattgtggggcttcatggggaggacagtgagtcaaagcctgcaccagggggggaaaactcagaacccgatacacaagtctcaccagacaggctattgcgagcagcccttttgaggagccgttatgctgatgtgattgtcaaagctcgtggcattcttagtcagggtggagacaaacaggaggagctggaaaagctacagaaggaagagaaagagcgcttgttggctgaaggtactgcagccatggaggcttgtagagccgaagctgaagctgaaaagaagcgtaaacggaattttgagagggagaaggctcgtcaggccctacaggagatggagagaactgtagaaattaatgataacctccatctcaaggatttggaattgcttggaacagccacaacagaacatattgtaagctctgttgatgagactagtccagaacgctctcatgatggcatggccggctatcatccaggagctgtcaatcctttggagcaacttggactgttcataaaggtagacgatgaggaagacgacgagcagtgttccctgcattaaagaaagaagagaaaggagaaatcagctgatggtgctgtgtttttccatgccctgtcacgggctaggggctggtgccaacctattgatccaaagtgatcacctgttgcgggccatcatgtgtggcaatggttctaaactggggtggtgagagccgtccattttgttaaaaatatgcatgggaaggatgaagatcatcttgcatagtcatttgcttccaggaggcgcacaggaggtggagtaaaaacgaacgtatttatggtgcctagaggacggttttttcagccactgccaaaacggcttgaatgacgccaccgaagtagtggagttcaaatggctcattgtttgccgcaacctcaatttcaagcgggtttgttcagcggcttatagcttcttctctccttttgttgtctcatctgttttagattgtagaatttgggctagttgcttcctgctgtaaatccgaattttgatgtagtgacggaagtgctacctttttgttgagcatgatcgaaaagtttacaagaaaaatcgtttttttgtagatgaacgtccagtcttgtctgtagctacaatttcttgcgcaatcagtgtaacatccgttgtgtttatattctgctcgacaacgagtacggatttaagcacgtgatatcagtgaataagacagacattagggtctaatcgttttta

SEQ ID NO: 55178 - DNA, 3467 bp, Zea Mays
cccgcgcgtcacgttcgcatcgcttctggttcgggtctcacctctcgcgatcaaagcagtagcgggttcagtggcttggcgaaggaaaaaaaaggaggaaaaaaaaatagcaaggctgtgcagcgaggagacgactcgactccaactgggaggcgaaaaataaaaaagaggataaggcgaggcccgaccgggcggccaccgcgctcccagatccgctccgctgccgtggagatccagctcccttgcgcgcctgagcgtggacgccggcgtctcgctcccggatcccgaccttggggttgcagctgcttcagatccagcgttaccaggttccgagctcgcatcctcttctttcgaatttggactacctttggatttcgggggtttcttcgattgacgcggtgaggtgtctgattcgggcgcgaattggaggatttgagggctgcgctgttggattcgtgcgcggttggtggttcgtattggtgttaagattcccgtttaggattagggttttggagaggatattgttatttttttgccttttgtgctttatttctgttgcttctgtagcttgaatttggtgtgtgccactgaaaatggttgtaaatgctgaacagatctgtgacccgctggcgcctgggcacatgacaccgacggttttaatggagtttgggcagcagaggccaatgaaacggggatacgaggaaatggtcttcagggcagcctcttcccgtggttatgcagagactgttggcgagtcgggagttgcagctggtagtcctcttcgtgttgattctgaggactcatctgtgccaaagcgcaagtgcatcagcctgaacagcgttggctttgatgtgaagcgggagatcttggtgccctctaagatgtcgtcatctgaacggcggtaccttcgaaagagattccgggcagagcttgattcggtgcgggatctcctcaagaagccagagtttgcagcccctgttcctctcaatcgggcacctgctttgtcatcctcagctgcacctcgagctaagaagccacagaagtctcagcgtggtgggaccaatgttatacgtggtgcaaagggacgattcttgcctacaaaaccgcggccggagacttccactgtgttatctgaagctgcagcgtttaagcagtgtgaagctattttgaagaagcttatgactcaaaagtatagtcatatattcaatgttccagttgatattgtgaagctgcaaattcctgattattttgacattgtgaagaccccaatggatcttggtactgtcaagaaaaagcttgaatctggttcatacacaagtccatcagattttgctgctgatgtccggctgacctttaacaacgctatggcttataatccgcgggggcatgctgtgcacgacatggccatccagctgaacaagatgtttgagagtcgatggaggccaattgagaagaaattggcttctgctgccactgagaaacatgttgaggttgacagggctgactcgaagaggaggaagacacctcctgtggaccgcagtgatgtgtcaatggagtgtgcacgacagacagagccagaaacaccgaagatgacagctgaagagagggaagcctttgggaactgcttggcatccatatctgatgagttacctcctcacatatttgaactgctacaacaatgcatcgacagcaatgcagatttgtctggggatggagagatagagattgacatccatgctgtcagtgatgacttgttatttgagctgaagaaacatgttgacaagtatttgcaagagaaagagcagagccagcaggtgaaatctgagccctccgagaatgaagctgtgaatgtatctggccttagccactcttctacaaatccttgcaaaggcggcgaacctatcgaagaggatgtggacatctgtggcaatgcctcacctatcatgctagacaaagatgcacaaatcaggaatagcaagtgtggtagtccaagtagttccagcagcgactctgaatcatcttctagcgattctgattcaggcagtgactctgaaagcgaatcagaaaaagttggcagccctggaaagcttgcgaaggggactaagaaacctgatcagctggtggagcaagaaaagagtgatgttattagtccagctgatgccaaccgtcctgctgctattgtggggcttcatggggaggacagtgagtcaaagcctgcaccagggggggaaaactcagaacccgatacacaagtctcaccagacaggctattgcgagcagcccttttgaggagccgttatgctgatgtgattgtcaaagctcgtggcattcttagtcagggtggagacaaacaggaggagctggaaaagctacagaaggaagagaaagagcgcttgttggctgaaggtactgcagccatggaggcttgtagagccgaagctgaagctgaaaagaagcgtaaacggaattttgagagggagaaggctcgtcaggccctacaggaggcaagtgttgaccttacccaccagcagttgcaatttctcattcttattatggagagaactgtagaaattaatgataacctccatctcaaggatttggaattgcttggaacagccacaacagaacatattgtaagctctgttgatgagactagtccagaacgctctcatgatggcatggccggctatcatccaggagctgtcaatcctttggagcaacttggactgttcataaaggtagacgatgaggaagacgacgagcagtgttccctgcattaaagaaagaagagaaaggagaaatcagctgatggtgctgtgtttttccatgccctgtcacgggctaggggctggtgccaacctattgatccaaagtgatcacctgttgcgggccatcatgtgtggcaatggttctaaactggggtggtgagagccgtccattttgttaaaaatatgcatgggaaggatgaagatcatcttgcatagtcatttgcttccaggaggcgcacaggaggtggagtaaaaacgaacgtatttatggtgcctagaggacggttttttcagccactgccaaaacggcttgaatgacgccaccgaagtagtggagttcaaatggctcattgtttgccgcaacctcaatttcaagcgggtttgttcagcggcttatagcttcttctctccttttgttgtctcatctgttttagattgtagaatttgggctagttgcttcctgctgtaaatccgaattttgatgtagtgacggaagtgctacctttttgttgagcatgatcgaaaagtttacaagaaaaatcgtttttttgtagatgaacgtccagtcttgtctgtagctacaatttcttgcgcaatcagtgtaacatccgttgtgtttatattctgctcgacaacgagtacggatttaagcacgtgatatcagtgaataagacagacattagggtctaatcgttttta

SEQ ID NO: 55179 - DNA, 2503 bp, Zea Mays
attagaagttataaatgtttgtagcttttaagttttaaggtttgatcaaatcttgtcctaaacggcatgtttttatgataggaaggagtggcaaaatatgacaattaaatcacataaggattggttaggatcaagcttggaagtggaaaaccatgattgatcaaccgtttgagaataaacacttaaacccagaattgtcttacacctcaacatatatttttggtaatatcatctaaccaaagcacaaggagtaatttaacatattcttaaccttattcttttacctgcctcaataactatccaagaaataataagcatagatcccagaacacgtggcaactatggtgggcacaggagggcgaaggcggcattttgtaacagttaatgtccatgcaaataaagaaacaaattgataatgatcgtgcaatgaatcacaggaatgataaataaatcatgatgagctgatgaaacagaactggagtgggaagatgaagagggcagggattaccaaagtattcaaaagagctgagctcaactctgtcaagcgaagaacaggtggagtgttaataaataattagcatataaacccctgattgtacatagaaaataggatagcaaactgaccacttggattcacaattacagatgagacctttggaggaccgaccacaaaaaaagtcagttaggtatgtaatctggcatccgtgaacccttcatctcttgatacagccacagctttaagctgcagacgtttcacataatatttaaagtaagttacataaacttcccatgaagtccaagaattagccatcaattgaagttcaattggtaacagaaatcatcaggaccaggtctacctaatatttaaagtaagttacataaacttcccatgaagtccaagaatcagccatcaattgaagtctaattggtaacagaaatcatcaagaccaggtctaacagagcatatatactattcctaaagaaaggtgtagcctaacaaatgcaggaaagaaagctaatgacaatacagtagtttctcacaagaaatgactgctgaagcaatgataatttacgggtccgtttagttggagagcgaggtggttctaaatcgggaatattcccaccatatttgggacgagcttgctccaaaaaacggtcgaatcccaccattccacttctccctctctttgcggtgggcccaaacagaaactgaaacgattccactcctctcttagaaattggatcgcagccgcttcgctctccaaaaagatatagataatagttttatagtagctaatagaagtggagtttaaaatagaatatagggatgagtaagcttgcaggtagccgacagtaccatcccttgtctcttatgggtttgtctcttcaaaaggttagaaatagtggtatactctggttagcaaagaggacaaccgaagcaatttaagattgtcttcagtggattgtgtaaaataggggacgcaacactatagatgacactgtttgcaaaatggagtttgaaatagggaatgagataaagatgaaataggggatctgttgcagatggcctaagaagtcaaggtatcgcttctatctatattgagtaaagatcatagttgttaaggcgccggcaaggcgaggtaaggcgaccgaccccctttttaccttttaagcgataaggcctaaggcgaggcgaggctttagtattataacaaaatagacaataaaatagaatatatgtgtgtatatatatatatatatatatatatatatatatatatatatatataggaatatagtctcaaaaagatatagataatagttttatagtagctaatagaagtccagttagcccaggcagcccaacagcccatcaaaattaggttacccacacatccagccacttattcccctcccctcccattccctccctatggcagcatgctcttcccgcagccgccgccaacgctcaactcactgccactgccagcacccagtcgccgccaccaaatctgctatgggcgtgcccccctcctcttccctccttcctctattctgcctggagagctcacggaggggaggggcgccgccggcgccaagagaccaacacccccacagctgtagatccgccgcagaccaacgacaacgctacagatcccactcgctttgtgctcgggtcaggttgcagcaggccctttacccatccctgcagaccttcaaggcgtcttcaaatcgatgtcttagcaagcttcaagggctcaaggcgccatgatgtcttagtctacggtctaaggcgagagggacgccttgccactgctgcacaccttaccgcctaagcgtcgcctaagcgacgcttcaaggacgccttaacaactatggtgccagccaaatctggcagctattttgctctttggctggcccctcccgaatgcctgcccagctatccgcgacgtgcatccaacagcagaggaaaaaagaaagaatgaagcaaggcaaatgattg

SEQ ID NO: 55180 - DNA, 2923 bp, Zea Mays
attagaagttataaatgtttgtagcttttaagttttaaggtttgatcaaatcttgtcctaaacggcatgtttttatgataggaaggagtggcaaaatatgacaattaaatcacataaggattggttaggatcaagcttggaagtggaaaaccatgattgatcaaccgtttgagaataaacacttaaacccagaattgtcttacacctcaacatatatttttggtaatatcatctaaccaaagcacaaggagtaatttaacatattcttaaccttattcttttacctgcctcaataactatccaagaaataataagcatagatcccagaacacgtggcaactatggtgggcacaggagggcgaaggcggcattttgtaacagttaatgtccatgcaaataaagaaacaaattgataatgatcgtgcaatgaatcacaggaatgataaataaatcatgatgagctgatgaaacagaactggagtgggaagatgaagagggcagggattaccaaagtattcaaaagagctgagctcaactctgtcaagcgaagaacaggtggagtgttaataaataattagcatataaacccctgattgtacatagaaaataggatagcaaactgaccacttggattcacaattacagatgagacctttggaggaccgaccacaaaaaaagtcagttaggtatgtaatctggcatccgtgaacccttcatctcttgatacagccacagctttaagctgcagacgtttcacataatatttaaagtaagttacataaacttcccatgaagtccaagaattagccatcaattgaagttcaattggtaacagaaatcatcaggaccaggtctacctaatatttaaagtaagttacataaacttcccatgaagtccaagaatcagccatcaattgaagtctaattggtaacagaaatcatcaagaccaggtctaacagagcatatatactattcctaaagaaaggtgtagcctaacaaatgcaggaaagaaagctaatgacaatacagtagtttctcacaagaaatgactgctgaagcaatgataatttacgggtccgtttagttggagagcgaggtggttctaaatcgggaatattcccaccatatttgggacgagcttgctccaaaaaacggtcgaatcccaccattccacttctccctctctttgcggtgggcccaaacagaaactgaaacgattccactcctctcttagaaattggatcgcagccgcttcgctctccaaaaagatatagataatagttttatagtagctaatagaagtggagtttaaaatagaatatagggatgagtaagcttgcaggtagccgacagtaccatcccttgtctcttatgggtttgtctcttcaaaaggttagaaatagtggtatactctggttagcaaagaggacaaccgaagcaatttaagattgtcttcagtggattgtgtaaaataggggacgcaacactatagatgacactgtttgcaaaatggagtttgaaatagggaatgagataaagatgaaataggggatctgttgcagatggcctaagaagtcaaggtatcgcttctatctatattgagtaaagatcatagttgttaaggcgccggcaaggcgaggtaaggcgaccgaccccctttttaccttttaagcgataaggcctaaggcgaggcgaggctttagtattataacaaaatagacaataaaatagaatatatgtgtgtatatatatatatatatatatatatatatatatatatatatatataggaatatagtctcaaaaagatatagataatagttttatagtagctaatagaagtccagttagcccaggcagcccaacagcccatcaaaattaggttacccacacatccagccacttattcccctcccctcccattccctccctatggcagcatgctcttcccgcagccgccgccaacgctcaactcactgccactgccagcacccagtcgccgccaccaaatctgctatgggcgtgcccccctcctcttccctccttcctctattctgcctggagagctcacggaggggaggggcgccgccggcgccaagagaccaacacccccacagctgtagatccgccgcagaccaacgacaacgctacagatcccactcgctttgtgctcgggtcaggttgcagcaggccctttacccatccctgcagaccttcaaggcgtcttcaaatcgatgtcttagcaagcttcaagggctcaaggcgccatgatgtcttagtctacggtctaaggcgagagggacgccttgccactgctgcacaccttaccgcctaagcgtcgcctaagcgacgcttcaaggacgccttaacaactatgcaagacttgtctgctttcagatcagtcaaaaaggccatgatctcctatgctcccttgttctttcatctgttgctccaccagggggtcagggctcttcatgtatctcttgatcctcctagcaggaaaagttggcatgaattccttcatcttgggcagaggaacttcacggaaccactcatggttcaaggcatcagcagcagatatgcgctgtatagaaggaacaagtctattaaggacatgcaaaatgtgtacaagagaatcaggtggtgcactagagaatgtatattaccttctcagggtcatatgccagcaacctatttagcaggtcaaacccagcttctgacaaggtcaagcctcccgtgaaggatacagctggaaatttgtcccttaatctattgtacctgatgtagcaaattgaaagtaagacctccatggaagtgaaccaatgcattcaaataaaaaaatagaaactataaagattagtgccacttacggtcgctttacgaagttgcctttgaagccaggcaatttggaacaaccatgcc

SEQ ID NO: 55181 - DNA, 3383 bp, Zea Mays
gccatgaggaggacgcaggcgaaggagtatggcggccccgtcattcgcgccaaacggacgaggatgggtggctcctgcagcagccgcgacggcgagcagggccagcgccgcccacgctgatccccggggcacaccgcccctgccacatcacctacgcagcccacgcgcaaccaggtctcctcgacccagatctctgccccaggagtggaggcgacgccgtaagcgccccaatgcggcgagcggcaatggccggtgcgtgcgcggacgtcgacgccgccgcctgggctccgggcggcgaggcgcgggatctgcggctagggttttggcgcgcaggaggattcgggagttgcttcggcgcgagggagtgggaacgaatagggagagctggagcagcggggcgacgaccgatgaggttggaactcagaagggggagggaaaaaaatcgaggggagcagagcacgcacggacgaggatgggcggggacggggataagatatggttccatcgatccattgcagggacagtgcaagcggccgggtccggcgacggagacgaagccgaggaagagaaggccttcttggtgccgagcgccgcggccttcccccacggcatgtccgccgccgccgctggcccgtcgctggccgtggccaagaaagaggagttcagcaagtcgccgtccaactcgccggcctcatcgggtggcacggacggtggctcgtcggctgtcccgtggccggagcagatccacgcgcagaacagcagcccgacgctgttagaaccgagtcgccaagccatccctctggagtgagtttttttgctattatggtactccttttaacatgcttctccattatagtactcagaaattaatcttgttcctaatagtatttataagtgattttgtcctacaaaatagtactgtaacctgtttttaattatttttattttttccattttccttaacatctgacgtgcccatattgtcattcccttctccgattcgctcgctttcctttatgataaagttattttgccttgtggatgattatgtcatatttggtgaacttaaatatggtgatcaacatctcctggtgcagctcggtatctcatctaaatatgctgaaagtggatgtaatatgctgaaactgaatatgtcaaatctgaatatgctcggtctctcatctgattatgttgctcggccattgcctttgggattggtcaaagctgcgaaagggatctgctgtagaaactttatctattgcataaactcaatctggctgtctactgctgttggtagcctcgcaatggtagctgtatctactggtaatgcagctctctctctctctctgtatctacaggttcaaatcgatggccggttgcttcttcaggctagcagaattttaccaagacccagagttcggcatgttgtggcaatggaaagggctggcgttggcttcagagaaccaatctgcatgacgttgattctatcacccatatccttgacgaccaaatggaggtcccaaaaaattgagcaaccaagcaagggctgtctgactctgtcaaaggcccagcagagattgttcacacaaagtaagcgagcgaaccgaagaagggaaggacaatatagtcacgtcacgtgttaagtaaaaaggaaaaacataaaaataattaaaaaaaaggttagagtactgttttggaggaccaaatcacttataaatactattagacagaaggttaacttgtgagtattataatgagaagcctgttaaaaggagtaccataatagcaaaaaaactcctctggagcatcgaccgactctccacctgaggaccgccagctccttcctccgcctcgacaagcgttggagagatggtgaagagaagcaagaagagcaagagcaagcgcgtcacgttgcggcagaagcacaaggtgctgcgcaaggtgaaggagcatgacatggaaaaaatggttacaaaggctgatccaagtaaacggattgtactacttcacaacaagatagatcttgttcctaaggaagcggtagagaagtggcttacatatctgagagaagaaatgccaacaattgcgtttaagtgtaatacccaagagcagcggaccaagccgggatggaaatcttcaaaactagataaaacaaacagcatcccacaaagtagtgattgccttggtgctgagaatctaattagattgctcaagaaatattccagaagccacgagctcaaactggcaattacggtgggtattgttggactccctaatgttggcaagagcagtctgatcaacagcctgaagaggtcccgagtggttaatgtcggttccactccaggggttactagatcaatgcaagaagttcaattagacaagaagatcagtgatcctgcgccgtggtgatcgcggccatcgttcgccgatggtctgcgtcgtcttcactcgtcagggaaccggctgtgacggcttggttctaacaggcgccgatggaggccatggagctcgtcgtcgcgctcaccgcctgcgccgactccgtcgcagcctgcaaccacgacgtcgccaactactacctcgtgcggctgggcgagatggcctcccccgcggggcccacgctgatgcaccgcgtggccgcctacttcgtggaggtgctcacgctgcgcatggttcatgcaaaagcatttaagtttgctaagttgcattctaagaacatgtatcaataatgattggaaatgaaagctgaattttttaccggcgagaggctactggagtttgcacctggtggtgtgagctgcgcaccacctccttcataggcagatgtcatctatatggaagcggcaggaggtggaagcactatatatgacacctctatcgctcttgttgattgctggggtcaacatgtgccgctgctgcacttggtgggcctagggaattctaggactctgggctggtttggtgggtagtgaaatttaaatagcaagtgattttctctctggatctcatctattttcttgtccaccgaaccagccttaagatttgttctgtctggatagcacaaaaattgtccatcttgcttgcacccataacactgctctgaacagaagatgcatgattacctgcatgcattaaacgatatactagataaatgtcaccggtatcacaagcttacatctcggagacaccttactatatgatttatgttgtcacaacacacgtgtattatactcacttcttagagttgtttttttatattcgtattgtagtataatttgatttgtattagtttagttctgtatggttgtttctaaaaaaattgttagattatatcgataatatatatgatatttgtttttacgtaatcattgtacactaacattttg

SEQ ID NO: 55182 - DNA, 3050 bp, Zea Mays
cggccatgaggaggacgcaggcgaaggagtatggcggccccgtcattcgcgccaaacggacgaggatgggtggctcctgcagcagccgcgacggcgagcagggccagcgccgcccacgctgatccccggggcacaccgcccctgccacatcacctacgcagcccacgcgcaaccaggtctcctcgacccagatctctgccccaggagtggaggcgacgccgtaagcgccccaatgcggcgagcggcaatggccggtgcgtgcgcggacgtcgacgccgccgcctgggctccgggcggcgaggcgcgggatctgcggctagggttttggcgcgcaggaggattcgggagttgcttcggcgcgagggagtgggaacgaatagggagagctggagcagcggggcgacgaccgatgaggttggaactcagaagggggagggaaaaaaatcgaggggagcagagcacgcacggacgaggatgggcggggacggggataagatatggttccatcgatccattgcagggacagtgcaagcggccgggtccggcgacggagacgaagccgaggaagagaaggccttcttggtgccgagcgccgcggccttcccccacggcatgtccgccgccgccgctggcccgtcgctggccgtggccaagaaagaggagttcagcaagtcgccgtccaactcgccggcctcatcgggtggcacggacggtggctcgtcggctgtcccgtggccggagcagatccacgcgcagaacagcagcccgacgctgttagaaccgagtcgccaagccatccctctggagttcaaatcgatggccggttgcttcttcaggctagcagaattttaccaagacccagagttcggcatgttgtggcaatggaaagggctggcgttggcttcagagaaccaatctgcatgacgttgattctatcacccatatccttgacgaccaaatggaggtcccaaaaaattgagcaaccaagcaagggctgtctgactctgtcaaaggcccagcagagattgttcacacaaagtaagcgagcgaaccgaagaagggaaggacaatatagtcacgtcacgtgttaagtaaaaaggaaaaacataaaaataattaaaaaaaaggttagagtactgttttggaggaccaaatcacttataaatactattagacagaaggttaacttgtgagtattataatgagaagcctgttaaaaggagtaccataatagcaaaaaaactcctctggagcatcgaccgactctccacctgaggaccgccagctccttcctccgcctcgacaagcgttggagagatggtgaagagaagcaagaagagcaagagcaagcgcgtcacgttgcggcagaagcacaaggtgctgcgcaaggtgaaggagcatgacatggaaaaaatggttacaaaggctgatccaagtaaacggattgtactacttcacaacaagatagatcttgttcctaaggaagcggtagagaagtggcttacatatctgagagaagaaatgccaacaattgcgtttaagtgtaatacccaagagcagcggaccaagccgggatggaaatcttcaaaactagataaaacaaacagcatcccacaaagtagtgattgccttggtgctgagaatctaattagattgctcaagaaatattccagaagccacgagctcaaactggcaattacggtgggtattgttggactccctaatgttggcaagagcagtctgatcaacagcctgaagaggtcccgagtggttaatgtcggttccactccaggggttactagatcaatgcaagaagttcaattagacaagaagatcagtgatcctgcgccgtggtgatcgcggccatcgttcgccgatggtctgcgtcgtcttcactcgtcagggaaccggctgtgacggcttggttctaacaggcgccgatggaggccatggagctcgtcgtcgcgctcaccgcctgcgccgactccgtcgcagcctgcaaccacgacgtcgccaactactacctcgtgcggctgggcgagatggcctcccccgcggggcccacgctgatgcaccgcgtggccgcctacttcgtggaggtgctcacgctgcgcatggtgcgcatgtggcccagtcgagatctggtcattagattcaatagtgtggtactggtggcatgtggcccagccgagatctgacagttcttagaaaaattcagctttcatttccaatcgttacagctttaaactattatgatcgttactttttcattggcattattacttgagaaaccattcaaaacatccactttgcttttgataaccatgaatttgtaggttcatgcaaaagcatttaagtttgctaagttgcattctaagaacatgtatcaataatgattggaaatgaaagctgaattttttaccggcgagaggctactggagtttgcacctggtggtgtgagctgcgcaccacctccttcataggcagatgtcatctatatggaagcggcaggaggtggaagcactatatatgacacctctatcgctcttgttgattgctggggtcaacatgtgccgctgctgcacttggtgggcctagggaattctaggactctgggctggtttggtgggtagtgaaatttaaatagcaagtgattttctctctggatctcatctattttcttgtccaccgaaccagccttaagatttgttctgtctggatagcacaaaaattgtccatcttgcttgcacccataacactgctctgaacagaagatgcatgattacctgcatgcattaaacgatatactagataaatgtcaccggtatcacaagcttacatctcggagacaccttactatatgatttatgttgtcacaacacacgtgtattatactcacttcttagagttgtttttttatattcgtattgtagtataatttgatttgtattagtttagttctgtatggttgtttctaaaaaaattgttagattatatcgataatatatatgatatttgtttttacgtaatcattgtacactaacattttg

SEQ ID NO: 55183 - DNA, 2949 bp, Zea Mays
cggccatgaggaggacgcaggcgaaggagtatggcggccccgtcattcgcgccaaacggacgaggatgggtggctcctgcagcagccgcgacggcgagcagggccagcgccgcccacgctgatccccggggcacaccgcccctgccacatcacctacgcagcccacgcgcaaccaggtctcctcgacccagatctctgccccaggagtggaggcgacgccgtaagcgccccaatgcggcgagcggcaatggccggtgcgtgcgcggacgtcgacgccgccgcctgggctccgggcggcgaggcgcgggatctgcggctagggttttggcgcgcaggaggattcgggagttgcttcggcgcgagggagtgggaacgaatagggagagctggagcagcggggcgacgaccgatgaggttggaactcagaagggggagggaaaaaaatcgaggggagcagagcacgcacggacgaggatgggcggggacggggataagatatggttccatcgatccattgcagggacagtgcaagcggccgggtccggcgacggagacgaagccgaggaagagaaggccttcttggtgccgagcgccgcggccttcccccacggcatgtccgccgccgccgctggcccgtcgctggccgtggccaagaaagaggagttcagcaagtcgccgtccaactcgccggcctcatcgggtggcacggacggtggctcgtcggctgtcccgtggccggagcagatccacgcgcagaacagcagcccgacgctgttagaaccgagtcgccaagccatccctctggagttcaaatcgatggccggttgcttcttcaggctagcagaattttaccaagacccagagttcggcatgttgtggcaatggaaagggctggcgttggcttcagagaaccaatctgcatgacgttgattctatcacccatatccttgacgaccaaatggaggtcccaaaaaattgagcaaccaagcaagggctgtctgactctgtcaaaggcccagcagagattgttcacacaaagtaagcgagcgaaccgaagaagggaaggacaatatagtcacgtcacgtgttaagtaaaaaggaaaaacataaaaataattaaaaaaaaggttagagtactgttttggaggaccaaatcacttataaatactattagacagaaggttaacttgtgagtattataatgagaagcctgttaaaaggagtaccataatagcaaaaaaactcctctggagcatcgaccgactctccacctgaggaccgccagctccttcctccgcctcgacaagcgttggagagatggtgaagagaagcaagaagagcaagagcaagcgcgtcacgttgcggcagaagcacaaggtgctgcgcaaggtgaaggagcatgacatggaaaaaatggttacaaaggctgatccaagtaaacggattgtactacttcacaacaagatagatcttgttcctaaggaagcggtagagaagtggcttacatatctgagagaagaaatgccaacaattgcgtttaagtgtaatacccaagagcagcggaccaagccgggatggaaatcttcaaaactagataaaacaaacagcatcccacaaagtagtgattgccttggtgctgagaatctaattagattgctcaagaaatattccagaagccacgagctcaaactggcaattacggtgggtattgttggactccctaatgttggcaagagcagtctgatcaacagcctgaagaggtcccgagtggttaatgtcggttccactccaggggttactagatcaatgcaagaagttcaattagacaagaaggcgccgatggaggccatggagctcgtcgtcgcgctcaccgcctgcgccgactccgtcgcagcctgcaaccacgacgtcgccaactactacctcgtgcggctgggcgagatggcctcccccgcggggcccacgctgatgcaccgcgtggccgcctacttcgtggaggtgctcacgctgcgcatggtgcgcatgtggcccagtcgagatctggtcattagattcaatagtgtggtactggtggcatgtggcccagccgagatctgacagttcttagaaaaattcagctttcatttccaatcgttacagctttaaactattatgatcgttactttttcattggcattattacttgagaaaccattcaaaacatccactttgcttttgataaccatgaatttgtaggttcatgcaaaagcatttaagtttgctaagttgcattctaagaacatgtatcaataatgattggaaatgaaagctgaattttttaccggcgagaggctactggagtttgcacctggtggtgtgagctgcgcaccacctccttcataggcagatgtcatctatatggaagcggcaggaggtggaagcactatatatgacacctctatcgctcttgttgattgctggggtcaacatgtgccgctgctgcacttggtgggcctagggaattctaggactctgggctggtttggtgggtagtgaaatttaaatagcaagtgattttctctctggatctcatctattttcttgtccaccgaaccagccttaagatttgttctgtctggatagcacaaaaattgtccatcttgcttgcacccataacactgctctgaacagaagatgcatgattacctgcatgcattaaacgatatactagataaatgtcaccggtatcacaagcttacatctcggagacaccttactatatgatttatgttgtcacaacacacgtgtattatactcacttcttagagttgtttttttatattcgtattgtagtataatttgatttgtattagtttagttctgtatggttgtttctaaaaaaattgttagattatatcgataatatatatgatatttgtttttacgtaatcattgtacactaacattttg

SEQ ID NO: 55184 - DNA, 2835 bp, Zea Mays
taagcggccatgaggaggacgcaggcgaaggagtatggcggccccgtcattcgcgccaaacggacgaggatgggtggctcctgcagcagccgcgacggcgagcagggccagcgccgcccacgctgatccccggggcacaccgcccctgccacatcacctacgcagcccacgcgcaaccaggtctcctcgacccagatctctgccccaggagtggaggcgacgccgtaagcgccccaatgcggcgagcggcaatggccggtgcgtgcgcggacgtcgacgccgccgcctgggctccgggcggcgaggcgcgggatctgcggctagggttttggcgcgcaggaggattcgggagttgcttcggcgcgagggagtgggaacgaatagggagagctggagcagcggggcgacgaccgatgaggttggaactcagaagggggagggaaaaaaatcgaggggagcagagcacgcacggacgaggatgggcggggacggggataagatatggttccatcgatccattgcagggacagtgcaagcggccgggtccggcgacggagacgaagccgaggaagagaaggccttcttggtgccgagcgccgcggccttcccccacggcatgtccgccgccgccgctggcccgtcgctggccgtggccaagaaagaggagttcagcaagtcgccgtccaactcgccggcctcatcgggtggcacggacggtggctcgtcggctgtcccgtggccggagcagatccacgcgcagaacagcagcccgacgctgttagaaccgagtcgccaagccatccctctggagttcaaatcgatggccggttgcttcttcaggctagcagaattttaccaagacccagagttcggcatgttgtggcaatggaaagggctggcgttggcttcagagaaccaatctgcatgacgttgattctatcacccatatccttgacgaccaaatggaggtcccaaaaaattgagcaaccaagcaagggctgtctgactctgtcaaaggcccagcagagattgttcacacaaagtaagcgagcgaaccgaagaagggaaggacaatatagtcacgtcacgtgttaagtaaaaaggaaaaacataaaaataattaaaaaaaaggttagagtactgttttggaggaccaaatcacttataaatactattagacagaaggttaacttgtgagtattataatgagaagcctgttaaaaggagtaccataatagcaaaaaaactcctctggagcatcgaccgactctccacctgaggaccgccagctccttcctccgcctcgacaagcgttggagagatggtgaagagaagcaagaagagcaagagcaagcgcgtcacgttgcggcagaagcacaaggtgctgcgcaaggtgaaggagcatgacatggaaaaaatggttacaaaggctgatccaagtaaacggattgtactacttcacaacaagatagatcttgttcctaaggaagcggtagagaagtggcttacatatctgagagaagaaatgccaacaattgcgtttaagtgtaatacccaagagcagcggaccaagccgggatggaaatcttcaaaactagataaaacaaacagcatcccacaaagtagtgattgccttggtgctgagaatctaattagattgctcaagaaatattccagaagccacgagctcaaactggcaattacggtgggtattgttggactccctaatgttggcaagagcagtctgatcaacagcctgaagaggtcccgagtggttaatgtcggttccactccaggggttactagatcaatgcaagaagttcaattagacaagaagatcagtgatcctgcgccgtggtgatcgcggccatcgttcgccgatggtctgcgtcgtcttcactcgtcagggaaccggctgtgacggcttggttctaacaggcgccgatggaggccatggagctcgtcgtcgcgctcaccgcctgcgccgactccgtcgcagcctgcaaccacgacgtcgccaactactacctcgtgcggctgggcgagatggcctcccccgcggggcccacgctgatgcaccgcgtggccgcctacttcgtggaggtgctcacgctgcgcatggttcatgcaaaagcatttaagtttgctaagttgcattctaagaacatgtatcaataatgattggaaatgaaagctgaattttttaccggcgagaggctactggagtttgcacctggtggtgtgagctgcgcaccacctccttcataggcagatgtcatctatatggaagcggcaggaggtggaagcactatatatgacacctctatcgctcttgttgattgctggggtcaacatgtgccgctgctgcacttggtgggcctagggaattctaggactctgggctggtttggtgggtagtgaaatttaaatagcaagtgattttctctctggatctcatctattttcttgtccaccgaaccagccttaagatttgttctgtctggatagcacaaaaattgtccatcttgcttgcacccataacactgctctgaacagaagatgcatgattacctgcatgcattaaacgatatactagataaatgtcaccggtatcacaagcttacatctcggagacaccttactatatgatttatgttgtcacaacacacgtgtattatactcacttcttagagttgtttttttatattcgtattgtagtataatttgatttgtattagtttagttctgtatggttgtttctaaaaaaattgttagattatatcgataatatatatgatatttgtttttacgtaatcattgtacactaacattttg

SEQ ID NO: 55185 - DNA, 2734 bp, Zea Mays
taagcggccatgaggaggacgcaggcgaaggagtatggcggccccgtcattcgcgccaaacggacgaggatgggtggctcctgcagcagccgcgacggcgagcagggccagcgccgcccacgctgatccccggggcacaccgcccctgccacatcacctacgcagcccacgcgcaaccaggtctcctcgacccagatctctgccccaggagtggaggcgacgccgtaagcgccccaatgcggcgagcggcaatggccggtgcgtgcgcggacgtcgacgccgccgcctgggctccgggcggcgaggcgcgggatctgcggctagggttttggcgcgcaggaggattcgggagttgcttcggcgcgagggagtgggaacgaatagggagagctggagcagcggggcgacgaccgatgaggttggaactcagaagggggagggaaaaaaatcgaggggagcagagcacgcacggacgaggatgggcggggacggggataagatatggttccatcgatccattgcagggacagtgcaagcggccgggtccggcgacggagacgaagccgaggaagagaaggccttcttggtgccgagcgccgcggccttcccccacggcatgtccgccgccgccgctggcccgtcgctggccgtggccaagaaagaggagttcagcaagtcgccgtccaactcgccggcctcatcgggtggcacggacggtggctcgtcggctgtcccgtggccggagcagatccacgcgcagaacagcagcccgacgctgttagaaccgagtcgccaagccatccctctggagttcaaatcgatggccggttgcttcttcaggctagcagaattttaccaagacccagagttcggcatgttgtggcaatggaaagggctggcgttggcttcagagaaccaatctgcatgacgttgattctatcacccatatccttgacgaccaaatggaggtcccaaaaaattgagcaaccaagcaagggctgtctgactctgtcaaaggcccagcagagattgttcacacaaagtaagcgagcgaaccgaagaagggaaggacaatatagtcacgtcacgtgttaagtaaaaaggaaaaacataaaaataattaaaaaaaaggttagagtactgttttggaggaccaaatcacttataaatactattagacagaaggttaacttgtgagtattataatgagaagcctgttaaaaggagtaccataatagcaaaaaaactcctctggagcatcgaccgactctccacctgaggaccgccagctccttcctccgcctcgacaagcgttggagagatggtgaagagaagcaagaagagcaagagcaagcgcgtcacgttgcggcagaagcacaaggtgctgcgcaaggtgaaggagcatgacatggaaaaaatggttacaaaggctgatccaagtaaacggattgtactacttcacaacaagatagatcttgttcctaaggaagcggtagagaagtggcttacatatctgagagaagaaatgccaacaattgcgtttaagtgtaatacccaagagcagcggaccaagccgggatggaaatcttcaaaactagataaaacaaacagcatcccacaaagtagtgattgccttggtgctgagaatctaattagattgctcaagaaatattccagaagccacgagctcaaactggcaattacggtgggtattgttggactccctaatgttggcaagagcagtctgatcaacagcctgaagaggtcccgagtggttaatgtcggttccactccaggggttactagatcaatgcaagaagttcaattagacaagaaggcgccgatggaggccatggagctcgtcgtcgcgctcaccgcctgcgccgactccgtcgcagcctgcaaccacgacgtcgccaactactacctcgtgcggctgggcgagatggcctcccccgcggggcccacgctgatgcaccgcgtggccgcctacttcgtggaggtgctcacgctgcgcatggttcatgcaaaagcatttaagtttgctaagttgcattctaagaacatgtatcaataatgattggaaatgaaagctgaattttttaccggcgagaggctactggagtttgcacctggtggtgtgagctgcgcaccacctccttcataggcagatgtcatctatatggaagcggcaggaggtggaagcactatatatgacacctctatcgctcttgttgattgctggggtcaacatgtgccgctgctgcacttggtgggcctagggaattctaggactctgggctggtttggtgggtagtgaaatttaaatagcaagtgattttctctctggatctcatctattttcttgtccaccgaaccagccttaagatttgttctgtctggatagcacaaaaattgtccatcttgcttgcacccataacactgctctgaacagaagatgcatgattacctgcatgcattaaacgatatactagataaatgtcaccggtatcacaagcttacatctcggagacaccttactatatgatttatgttgtcacaacacacgtgtattatactcacttcttagagttgtttttttatattcgtattgtagtataatttgatttgtattagtttagttctgtatggttgtttctaaaaaaattgttagattatatcgataatatatatgatatttgtttttacgtaatcattgtacactaacattttg

SEQ ID NO: 55186 - DNA, 387 bp, Zea Mays
gccacagcaccagaaagattcctagtcctccactcctcctccacttgagagtgccccacgcagcccactgctgggcagaggccgcgcgcggcgccagcgccaccacccctttctcttctcccctctcccgtcacatcctccacccaatgtggcatataaatcccagatccagatctcccacctccctcttgtttgtatagccaggcagccagcctcaccatgtgatctctcgcagttaaatctacggaggcaaagagaaaagaggttcacttgaggaatagtctataggaatatatgaaggcccttctctgcctttgcaattaaccttacttatcttgtgtacatttgtaattatgagatataagcagcagattacttcatttcggg

SEQ ID NO: 55187 - DNA, 2458 bp, Zea Mays
acgaactggcgtgccagtgccagtgccgagcgcccgagcccttactcctcttcttccgaccccccgctggcttggaaaaaaggggaagaaaactcgcgcagtcggtcaccgaagggaggagcgcggtcgaggtgccgcccacacggagctgcgaggtgtttgtaggatctcctaggtgagcccctgctgcttggagacagccatggccaccggcgtggctccagctcctctcccacatgtcagagtgcatcatgggggcgtcgggttcaccaggagcgtcgattttgcgaaggtcttgtctgctcccggtgccggcacgatgagggcaagctcctctagaggcagggcgctcgtggcgaagagctctagtactggctcggagaccatggagctcgagccatcttcagaaggaagcccacttttagtacccaggcagaagtactgtgaatcaacacaccagacaaggaggaggaaaactcgaactgtgatggtggggaatgtgccacttggcagtgatcatcccataaggattcaaaccatgacgacttcagataccaaggatgttgcaaaaacagtagaggaggtgatgaggatagcagataaaggagctgatcttgttagaataacagtccagggtaggaaggaagctgatgcctgctttgagatcaagaacactctggttcagaagaattacaacattccactagtggccgatattcattttgctcctacggtagccctaagggtggcagaatgttttgacaaaattcgtgtgaacccaggaaattttgctgatcgtcgtgctcaatttgaaaagctggaatatactgacgacgactaccaaaaagagctagagcatattgagaaggtgttttctccattagttgagaaatgcaagcagtatggaagagcaatgcgaataggaacaaatcatggtagtctttctgaccgcataatgagctactatggtgattctccacggggaatggttgagtctgctttggaatttgctagaatatgtcggaagttggacttccacaactttgtattttcgatgaaagctagtaaccctgttatcatggtccaagcatatcgcctgcttgtggcagaaatgtataacctaggatgggattatcccttgcacttgggtgttacagaagctggagagggtgaagatggaaggatgaaatctgctattggcattgggacactgctaatggatggtttgggtgatacaatccgtgtctccctcacagaaccaccagaagaagagattgatccttgccaaaggttggcaaatcttgggacgcaggccgcaaaccttcaaattggggtggccccatttgaagaaaagcacaggcgttattttgatttccagcgtaggagtggtcaattgcctttgcagaaggagggtgaggaagttgactacagaaatgtcctgcatcgtgatggttctgtactgatgtcagtttccctggatcagttgaaggctcctgatctcctttataggtctcttgcagcaaagcttgtggttggcatgcctttcaaggatctggctactgtagattccattcttttgagggagctcccccctgtagaagatgctgaagctaggcttgcactcaaaagattagttgacatcagcatgggcgtactggcccccttatcggagcagttgacaaagccactcccacatgcaattgtacttgtcaacctcgacgaattgtcaagtggtgcacacaaacttttgccagaaggcactagactagctgtcactcttcgtggtgatgaatcatacgagcagctagatattcttaaggatgttgatgatataacaatgttgttacataatgttccatatggtgaggagaagacaggcagggtgcatgctgctaggaggttatttgagtacttacaggccaatggcttgaacttccctgtaattcatcacataaatttccctgaaaccattgacagagatggtcttgtcattggtgctggggccaacgttggtgctctcttagtcgatggtcttggtgatggtgtattccttgaagctgctgaccaggaatttgagtttctgagggacacatctttcaacttgctccaaggttgcaggatgcgcaacacaaaaactgaatatgtgtcttgtccttcctgcggccgaacactctttgaccttcaggaaatcagcgctgagattagagaaaagacctctcatctgccaggtgtctcgatcgctatcatgggctgtattgtcaatggaccaggagagatggctgatgccgattttgggtacgttggaggcgctcccggaaagatcgacctttacgtcggcaaggctagtggcatattacgcagtcagtgtgtcactgtcgccaacctaccaaaggcgacgaacaatttggcctggtcctcgtgttgctgggcaagaattccaagggcatctccgagttgc

SEQ ID NO: 55188 - DNA, 2477 bp, Zea Mays
tgcccttgcacgtgtatttttcaagtacccaggcagaagtactgtgaatcaacacaccagacaaggaggaggaaaactcgaactgtgatggtggggaatgtgccacttggcagtgatcatcccataaggattcaaaccatgacgacttcagataccaaggatgttgcaaaaacagtagaggaggtgatgaggatagcagataaaggagctgatcttgttagaataacagtccagggtaggaaggaagctgatgcctgctttgagatcaagaacactctggttcagaagaattacaacattccactagtggccgatattcattttgctcctacggtagccctaagggtggcagaatgttttgacaaaattcgtgtgaacccaggaaattttgctgatcgtcgtgctcaatttgaaaagctggaatatactgacgacgactaccaaaaagagctagagcatattgagaaggtgttttctccattagttgagaaatgcaagcagtatggaagagcaatgcgaataggaacaaatcatggtagtctttctgaccgcataatgagctactatggtgattctccacggggaatggttgagtctgctttggaatttgctagaatatgtcggaagttggacttccacaactttgtattttcgatgaaagctagtaaccctgttatcatggtccaagcatatcgcctgcttgtggcagaaatgtataacctaggatgggattatcccttgcacttgggtgttacagaagctggagagggtgaagatggaaggatgaaatctgctattggcattgggacactgctaatggatggtttgggtgatacaatccgtgtctccctcacagaaccaccagaagaagagattgatccttgccaaaggttggcaaatcttgggacgcaggccgcaaaccttcaaattggggtggccccatttgaagaaaagcacaggcgttattttgatttccagcgtaggagtggtcaattgcctttgcagaaggagggtgaggaagttgactacagaaatgtcctgcatcgtgatggttctgtactgatgtcagtttccctggatcagttgaaggctcctgatctcctttataggtctcttgcagcaaagcttgtggttggcatgcctttcaaggatctggctactgtagattccattcttttgagggagctcccccctgtagaagatgctgaagctaggcttgcactcaaaagattagttgacatcagcatgggcgtactggcccccttatcggagcagttgacaaagccactcccacatgcaattgtacttgtcaacctcgacgaattgtcaagtggtgcacacaaacttttgccagaaggcactagactagctgtcactcttcgtggtgatgaatcatacgagcagctagatattcttaaggatgttgatgatataacaatgttgttacataatgttccatatggtgaggagaagacaggcagggtgcatgctgctaggaggttatttgagtacttacaggccaatggcttgaacttccctgtaattcatcacataaatttccctgaaaccattgacagagatggtcttgtcattggtgctggggccaacgttggtgctctcttagtcgatggtcttggtgatggtgtattccttgaagctgctgaccaggaatttgagtttctgagggacacatctttcaacttgctccaaggttgcaggatgcgcaacacaaaaactgaatatgtgtcttgtccttcctgcggccgaacactctttgaccttcaggaaatcagcgctgagattagagaaaagacctctcatctgccaggtgtctcgatcgctatcatgggctgtattgtcaatggaccaggagagatggctgatgccgattttgggtacgttggaggcgctcccggaaagatcgacctttacgtcggcaagaccgttgtgcagcgcgccatcgccatggaaggtgccactgacgccttgatccagctgatcaaggaccatggccgatgggtggatcctcctgccgaggagtagggctgtaggctgtagccaagtctgtagtttatatattctgtaaagcgaaacacgcaatgcagtaactgagcatacgatgtacatccctacacattttgtacatttattgagatctgagaaataaactagaaaccgtcggtgacggcatgtctgcagcaccccaaatgaagcacatacgatttacatattagtagtagcccatgtgagcaagacataatcctatacaatcttgaagtctgcattatatattttttccaacagaggtagcttagaaagtttttcgagcaatgcaattttgttcgttactttccgtttactttttcttttttttagcgttgagggttatataaatagatttataatacaaagagaaaaacggtcgtgattacacaacaccaaaatttttattgtggtcttgagagtttgtgatgatc

SEQ ID NO: 55189 - DNA, 2748 bp, Zea Mays
cttgtttccttcacccgggaacggcggtgtttgtaggatctcctaggtgagcccctgctgcttggagacagccatggccaccggcgtggctccagctcctctcccacatgtcagagtgcatcatgggggcgtcgggttcaccaggagcgtcgattttgcgaaggtcttgtctgctcccggtgccggcacgatgagggcaagctcctctagaggcagggcgctcgtggcgaagagctctagtactggctcggagaccatggagctcgagccatcttcagaaggaagcccacttttagtacccaggcagaagtactgtgaatcaacacaccagacaaggaggaggaaaactcgaactgtgatggtggggaatgtgccacttggcagtgatcatcccataaggattcaaaccatgacgacttcagataccaaggatgttgcaaaaacagtagaggaggtgatgaggatagcagataaaggagctgatcttgttagaataacagtccagggtaggaaggaagctgatgcctgctttgagatcaagaacactctggttcagaagaattacaacattccactagtggccgatattcattttgctcctacggtagccctaagggtggcagaatgttttgacaaaattcgtgtgaacccaggaaattttgctgatcgtcgtgctcaatttgaaaagctggaatatactgacgacgactaccaaaaagagctagagcatattgagaaggtgttttctccattagttgagaaatgcaagcagtatggaagagcaatgcgaataggaacaaatcatggtagtctttctgaccgcataatgagctactatggtgattctccacggggaatggttgagtctgctttggaatttgctagaatatgtcggaagttggacttccacaactttgtattttcgatgaaagctagtaaccctgttatcatggtccaagcatatcgcctgcttgtggcagaaatgtataacctaggatgggattatcccttgcacttgggtgttacagaagctggagagggtgaagatggaaggatgaaatctgctattggcattgggacactgctaatggatggtttgggtgatacaatccgtgtctccctcacagaaccaccagaagaagagattgatccttgccaaaggttggcaaatcttgggacgcaggccgcaaaccttcaaattggggtggccccatttgaagaaaagcacaggcgttattttgatttccagcgtaggagtggtcaattgcctttgcagaaggagggtgaggaagttgactacagaaatgtcctgcatcgtgatggttctgtactgatgtcagtttccctggatcagttgaaggctcctgatctcctttataggtctcttgcagcaaagcttgtggttggcatgcctttcaaggatctggctactgtagattccattcttttgagggagctcccccctgtagaagatgctgaagctaggcttgcactcaaaagattagttgacatcagcatgggcgtactggcccccttatcggagcagttgacaaagccactcccacatgcaattgtacttgtcaacctcgacgaattgtcaagtggtgcacacaaacttttgccagaaggcactagactagctgtcactcttcgtggtgatgaatcatacgagcagctagatattcttaaggatgttgatgatataacaatgttgttacataatgttccatatggtgaggagaagacaggcagggtgcatgctgctaggaggttatttgagtacttacaggccaatggcttgaacttccctgtaattcatcacataaatttccctgaaaccattgacagagatggtcttgtcattggtgctggggccaacgttggtgctctcttagtcgatggtcttggtgatggtgtattccttgaagctgctgaccaggaatttgagtttctgagggacacatctttcaacttgctccaaggttgcaggatgcgcaacacaaaaactgaatatgtgtcttgtccttcctgcggccgaacactctttgaccttcaggaaatcagcgctgagattagagaaaagacctctcatctgccaggtgtctcgatcgctatcatgggctgtattgtcaatggaccaggagagatggctgatgccgattttgggtacgttggaggcgctcccggaaagatcgacctttacgtcggcaagaccgttgtgcagcgcgccatcgccatggaaggtgccactgacgccttgatccagctgatcaaggaccatggccgatgggtggatcctcctgccgaggagtagggctgtaggctgtagccaagtctgtagtttatatattctgtaaagcgaaacacgcaatgcagtaactgagcatacgatgtacatccctacacattttgtacatttattgagatctgagaaataaactagaaaccgtcggtgacggcatgtctgcagcaccccaaatgaagcacatacgatttacatattagtagtagcccatgtgagcaagacataatcctatacaatcttgaagtctgcattatatattttttccaacagaggtagcttagaaagtttttcgagcaatgcaattttgttcgttactttccgtttactttttcttttttttagcgttgagggttatataaatagatttataatacaaagagaaaaacggtcgtgattacacaacaccaaaatttttattgtggtcttgagagtttgtgatgatc

SEQ ID NO: 55190 - DNA, 2754 bp, Zea Mays
ggtgcaccagctcacagtcgtcggtctgtcaggtgtttgtaggatctcctaggtgagcccctgctgcttggagacagccatggccaccggcgtggctccagctcctctcccacatgtcagagtgcatcatgggggcgtcgggttcaccaggagcgtcgattttgcgaaggtcttgtctgctcccggtgccggcacgatgagggcaagctcctctagaggcagggcgctcgtggcgaagagctctagtactggctcggagaccatggagctcgagccatcttcagaaggaagcccacttttagtacccaggcagaagtactgtgaatcaacacaccagacaaggaggaggaaaactcgaactgtgatggtggggaatgtgccacttggcagtgatcatcccataaggattcaaaccatgacgacttcagataccaaggatgttgcaaaaacagtagaggaggtgatgaggatagcagataaaggagctgatcttgttagaataacagtccagggtaggaaggaagctgatgcctgctttgagatcaagaacactctggttcagaagaattacaacattccactagtggccgatattcattttgctcctacggtagccctaagggtggcagaatgttttgacaaaattcgtgtgaacccaggaaattttgctgatcgtcgtgctcaatttgaaaagctggaatatactgacgacgactaccaaaaagagctagagcatattgagaaggtgttttctccattagttgagaaatgcaagcagtatggaagagcaatgcgaataggaacaaatcatggtagtctttctgaccgcataatgagctactatggtgattctccacggggaatggttgagtctgctttggaatttgctagaatatgtcggaagttggacttccacaactttgtattttcgatgaaagctagtaaccctgttatcatggtccaagcatatcgcctgcttgtggcagaaatgtataacctaggatgggattatcccttgcacttgggtgttacagaagctggagagggtgaagatggaaggatgaaatctgctattggcattgggacactgctaatggatggtttgggtgatacaatccgtgtctccctcacagaaccaccagaagaagagattgatccttgccaaaggttggcaaatcttgggacgcaggccgcaaaccttcaaattggggtggccccatttgaagaaaagcacaggcgttattttgatttccagcgtaggagtggtcaattgcctttgcagaaggagggtgaggaagttgactacagaaatgtcctgcatcgtgatggttctgtactgatgtcagtttccctggatcagttgaaggctcctgatctcctttataggtctcttgcagcaaagcttgtggttggcatgcctttcaaggatctggctactgtagattccattcttttgagggagctcccccctgtagaagatgctgaagctaggcttgcactcaaaagattagttgacatcagcatgggcgtactggcccccttatcggagcagttgacaaagccactcccacatgcaattgtacttgtcaacctcgacgaattgtcaagtggtgcacacaaacttttgccagaaggcactagactagctgtcactcttcgtggtgatgaatcatacgagcagctagatattcttaaggatgttgatgatataacaatgttgttacataatgttccatatggtgaggagaagacaggcagggtgcatgctgctaggaggttatttgagtacttacaggccaatggcttgaacttccctgtaattcatcacataaatttccctgaaaccattgacagagatggtcttgtcattggtgctggggccaacgttggtgctctcttagtcgatggtcttggtgatggtgtattccttgaagctgctgaccaggaatttgagtttctgagggacacatctttcaacttgctccaaggttgcaggatgcgcaacacaaaaactgaatatgtgtcttgtccttcctgcggccgaacactctttgaccttcaggaaatcagcgctgagattagagaaaagacctctcatctgccaggtgtctcgatcgctatcatgggctgtattgtcaatggaccaggagagatggctgatgccgattttgggtacgttggaggcgctcccggaaagatcgacctttacgtcggcaagaccgttgtgcagcgcgccatcgccatggaaggtgccactgacgccttgatccagctgatcaaggaccatggccgatgggtggatcctcctgccgaggagtagggctgtaggctgtagccaagtctgtagtttatatattctgtaaagcgaaacacgcaatgcagtaactgagcatacgatgtacatccctacacattttgtacatttattgagatctgagaaataaactagaaaccgtcggtgacggcatgtctgcagcaccccaaatgaagcacatacgatttacatattagtagtagcccatgtgagcaagacataatcctatacaatcttgaagtctgcattatatattttttccaacagaggtagcttagaaagtttttcgagcaatgcaattttgttcgttactttccgtttactttttcttttttttagcgttgagggttatataaatagatttataatacaaagagaaaaacggtcgtgattacacaacaccaaaatttttattgtggtcttgagagtttgtgatgatc

SEQ ID NO: 55191 - DNA, 2851 bp, Zea Mays
acgaactggcgtgccagtgccagtgccgagcgcccgagcccttactcctcttcttccgaccccccgctggcttggaaaaaaggggaagaaaactcgcgcagtcggtcaccgaagggaggagcgcggtcgaggtgccgcccacacggagctgcgaggtgtttgtaggatctcctaggtgagcccctgctgcttggagacagccatggccaccggcgtggctccagctcctctcccacatgtcagagtgcatcatgggggcgtcgggttcaccaggagcgtcgattttgcgaaggtcttgtctgctcccggtgccggcacgatgagggcaagctcctctagaggcagggcgctcgtggcgaagagctctagtactggctcggagaccatggagctcgagccatcttcagaaggaagcccacttttagtacccaggcagaagtactgtgaatcaacacaccagacaaggaggaggaaaactcgaactgtgatggtggggaatgtgccacttggcagtgatcatcccataaggattcaaaccatgacgacttcagataccaaggatgttgcaaaaacagtagaggaggtgatgaggatagcagataaaggagctgatcttgttagaataacagtccagggtaggaaggaagctgatgcctgctttgagatcaagaacactctggttcagaagaattacaacattccactagtggccgatattcattttgctcctacggtagccctaagggtggcagaatgttttgacaaaattcgtgtgaacccaggaaattttgctggaatatactgacgacgactaccaaaaagagctagagcatattgagaaggtgttttctccattagttgagaaatgcaagcagtatggaagagcaatgcgaataggaacaaatcatggtagtctttctgaccgcataatgagctactatggtgattctccacggggaatggttgagtctgctttggaatttgctagaatatgtcggaagttggacttccacaactttgtattttcgatgaaagctagtaaccctgttatcatggtccaagcatatcgcctgcttgtggcagaaatgtataacctaggatgggattatcccttgcacttgggtgttacagaagctggagagggtgaagatggaaggatgaaatctgctattggcattgggacactgctaatggatggtttgggtgatacaatccgtgtctccctcacagaaccaccagaagaagagattgatccttgccaaaggttggcaaatcttgggacgcaggccgcaaaccttcaaattggggtggccccatttgaagaaaagcacaggcgttattttgatttccagcgtaggagtggtcaattgcctttgcagaaggagggtgaggaagttgactacagaaatgtcctgcatcgtgatggttctgtactgatgtcagtttccctggatcagttgaaggctcctgatctcctttataggtctcttgcagcaaagcttgtggttggcatgcctttcaaggatctggctactgtagattccattcttttgagggagctcccccctgtagaagatgctgaagctaggcttgcactcaaaagattagttgacatcagcatgggcgtactggcccccttatcggagcagttgacaaagccactcccacatgcaattgtacttgtcaacctcgacgaattgtcaagtggtgcacacaaacttttgccagaaggcactagactagctgtcactcttcgtggtgatgaatcatacgagcagctagatattcttaaggatgttgatgatataacaatgttgttacataatgttccatatggtgaggagaagacaggcagggtgcatgctgctaggaggttatttgagtacttacaggccaatggcttgaacttccctgtaattcatcacataaatttccctgaaaccattgacagagatggtcttgtcattggtgctggggccaacgttggtgctctcttagtcgatggtcttggtgatggtgtattccttgaagctgctgaccaggaatttgagtttctgagggacacatctttcaacttgctccaaggttgcaggatgcgcaacacaaaaactgaatatgtgtcttgtccttcctgcggccgaacactctttgaccttcaggaaatcagcgctgagattagagaaaagacctctcatctgccaggtgtctcgatcgctatcatgggctgtattgtcaatggaccaggagagatggctgatgccgattttgggtacgttggaggcgctcccggaaagatcgacctttacgtcggcaagaccgttgtgcagcgcgccatcgccatggaaggtgccactgacgccttgatccagctgatcaaggaccatggccgatgggtggatcctcctgccgaggagtagggctgtaggctgtagccaagtctgtagtttatatattctgtaaagcgaaacacgcaatgcagtaactgagcatacgatgtacatccctacacattttgtacatttattgagatctgagaaataaactagaaaccgtcggtgacggcatgtctgcagcaccccaaatgaagcacatacgatttacatattagtagtagcccatgtgagcaagacataatcctatacaatcttgaagtctgcattatatattttttccaacagaggtagcttagaaagtttttcgagcaatgcaattttgttcgttactttccgtttactttttcttttttttagcgttgagggttatataaatagatttataatacaaagagaaaaacggtcgtgattacacaacaccaaaatttttattgtggtcttgagagtttgtgatgatc

SEQ ID NO: 55192 - DNA, 2840 bp, Zea Mays
acgaactggcgtgccagtgccagtgccgagcgcccgagcccttactcctcttcttccgaccccccgctggcttggaaaaaaggggaagaaaactcgcgcagtcggtcaccgaagggaggagcgcggtcgaggtgccgcccacacggagctgcgaggtgtttgtaggatctcctaggtgagcccctgctgcttggagacagccatggccaccggcgtggctccagctcctctcccacatgtcagagtgcatcatgggggcgtcgggttcaccaggagcgtcgattttgcgaaggtcttgtctgctcccggtgccggcacgatgagggcaagctcctctagaggcagggcgctcgtggcgaagagctctagtactggctcggagaccatggagctcgagccatcttcagaaggaagcccacttttagtacccaggcagaagtactgtgaatcaacacaccagacaaggaggaggaaaactcgaactgtgatggtggggaatgtgccacttggcagtgatcatcccataaggattcaaaccatgacgacttcagataccaaggatgttgcaaaaacagtagaggaggtgatgaggatagcagataaaggagctgatcttgttagaataacagtccagggtaggaaggaagctgatgcctgctttgagatcaagaacactctggttcagaagaattacaacattccactagtggccgatattcattttgctcctacggtagccctaagggtggcagaatgttttgacaaaattcgtgtgaacccaggaaattttgctgatcgtcgtgctcaatttgaaaagctggaatatactgacgacgactaccaaaaagagctagagcatattgagaaggtgttttctccattagttgagaaatgcaagcagtatggaagagcaatgcgaataggaacaaatcatggtagtctttctgaccgcataatgagctactatggtgattctccacggggaatggttgagtctgctttggaatttgctagaatatgtcggaagttggacttccacaactttgtattttcgatgaaagctagtaaccctgttatcatggtccaagcatatcgcctgcttgtggcagaaatgtataacctaggatgggattatcccttgcacttgggtgttacagaagctggagagggtgaagatggaaggatgaaatctgctattggcattgggacactgctaatgaaccaccagaagaagagattgatccttgccaaaggttggcaaatcttgggacgcaggccgcaaaccttcaaattggggtggccccatttgaagaaaagcacaggcgttattttgatttccagcgtaggagtggtcaattgcctttgcagaaggagggtgaggaagttgactacagaaatgtcctgcatcgtgatggttctgtactgatgtcagtttccctggatcagttgaaggctcctgatctcctttataggtctcttgcagcaaagcttgtggttggcatgcctttcaaggatctggctactgtagattccattcttttgagggagctcccccctgtagaagatgctgaagctaggcttgcactcaaaagattagttgacatcagcatgggcgtactggcccccttatcggagcagttgacaaagccactcccacatgcaattgtacttgtcaacctcgacgaattgtcaagtggtgcacacaaacttttgccagaaggcactagactagctgtcactcttcgtggtgatgaatcatacgagcagctagatattcttaaggatgttgatgatataacaatgttgttacataatgttccatatggtgaggagaagacaggcagggtgcatgctgctaggaggttatttgagtacttacaggccaatggcttgaacttccctgtaattcatcacataaatttccctgaaaccattgacagagatggtcttgtcattggtgctggggccaacgttggtgctctcttagtcgatggtcttggtgatggtgtattccttgaagctgctgaccaggaatttgagtttctgagggacacatctttcaacttgctccaaggttgcaggatgcgcaacacaaaaactgaatatgtgtcttgtccttcctgcggccgaacactctttgaccttcaggaaatcagcgctgagattagagaaaagacctctcatctgccaggtgtctcgatcgctatcatgggctgtattgtcaatggaccaggagagatggctgatgccgattttgggtacgttggaggcgctcccggaaagatcgacctttacgtcggcaagaccgttgtgcagcgcgccatcgccatggaaggtgccactgacgccttgatccagctgatcaaggaccatggccgatgggtggatcctcctgccgaggagtagggctgtaggctgtagccaagtctgtagtttatatattctgtaaagcgaaacacgcaatgcagtaactgagcatacgatgtacatccctacacattttgtacatttattgagatctgagaaataaactagaaaccgtcggtgacggcatgtctgcagcaccccaaatgaagcacatacgatttacatattagtagtagcccatgtgagcaagacataatcctatacaatcttgaagtctgcattatatattttttccaacagaggtagcttagaaagtttttcgagcaatgcaattttgttcgttactttccgtttactttttcttttttttagcgttgagggttatataaatagatttataatacaaagagaaaaacggtcgtgattacacaacaccaaaatttttattgtggtcttgagagtttgtgatgatc

SEQ ID NO: 55193 - DNA, 3484 bp, Zea Mays
ttgtgtgcctcctgtgaggctagccgtgaccgacgaagtagcagggtggcaaacatggctcttcttctcacaggacgcgtgctcgtggtggcgtgcgtcctcgtcgcgtgctcctcctcctgcggctgccctgtagcggcggcggcggcgatgacgacggtggacggcatcacggccatctacagcttcggggactcgataacggacacgggcaacctcgtccgcgaaggcgccaccgacatgctgcgctacatcggcagtcgtccctacggcatcgacttgctgcgcggcgtcccgaccccgaccggccgctgctctaatggatacctcatgatcgatttcctcgccaagtaccttggccttcccctcctcaacccgtacctcgacaaggcggcggatttcacgcacggcgtcaacttcgcggtcgccggagccaccgccctcggcgcgacggcgctcgccgagagaggggtcaccatgccccacaccaacagctccctcgacgttcagctccagtggttcagggacttcatggcctccgccaccacaaactctagccaagaggtccgaaggaagctagcgagctcactggtgatgctggagatcggtgggaacgacttcaactacgccttcctccagctccagacccggccaacgggcggcggatacggcagcggcaacgtcacccgtatagtggaaatcctagaacaggtcggggcgctcgtgcctcaagtcgtgcaatccattacaaacgcagccaaggtgtttgtaggatctcctaggtgagcccctgctgcttggagacagccatggccaccggcgtggctccagctcctctcccacatgtcagagtgcatcatgggggcgtcgggttcaccaggagcgtcgattttgcgaaggtcttgtctgctcccggtgccggcacgatgagggcaagctcctctagaggcagggcgctcgtggcgaagagctctagtactggctcggagaccatggagctcgagccatcttcagaaggaagcccacttttagtacccaggcagaagtactgtgaatcaacacaccagacaaggaggaggaaaactcgaactgtgatggtggggaatgtgccacttggcagtgatcatcccataaggattcaaaccatgacgacttcagataccaaggatgttgcaaaaacagtagaggaggtgatgaggatagcagataaaggagctgatcttgttagaataacagtccagggtaggaaggaagctgatgcctgctttgagatcaagaacactctggttcagaagaattacaacattccactagtggccgatattcattttgctcctacggtagccctaagggtggcagaatgttttgacaaaattcgtgtgaacccaggaaattttgctgatcgtcgtgctcaatttgaaaagctggaatatactgacgacgactaccaaaaagagctagagcatattgagaaggtgttttctccattagttgagaaatgcaagcagtatggaagagcaatgcgaataggaacaaatcatggtagtctttctgaccgcataatgagctactatggtgattctccacggggaatggttgagtctgctttggaatttgctagaatatgtcggaagttggacttccacaactttgtattttcgatgaaagctagtaaccctgttatcatggtccaagcatatcgcctgcttgtggcagaaatgtataacctaggatgggattatcccttgcacttgggtgttacagaagctggagagggtgaagatggaaggatgaaatctgctattggcattgggacactgctaatggatggtttgggtgatacaatccgtgtctccctcacagaaccaccagaagaagagattgatccttgccaaaggttggcaaatcttgggacgcaggccgcaaaccttcaaattggggtggccccatttgaagaaaagcacaggcgttattttgatttccagcgtaggagtggtcaattgcctttgcagaaggagggtgaggaagttgactacagaaatgtcctgcatcgtgatggttctgtactgatgtcagtttccctggatcagttgaaggctcctgatctcctttataggtctcttgcagcaaagcttgtggttggcatgcctttcaaggatctggctactgtagattccattcttttgagggagctcccccctgtagaagatgctgaagctaggcttgcactcaaaagattagttgacatcagcatgggcgtactggcccccttatcggagcagttgacaaagccactcccacatgcaattgtacttgtcaacctcgacgaattgtcaagtggtgcacacaaacttttgccagaaggcactagactagctgtcactcttcgtggtgatgaatcatacgagcagctagatattcttaaggatgttgatgatataacaatgttgttacataatgttccatatggtgaggagaagacaggcagggtgcatgctgctaggaggttatttgagtacttacaggccaatggcttgaacttccctgtaattcatcacataaatttccctgaaaccattgacagagatggtcttgtcattggtgctggggccaacgttggtgctctcttagtcgatggtcttggtgatggtgtattccttgaagctgctgaccaggaatttgagtttctgagggacacatctttcaacttgctccaaggttgcaggatgcgcaacacaaaaactgaatatgtgtcttgtccttcctgcggccgaacactctttgaccttcaggaaatcagcgctgagattagagaaaagacctctcatctgccaggtgtctcgatcgctatcatgggctgtattgtcaatggaccaggagagatggctgatgccgattttgggtacgttggaggcgctcccggaaagatcgacctttacgtcggcaagaccgttgtgcagcgcgccatcgccatggaaggtgccactgacgccttgatccagctgatcaaggaccatggccgatgggtggatcctcctgccgaggagtagggctgtaggctgtagccaagtctgtagtttatatattctgtaaagcgaaacacgcaatgcagtaactgagcatacgatgtacatccctacacattttgtacatttattgagatctgagaaataaactagaaaccgtcggtgacggcatgtctgcagcaccccaaatgaagcacatacgatttacatattagtagtagcccatgtgagcaagacataatcctatacaatcttgaagtctgcattatatattttttccaacagaggtagcttagaaagtttttcgagcaatgcaattttgttcgttactttccgtttactttttcttttttttagcgttgagggttatataaatagatttataatacaaagagaaaaacggtcgtgattacacaacaccaaaatttttattgtggtcttgagagtttgtgatgatc

SEQ ID NO: 55194 - DNA, 1105 bp, Zea Mays
ccagcatatcgacaacccgagtatgagtatcccaaggttgacgcgccgcccgccaccggcaatctagctagctaggaatcaatggtaggtgctgcagggccatggactcgcctcgcgtttcaaacgcgcggtgcgtcgcgaaatgcaggcgaggcaaggcgaggcgagctagcgtgcagtacataccatagcattacagtcgcactcttggaacgacaaaatgggatcctgcgcgtgttgatgggagctgaaacgttagcgtccgggccgggccgggtacttaaggcacctaaagccaaggtttcgttgtgtgcctcctgtgaggctagccgtgaccgacgaagtagcagggtggcaaacatggctcttcttctcacaggacgcgtgctcgtggtggcgtgcgtcctcgtcgcgtgctcctcctcctgcggctgccctgtagcggcggcggcggcgatgacgacggtggacggcatcacggccatctacagcttcggggactcgataacggacacgggcaacctcgtccgcgaaggcgccaccgacatgctgcgctacatcggcagtcgtccctacggcatcgacttgctgcgcggcgtcccgaccccgaccggccgctgctctaatggatacctcatgatcgatttcctcgccaagtaccttggccttcccctcctcaacccgtacctcgacaaggcggcggatttcacgcacggcgtcaacttcgcggtcgccggagccaccgccctcggcgcgacggcgctcgccgagagaggggtcaccatgccccacaccaacagctccctcgacgttcagctccagtggttcagggacttcatggcctccgccaccacaaactctagccaagaggtccgaaggaagctagcgagctcactggtgatgctggagatcggtgggaacgacttcaactacgccttcctccagctccagacccggccaacgggcggcggatacggcagcggcaacgtcacccgtatagtggaaatcctagaacaggtcggggcgctcgtgcctcaagtcgtgcaatccattacaaacgcagccaagtacgtacaaacaaacttgcttctccgacccccctcag

SEQ ID NO: 55195 - DNA, 859 bp, Zea Mays
gtatgaagaaggattaaagctgaggccgaatggttcgctaggtttactctcccctcctcttccacggccgcgcctgcgacacccatccgccgccacgccatggccaagtacaacgtggtgcagaagaacaagcgccagtgcaatcaggaccgcaagcgcgccgcgcatggggagcccgggaccggcaagctcaagcagcggaccgcgcccgtctccatgtccggcaagcggaagaagaagctcgagcgccgcctcaaccggaaagaggctgcgatgattaaggcgctggagaacaacatgggggatgtcgacatggtctcagttgaagagtcttcagaagctgcaaagggcaagtcccaagtgaagttcagtgtgaagaaaaactcaagaatacagataaagagattaaagggcaaaggcaggaagaaagccaaaaatgcaaaaccacctgccaaggagaaagttgatgccatggtagaatgacagttgatgccatggtagcatgacggacaagactacatacatccatccctttgtatgttttctcagagtttgcagcatggaccgacctcaccgaacactggcgcgtgtctcttgcatcttctgcctgaatgttaaatagaagctacttaggcctggtgttaatgtacttcaaacatgaatctacctttaatagtggactatgcgaatttgttcatgttcttattgcgtttatggagatgcttcattgtgaatgtcggcttctatagtaagcaactagcataatcttatcaccccccccccccccccccccccccctccctccctccccagcatcggatggcaattgttgtaatcagacataggcgcataggcaatc

SEQ ID NO: 55196 - DNA, 856 bp, Zea Mays
gtatgaagaaggattaaagctgaggccgaatggttcgctaggtttactctcccctcctcttccacggccgcgcctgcgacacccatccgccgccacgccatggccaagtacaacgtggtgcagaagaacaagcgccagtgcaatcaggaccgcaagcgcgccgcgcatggggagcccgggaccggcaagctcaagcagcggaccgcgcccgtctccatgtccggcaagcggaagaagaagctcgagcgccgcctcaaccggaagcagaaagaggctgcgatgattaaggcgctggagaacaacatgggggatgtcgacatggtctcagttgaagaagctgcaaagggcaagtcccaagtgaagttcagtgtgaagaaaaactcaagaatacagataaagagattaaagggcaaaggcaggaagaaagccaaaaatgcaaaaccacctgccaaggagaaagttgatgccatggtagaatgacagttgatgccatggtagcatgacggacaagactacatacatccatccctttgtatgttttctcagagtttgcagcatggaccgacctcaccgaacactggcgcgtgtctcttgcatcttctgcctgaatgttaaatagaagctacttaggcctggtgttaatgtacttcaaacatgaatctacctttaatagtggactatgcgaatttgttcatgttcttattgcgtttatggagatgcttcattgtgaatgtcggcttctatagtaagcaactagcataatcttatcaccccccccccccccccccccccccctccctccctccccagcatcggatggcaattgttgtaatcagacataggcgcataggcaatc

SEQ ID NO: 55197 - DNA, 1885 bp, Zea Mays
cccaccttcctctcttctcccctcacccctttctggctttctcctccgccgaggccccgagtcctgccggaattctagatcccggaggcaacttgccacgggctcctccgctccggtcgctgaatcgtactatcgtgctctcgacagaaagcccggccgaaacccagccggaccaagccctgttcgccgtgcgcgcggtgccccgggccagatctgcgagatctgcaccgacaccgctacgcctatcacgaggtggatgctctcgtgatctctcggagtcccctggactgagcggcatctcggcggaggcgtagcctgcttagctggtggcctgccgagatgcagcggaatggggtggtggaatgcagcgtgtgccactcccgggtggtggtgccgagtccccggagcgtgtccagggcatacgacaagcaccgcagcaagatgtcgtccaagttccgcgcgctcaacgtcttcctcgttgtcggcgactgcatccttgttggtctccagcccatcctagtgttcatgtcaaaggttgatgggaagttccagttcagtcccatcagtgttaactttctgaccgaggttatgaaagtcatctttgctattgtgatgcttataattcagtctagaaagcaaaaggttggagaaaagccactcttggcacgttcaaccttcatacaggcagcccgtaacaatgtacttctagctgttcctgctcttctgtatgccatcaacaattacttaaaattcatcatgcagttgtacttcaatcctgcgactgtgaaaatgttaagtaatctaaaggtactggttatagctgttcttctgaaatttataatgagaaggagattctcagttattcagtgggaagctcttgctttattgcttattggaatcagcatcaatcaacttcgaactgtacctgcgggcaatacagcatttggtcttcctgtcactgctattgcatacatatatacattgatttttgtaactgttccttcaatggcttctgtctacaatgaatatgccttgaaaagccaatatgacactagcatttatcttcagaacttgtttctgtatggatatggagcaatattcaacttccttggcattctaacgaatgtcattttgcagggccagagagttttaatattcttcgaggacattcgagggccacgatgtttctcatatgtaataatgcagcacaaggcattctatcttcattcttcttcaagtatgcagacacaattttgaagaagtattcgtcaactgttgccacgatatttactggcctagcttctgctgcatttttggggcataccttgaccattaattttctcctgggcatatcagtggtgtttatttcaatgcaccagttcttctctccacttgctaaagtcaaagatgacaaaccagctgacttaatagagttggaagacacacaaaatcaccggtcatccgaatcttcttttgtaaatatgactgctggtgctgctgttgatgcgagccataggattggaactgatgagaggcaacccctgttgcctacatgaactagtttcttgagcaggtttggtgtagcattgtaagttgaataaactattgtacactgtaaaggcaaaggaaggaaagaactaccaacatcttctccaatttctttcatttttgggacgaggccggtcggtggcctgccatctgtggccgtgggagtgacagagcagcatacattttgataggcgtataattcaatagggattttccagatacggcacttgtaacaaaattttcttggaggtgtatatgaacaacggcgatatgacaatcttttctgtacggaacatttatactattgagtgattgatttactattactatgttgtta

SEQ ID NO: 55198 - DNA, 1864 bp, Zea Mays
cccaccttcctctcttctcccctcacccctttctggctttctcctccgccgaggccccgagtcctgccggaattctagatcccggaggcaacttgccacgggctcctccgctccggtcgctgaatcgtactatcgtgctctcgacagaaagcccggccgaaacccagccggaccaagccctgttcgccgtgcgcgcggtgccccgggccagatctgcgagatctgcaccgacaccgctacgcctatcacgagcctgtaggtggatgctctcgtgatctctcggagtcccctggactgagcggcatctcggcggaggcgtagcctgcttagctggtggcctgccgagatgcagcggaatggggtggtggaatgcagcgtgtgccactcccgggtggtggtgccgagtccccggagcgtgtccagggcatacgacaagcaccgcagcaagatgtcgtccaagttccgcgcgctcaacgtcttcctcgttgtcggcgactgcatccttgttggtctccagcccatcctagtgttcatgtcaaaggttgatgggaagttccagttcagtcccatcagtgttaactttctgaccgaggttatgaaagtcatctttgctattgtgatgcttataattcagtctagaaagcaaaaggttggagaaaagccactcttggcacgttcaaccttcatacaggcagcccgtaacaatgtacttctagctgttcctgctcttctgtatgccatcaacaattacttaaaattcatcatgcagttgtacttcaatcctgcgactgtgaaaatgttaagtaatctaaaggtactggttatagctgttcttctgaaatttataatgagaaggagattctcagttattcagtgggaagctcttgctttattgcttattggaatcagcatcaatcaacttcgaactgtacctgcgggcaatacagcatttggtcttcctgtcactgctattgcatacatatatacattgatttttgtaactgttccttcaatggcttctgtctacaatgaatatgccttgaaaagccaatatgacactagcatttatcttcagaacttgtttctgtatggatatggagcaatattcaacttccttggcattctaacgaatgtcattttgcagggccagagagttttaatattcttcgaggacattcgagggccacgatgtttctcatatgtaataatgcagcacaaggcattctatcttcattcttcttcaagtatgcagacacaattttgaagaagtattcgtcaactgttgccacgatatttactggcctagcttctgctgcatttttggggcataccttgaccattaattttctcctgggcatatcagtggtgtttatttcaatgcaccagttcttctctccacttgctaaagtcaaagatgacaaaccagctgacttaatagagttggaagacacacaaaatcaccggtcatccgaatcttcttttgtaaatatgactgctggtgctgctgttgatgtagggatagatgactctttttttgcggtgtgagcagcaggtttggtgtagcattgtaagttgaataaactattgtacactgtaaaggcaaaggaaggaaagaactaccaacatcttctccaatttctttcatttttgggacgaggccggtcggtggcctgccatctgtggccgtgggagtgacagagcagcatacattttgataggcgtataattcaatagggattttccagatacggcacttgtaacaaaattttcttggaggtgtatatgaacaacggcgatatgacaatcttttctgtacggaacatttatactattgagtgattgatttactattactatgttgtta

SEQ ID NO: 55199 - DNA, 2032 bp, Zea Mays
cccaccttcctctcttctcccctcacccctttctggctttctcctccgccgaggccccgagtcctgccggaattctagatcccggaggcaacttgccacgggctcctccgctccggtcgctgaatcgtactatcgtgctctcgacagaaagcccggccgaaacccagccggaccaagccctgttcgccgtgcgcgcggtgccccgggccagatctgcgagatctgcaccgacaccgctacgcctatcacgagcctgtaggtggatgctctcgtgatctctcggagtcccctggactgagcggcatctcggcggaggcgtagcctgcttagctggtggcctgccgagatgcagcggaatggggtggtggaatgcagcgtgtgccactcccgggtggtggtgccgagtccccggagcgtgtccagggcatacgacaagcaccgcagcaagatgtcgtccaagttccgcgcgctcaacgtcttcctcgttgtcggcgactgcatccttgttggtctccagcccatcctagtgttcatgtcaaaggttgatgggaagttccagttcagtcccatcagtgttaactttctgaccgaggttatgaaagtcatctttgctattgtgatgcttataattcagtctagaaagcaaaaggttggagaaaagccactcttggcacgttcaaccttcatacaggcagcccgtaacaatgtacttctagctgttcctgctcttctgtatgccatcaacaattacttaaaattcatcatgcagttgtacttcaatcctgcgactgtgaaaatgttaagtaatctaaaggtactggttatagctgttcttctgaaatttataatgagaaggagattctcagttattcagtgggaagctcttgctttattgcttattggaatcagcatcaatcaacttcgaactgtacctgcgggcaatacagcatttggtcttcctgtcactgctattgcatacatatatacattgatttttgtaactgttccttcaatggcttctgtctacaatgaatatgccttgaaaagccaatatgacactagcatttatcttcaggtaaagtattagttagtttacctttggctgagttcatttagagtagcttgtattgtccagccttagatcagaaatttcatttattgtagttctgtttttgttttccaacttcatggtttgacttgtattgctgtttgtttttttatcatattgccccttatttccttgatgtttttccatttaattctagaacttgtttctgtatggatatggagcaatattcaacttccttggcattctaacgaatgtcattttgcagggccagagagttttaatattcttcgaggacattcgagggccacgatgtttctcatatgtaataatgcagcacaaggcattctatcttcattcttcttcaagtatgcagacacaattttgaagaagtattcgtcaactgttgccacgatatttactggcctagcttctgctgcatttttggggcataccttgaccattaattttctcctgggcatatcagtggtgtttatttcaatgcaccagttcttctctccacttgctaaagtcaaagatgacaaaccagctgacttaatagagttggaagacacacaaaatcaccggtcatccgaatcttcttttgtaaatatgactgctggtgctgctgttgatgcgagccataggattggaactgatgagaggcaacccctgttgcctacatgaactagtttcttgaggcaaaggaaggaaagaactaccaacatcttctccaatttctttcatttttgggacgaggccggtcggtggcctgccatctgtggccgtgggagtgacagagcagcatacattttgataggcgtataattcaatagggattttccagatacggcacttgtaacaaaattttcttggaggtgtatatgaacaacggcgatatgacaatcttttctgtacggaacatttatactattgagtgattgatttactattactatgttgtta

SEQ ID NO: 55200 - DNA, 1881 bp, Zea Mays
cccaccttcctctcttctcccctcacccctttctggctttctcctccgccgaggccccgagtcctgccggaattctagatcccggaggcaacttgccacgggctcctccgctccggtcgctgaatcgtactatcgtgctctcgacagaaagcccggccgaaacccagccggaccaagccctgttcgccgtgcgcgcggtgccccgggccagatctgcgagatctgcaccgacaccgctacgcctatcacgaggtggatgctctcgtgatctctcggagtcccctggactgagcggcatctcggcggaggcgtagcctgcttagctggtggcctgccgagatgcagcggaatggggtggtggaatgcagcgtgtgccactcccgggtggtggtgccgagtccccggagcgtgtccagggcatacgacaagcaccgcagcaagatgtcgtccaagttccgcgcgctcaacgtcttcctcgttgtcggcgactgcatccttgttggtctccagcccatcctagtgttcatgtcaaaggttgatgggaagttccagttcagtcccatcagtgttaactttctgaccgaggttatgaaagtcatctttgctattgtgatgcttataattcagtctagaaagcaaaaggttggagaaaagccactcttggcacgttcaaccttcatacagcccgtaacaatgtacttctagctgttcctgctcttctgtatgccatcaacaattacttaaaattcatcatgcagttgtacttcaatcctgcgactgtgaaaatgttaagtaatctaaaggtactggttatagctgttcttctgaaatttataatgagaaggagattctcagttattcagtgggaagctcttgctttattgcttattggaatcagcatcaatcaacttcgaactgtacctgcgggcaatacagcatttggtcttcctgtcactgctattgcatacatatatacattgatttttgtaactgttccttcaatggcttctgtctacaatgaatatgccttgaaaagccaatatgacactagcatttatcttcagaacttgtttctgtatggatatggagcaatattcaacttccttggcattctaacgaatgtcattttgcagggccagagagttttaatattcttcgaggacattcgagggccacgatgtttctcatatgtaataatgcagcacaaggcattctatcttcattcttcttcaagtatgcagacacaattttgaagaagtattcgtcaactgttgccacgatatttactggcctagcttctgctgcatttttggggcataccttgaccattaattttctcctgggcatatcagtggtgtttatttcaatgcaccagttcttctctccacttgctaaagtcaaagatgacaaaccagctgacttaatagagttggaagacacacaaaatcaccggtcatccgaatcttcttttgtaaatatgactgctggtgctgctgttgatgcgagccataggattggaactgatgagaggcaacccctgttgcctacatgaactagtttcttgagcaggtttggtgtagcattgtaagttgaataaactattgtacactgtaaaggcaaaggaaggaaagaactaccaacatcttctccaatttctttcatttttgggacgaggccggtcggtggcctgccatctgtggccgtgggagtgacagagcagcatacattttgataggcgtataattcaatagggattttccagatacggcacttgtaacaaaattttcttggaggtgtatatgaacaacggcgatatgacaatcttttctgtacggaacatttatactattgagtgattgatttactattactatgttgtta

SEQ ID NO: 55201 - DNA, 1892 bp, Zea Mays
cccaccttcctctcttctcccctcacccctttctggctttctcctccgccgaggccccgagtcctgccggaattctagatcccggaggcaacttgccacgggctcctccgctccggtcgctgaatcgtactatcgtgctctcgacagaaagcccggccgaaacccagccggaccaagccctgttcgccgtgcgcgcggtgccccgggccagatctgcgagatctgcaccgacaccgctacgcctatcacgagcctgtaggtggatgctctcgtgatctctcggagtcccctggactgagcggcatctcggcggaggcgtagcctgcttagctggtggcctgccgagatgcagcggaatggggtggtggaatgcagcgtgtgccactcccgggtggtggtgccgagtccccggagcgtgtccagggcatacgacaagcaccgcagcaagatgtcgtccaagttccgcgcgctcaacgtcttcctcgttgtcggcgactgcatccttgttggtctccagcccatcctagtgttcatgtcaaaggttgatgggaagttccagttcagtcccatcagtgttaactttctgaccgaggttatgaaagtcatctttgctattgtgatgcttataattcagtctagaaagcaaaaggttggagaaaagccactcttggcacgttcaaccttcatacaggcagcccgtaacaatgtacttctagctgttcctgctcttctgtatgccatcaacaattacttaaaattcatcatgcagttgtacttcaatcctgcgactgtgaaaatgttaagtaatctaaaggtactggttatagctgttcttctgaaatttataatgagaaggagattctcagttattcagtgggaagctcttgctttattgcttattggaatcagcatcaatcaacttcgaactgtacctgcgggcaatacagcatttggtcttcctgtcactgctattgcatacatatatacattgatttttgtaactgttccttcaatggcttctgtctacaatgaatatgccttgaaaagccaatatgacactagcatttatcttcagaacttgtttctgtatggatatggagcaatattcaacttccttggcattctaacgaatgtcattttgcagggccagagagttttaatattcttcgaggacattcgagggccacgatgtttctcatatgtaataatgcagcacaaggcattctatcttcattcttcttcaagtatgcagacacaattttgaagaagtattcgtcaactgttgccacgatatttactggcctagcttctgctgcatttttggggcataccttgaccattaattttctcctgggcatatcagtggtgtttatttcaatgcaccagttcttctctccacttgctaaagtcaaagatgacaaaccagctgacttaatagagttggaagacacacaaaatcaccggtcatccgaatcttcttttgtaaatatgactgctggtgctgctgttgatgcgagccataggattggaactgatgagaggcaacccctgttgcctacatgaactagtttcttgagcaggtttggtgtagcattgtaagttgaataaactattgtacactgtaaaggcaaaggaaggaaagaactaccaacatcttctccaatttctttcatttttgggacgaggccggtcggtggcctgccatctgtggccgtgggagtgacagagcagcatacattttgataggcgtataattcaatagggattttccagatacggcacttgtaacaaaattttcttggaggtgtatatgaacaacggcgatatgacaatcttttctgtacggaacatttatactattgagtgattgatttactattactatgttgtta

SEQ ID NO: 55202 - DNA, 1922 bp, Zea Mays
cccaccttcctctcttctcccctcacccctttctggctttctcctccgccgaggccccgagtcctgccggaattctagatcccggaggcaacttgccacgggctcctccgctccggtcgctgaatcgtactatcgtgctctcgacagaaagcccggccgaaacccagccggaccaagccctgttcgccgtgcgcgcggtgccccgggccagatctgcgagatctgcaccgacaccgctacgcctatcacgaggtggatgctctcgtgatctctcggagtcccctggactgagcggcatctcggcggaggcgtagcctgcttagctggtggcctgccgagatgcagcggaatggggtggtggaatgcagcgtgtgccactcccgggtggtggtgccgagtccccggagcgtgtccagggcatacgacaagcaccgcagcaagatgtcgtccaagttccgcgcgctcaacgtcttcctcgttgtcggcgactgcatccttgttggtctccagcccatcctagtgttcatgtcaaaggttgatgggaagttccagttcagtcccatcagtgttaactttctgaccgaggttatgaaagtcatctttgctattgtgatgcttataattcagtctagaaagcaaaaggttggagaaaagccactcttggcacgttcaaccttcatacaggcagcccgtaacaatgtacttctagctgttcctgctcttctgtatgccatcaacaattacttaaaattcatcatgcagttgtacttcaatcctgcgactgtgaaaatgttaagtaatctaaaggtactggttatagctgttcttctgaaatttataatgagaaggagattctcagttattcagtgggaagctcttgctttattgcttattggaatcagcatcaatcaacttcgaactgtacctgcgggcaatacagcatttggtcttcctgtcactgctattgcatacatatatacattgatttttgtaactgttccttcaatggcttctgtctacaatgaatatgccttgaaaagccaatatgacactagcatttatcttcagaacttgtttctgtatggatatggagcaatattcaacttccttggcattctaacgaatgtcattttgcagggccagagagttttaatattcttcgaggacattcgagggccacgatgtttctcatatgtaataatgcagcacaaggcattctatcttcattcttcttcaagtatgcagacacaattttgaagaagtattcgtcaactgttgccacgatatttactggcctagcttctgctgcatttttggggcataccttgaccattaattttctcctgggcatatcagtggtgtttatttcaatgcaccagttcttctctccacttgctaaagtcaaagatgacaaaccagctgacttaatagagttggaagacacacaaaatcaccggtcatccgaatcttcttttgtaaatatgactgctggtgctgctgttgatgcgagccataggattggaactgatgagaggcaacccctgttgcctacatgaactagtttcttgaggtagggatagatgactctttttttgcggtgtgagcagcaggtttggtgtagcattgtaagttgaataaactattgtacactgtaaaggcaaaggaaggaaagaactaccaacatcttctccaatttctttcatttttgggacgaggccggtcggtggcctgccatctgtggccgtgggagtgacagagcagcatacattttgataggcgtataattcaatagggattttccagatacggcacttgtaacaaaattttcttggaggtgtatatgaacaacggcgatatgacaatcttttctgtacggaacatttatactattgagtgattgatttactattactatgttgtta

SEQ ID NO: 55203 - DNA, 769 bp, Zea Mays
cgcgcgtcgctcatcaggttccacgagaacctgccgagccggtcgcaggcgcgaggagaatggggacggaggccgacgccgcagccgtggattcgcttcggtcgcagatcccgttccagaccgacggggagctcatcctcccgccgcgcgatgtggggctcgtcctcgtcgacctctgcaacggcttctgcaccgtcggcgccgggaacctcgctcctgttgcgccaaataagcagataagtaaaatggtggaagaggccgctaggctctctaagctgttctgtgatagaaacctgccgatctttgcattcctggatacccattatccagataagccggagccaccgtatcctcctcactgtatcattggtactggggaggagaacttcgttccagacctggagtggttggaaaaggagccaaatgtgactataaagaggaaaagttgtattgacggttacatcagctgcatagaggaggacgggtctagtgtttttgttgactgggtgggaaaatatcagatcaaaactgtcttggtactcgggatatgcacggacatctgtgttttggattttgcaagctcaactctggctgctcgaaatattgaccgagtgcctccattacgagatgtcgtgatttattcagaggggtgtgctacatatgaccttcctgttgagatcgctatgaatatcaaaggagctcttgcccatcctcaggtacagagcacatgcttgctgtcgataaactgaggaagcaaaggaataatcgg

SEQ ID NO: 55204 - DNA, 1091 bp, Zea Mays
ggcatttctgtcgatcctacgagaccgctttgttgttatctagtatatcaaacacatgatgtcatcgttatattagcatgtgctcttctttcctccttgcgatttcgctcctgttgcgccaaataagcagataagtaaaatggtggaagaggccgctaggctctctaagctgttctgtgatagaaacctgccgatctttgcattcctggatacccattatccagataagccggagccaccgtatcctcctcactgtatcattggtactggggaggagaacttcgttccagacctggagtggttggaaaaggagccaaatgtgactataaagaggaaaagttgtattgacggttacatcagctgcatagaggaggacgggtctagtgtttttgttgactgggtgggaaaatatcagatcaaaactgtcttggtactcgggatatgcacggacatctgtgttttggattttgcaagctcaactctggctgctcgaaatattgaccgagtgcctccattacgagatgtcgtgatttattcagaggggtgtgctacatatgaccttcctgttgagatcgctatgaatatcaaaggagctcttgcccatcctcaggacctgatgcatcatattggactctatatggccaaaggaaggggtgcaaaggttgttgacagggtggttattgaaccttgaataaaaaaaacttccctcatcgtagtgatgttgctagagtttcctgtcttctcatccttccattgtaacaatcagatatatatgcgtcttagcataaagttgttgagatactaatgctagcgacaactatgttgacttgtcgagtatgtagagatgggctcatcattttgtggtgagcttgtacatatttcctgagattactttgtcctgccaaacatgcgccagttctccattggttgctaatgttcggctctgggattgtatattcgtatttaataaaagtactccctcctattccaattcgaattataggatattttgattttttttaatatatgacttttgctatctacagtattcgatatctaaatacataacaaaatatatcaaaaaggcaaaa

SEQ ID NO: 55205 - DNA, 1009 bp, Zea Mays
atcaatcgactacaccgtgatccggctcctgttgcgccaaataagcagataagtaaaatggtggaagaggccgctaggctctctaagctgttctgtgatagaaacctgccgatctttgcattcctggatacccattatccagataagccggagccaccgtatcctcctcactgtatcattggtactggggaggagaacttcgttccagacctggagtggttggaaaaggagccaaatgtgactataaagaggaaaagttgtattgacggttacatcagctgcatagaggaggacgggtctagtgtttttgttgactgggtgggaaaatatcagatcaaaactgtcttggtactcgggatatgcacggacatctgtgttttggattttgcaagctcaactctggctgctcgaaatattgaccgagtgcctccattacgagatgtcgtgatttattcagaggggtgtgctacatatgaccttcctgttgagatcgctatgaatatcaaaggagctcttgcccatcctcaggacctgatgcatcatattggactctatatggccaaaggaaggggtgcaaaggttgttgacagggtggttattgaaccttgaataaaaaaaacttccctcatcgtagtgatgttgctagagtttcctgtcttctcatccttccattgtaacaatcagatatatatgcgtcttagcataaagttgttgagatactaatgctagcgacaactatgttgacttgtcgagtatgtagagatgggctcatcattttgtggtgagcttgtacatatttcctgagattactttgtcctgccaaacatgcgccagttctccattggttgctaatgttcggctctgggattgtatattcgtatttaataaaagtactccctcctattccaattcgaattataggatattttgattttttttaatatatgacttttgctatctacagtattcgatatctaaatacataacaaaatatatcaaaaaggcaaaa

SEQ ID NO: 55206 - DNA, 1280 bp, Zea Mays
cgctcatcaggttccacgaggtcagtgtgcacgcgtgaccgcgaaaagttgtttcgacctcctcggctgctgctttccgctgacctcgccgtgccattgagatgtcatagaacctgccgagccggtcgcaggcgcgaggagaatggggacggaggccgacgccgcagccgtggattcgcttcggtcgcagatcccgttccagaccgacggggagctcatcctcccgccgcgcgatgtggggctcgtcctcgtcgacctctgcaacggcttctgcaccgtcggcgccgggaacctcgctcctgttgcgccaaataagcagataagtaaaatggtggaagaggccgctaggctctctaagctgttctgtgatagaaacctgccgatctttgcattcctggatacccattatccagataagccggagccaccgtatcctcctcactgtatcattggtactggggaggagaacttcgttccagacctggagtggttggaaaaggagccaaatgtgactataaagaggaaaagttgtattgacggttacatcagctgcatagaggaggacgggtctagtgtttttgttgactgggtgggaaaatatcagatcaaaactgtcttggtactcgggatatgcacggacatctgtgttttggattttgcaagctcaactctggctgctcgaaatattgaccgagtgcctccattacgagatgtcgtgatttattcagaggggtgtgctacatatgaccttcctgttgagatcgctatgaatatcaaaggagctcttgcccatcctcaggacctgatgcatcatattggactctatatggccaaaggaaggggtgcaaaggttgttgacagggtggttattgaaccttgaataaaaaaaacttccctcatcgtagtgatgttgctagagtttcctgtcttctcatccttccattgtaacaatcagatatatatgcgtcttagcataaagttgttgagatactaatgctagcgacaactatgttgacttgtcgagtatgtagagatgggctcatcattttgtggtgagcttgtacatatttcctgagattactttgtcctgccaaacatgcgccagttctccattggttgctaatgttcggctctgggattgtatattcgtatttaataaaagtactccctcctattccaattcgaattataggatattttgattttttttaatatatgacttttgctatctacagtattcgatatctaaatacataacaaaatatatcaaaaaggcaaaa

SEQ ID NO: 55207 - DNA, 1007 bp, Zea Mays
gtcgctcatcaggttccacgaggctcctgttgcgccaaataagcagataagtaaaatggtggaagaggccgctaggctctctaagctgttctgtgatagaaacctgccgatctttgcattcctggatacccattatccagataagccggagccaccgtatcctcctcactgtatcattggtactggggaggagaacttcgttccagacctggagtggttggaaaaggagccaaatgtgactataaagaggaaaagttgtattgacggttacatcagctgcatagaggaggacgggtctagtgtttttgttgactgggtgggaaaatatcagatcaaaactgtcttggtactcgggatatgcacggacatctgtgttttggattttgcaagctcaactctggctgctcgaaatattgaccgagtgcctccattacgagatgtcgtgatttattcagaggggtgtgctacatatgaccttcctgttgagatcgctatgaatatcaaaggagctcttgcccatcctcaggacctgatgcatcatattggactctatatggccaaaggaaggggtgcaaaggttgttgacagggtggttattgaaccttgaataaaaaaaacttccctcatcgtagtgatgttgctagagtttcctgtcttctcatccttccattgtaacaatcagatatatatgcgtcttagcataaagttgttgagatactaatgctagcgacaactatgttgacttgtcgagtatgtagagatgggctcatcattttgtggtgagcttgtacatatttcctgagattactttgtcctgccaaacatgcgccagttctccattggttgctaatgttcggctctgggattgtatattcgtatttaataaaagtactccctcctattccaattcgaattataggatattttgattttttttaatatatgacttttgctatctacagtattcgatatctaaatacataacaaaatatatcaaaaaggcaaaa

SEQ ID NO: 55208 - DNA, 661 bp, Zea Mays
cagaagtttatattgtgttatctactgacaagcttgatcttgtttggttgccccagtaccttatagttttgacaaagctatgtttgtcaggaggttgctgagcttttttatgaacaaaacgtgctggaggtggaacctgagattctcccggacatcagttggcgtctctctagttcagtagatggtaaagcaaagattgatgaagaccgtcttaccgatgctgagcttgaccagtaccattctttggagaacaatccaattatttttgagctgagagacgagccagcgatcccgcagctgggagtgtattgaagaatctgtgccagcaggacagaaagctctgtttgcttgctgcttgctctggagtctggagttgtctagtctagaattctagtaggtcttgaacctggtgttttccccagctatgttctagtgggatgttggtgatgtaggatttcagtttgagtactggtaccagttccagctgaagcgacagccttatggctgctgatgggtgatggttgtggaacaacgggcgatataattctaatattttcagcaaactagtctgtggtctctatatttattctcgtgaatcctaaacagtgctaagttttttttggccctaatctatggtctctataaaatcgatattattttt

SEQ ID NO: 55209 - DNA, 1246 bp, Zea Mays
aaaatcccagttagatcttggttgactaatatagaatatgtgcgcaaagaaaggttgtgcagttacatcaccaatctaggcaccgtctcctctacgtcaattggatattacccaggctttcaaggtagaaaagaagctttttgttccatcatggccttatcaactccagcgtctattttggttgacgagaaccaacagataaatagaggtaagagggccgatggaccaagggccaaagggctgaagccatccgagaatcctggcaatcaagggaggagagctcttaaggatttgtccaacttctctaaaggcactggtttgaaggacacttccaccctgaaagagaagtcccagcagaagcctcgtagtaatgtggccaacactattaaaggcaatgctttgaaggacaagcccatcctgaaagagaagtccacccaggaacagaggtcaaaagctcttaagaacccaatgaaaattttagttgatgaagagatcaaaatgtgccatgagtgggctaaggatggggtggagggatttcactcaacacaaaataattctcaaaagttggataaggatctgctagacaaacgtgtcaagaagaaagtggcggcagtaaactcagccttgtgtggttggccagatacagtatttgattctctaatgtatccatctatggaggttgctgagcttttttatgaacaaaacgtgctggaggtggaacctgagattctcccggacatcagttggcgtctctctagttcagtagatggtaaagcaaagattgatgaagaccgtcttaccgatgctgagcttgaccagtaccattctttggagaacaatccaattatttttgagctgagagacgagccagcgatcccgcagctgggagtgtattgaagaatctgtgccagcaggacagaaagctctgtttgcttgctgcttgctctggagtctggagttgtctagtctagaattctagtaggtcttgaacctggtgttttccccagctatgttctagtgggatgttggtgatgtaggatttcagtttgagtactggtaccagttccagctgaagcgacagccttatggctgctgatgggtgatggttgtggaacaacgggcgatataattctaatattttcagcaaactagtctgtggtctctatatttattctcgtgaatcctaaacagtgctaagttttttttggccctaatctatggtctctataaaatcgatattattttt

SEQ ID NO: 55210 - DNA, 1257 bp, Zea Mays
gttaattttttggcagaagcagatcggatgcttatgtgcgcaaagaaaggttgtgcagttacatcaccaatctaggcaccgtctcctctacggtgcttgttcccctgtcaattggatattacccaggctttcaaggtagaaaagaagctttttgttccatcatggccttatcaactccagcgtctattttggttgacgagaaccaacagataaatagaggtaagagggccgatggaccaagggccaaagggctgaagccatccgagaatcctggcaatcaagggaggagagctcttaaggatttgtccaacttctctaaaggcactggtttgaaggacacttccaccctgaaagagaagtcccagcagaagcctcgtagtaatgtggccaacactattaaaggcaatgctttgaaggacaagcccatcctgaaagagaagtccacccaggaacagaggtcaaaagctcttaagaacccaatgaaaattttagttgatgaagagatcaaaatgtgccatgagtgggctaaggatggggtggagggatttcactcaacacaaaataattctcaaaagttggataaggatctgctagacaaacgtgtcaagaagaaagtggcggcagtaaactcagccttgtgtggttggccagatacagtatttgattctctaatgtatccatctatggaggttgctgagcttttttatgaacaaaacgtgctggaggtggaacctgagattctcccggacatcagttggcgtctctctagttcagtagatggtaaagcaaagattgatgaagaccgtcttaccgatgctgagcttgaccagtaccattctttggagaacaatccaattatttttgagctgagagacgagccagcgatcccgcagctgggagtgtattgaagaatctgtgccagcaggacagaaagctctgtttgcttgctgcttgctctggagtctggagttgtctagtctagaattctagtaggtcttgaacctggtgttttccccagctatgttctagtgggatgttggtgatgtaggatttcagtttgagtactggtaccagttccagctgaagcgacagccttatggctgctgatgggtgatggttgtggaacaacgggcgatataattctaatattttcagcaaactagtctgtggtctctatatttattctcgtgaatcctaaacagtgctaagttttttttggccctaatctatggtctctataaaatcgatattattttt

SEQ ID NO: 55211 - DNA, 1174 bp, Zea Mays
ctcagtggggttcataatccatcatcaattggatattacccaggctttcaaggtagaaaagaagctttttgttccatcatggccttatcaactccagcgtctattttggttgacgagaaccaacagataaatagaggtaagagggccgatggaccaagggccaaagggctgaagccatccgagaatcctggcaatcaagggaggagagctcttaaggatttgtccaacttctctaaaggcactggtttgaaggacacttccaccctgaaagagaagtcccagcagaagcctcgtagtaatgtggccaacactattaaaggcaatgctttgaaggacaagcccatcctgaaagagaagtccacccaggaacagaggtcaaaagctcttaagaacccaatgaaaattttagttgatgaagagatcaaaatgtgccatgagtgggctaaggatggggtggagggatttcactcaacacaaaataattctcaaaagttggataaggatctgctagacaaacgtgtcaagaagaaagtggcggcagtaaactcagccttgtgtggttggccagatacagtatttgattctctaatgtatccatctatggaggttgctgagcttttttatgaacaaaacgtgctggaggtggaacctgagattctcccggacatcagttggcgtctctctagttcagtagatggtaaagcaaagattgatgaagaccgtcttaccgatgctgagcttgaccagtaccattctttggagaacaatccaattatttttgagctgagagacgagccagcgatcccgcagctgggagtgtattgaagaatctgtgccagcaggacagaaagctctgtttgcttgctgcttgctctggagtctggagttgtctagtctagaattctagtaggtcttgaacctggtgttttccccagctatgttctagtgggatgttggtgatgtaggatttcagtttgagtactggtaccagttccagctgaagcgacagccttatggctgctgatgggtgatggttgtggaacaacgggcgatataattctaatattttcagcaaactagtctgtggtctctatatttattctcgtgaatcctaaacagtgctaagttttttttggccctaatctatggtctctataaaatcgatattattttt

SEQ ID NO: 55212 - DNA, 1211 bp, Zea Mays
atttattcgctgttccgagttagccctccgtgtggccacacgttttgagcacgcgcccaagtcaattggatattacccaggctttcaaggtagaaaagaagctttttgttccatcatggccttatcaactccagcgtctattttggttgacgagaaccaacagataaatagaggtaagagggccgatggaccaagggccaaagggctgaagccatccgagaatcctggcaatcaagggaggagagctcttaaggatttgtccaacttctctaaaggcactggtttgaaggacacttccaccctgaaagagaagtcccagcagaagcctcgtagtaatgtggccaacactattaaaggcaatgctttgaaggacaagcccatcctgaaagagaagtccacccaggaacagaggtcaaaagctcttaagaacccaatgaaaattttagttgatgaagagatcaaaatgtgccatgagtgggctaaggatggggtggagggatttcactcaacacaaaataattctcaaaagttggataaggatctgctagacaaacgtgtcaagaagaaagtggcggcagtaaactcagccttgtgtggttggccagatacagtatttgattctctaatgtatccatctatggaggttgctgagcttttttatgaacaaaacgtgctggaggtggaacctgagattctcccggacatcagttggcgtctctctagttcagtagatggtaaagcaaagattgatgaagaccgtcttaccgatgctgagcttgaccagtaccattctttggagaacaatccaattatttttgagctgagagacgagccagcgatcccgcagctgggagtgtattgaagaatctgtgccagcaggacagaaagctctgtttgcttgctgcttgctctggagtctggagttgtctagtctagaattctagtaggtcttgaacctggtgttttccccagctatgttctagtgggatgttggtgatgtaggatttcagtttgagtactggtaccagttccagctgaagcgacagccttatggctgctgatgggtgatggttgtggaacaacgggcgatataattctaatattttcagcaaactagtctgtggtctctatatttattctcgtgaatcctaaacagtgctaagttttttttggccctaatctatggtctctataaaatcgatattattttt

SEQ ID NO: 55213 - DNA, 3069 bp, Zea Mays
cgcggatctagccggggcctggaggaagcaggcggggaacgtggggagtgattccctggtaatgttgttggcgtaaatatgcctgcgtcatcagctcctacggcaactactcttgctcctgaggacacagggaagatgaccaagatcgctgctactatcatgagtcttttgatcatgcatatagcaactaatctgccactaagcaagtatatgacactgcattagcccattatgacctcagttcatctccccaatgcgttgtgttgaatgagccacctcataaaatgtcaacgccatgcctttcagcattcaaccaaccatccattgcttatgcgccatgcctttcagcattcaaccaaccatccattgcttattcagagttcacatggttctagaatcctggatgcaccgacaagctgcaaagtgtttccttttttttaaaaaaaagaaaagttcaagctaccagagatcacgcccatatggtgggttgggtccctgaggacctaacaagaaattgacttctgatttcattgagctatatccatgcggtggggcatcagtttttatttgtttgttttctgcattttgcatgacttcgtaattttgtattgtaaactaatttacttggagatagacctattttcttgtataaaccaactacattttatgcttgccctttggagataccaggatcactatgtacctatcgtaagtgccaactatttatttgtttttggtgtaactcatttacttcttttttttcagattggtagtaaatgacagattaacacacctgagagctgctaggatcaacaactttctttcaaaatgcatctgttcattcttttttcttttgcatttagattaccctttgttttgtggtctgtaaataccacatgagcatgagcacatggcccttatgtttgaacgatttcacatatttttatataatatgtctttttcatgcatatgtatccctacatatgcatgcatacaaattatttggataattaaatctaacttgagtgtattctgctcttctttcgctatatagagatgaaatatgtgatagaattatccataaaaacatggcttgatctgtccgctgttgttgtatattgatcaagagaagcaagctagcttcgatgagaagagcagaatgttagttggatgtggtttggtcttctttcacctggttagtggtcaactgtactatgctgctacgatctttcaggtaccgacatattgttggtttcctatatggattatagaattatccagttcaagcatgcctaggtattatagatgcccatttgtgttaggacttattatgatgatctcaacttgggaataattgctaaacttgtctgggcaacttgggatcattactttttagaccccacattatatattgaattcctttatcacttgtatctatcatttgtttgcaagcagagagttggattctctagggcatttgatgtcactcatgtgtcaattcttcttattactgaaggtacatgtgaacacttttgcatatgctctattgaaatttaacctaagtatttttcaactttaatatgatttttacaccctagaaaggcattttgttactgatacaactgcatgctaggggaagttcacatgcatagcttctatcctgtgttagagacaatctgtagttttatatggcccctgatgtccattaaccagaccttgatcagaggttggtgactagatagcatgtcacaccataaaaaattccttgcttgcttgctttagttgagaaggacatgcctcgtgcaggttgagtattcgaagcagcctctccgcatgtgtgggaggatggcttgccttggtttttttacttccctagacctcattcgtgtaggatcctctagcaccaggtctaccttttttgcttgctttggctgctaaagttgtgcccagctttaaggagcaaataaatttggaaaaaaaaactcatttcaacaaataaagctgctctcaaatatccatttgcatgtttgttgcatttttttcaattatttgtttaagactctgttgcatcatcaccaagctcttgtgttgtccccaatagcatttgtgattctggttcattcattcgtgtaccatgacaacaaattaacttgcaataatgtcgtgttcaccttaaggttgtcaacatacatgcttcttgtgaaatatttagaacttactatgatgaataccttactgcataatccattaatatgctgaagcaatattcctctttaacatggaaggaataaatatactattctggagcttaatggcattgacacaatatctgatagacttactagctatactgataattgacaggtgcatgtttcacatttaatttttctattttcatagaactaacactatctgagtaacttgttgttaaatttgagatattaagacatcaggacggatccaatcaacttttattaaggcatcttccttcagtatcacttgtgttgttgctgcactgctcctacccactccatccgagaatgagaatatactctatctaaatcgaattgtttatatggacaatactcattattatgtctttatttattgtaattgtttgatgtggctgagaggagttactatcgaagggatctttcattctttgaacttctagccacctggtataggatcctaaggacaacagagactccatccatccttagcaatgaccatgatccatgttagcaaaaccagatatatcctgctctcaatcaataattcagtatcaagcagtggttactgtcgctgcttccttccagtctggtggttatctgaagcagcaattcctacaccttcaacagcctatgcagtctccacaggagcagtgcaacctcaatccactattgcaacaacaaatatgatagcttctgctggtcattctatgtttctgtcatgtaagtttcaggaaataaatttattcagtgtggcaactggaagaaagctcatactattttaatgacttgtgtggaatgagttaagtttgtacccgtgaattgtgttcaatgtttt

SEQ ID NO: 55214 - DNA, 3138 bp, Zea Mays
atggcaagagggggaagacatgggaggcaaggggaggaatacccagggcgcagggggtcaggcagccacattggagacggagtgggcgacgtgtggtcgcggaggaagaggaggcccttgcagcggcaccgtggaggcggcgctcagtcgaaaaggtttgtgtgggaaccgatagaggtacgtcacggcagccggaagagccaaatcagagccggcagagctgcgcgctgcgacgacgggacgagggaaggagaggcagagggaggaggcgaggctggtcaggccgacggtgcagtgcgagcgagtgcaacaaccccagcggcggccgtcgacctcaattcccaaacattccctggtaatgttgttggcgtaaatatgcctgcgtcatcagctcctacggcaactactcttgctcctgagggaagatgaccaagatcgctgctactatcatgagtcttttgatcatgcatatagcaactaatctgccactaagcaagtatatgacactgcattagcccattatgacctcagttcatctccccaatgcgttgtgttgaatgagccacctcataaaatgtcaacgccatgcctttcagcattcaaccaaccatccattgcttatgcgccatgcctttcagcattcaaccaaccatccattgcttattcagagttcacatggttctagaatcctggatgcaccgacaagctgcaaagtgtttccttttttttaaaaaaaagaaaagttcaagctaccagagatcacgcccatatggtgggttgggtccctgaggacctaacaagaaattgacttctgatttcattgagctatatccatgcggtggggcatcagtttttatttgtttgttttctgcattttgcatgacttcgtaattttgtattgtaaactaatttacttggagatagacctattttcttgtataaaccaactacattttatgcttgccctttggagataccaggatcactatgtacctatcgtaagtgccaactatttatttgtttttggtgtaactcatttacttcttttttttcagattggtagtaaatgacagattaacacacctgagagctgctaggatcaacaactttctttcaaaatgcatctgttcattcttttttcttttgcatttagattaccctttgttttgtggtctgtaaataccacatgagcatgagcacatggcccttatgtttgaacgatttcacatatttttatataatatgtctttttcatgcatatgtatccctacatatgcatgcatacaaattatttggataattaaatctaacttgagtgtattctgctcttctttcgctatatagagatgaaatatgtgatagaattatccataaaaacatggcttgatctgtccgctgttgttgtatattgatcaagagaagcaagctagcttcgatgagaagagcagaatgttagttggatgtggtttggtcttctttcacctggttagtggtcaactgtactatgctgctacgatctttcagagagttggattctctagggcatttgatgtcactcatgtgtcaattcttcttattactgaaggtacatgtgaacacttttgcatatgctctattgaaatttaacctaagtatttttcaactttaatatgatttttacaccctagaaaggcattttgttactgatacaactgcatgctaggggaagttcacatgcatagcttctatcctgtgttagagacaatctgtagttttatatggcccctgatgtccattaaccagaccttgatcagaggttggtgactagatagcatgtcacaccataaaaaattccttgcttgcttgctttagttgagaaggacatgcctcgtgcaggttgagtattcgaagcagcctctccgcatgtgtgggaggatggcttgccttggtttttttacttccctagacctcattcgtgtaggatcctctagcaccaggtctaccttttttgcttgctttggctgctaaagttgtgcccagctttaaggagcaaataaatttggaaaaaaaaactcatttcaacaaataaagctgctctcaaatatccatttgcatgtttgttgcatttttttcaattatttgtttaagactctgttgcatcatcaccaagctcttgtgttgtccccaatagcatttgtgattctggttcattcattcgtgtaccatgacaacaaattaacttgcaataatgtcgtgttcaccttaaggttgtcaacatacatgcttcttgtgaaatatttagaacttactatgatgaataccttactgcataatccattaatatgctgaagcaatattcctctttaacatggaaggaataaatatactattctggagcttaatggcattgacacaatatctgatagacttactagctatactgataattgacaggtgcatgtttcacatttaatttttctattttcatagaactaacactatctgagtaacttgttgttaaatttgagatattaagacatcaggacggatccaatcaacttttattaaggcatcttccttcagtatcacttgtgttgttgctgcactgctcctacccactccatccgagaatgagaatatactctatctaaatcgaattgtttatatggacaatactcattattatgtctttatttattgtaattgtttgatgtggctgagaggagttactatcgaagggatctttcattctttgaacttctagccacctggtataggatcctaaggacaacagagactccatccatccttagcaatgaccatgatccatgttagcaaaaccagatatatcctgctctcaatcaataattcagtatcaagcagtggttactgtcgctgcttccttccagtctggtggttatctgaagcagcaattcctacaccttcaacagcctatgcagtctccacaggagcagtgcaacctcaatccactattgcaacaacaaatatgatagcttctgctggtcattctatgtttctgtcatgtaagtttcaggaaataaatttattcagtgtggcaactggaagaaagctcatactattttaatgacttgtgtggaatgagttaagtttgtacccgtgaattgtgttcaatgtttt

SEQ ID NO: 55215 - DNA, 1708 bp, Zea Mays
atcttttcctctcaccccacaaatggggagaggctgcttcgaatctgtgacctggtgattcacctttgatggaatctttgaagaaagctgtggctgatgcaaaaaagccccgttccatacaagacttactgaaggagcaggtggctaaactgagagaacaagcgtctggtggaggcagagggaatgggaatcgccgtggaggcagtggtggttctggtggcccagatgatgaatcgttcaaggaaacattggatgaagtagtgcaagttatcttagccactgttgctttcatacttgtgtacatccacataatcagaggggaggagctttaccgtcttgccagggactacaccagatatctcgtcaccggtaagaggactgcccgactgaagcgtgccatgcaaaggtggcgcaacttctcggagagcttcatgcagaaggcaggctcagaagacgaccaatatgagagaccagctgtgtcaaaacctgcatggtggcaacagcctcagaaatttgtgcattttgtggaggacctttgcaggggaaactggcgtccccatgctcaggagtcttagttgatggagtaccccccgacccattgcagaatgcatacttggctgtgattggagcaaggtcgcctgtcaggctgtcacctggggcaggttttttttttttgttatttatcggatatttgccactggtttcttaggagtatgtagaaagtcgctgaattgttggcaattttgcagttgatagaacctcgttttgagactctaacctgccaagtcgggtgtggaattgtttattaataagctgtttggtttgaggaatgatctagtccatcgtcttctcactcctcacttttttgtttggtttgtggaatggattgagttgatccatcatcaccttattccttatagttatttagttagtactaatatgagtaataaggtcatcccaccaaatttgaggaatggactcatgatgcaccaccacattttggatgaaatgattcctcaaaccaaacaccccctaagtcggcctttctatgtacatgtttgttgaggactgcagatctattgccaccaccacaagcctcagccctcagctagctagcaagttgccctgccatacatttttgttgttaggatattaggacttcaaagttacactagccgtgcaaatgtaacaatgtagtattatgttttgtaggaaatttttgcacgacctatcatgcccatgaggccatgaaactattgtcctttcaatagcgatattgctagcacagtaaacaccaatccatcgacagaacaagagagttcatgaaaatatgaaatagctcactttttatgtttcttcgctatggttatacaaactcagtatagttctgaaaaaataaccgagtgtctgcaccaaactaccaaaaagtttcatattgtaaacgtgaatcggtgcatggccgtttccccagattgaaagaaatcatttgtcgctgttatactcggtggttggcaatgctgaaagtaatccggcacagatcaactttcatcagcaggagagcctgacgcttcagcagctttcttttccttctgtttctctctgcgcttcttgtttcgcaatgcatttttgctcatctcccccctgtcacattaagcttgtaccttgtcctgaagttctgcagaacccttagcatgaggtgggcggtatg

SEQ ID NO: 55216 - DNA, 1963 bp, Zea Mays
accctcataccacactcaaactcgcatcctgtggagtttttacatagaagtcgtcacttattgcgccgtggtggatgggcaggggctcgtgtcgaacactcgaacagaaccaccgccattctagaggcatccagtattccagcccaatcctatctttgtattcctctccctcgtctcggaagtctggttcgccgaacagtcccgaacccccgattcactgccgctgccccgtctcgtcctcttcgccagcgaaaaccctagtctaggggacgggagcgcaatccacgcacggcaacatggacgccatccgcaagcagctcgaccagctcatgggggccaaccgcaacggcgatgtacgggaggtcagccgcaagtactatgatcgcgacgtctgccgcctctacctcgccggcctctgcccccacgacctcttccagcttaccaagatggacatgggcccgtgcccgaagctgcactcgctgcaactgcgcaaagaatatgaagaagccaaagccaaaggtactgataactatgaccgtgaattggaagaaaccattgaaagactaattgttgagtgtgaaaggaagattcagagagcccttaagcggttggaggaagaggatgctaaggcagctattgctatttctgttactgaggttacacagactaaagaagtaatggagttatccaaacaaattaggcagaagatgaaggatattgatgcttttgatcttgagggtaacaccgaggggaaaattcgggccactgaagaacttgacaagctaaaagaacaaagggcagaagagcaggcaaagatgttacttgaagctttcaacaaagaccgtgcttctttaataaactctcttcaaaatgccactcaaacaactacacctgtcccccctgctgctccggatgcacggacacaagaaatgataaacgagaaactgaaaaaggcagaagaactaggtgagaatgggatggttgatgaagcccaaaaattgttggatgaggcggaagctctgaagaagctggccacccgaccacaggctgttccagactctacaaaaatgagcgctcatgtccagataactgaccaaaagctgcgcctgtgtgacatatgtggagcattcttgagcgtatatgacagtgaccgtcgcttggcagatcattttggagggaaacttcatatgggttatatgcttatacgtgagagattgtctgaactgcaggaagagaagaacaaaaaacggaagctagaccgagctgagtatgacagaagggaaaggagcggggaacgtgccagggattcgagcagggatcgctacatagaccgcagcagcagccgtgacagggagtatgaccgcagaagaagccatgatcgctaccatgacagggaaagagagagagattccaggcagtctcgtagttatgattccagaagccaccgcaggtcatattcaccaaggggaagttctagggattatgatcgatctgggcgtcatgaacgccgtgatcggtactaggagcaaggaagcctccttgaaatttagggtactagattgcgttgcctcagggctagtttggccacctcatttttccaaggattgacaaccttatttttttaagggatttctattttcctaagaaaaattagttcattttcccctgggagggaataccttggggaaatggaggtgccaaactagcctaagtgttgttcgggaattctaagagggggcttaggtccaactggagaaaggcatcagctctttgcattataactaagggataggatctgacgtaatctatgcgtatcatattgttgtgttagctggtgttcatcgtgtaaacacaatgtggtggcgacgtgtcatgctttaatacgcttatatgcatttgaattaagttaatctgcccttgccatgtgtcttttattctggtaataagtttgtactcgtacgaa

SEQ ID NO: 55217 - DNA, 1883 bp, Zea Mays
accctcataccacactcaaactcgcatcctgtggagtttttacatagaagtcgtcacttattgcgccgtggtggatgggcaggggctcgtgtcgaacactcgaacagaaccaccgccattctagaggcatccagtattccagcccaatcctatctttgtattcctctccctcgtctcggaagtctggttcgccgaacagtcccgaacccccgattcactgccgctgccccgtctcgtcctcttcgccagcgaaaaccctagtctaggggacgggagcgcaatccacgcacggcaacatggacgccatccgcaagcagctcgaccagctcatgggggccaaccgcaacggcgatgtacgggaggtcagccgcaagtactatgatcgcgacgtctgccgcctctacctcgccggcctctgcccccacgacctcttccagcttaccaagatggacatgggcccgtgcccgaagctgcactcgctgcaactgcgcaaagaatatgaagaagccaaagccaaagattcagagagcccttaagcggttggaggaagaggatgctaaggcagctattgctatttctgttactgaggttacacagactaaagaagtaatggagttatccaaacaaattaggcagaagatgaaggatattgatgcttttgatcttgagggtaacaccgaggggaaaattcgggccactgaagaacttgacaagctaaaagaacaaagggcagaagagcaggcaaagatgttacttgaagctttcaacaaagaccgtgcttctttaataaactctcttcaaaatgccactcaaacaactacacctgtcccccctgctgctccggatgcacggacacaagaaatgataaacgagaaactgaaaaaggcagaagaactaggtgagaatgggatggttgatgaagcccaaaaattgttggatgaggcggaagctctgaagaaggctgttccagactctacaaaaatgagcgctcatgtccagataactgaccaaaagctgcgcctgtgtgacatatgtggagcattcttgagcgtatatgacagtgaccgtcgcttggcagatcattttggagggaaacttcatatgggttatatgcttatacgtgagagattgtctgaactgcaggaagagaagaacaaaaaacggaagctagaccgagctgagtatgacagaaggtccagggaaaggagcggggaacgtgccagggattcgagcagggatcgctacatagaccgcagcagcagccgtgacagggagtatgaccgcagaagaagccatgatcgctaccatgacagggaaagagagagagattccaggcagtctcgtagttatgattccagaagccaccgcaggtcatattcaccaaggggaagttctagggattatgatcgatctgggcgtcatgaacgccgtgatcggtactaggagcaaggaagcctccttgaaatttagggtactagattgcgttgcctcagggctagtttggccacctcatttttccaaggattgacaaccttatttttttaagggatttctattttcctaagaaaaattagttcattttcccctgggagggaataccttggggaaatggaggtgccaaactagcctaagtgttgttcgggaattctaagagggggcttaggtccaactggagaaaggcatcagctctttgcattataactaagggataggatctgacgtaatctatgcgtatcatattgttgtgttagctggtgttcatcgtgtaaacacaatgtggtggcgacgtgtcatgctttaatacgcttatatgcatttgaattaagttaatctgcccttgccatgtgtcttttattctggtaataagtttgtactcgtacgaa

SEQ ID NO: 55218 - DNA, 2560 bp, Zea Mays
tacgtttctttcttcctccacacgcctgcttgttcacctccatggctgatggctccatctcctcctgtccctaaccccctccggccctcccctcctccaaagccctaaaccccacgtagctcggtgtgtcagtccactcgcccgcccggtcggcgccgcacccatctttcggattctaccctaaaggcatgaccttggtcttccaatctggaaattgagtagcaatcaagtatggctgcaagagcaatcacgaggagaaggaagtatcttttcgaccatgttaaaacacctaacctctcatcttcatcctctactttccaacatggaagaattggttctgaagatgagccaaaaataacactactgtttctggagcaaagctctagggattcaagatctgagaaggagcaatactgtgtgaatttgactaataggaatttggcaggtattgctaatagatttctgcgacgtccagctcatgggatatctctttcatattatggaattggaaagaatgactttgggttgccactgggagctagatctatgctgcagtcagttcgtgcatcatcaactgcaaccgcagggcaacctaagttggatattgatgacgaacagagtggggatcagaagcaaaatagaaagaaaaaagagacatccccagaggaatgtgatcaggctgtggaaggcctaagcactgcaaaagctaaagccaaagctaaacaggtccaagaatctctcaaggctagccaatcggccatgcagaaattctgggcaaggcttttgggtattggtcctgctctgcgagctgtggcttcaatgagcagggctgattgggctgcaaagcttaagcattggaaggctgaatttgttactacactgcagcattactggttagggacaaagctactatgggcagatgttagaatctcatcaagattactggtgaaacttgctggtggaaaaagcctttctagaagagagaggcaacagctgacacgcacaacagctgatatcttcaggctggtaccatttgctgtgttcatcgttgttcctttcatggagttcttactgccagtgttcctgaagttatttccaaacatgcttccatcaactttccaagacaaaatgaaagaagaggaagcattgaagaggaaactaaaagcaaggatggaatatgcaaagtttttgcaagatacagcaaaagaaatggcaaaggaagtccaaacatcacgtagtggggatataaaacaaactgctgaagatctggacgagtttttgaacaagatcacgcttggtaaatatgtgcaaatatatgggtatccggccttttggtacagatcactacttgaggttcatgcttcgcaaaaaactgcaagacattaagaatgatgataagatgattcaagctgagggtgttgaatctctttctgaagaggagcttcggcaagcctgtcgggaacgtggtcacctaggtctactgtcaactgaagagatgagacagcagctccgagactggttggatctctcattaaatcatgcagtgccatcttcacttctcatactttcaagagcttttactgtatctgggaaagtgaaacctgaggaagctgttgtagcaacactatcttcactaccggatgaagttgtggatacagttggaacagtactgccatctgaagattcagtttctgagaggaggagaaaacttgaatttcttgagatgcaagaagaacttatcaaggaggaagagaaaaggaaggagaaagaagaaaaagcaaaacaagaggaagaggaaaaggcaaagctcaaagaaacgaagggttctgctgaagatttagctttgaaagaaatgattgaggctactgctagggaagaggaactgcgaaaggcaaaacaacacgacagggaaaaactctgtaatatcggccgagcattggcagtgctcgcatctgcatcatctgtaagcaaggagcgtcaggagttcttgggacttgtcaacaaggagatagaactatacaactcaatgcttgaaaaggagggtgcagaagaagctaagagagcatacatagctgctagagaggaatcagaccatcatgctgaggctgctgcagaagaaaaaatttcatcagcacttattgagaaggttgatgctatgctccaagaattagaaaaggagattgatgatgtggatgcacaaattggaaatcgttggcaactgcttgataaggaccatgatggcaaagtgacccctgaagaggtggcggcggcggcagcttatctcaaggacaccatagggaaagaaggcgtgcaagagctcatcagcaacctttctaaagacacagaaggaaaaatccttgttgaagatattgtgaagctagcatcccaaacagaaaacaatgaagaggaagaggaagcacggtagatgggagagtatatggaaacatcacactcgttcagcagtcaaaactcatgtattgaaagggatgcagcgcacgagccaactgagtcgagccgaatctcattcttgagctcatgcaatggacgagccaaaccaaac

SEQ ID NO: 55219 - DNA, 2849 bp, Zea Mays
cgtttctttcttcctccacacgcctgcttgttcacctccatggctgatggctccatctcctcctgtccctaaccccctccggccctcccctcctccaaagccctaaaccccacgtagctcggtgtgtcagtccactcgcccgcccggtcggcgccgcacccatctttcggattctaccctaaaggcatgaccttggtcttccaatctggaaattgagtagcaatcaagtatggctgcaagagcaatcacgaggagaaggaagtatcttttcgaccatgttaaaacacctaacctctcatcttcatcctctactttccaacatggaagaattggttctgaagatgagccaaaaataacactactgtttctggagcaaagctctagggattcaagatctgagaaggagcaatactgtgtgaatttgactaataggaatttggcaggtattgctaatagatttctgcgacgtccagctcatgggatatctctttcatattatggaattggaaagaatgactttgggttgccactgggagctagatctatgctgcagtcagttcgtgcatcatcaactgcaaccgcagggcaacctaagttggatattgatgacgaacagagtggggatcagaagcaaaatagaaagaaaaaagagacatccccagaggaatgtgatcaggctgtggaaggcctaagcactgcaaaagctaaagccaaagctaaacaggtccaagaatctctcaaggctagccaatcggccatgcagaaattctgggcaaggcttttgggtattggtcctgctctgcgagctgtggcttcaatgaggctgattgggctgcaaagcttaagcattggaaggctgaatttgttactacactgcagcattactggttagggacaaagctactatgggcagatgttagaatctcatcaagattactggtgaaacttgctggtggaaaaagcctttctagaagagagaggcaacagctgacacgcacaacagctgatatcttcaggctggtaccatttgctgtgttcatcgttgttcctttcatggagttcttactgccagtgttcctgaagttatttccaaacatgcttccatcaactttccaagacaaaatgaaagaagaggaagcattgaagaggaaactaaaagcaaggatggaatatgcaaagtttttgcaagatacagcaaaagaaatggcaaaggaagtccaaacatcacgtagtggggatataaaacaaactgctgaagatctggacgagtttttgaacaaggttaggagaggtgaacgggtctccaatgacgaaatcttgagctttgcgaagcttttcaatgatgaacttactttggataacatgagcatatcacgcttggtaaatatgtgcaaatatatgggtatccggccttttggtacagatcactacttgaggttcatgcttcgcaaaaaactgcaagacattaagaatgatgataagatgattcaagctgagggtgttgaatctctttctgaagaggagcttcggcaagcctgtcgggaacgtggtcacctaggtctactgtcaactgaagagatgagacagcagctccgagactggttggatctctcattaaatcatgcagtgccatcttcacttctcatactttcaagagcttttactgtatctgggaaagtgaaacctgaggaagctgttgtagcaacactatcttcactaccggatgaagttgtggatacagttggaacagtactgccatctgaagattcagtttctgagaggaggagaaaacttgaatttcttgagatgcaagaagaacttatcaaggaggaagagaaaaggaaggagaaagaagaaaaagcaaaacaagaggaagaggaaaaggcaaagctcaaagaaacgaagggttctgctgaagatttagctttgaaagaaatgattgaggctactgctagggaagaggaactgcgaaaggcaaaacaacacgacagggaaaaactctgtaatatcggccgagcattggcagtgctcgcatctgcatcatctgtaagcaaggagcgtcaggagttcttgggacttgtcaacaaggagatagaactatacaactcaatgcttgaaaaggagggtgcagaagaagctaagagagcatacatagctgctagagaggaatcagaccatcatgctgaggctgctgcagaagaaaaaatttcatcagcacttattgagaaggttgatgctatgctccaagaattagaaaaggagattgatgatgtggatgcacaaattggaaatcgttggcaactgcttgataaggaccatgatggcaaagtgacccctgaagaggtggcggcggcggcagcttatctcaaggacaccatagggaaagaaggcgtgcaagagctcatcagcaacctttctaaagacacagaaggaaaaatccttgttgaagatattgtgaagctagcatcccaaacagaaaacaatgaagaggaagaggaagcacggtagatgggagagtatatggaaacatcacactcgttcagcagtcaaaactcatgtattgaaaggcaatacgtccatttcttgtgtctcttgactgactttgatagtgacttccaattagcaaggtagattttctgtagaaaggctcatgctgacatgcatttagttagccgccgtgttgtgatttggcaggtaaaattgcaaccaaaatttagaccggttgcatggacgtggataatacagatcaattgtatttgttactactatgcaatcccgaaatattggatctgtttcaaattctcaagtaatcattgatggatgctatttattgaccataaagcttacgg

SEQ ID NO: 55220 - DNA, 2849 bp, Zea Mays
cgtttctttcttcctccacacgcctgcttgttcacctccatggctgatggctccatctcctcctgtccctaaccccctccggccctcccctcctccaaagccctaaaccccacgtagctcggtgtgtcagtccactcgcccgcccggtcggcgccgcacccatctttcggattctaccctaaaggcatgaccttggtcttccaatctggaaattgagtagcaatcaagtatggctgcaagagcaatcacgaggagaaggaagtatcttttcgaccatgttaaaacacctaacctctcatcttcatcctctactttccaacatggaagaattggttctgaagatgagccaaaaataacactactgtttctggagcaaagctctagggattcaagatctgagaaggagcaatactgtgtgaatttgactaataggaatttggcaggtattgctaatagatttctgcgacgtccagctcatgggatatctctttcatattatggaattggaaagaatgactttgggttgccactgggagctagatctatgctgcagtcagttcgtgcatcatcaactgcaaccgcagggcaacctaagttggatattgatgacgaacagagtggggatcagaagcaaaatagaaagaaaaaagagacatccccagaggaatgtgatcaggctgtggaaggcctaagcactgcaaaagctaaagccaaagctaaacaggtccaagaatctctcaaggctagccaatcggccatgcagaaattctgggcaaggcttttgggtattggtcctgctctgcgagctgtggcttcaatgagcagggctgattgggctgcaaagcttaagcattggaaggctgaatttgttactacactgcagcattactggttagggacaaagctactatgggcagatgttagaatctcatcaagattactggtgaaacttgctggtggaaaaagcctttctagaagagagaggcaacagctgacacgcacaacagctgatatcttcaggctggtaccatttgctgtgttcatcgttgttcctttcatggagttcttactgccagtgttcctgaagttatttccaaacatgcttccatcaactttccaagacaaaatgaaagaagaggaagcattgaagaggaaactaaaagcaaggatggaatatgcaaagtttttgcaagatacagcaaaagaaatggcaaaggaagtccaaacatcacgtagtggggatataaaacaaactgctgaagatctggacgagtttttgaacaaggttaggagaggtgaacgggtctccaatgacgaaatcttgagctttgcgaagcttttcaatgatgaacttactttggataacatgaatcacgcttggtaaatatgtgcaaatatatgggtatccggccttttggtacagatcactacttgaggttcatgcttcgcaaaaaactgcaagacattaagaatgatgataagatgattcaagctgagggtgttgaatctctttctgaagaggagcttcggcaagcctgtcgggaacgtggtcacctaggtctactgtcaactgaagagatgagacagcagctccgagactggttggatctctcattaaatcatgcagtgccatcttcacttctcatactttcaagagcttttactgtatctgggaaagtgaaacctgaggaagctgttgtagcaacactatcttcactaccggatgaagttgtggatacagttggaacagtactgccatctgaagattcagtttctgagaggaggagaaaacttgaatttcttgagatgcaagaagaacttatcaaggaggaagagaaaaggaaggagaaagaagaaaaagcaaaacaagaggaagaggaaaaggcaaagctcaaagaaacgaagggttctgctgaagatttagctttgaaagaaatgattgaggctactgctagggaagaggaactgcgaaaggcaaaacaacacgacagggaaaaactctgtaatatcggccgagcattggcagtgctcgcatctgcatcatctgtaagcaaggagcgtcaggagttcttgggacttgtcaacaaggagatagaactatacaactcaatgcttgaaaaggagggtgcagaagaagctaagagagcatacatagctgctagagaggaatcagaccatcatgctgaggctgctgcagaagaaaaaatttcatcagcacttattgagaaggttgatgctatgctccaagaattagaaaaggagattgatgatgtggatgcacaaattggaaatcgttggcaactgcttgataaggaccatgatggcaaagtgacccctgaagaggtggcggcggcggcagcttatctcaaggacaccatagggaaagaaggcgtgcaagagctcatcagcaacctttctaaagacacagaaggaaaaatccttgttgaagatattgtgaagctagcatcccaaacagaaaacaatgaagaggaagaggaagcacggtagatgggagagtatatggaaacatcacactcgttcagcagtcaaaactcatgtattgaaaggcaatacgtccatttcttgtgtctcttgactgactttgatagtgacttccaattagcaaggtagattttctgtagaaaggctcatgctgacatgcatttagttagccgccgtgttgtgatttggcaggtaaaattgcaaccaaaatttagaccggttgcatggacgtggataatacagatcaattgtatttgttactactatgcaatcccgaaatattggatctgtttcaaattctcaagtaatcattgatggatgctatttattgaccataaagcttacgg

SEQ ID NO: 55221 - DNA, 2875 bp, Zea Mays
cgtttctttcttcctccacacgcctgcttgttcacctccatggctgatggctccatctcctcctgtccctaaccccctccggccctcccctcctccaaagccctaaaccccacgtagctcggtgtgtcagtccactcgcccgcccggtcggcgccgcacccatctttcggattctaccctaaaggcatgaccttggtcttccaatctggaaattgagtagcaatcaagtatggctgcaagagcaatcacgaggagaaggaagtatcttttcgaccatgttaaaacacctaacctctcatcttcatcctctactttccaacatggaagaattggttctgaagatgagccaaaaataacactactgtttctggagcaaagctctagggattcaagatctgagaaggagcaatactgtgtgaatttgactaataggaatttggcaggtattgctaatagatttctgcgacgtccagctcatgggatatctctttcatattatggaattggaaagaatgactttgggttgccactgggagctagatctatgctgcagtcagttcgtgcatcatcaactgcaaccgcagggcaacctaagttggatattgatgacgaacagagtggggatcagaagcaaaatagaaagaaaaaagagacatccccagaggaatgtgatcaggctgtggaaggcctaagcactgcaaaagctaaagccaaagctaaacaggtccaagaatctctcaaggctagccaatcggccatgcagaaattctgggcaaggcttttgggtattggtcctgctctgcgagctgtggcttcaatgagcagggctgattgggctgcaaagcttaagcattggaaggctgaatttgttactacactgcagcattactggttagggacaaagctactatgggcagatgttagaatctcatcaagattactggtgaaacttgctggtggaaaaagcctttctagaagagagaggcaacagctgacacgcacaacagctgatatcttcaggctggtaccatttgctgtgttcatcgttgttcctttcatggagttcttactgccagtgttcctgaagttatttccaaacatgcttccatcaactttccaagacaaaatgaaagaagaggaagcattgaagaggaaactaaaagcaaggatggaatatgcaaagtttttgcaagatacagcaaaagaaatggcaaaggaagtccaaacatcacgtagtggggatataaaacaaactgctgaagatctggacgagtttttgaacaaggttaggagaggtgaacgggtctccaatgacgaaatcttgagctttgcgaagcttttcaatgatgaacttactttggataacatgagcatatcacgcttggtaaatatgtgcaaatatatgggtatccggccttttggtacagatcactacttgaggttcatgcttcgcaaaaaactgcaagacattaagaatgatgataagatgattcaagctgagggtgttgaatctctttctgaagaggagcttcggcaagcctgtcgggaacgtggtcacctaggtctactgtcaactgaagagatgagacagcagctccgagactggttggatctctcattaaatcatgcagtgccatcttcacttctcatactttcaagagcttttactgtatctgggaaagtgaaacctgaggaagctgttgtagcaacactatcttcactaccggatgaagttgtggatacagttggaacagtactgccatctgaagattcagtttctgagaggaggagaaaacttgaatttcttgagatgcaagaagaacttatcaaggaggaagagaaaaggaaggagaaagaagaaaaagcaaaacaagaggaagaggaaaaggcaaagctcaaagaaacgaagggttctgctgaagatttagctttgaaagaaatgattgaggctactgctagggaagaggaactgcgaaaggcaaaacaacacgacagggaaaaactctgtaatatcggccgagcattggcagtgctcgcatctgcatcatctgtaagcaaggagcgtcaggagttcttgggacttgtcaacaaggagatagaactatacaactcaatgcttgaaaaggagggtgcagaagaagctaagagagcatacatagctgctagagaggaatcagaccatcatgctgaggctgctgcagaagaaaaaatttcatcagcacttattgagaagctatgacctttgctgcattcaggttgatgctatgctccaagaattagaaaaggagattgatgatgtggatgcacaaattggaaatcgttggcaactgcttgataaggaccatgatggcaaagtgacccctgaagaggtggcggcggcggcagcttatctcaaggacaccatagggaaagaaggcgtgcaagagctcatcagcaacctttctaaagacacagaaggaaaaatccttgttgaagatattgtgaagctagcatcccaaacagaaaacaatgaagaggaagaggaagcacggtagatgggagagtatatggaaacatcacactcgttcagcagtcaaaactcatgtattgaaaggcaatacgtccatttcttgtgtctcttgactgactttgatagtgacttccaattagcaaggtagattttctgtagaaaggctcatgctgacatgcatttagttagccgccgtgttgtgatttggcaggtaaaattgcaaccaaaatttagaccggttgcatggacgtggataatacagatcaattgtatttgttactactatgcaatcccgaaatattggatctgtttcaaattctcaagtaatcattgatggatgctatttattgaccataaagcttacgg

SEQ ID NO: 55222 - DNA, 2766 bp, Zea Mays
tacgtttctttcttcctccacacgcctgcttgttcacctccatggctgatggctccatctcctcctgtccctaaccccctccggccctcccctcctccaaagccctaaaccccacgtagctcggtgtgtcagtccactcgcccgcccggtcggcgccgcacccatctttcggattctaccctaaaggcatgaccttggtcttccaatctggaaattgagtagcaatcaagtatggctgcaagagcaatcacgaggagaaggaagtatcttttcgaccatgttaaaacacctaacctctcatcttcatcctctactttccaacatggaagaattggttctgaagatgagccaaaaataacactactgtttctggagcaaagctctagggattcaagatctgagaaggagcaatactgtgtgaatttgactaataggaatttggcaggtattgctaatagatttctgcgacgtccagctcatgggatatctctttcatattatggaattggaaagaatgactttgggttgccactgggagctagatctatgctgcagtcagttcgtgcatcatcaactgcaaccgcagggcaacctaagttggatattgatgacgaacagagtggggatcagaagcaaaatagaaagaaaaaagagacatccccagaggaatgtgatcaggctgtggaaggcctaagcactgcaaaagctaaagccaaagctaaacaggtccaagaatctctcaaggctagccaatcggccatgcagaaattctgggcaaggcttttgggtattggtcctgctctgcgagctgtggcttcaatgagcagggctgattgggctgcaaagcttaagcattggaaggctgaatttgttactacactgcagcattactggttagggacaaagctactatgggcagatgttagaatctcatcaagattactggtgaaacttgctggtggaaaaagcctttctagaagagagaggcaacagctgacacgcacaacagctgatatcttcaggctggtaccatttgctgtgttcatcgttgttcctttcatggagttcttactgccagtgttcctgaagttatttccaaacatgcttccatcaactttccaagacaaaatgaaagaagaggaagcattgaagaggaaactaaaagcaaggatggaatatgcaaagtttttgcaagatacagcaaaagaaatggcaaaggaagtccaaacatcacgtagtggggatataaaacaaactgctgaagatctggacgagtttttgaacaagatcacgcttggtaaatatgtgcaaatatatgggtatccggccttttggtacagatcactacttgaggttcatgcttcgcaaaaaactgcaagacattaagaatgatgataagatgattcaagctgagggtgttgaatctctttctgaagaggagcttcggcaagcctgtcgggaacgtggtcacctaggtctactgtcaactgaagagatgagacagcagctccgagactggttggatctctcattaaatcatgcagtgccatcttcacttctcatactttcaagagcttttactgtatctgggaaagtgaaacctgaggaagctgttgtagcaacactatcttcactaccggatgaagttgtggatacagttggaacagtactgccatctgaagattcagtttctgagaggaggagaaaacttgaatttcttgagatgcaagaagaacttatcaaggaggaagagaaaaggaaggagaaagaagaaaaagcaaaacaagaggaagaggaaaaggcaaagctcaaagaaacgaagggttctgctgaagatttagctttgaaagaaatgattgaggctactgctagggaagaggaactgcgaaaggcaaaacaacacgacagggaaaaactctgtaatatcggccgagcattggcagtgctcgcatctgcatcatctgtaagcaaggagcgtcaggagttcttgggacttgtcaacaaggagatagaactatacaactcaatgcttgaaaaggagggtgcagaagaagctaagagagcatacatagctgctagagaggaatcagaccatcatgctgaggctgctgcagaagaaaaaatttcatcagcacttattgagaaggttgatgctatgctccaagaattagaaaaggagattgatgatgtggatgcacaaattggaaatcgttggcaactgcttgataaggaccatgatggcaaagtgacccctgaagaggtggcggcggcggcagcttatctcaaggacaccatagggaaagaaggcgtgcaagagctcatcagcaacctttctaaagacacagaaggaaaaatccttgttgaagatattgtgaagctagcatcccaaacagaaaacaatgaagaggaagaggaagcacggtagatgggagagtatatggaaacatcacactcgttcagcagtcaaaactcatgtattgaaaggcaatacgtccatttcttgtgtctcttgactgactttgatagtgacttccaattagcaaggtagattttctgtagaaaggctcatgctgacatgcatttagttagccgccgtgttgtgatttggcaggtaaaattgcaaccaaaatttagaccggttgcatggacgtggataatacagatcaattgtatttgttactactatgcaatcccgaaatattggatctgtttcaaattctcaagtaatcattgatggatgctatttattgaccataaagcttacgg

SEQ ID NO: 55223 - DNA, 2856 bp, Zea Mays
ctacgtttctttcttcctccacacgcctgcttgttcacctccatggctgatggctccatctcctcctgtccctaaccccctccggccctcccctcctccaaagccctaaaccccacgtagctcggtgtgtcagtccactcgcccgcccggtcggcgccgcacccatctttcggattctaccctaaaggcatgaccttggtcttccaatctggaaattgagtagcaatcaagtatggctgcaagagcaatcacgaggagaaggaagtatcttttcgaccatgttaaaacacctaacctctcatcttcatcctctactttccaacatggaagaattggttctgaagatgagccaaaaataacactactgtttctggagcaaagctctagggattcaagatctgagaaggagcaatactgtgtgaatttgactaataggaatttggcaggtattgctaatagatttctgcgacgtccagctcatgggatatctctttcatattatggaattggaaagaatgactttgggttgccactgggagctagatctatgctgcagtcagttcgtgcatcatcaactgcaaccgcagggcaacctaagttggatattgatgacgaacagagtggggatcagaagcaaaatagaaagaaaaaagagacatccccagaggaatgtgatcaggctgtggaaggcctaagcactgcaaaagctaaagccaaagctaaacaggtccaagaatctctcaaggctagccaatcggccatgcagaaattctgggcaaggcttttgggtattggtcctgctctgcgagctgtggcttcaatgagcagggctgattgggctgcaaagcttaagcattggaaggctgaatttgttactacactgcagcattactggttagggacaaagctactatgggcagatgttagaatctcatcaagattactggtgaaacttgctggtggaaaaagcctttctagaagagagaggcaacagctgacacgcacaacagctgatatcttcaggctggtaccatttgctgtgttcatcgttgttcctttcatggagttcttactgccagtgttcctgaagttatttccaaacatgcttccatcaactttccaagacaaaatgaaagaagaggaagcattgaagaggaaactaaaagcaaggatggaatatgcaaagtttttgcaagatacagcaaaagaaatggcaaaggaagtccaaacatcacgtagtggggatataaaacaaactgctgaagatctggacgagtttttgaacaaggttaggagaggtgaacgggtctccaatgacgaaatcttgagctttgcgaagcttttcaatgatgaacttactttggataacatgagcatatcacgcttggtaaatatgtgcaaatatatgggtatccggccttttggtacagatcactacttgaggttcatgcttcgcaaaaaactgcaagacattaagaatgatgataagatgattcaagctgagggtgttgaatctctttctgaagaggagcttcggcaagcctgtcgggaacgtggtcacctaggtctactgtcaactgaagagatgagacagcagctccgagactggttggatctctcattaaatcatgcagtgccatcttcacttctcatactttcaagagcttttactgtatctgggaaagtgaaacctgaggaagctgttgtagcaacactatcttcactaccggatgaagttgtggatacagttggaacagtactgccatctgaagattcagtttctgagaggaggagaaaacttgaatttcttgagatgcaagaagaacttatcaaggaggaagagaaaaggaaggagaaagaagaaaaagcaaaacaagaggaagaggaaaaggcaaagctcaaagaaacgaagggttctgctgaagatttagctttgaaagaaatgattgaggctactgctagggaagaggaactgcgaaaggcaaaacaacacgacagggaaaaactctgtaatatcggccgagcattggcagtgctcgcatctgcatcatctgtaagcaaggagcgtcaggagttcttgggacttgtcaacaaggagatagaactatacaactcaatgcttgaaaaggagggtgcagaagaagctaagagagcatacatagctgctagagaggaatcagaccatcatgctgaggctgctgcagaagaaaaaatttcatcagcacttattgagaaggttgatgctatgctccaagaattagaaaaggagattgatgatgtggatgcacaaattggaaatcgttggcaactgcttgataaggaccatgatggcaaagtgacccctgaagaggtggcggcggcggcagcttatctcaaggacaccatagggaaagaaggcgtgcaagagctcatcagcaacctttctaaagacacagaaggaaaaatccttgttgaagatattgtgaagctagcatcccaaacagaaaacaatgaagaggaagaggaagcacggtagatgggagagtatatggaaacatcacactcgttcagcagtcaaaactcatgtattgaaaggcaatacgtccatttcttgtgtctcttgactgactttgatagtgacttccaattagcaaggtagattttctgtagaaaggctcatgctgacatgcatttagttagccgccgtgttgtgatttggcaggtaaaattgcaaccaaaatttagaccggttgcatggacgtggataatacagatcaattgtatttgttactactatgcaatcccgaaatattggatctgtttcaaattctcaagtaatcattgatggatgctatttattgaccataaagcttacgg

SEQ ID NO: 55224 - DNA, 1714 bp, Zea Mays
cgtttctttcttcctccacacgcctgcttgttcacctccatggctgatggctccatctcctcctgtccctaaccccctccggccctcccctcctccaaagccctaaaccccacgtagctcggtgtgtcagtccactcgcccgcccggtcggcgccgcacccatctttcggattctaccctaaaggcatgaccttggtcttccaatctggaaattgagtagcaatcaagtatggctgcaagagcaatcacgaggagaaggaagtatcttttcgaccatgttaaaacacctaacctctcatcttcatcctctactttccaacatggaagaattggttctgaagatgagccaaaaataacactactgtttctggagcaaagctctagggattcaagatctgagaaggagcaatactgtgtgaatttgactaataggaatttggcaggtattgctaatagatttctgcgacgtccagctcatgggatatctctttcatattatggaattggaaagaatgactttgggttgccactgggagctagatctatgctgcagtcagttcgtgcatcatcaactgcaaccgcagggcaacctaagttggatattgatgacgaacagagtggggatcagaagcaaaatagaaagaaaaaagagacatccccagaggaatgtgatcaggctgtggaaggcctaagcactgcaaaagctaaagccaaagctaaacaggtccaagaatctctcaaggctagccaatcggccatgcagaaattctgggcaaggcttttgggtattggtcctgctctgcgagctgtggcttcaatgagcaggtctcagttccttcatacctaaatgcgtacatataagaacaatgattgatcggtctctttcttaacttatgaaactttacctctttgtttgttaagggctgattgggctgcaaagcttaagcattggaaggctgaatttgttactacactgcagcattactggttagggacaaagctactatgggcagatgttagaatctcatcaagattactggtgaaacttgctggtggaaaaagcctttctagaagagagaggcaacagctgacacgcacaacagctgatatcttcaggctggtaccatttgctgtgttcatcgttgttcctttcatggagttcttactgccagtgttcctgaagttatttccaaacatgcttccatcaactttccaagacaaaatgaaagaagaggaagcattgaagaggaaactaaaagcaaggatggaatatgcaaagtttttgcaagatacagcaaaagaaatggcaaaggaagtccaaacatcacgtagtggggatataaaacaaactgctgaagatctggacgagtttttgaacaaggttaggagaggtgaacgggtctccaatgacgaaatcttgagctttgcgaagcttttcaatgatgaacttactttggataacatgagcatatcacgcttggtaaatatgtgcaaatatatgggtatccggccttttggtacagatcactacttgaggttcatgcttcgcaaaaaactgcaagacattaagaatgatgataagatgattcaagctgagggtgttgaatctctttctgaagaggagcttcggcaagcctgtcgggaacgtggtcacctaggtctactgtcaactgaagagatgagacagcagcgacacacacttctacagctagtg

SEQ ID NO: 55225 - DNA, 1520 bp, Zea Mays
aaggtctttgcgtagacctgaatgccagcagcagacgcgaaacattacggccattttgaagtatataatactctgagagcaagaggagcaaaagttccgaaaaccagaaagaccccgatggctgtgtcaaatccgaaacaagttccagagtatgaactgaacccacttgaactggagtttcgaagaggagaggaggtcacaaagggtacatatctggcaaaatggtatggctcgaaagtttttgttaagatactagacaaagacagcttctcagatgctgaaagcataaatgcgttcaaacacgagcttaccttacttgagaaagcacgacatcccaatttggtccaatttgttggagctgtcacgcaaaatgtcccgatgatgattgtttcagagtaccatcaaaagggtgatttagccagttatattgagatgaaaggtcggctgaagcctcacaaagctataagatttgctcttgacattgcgaggggactgaattatctccatgagtgcaagcctgagccaatcattcatggaaatttgtcgccaaaaaacatcattcgggacgatgaaggacaacttaaggtggctggttttggatcactgagtttgagtaaagtttctgaagataaagtacaaatggctcagccagttacaaaatttgacaatgtatacatcgctcccgaggtctacaaaaacgaaccatttgacagaagtgtagatgtatttgcatttggtctcattctttatgagatgattgaaggagctcctgcttttcacccaaagccacaagaggaagcagctaagatgatttgcttagaggggctgagaccaccattcaagaataaaccgaaatactaccccagtgatgtgaaagagttgatacaagaatgctgggatccgatgccttccgtcaggccaacattcgcggagataattgtgcgcctgaacaagatacatgcgaactgtgctaagcagggtagctggagagacaccttcaagcttccatggaaacaaactggagagagataattgtaaagccccgcgaggctgccgtgtcaagatttcgccccttcccttcagcaagtgtgagtaaacacgagtcaagaaacgtacagagttacaaacagaaaggcaaagttcctatttagttcaggtttcagaccagtttgtgctttgtagcctgtataactgtatctaggcttatgccaccggcccaatttctcttgagctatcttcatccaaacgggaacaacagagtattaatcagtattctgaacattcagggcgtgcctattccttttgaactcctacgtgaacgttgtaaattctgcacgatttcctttcgtgccttttgtgtacgttgtgctgaaagagaaccagaggcatacgcatatcccgagaaaatgctgcagcgacgaaggaaaagcacagcgaagaaacgttcgccgctcaccagtggcacgatgagccaggttcacaacgcgcaggccgtgcctgtgttcggccccgggatacgg

SEQ ID NO: 55226 - DNA, 1626 bp, Zea Mays
gtagtttcgatatgcctcagttcattgccagcagcagacgcgaaacattacggccattttgaagtatataatactctgagagcaagaggagcaaaagttccgaaaaccagaaagaccccgatggctgtgtcaaatccgaaacaagttccagagtatgaactgaacccacttgaactggagtttcgaagaggagaggaggtcacaaagggtacatatctggcaaaatggtatggctcgaaagtttttgttaagatactagacaaagacagcttctcagatgctgaaagcataaatgcgttcaaacacgagcttaccttacttgagaaagcacgacatcccaatttggtccaatttgttggagctgtcacgcaaaatgtcccgatgatgattgtttcagagtaccatcaaaagggtgatttagccagttatattgagatgaaaggtcggctgaagcctcacaaagctataagatttgctcttgacattgcgaggggactgaattatctccatgagtgcaagcctgagccaatcattcatggaaatttgtcgccaaagtaagctcattaagcattattccatcgttgaattcgtgcaagacttttagatataagtggctacatgtatgctgtacgctatgatactttggtaaggttgcagaaacatcattcgggacgatgaaggacaacttaaggtggctggttttggatcactgagtttgagtaaagtttctgaagataaagtacaaatggctcagccagttacaaaatttgacaatgtatacatcgctcccgaggtctacaaaaacgaaccatttgacagaagtgtagatgtatttgcatttggtctcattctttatgagatgattgaaggagctcctgcttttcacccaaagccacaagaggaagcagctaagatgatttgcttagaggggctgagaccaccattcaagaataaaccgaaatactaccccagtgatgtgaaagagttgatacaagaatgctgggatccgatgccttccgtcaggccaacattcgcggagataattgtgcgcctgaacaagatacatgcgaactgtgctaagcagggtagctggagagacaccttcaagcttccatggaaacaaactggagagagataattgtaaagccccgcgaggctgccgtgtcaagatttcgccccttcccttcagcaagtgtgagtaaacacgagtcaagaaacgtacagagttacaaacagaaaggcaaagttcctatttagttcaggtttcagaccagtttgtgctttgtagcctgtataactgtatctaggcttatgccaccggcccaatttctcttgagctatcttcatccaaacgggaacaacagagtattaatcagtattctgaacattcagggcgtgcctattccttttgaactcctacgtgaacgttgtaaattctgcacgatttcctttcgtgccttttgtgtacgttgtgctgaaagagaaccagaggcatacgcatatcccgagaaaatgctgcagcgacgaaggaaaagcacagcgaagaaacgttcgccgctcaccagtggcacgatgagccaggttcacaacgcgcaggccgtgcctgtgttcggccccgggatacgg

SEQ ID NO: 55227 - DNA, 2210 bp, Zea Mays
tcgagtcgtcgcccaatcggttgaatcggggagcagaggcatcgcccccacgcccaatcatccgcccccaaatccccagaagcacccacccctccgcgcgcgagatcccacgcgcgtccctcccacagtcccaccaccccccggggacgcggactccctcctccgtcctccccccccccccgcggtcccagcccagcggtggccctgcgacgaccgatggacgcggcggcgaagaagatgacgcggagcatctcgcggcagctctcgtcgggggcggcgcggctgtggcgccagctgtcgctggacccgcacaccccgcgccgcggcggcccgggcccggtcccagcggcgggggccgggcagacgcggttcgcgatcgccaggcagtcgtcgctcgacccgacgccgcgcggcgggccggacgggtcgtcggcgcaccagcagctcgcggtgccggagaacctggacgccaccatgcgcctgctcttcgccgcgtgccagggggatgccgccggggtcgaggagctgctcaggagcggggtggacgtcgacagcatcgacctcgacggacgtacggcgctgcacatcgcggcctgcgaggggcagggggaggtcgtgcgcctgctgctcgactggaaggccaacatcaacgcccgcgaccgctggggtagcacgccagcagcagacgcgaaacattacggccattttgaagtatataatactctgagagcaagaggagcaaaagttccgaaaaccagaaagaccccgatggctgtgtcaaatccgaaacaagttccagagtatgaactgaacccacttgaactggagtttcgaagaggagaggaggtcacaaagggtacatatctggcaaaatggtatggctcgaaagtttttgttaagatactagacaaagacagcttctcagatgctgaaagcatgtaagggctacctacattaactcgtatctcaaaaatgcgttcaaacacgagcttaccttacttgagaaagcacgacatcccaatttggtccaatttgttggagctgtcacgcaaaatgtcccgatgatgattgtttcagagtaccatcaaaagggtgatttagccagttatattgagatgaaaggtcggctgaagcctcacaaagctataagatttgctcttgacattgcgaggggactgaattatctccatgagtgcaagcctgagccaatcattcatggaaatttgtcgccaaagttgcagaaacatcattcgggacgatgaaggacaacttaaggtggctggttttggatcactgagtttgagtaaagtttctgaagataaagtacaaatggctcagccagttacaaaatttgacaatgtatacatcgctcccgaggtctacaaaaacgaaccatttgacagaagtgtagatgtatttgcatttggtctcattctttatgagatgattgaaggagctcctgcttttcacccaaagccacaagaggaagcagctaagatgatttgcttagaggggctgagaccaccattcaagaataaaccgaaatactaccccagtgatgtgaaagagttgatacaagaatgctgggatccgatgccttccgtcaggccaacattcgcggagataattgtgcgcctgaacaagatacatgcgaactgtgctaagcagggtagctggagagacaccttcaagcttccatggaaacaaactggagagagataattgtaaagccccgcgaggctgccgtgtcaagatttcgccccttcccttcagcaagtgtgagtaaacacgagtcaagaaacgtacagagttacaaacagaaaggcaaagttcctatttagttcaggtttcagaccagtttgtgctttgtagcctgtataactgtatctaggcttatgccaccggcccaatttctcttgagctatcttcatccaaacgggaacaacagagtattaatcagtattctgaacattcagggcgtgcctattccttttgaactcctacgtgaacgttgtaaattctgcacgatttcctttcgtgccttttgtgtacgttgtgctgaaagagaaccagaggcatacgcatatcccgagaaaatgctgcagcgacgaaggaaaagcacagcgaagaaacgttcgccgctcaccagtggcacgatgagccaggttcacaacgcgcaggccgtgcctgtgttcggccccgggatacgg

SEQ ID NO: 55228 - DNA, 2331 bp, Zea Mays
cccccacccacccaaccgcgctcctctgctagtctgctctgcaactgcaagacgattcgtttccatcgccatcggtgctgctcgagctcgactgctgcagctgctaccagtagtgagctgtgtgtgtgtgtagtatatacaatattcgtataaactgctggtctcaatcgagtcgtcgcccaatcggttgaatcggggagcagaggcatcgcccccacgcccaatcatccgcccccaaatccccagaagcacccacccctccgcgcgcgagatcccacgcgcgtccctcccacagtcccaccaccccccggggacgcggactccctcctccgtcctccccccccccccgcggtcccagcccagcggtggccctgcgacgaccgatggacgcggcggcgaagaagatgacgcggagcatctcgcggcagctctcgtcgggggcggcgcggctgtggcgccagctgtcgctggacccgcacaccccgcgccgcggcggcccgggcccggtcccagcggcgggggccgggcagacgcggttcgcgatcgccaggcagtcgtcgctcgacccgacgccgcgcggcgggccggacgggtcgtcggcgcaccagcagctcgcggtgccggagaacctggacgccaccatgcgcctgctcttcgccgcgtgccagggggatgccgccggggtcgaggagctgctcaggagcggggtggacgtcgacagcatcgacctcgacggacgtacggcgctgcacatcgcggcctgcgaggggcagggggaggtcgtgcgcctgctgctcgactggaaggccaacatcaacgcccgcgaccgctggggtagcacgccagcagcagacgcgaaacattacggccattttgaagtatataatactctgagagcaagaggagcaaaagttccgaaaaccagaaagaccccgatggctgtgtcaaatccgaaacaagttccagagtatgaactgaacccacttgaactggagtttcgaagaggagaggaggtcacaaagggtacatatctggcaaaatggtatggctcgaaagtttttgttaagatactagacaaagacagcttctcagatgctgaaagcataaatgcgttcaaacacgagcttaccttacttgagaaagcacgacatcccaatttggtccaatttgttggagctgtcacgcaaaatgtcccgatgatgattgtttcagagtaccatcaaaagttatattgagatgaaaggtcggctgaagcctcacaaagctataagatttgctcttgacattgcgaggggactgaattatctccatgagtgcaagcctgagccaatcattcatggaaatttgtcgccaaagttgcagaaacatcattcgggacgatgaaggacaacttaaggtggctggttttggatcactgagtttgagtaaagtttctgaagataaagtacaaatggctcagccagttacaaaatttgacaatgtatacatcgctcccgaggtctacaaaaacgaaccatttgacagaagtgtagatgtatttgcatttggtctcattctttatgagatgattgaaggagctcctgcttttcacccaaagccacaagaggaagcagctaagatgatttgcttagaggggctgagaccaccattcaagaataaaccgaaatactaccccagtgatgtgaaagagttgatacaagaatgctgggatccgatgccttccgtcaggccaacattcgcggagataattgtgcgcctgaacaagatacatgcgaactgtgctaagcagggtagctggagagacaccttcaagcttccatggaaacaaactggagagagataattgtaaagccccgcgaggctgccgtgtcaagatttcgccccttcccttcagcaagtgtgagtaaacacgagtcaagaaacgtacagagttacaaacagaaaggcaaagttcctatttagttcaggtttcagaccagtttgtgctttgtagcctgtataactgtatctaggcttatgccaccggcccaatttctcttgagctatcttcatccaaacgggaacaacagagtattaatcagtattctgaacattcagggcgtgcctattccttttgaactcctacgtgaacgttgtaaattctgcacgatttcctttcgtgccttttgtgtacgttgtgctgaaagagaaccagaggcatacgcatatcccgagaaaatgctgcagcgacgaaggaaaagcacagcgaagaaacgttcgccgctcaccagtggcacgatgagccaggttcacaacgcgcaggccgtgcctgtgttcggccccgggatacgg

SEQ ID NO: 55229 - DNA, 2346 bp, Zea Mays
gttttattcccccacccacccaaccgcgctcctctgctagtctgctctgcaactgcaagacgattcgtttccatcgccatcggtgctgctcgagctcgactgctgcagctgctaccagtagtgagctgtgtgtgtgtgtagtatatacaatattcgtataaactgctggtctcaatcgagtcgtcgcccaatcggttgaatcggggagcagaggcatcgcccccacgcccaatcatccgcccccaaatccccagaagcacccacccctccgcgcgcgagatcccacgcgcgtccctcccacagtcccaccaccccccggggacgcggactccctcctccgtcctccccccccccccgcggtcccagcccagcggtggccctgcgacgaccgatggacgcggcggcgaagaagatgacgcggagcatctcgcggcagctctcgtcgggggcggcgcggctgtggcgccagctgtcgctggacccgcacaccccgcgccgcggcggcccgggcccggtcccagcggcgggggccgggcagacgcggttcgcgatcgccaggcagtcgtcgctcgacccgacgccgcgcggcgggccggacgggtcgtcggcgcaccagcagctcgcggtgccggagaacctggacgccaccatgcgcctgctcttcgccgcgtgccagggggatgccgccggggtcgaggagctgctcaggagcggggtggacgtcgacagcatcgacctcgacggacgtacggcgctgcacatcgcggcctgcgaggggcagggggaggtcgtgcgcctgctgctcgactggaaggccaacatcaacgcccgcgaccgctggggtagcacgccagcagcagacgcgaaacattacggccattttgaagtatataatactctgagagcaagaggagcaaaagttccgaaaaccagaaagaccccgatggctgtgtcaaatccgaaacaagttccagagtatgaactgaacccacttgaactggagtttcgaagaggagaggaggtcacaaagggtacatatctggcaaaatggtatggctcgaaagtttttgttaagatactagacaaagacagcttctcagatgctgaaagcataaatgcgttcaaacacgagcttaccttacttgagaaagcacgacatcccaatttggtccaatttgttggagctgtcacgcaaaatgtcccgatgatgattgtttcagagtaccatcaaaagggtgatttagccagttatattgagatgaaaggtcggctgaagcctcacaaagctataagatttgctcttgacattgcgaggggactgaattatctccatgagtgcaagcctgagccaatcattcatggaaatttgtcgccaaaaaacatcattcgggacgatgaaggacaacttaaggtggctggttttggatcactgagtttgagtaaagtttctgaagataaagtacaaatggctcagccagttacaaaatttgacaatgtatacatcgctcccgaggtctacaaaaacgaaccatttgacagaagtgtagatgtatttgcatttggtctcattctttatgagatgattgaaggagctcctgcttttcacccaaagccacaagaggaagcagctaagatgatttgcttagaggggctgagaccaccattcaagaataaaccgaaatactaccccagtgatgtgaaagagttgatacaagaatgctgggatccgatgccttccgtcaggccaacattcgcggagataattgtgcgcctgaacaagatacatgcgaactgtgctaagcagggtagctggagagacaccttcaagcttccatggaaacaaactggagagagataattgtaaagccccgcgaggctgccgtgtcaagatttcgccccttcccttcagcaagtgtgagtaaacacgagtcaagaaacgtacagagttacaaacagaaaggcaaagttcctatttagttcaggtttcagaccagtttgtgctttgtagcctgtataactgtatctaggcttatgccaccggcccaatttctcttgagctatcttcatccaaacgggaacaacagagtattaatcagtattctgaacattcagggcgtgcctattccttttgaactcctacgtgaacgttgtaaattctgcacgatttcctttcgtgccttttgtgtacgttgtgctgaaagagaaccagaggcatacgcatatcccgagaaaatgctgcagcgacgaaggaaaagcacagcgaagaaacgttcgccgctcaccagtggcacgatgagccaggttcacaacgcgcaggccgtgcctgtgttcggccccgggatacgg

SEQ ID NO: 55230 - DNA, 2823 bp, Zea Mays
cacaaaacagaagctctgcaagaatcatccaaatatgtacaccaagagtaccagctggatctatacagaagaaagtacaaaactcatctgcttctacatctcagatgtcaagaataccaaaacaattacgaccttctcttcctaaggtcccaagaagtacttcatctgtgacaaacaatttggaatcacacaaaaaaatagctccagttaaagctgaactagttcacagagtaactggattccctgctagattgaagatcaatcctgtatcttctggacctagcatagagaaggctgtggtgcctgctgttactgccatacatgaagaagccactgtgaaatgcaaaaaaaacccagcacacccacaaattagcccatccaccccctttgatagcactgtgtcaaaacttgctaagccatcagcacttcgattgccttcaccttcacttggttttttcactcaggaaaaagcgcatgtgccacatggtgatgctgctaaaagaaacgtggggaggtgtttctcttcaaatacttcagcgcttgatagacctcccagatacaggcagtctgaggaaagcagactccacctagcaaagcagctgtcaaccaatggcactgttgcttccaatcttgtgctacctgtgactagagagggccatctcaaatctttggtggttccagaaaatgaatcatcgtcaaaagttatcattacatacttagaaaaatctggaaatgtaaataatcaagcaatgccaaaggctgatttcttattggcaggaactggagctactgatactacacaaccaatgaatttagaaaagaaagatgacgctggaaatagtgagacattgcttgtagaaggaatggatgatatcaaagagattgaacctcttgataatttctacgctcctgaagctatttgttcctcaaccattcgacctgttgaggattctttctcgcttgaagccagttattcctcaactaaacctattgtagagagtaaattgtcactctcttgcatttcttctaaagtacactcctctagtgagcttagttgtcaaggcaagtcagtcagtgatcccagtgcagcgatggacatggaaaactctaatgttggagatactgcacttagcgcttctttgtcgaaaggcaggagttgcactccagctcttgatttgttgcaaggattttattcatttgatcgccagaatattgaatgtcctatgctgatggaatcagtatctacaatatgtgcagaccagctgccacattgtgacagtttaagcgatgaaacgccagccctagctggcagtcattcagatttgaatgattctttgtgtgatgaagctaaacctgctttgtcaaaagaaccaaatactgaaggtgaaatggagcttcaaacaaacagtaccatagctgtaaaggaaactccgttgttagatgtggggtgtgggcatattcacaattataggaccacagattgttctacgagattggaagcacctacaccttgtgtggaaagacgtcatgctttattagtagaaccaaatatggaagaaaaaatggtgcttgacacaaacagattgtcagctatacagtacacaccacatatagaaaagaacaaggcactggaaagatcaccggcaaatacaatccgtaaagatcatctgaagaacttgataccatttacagaagaatggcttgctgtcatggagtcttgtgggcagttttggaacaaaagaccggtgctgtgcaaaattctcctcctgacaaaacacctccagaaccgagtccttggtcaccggttaaacggaaggcgcaagatgttggaccatttgactgtacgaagtactccaaaagcatccgaacctctggtacctaactgcagacgtttgagttcacattctatcacggtatagccacggtgataaggtcagggcatccgagcttttggtaccctaactgcagaccttgaccttcacgctctgtcaactgacatggtacagtcactgtgataaggtcagggactcccagccgaacacggcgtaaatacctgctaccgattgtcatttttgaccaaactaactgcgatgtagttcagcagccttgttgacctgcatttttttgcttccccccccccccccccccccccccctttcccccctttttttgttattgtgaaatactgttgagatcacgccccaagcaaacgcttggtaattaagaagggaaaaaagagagagagagaggagaaaggatctattattatgtttgtctcgattgtccttttttggccattagtaggtgactattgatgtctgaaattccgaacgggatacctgatcgaattccttgagagttggtcaggccaatgcagaattgaggtttcacggcggcaagccggcaatcctgctgccccagccaccagagaagagagtcagattttctggtgaacacgagagagcatcttgatgtgcatcttccattcttcctacctcgtcctgttccccttctctagtgtcgtgtagcgctcagcgttgttatgtgtttggttgcagggcaactgaaacagttggagacagaacagctggaacagccacgtcctgttgccctattttgtccgtctaattctgacgaatagctagagatggttctgtcccaatttatgactctgtactaaacaatcttatttaaaaatcgttctatcgttgcaactaaacacatactggttttctggacggaatgtgtgttccattgttttagtgtttgttagactatttcagcaacttacctatccatgtatgcaaactccattataggaac

SEQ ID NO: 55231 - DNA, 2289 bp, Zea Mays
aagccgcagggaattcacatggaaaattgcctgcaagatatcacagggcagaaagccagggaaggaaattgttttcttcagcaaaaactcctcagggggacaatcagaaagaatctgctagggaacacaaaacagaagctctgcaagaatcatccaaatatgtacaccaagagtaccagctggatctatatatcctaatgaagttttaggcaggattgagcaggccttaaagttttttcccttgataacaatgtcaagaataccaaaacaattacgaccttctcttcctaaggtcccaagaagtacttcatctgtgacaaacaatttggaatcacacaaaaaaatagctccagttaaagctgaactagttcacagagtaactggattccctgctagattgaagatcaatcctgtatcttctggacctagcatagagaaggctgtggtgcctgctgttactgccatacatgaagaagccactgtgaaatgcaaaaaaaacccagcacacccacaaattagcccatccaccccctttgatagcactgtgtcaaaacttgctaagccatcagcacttcgattgccttcaccttcacttggttttttcactcaggaaaaagcgcatgtgccacatggtgatgctgctaaaagaaacgtggggaggtgtttctcttcaaatacttcagcgcttgatagacctcccagatacaggcagtctgaggaaagcagactccacctagcaaagcagctgtcaaccaatggcactgttgcttccaatcttgtgctacctgtgactagagagggccatctcaaatctttggtggttccagaaaatgaatcatcgtcaaaagttatcattacatacttagaaaaatctggaaatgtaaataatcaagcaatgccaaaggctgatttcttattggcaggaactggagctactgatactacacaaccaatgaatttagaaaagaaagatgacgctggaaatagtgagacattgcttgtagaaggaatggatgatatcaaagagattgaacctcttgataatttctacgctcctgaagctatttgttcctcaaccattcgacctgttgaggattctttctcgcttgaagccagttattcctcaactaaacctattgtagagagtaaattgtcactctcttgcatttcttctaaagtacactcctctagtgagcttagttgtcaaggcaagtcagtcagtgatcccagtgcagcgatggacatggaaaactctaatgttggagatactgcacttagcgcttctttgtcgaaaggcaggagttgcactccagctcttgatttgttgcaaggattttattcatttgatcgccagaatattgaatgtcctatgctgatggaatcagtatctacaatatgtgcagaccagctgccacattgtgacagtttaagcgatgaaacgccagccctagctggcagtcattcagatttgaatgattctttgtgtgatgaagctaaacctgctttgtcaaaagaaccaaatactgaaggtgaaatggagcttcaaacaaacagtaccatagctgtaaaggaaactccgttgttagatgtggggtgtgggcatattcacaattataggaccacagattgttctacgagattggaagcacctacaccttgtgtggaaagacgtcatgctttattagtagaaccaaatatggaagaaaaaatggtgcttgacacaaacagattgtcagctatacagtacacaccacatatagaaaagaacaaggcactggaaagatcaccggcaaatacaatccgtaaagatcatctgaagaacttgataccatttacagaagaatggcttgctgtcatggagtcttgtgggcaggaagttttggaacaaaagaccggtgctgtgcaaaattctcctcctgacaaaacacctccagaaccgagtccttggtcaccggttaaacggaaggcgcaagatgttggaccatttgactgtacgaagtactccaaaagcatccgaacctctgggcaactgaaacagttggagacagaacagctggaacagccacgtcctgttgccctattttgtccgtctaattctgacgaatagctagagatggttctgtcccaatttatgactctgtactaaacaatcttatttaaaaatcgttctatcgttgcaactaaacacatactggttttctggacggaatgtgtgttccattgttttagtgtttgttagactatttcagcaacttacctatccatgtatgcaaactccattataggaac

SEQ ID NO: 55232 - DNA, 2620 bp, Zea Mays
atggcgtcgccgcgccgcattccctctgtgcctgccagatccggcaacaaagagaatatatctcaagatggagaagctcccttggattttgcaaccttgcctaaagaagggcctgccactacaaggcggaagaagaagcttgcaggtttcaacttgaggaaaagcattgcctggaatcctgcttttttaactgaagaaggtgttttggataactcggagctttctgtgcttactggctcccaaccgatggcaaataggagccctggatcaggggtcagtagtataatgtccccatcctgtcagtcagggagatatggtaacacatatgtacggaaggaagccgcagggaattcacatggaaaattgcctgcaagatatcacagggcagaaagccagggaaggaaattgttttcttcagcaaaaactcctcagggggacaatcagaaagaatctgctggaacacaaaacagaagctctgcaagaatcatccaaatatgtacaccaagagtaccagctggatctatatatcctaatgaagttttaggcaggattgagcaggccttaaagttttttcccttgataacaatgtcaagaataccaaaacaattacgaccttctcttcctaaggtcccaagaagtacttcatctgtgacaaacaatttggaatcacacaaaaaaatagctccagttaaagctgaactagttcacagagtaactggattccctgctagattgaagatcaatcctgtatcttctggacctagcatagagaaggctgtggtgcctgctgttactgccatacatgaagaagccactgtgaaatgcaaaaaaaacccagcacacccacaaattagcccatccaccccctttgatagcactgtgtcaaaacttgctaagccatcagcacttcgattgccttcaccttcacttggttttttcactcaggaaaaagcgcatgtgccacatggtgatgctgctaaaagaaacgtggggaggtgtttctcttcaaatacttcagcgcttgatagacctcccagatacaggcagtctgaggaaagcagactccacctagcaaagcagctgtcaaccaatggcactgttgcttccaatcttgtgctacctgtgactagagagggccatctcaaatctttggtggttccagaaaatgaatcatcgtcaaaagttatcattacatacttagaaaaatctggaaatgtaaataatcaagcaatgccaaaggctgatttcttattggcaggaactggagctactgatactacacaaccaatgaatttagaaaagaaagatgacgctggaaatagtgagacattgcttgtagaaggaatggatgatatcaaagagattgaacctcttgataatttctacgctcctgaagctatttgttcctcaaccattcgacctgttgaggattctttctcgcttgaagccagttattcctcaactaaacctattgtagagagtaaattgtcactctcttgcatttcttctaaagtacactcctctagtgagcttagttgtcaaggcaagtcagtcagtgatcccagtgcagcgatggacatggaaaactctaatgttggagatactgcacttagcgcttctttgtcgaaaggcaggagttgcactccagctcttgatttgttgcaaggattttattcatttgatcgccagaatattgaatgtcctatgctgatggaatcagtatctacaatatgtgcagaccagctgccacattgtgacagtttaagcgatgaaacgccagccctagctggcagtcattcagatttgaatgattctttgtgtgatgaagctaaacctgctttgtcaaaagaaccaaatactgaaggtgaaatggagcttcaaacaaacagtaccatagctgtaaaggaaactccgttgttagatgtggggtgtgggcatattcacaattataggaccacagattgttctacgagattggaagcacctacaccttgtgtggaaagacgtcatgctttattagtagaaccaaatatggaagaaaaaatggtgcttgacacaaacagattgtcagctatacagtacacaccacatatagaaaagaacaaggcactggaaagatcaccggcaaatacaatccgtaaagatcatctgaagaacttgataccatttacagaagaatggcttgctgtcatggagtcttgtgggcagttttggaacaaaagaccggtgctgtgcaaaattctcctcctgacaaaacacctccagaaccgagtccttggtcaccggttaaacggaaggcgcaagatgttggaccatttgactgtacgaagtactccaaaagcatccgaacctctgggcaactgaaacagttggagacagaacagctggaacagccacgtcctgttgccctattttgtccgtctaattctgacgaatagctagagatggttctgtcccaatttatgactctgtactaaacaatcttatttaaaaatcgttctatcgttgcaactaaacacatactggttttctggacggaatgtgtgttccattgttttagtgtttgttagactatttcagcaacttacctatccatgtatgcaaactccattataggaac

SEQ ID NO: 55233 - DNA, 3363 bp, Zea Mays
caaaatctcaaaccgtcaaacgggacctgatacctgagatacgcgcatggcgtcgccgcgccgcattccctctgtgcctgccagatccggcaacaaagagaatatatctcaagatggagaagctcccttggattttgcaaccttgcctaaagaagggcctgccactacaaggcggaagaagaagcttgcaggtttcaacttgaggaaaagcattgcctggaatcctgcttttttaactgaagaaggtttaatagtaacatcaaagaactttgtaggtgttttggataactcggagctttctgtgcttactggctcccaaccgatggcaaataggagccctggatcaggggtcagtagtataatgtccccatcctgtcagtcagggagatatggtaacacatatgtacggaaggaagccgcagggaattcacatggaaaattgcctgcaagatatcacagggcagaaagccagggaaggaaattgttttcttcagcaaaaactcctcagggggacaatcagaaagaatctgctggaacacaaaacagaagctctgcaagaatcatccaaatatgtacaccaagagtaccagctggatctatacagaagaaagtacaaaactcatctgcttctacatctcagatgtcaagaataccaaaacaattacgaccttctcttcctaaggtcccaagaagtacttcatctgtgacaaacaatttggaatcacacaaaaaaatagctccagttaaagctgaactagttcacagagtaactggattccctgctagattgaagatcaatcctgtatcttctggacctagcatagagaaggctgtggtgcctgctgttactgccatacatgaagaagccactgtgaaatgcaaaaaaaacccagcacacccacaaattagcccatccaccccctttgatagcactgtgtcaaaacttgctaagccatcagcacttcgattgccttcaccttcacttggttttttcactcaggaaaaagcgcatgtgccacatggtgatgctgctaaaagaaacgtggggaggtgtttctcttcaaatacttcagcgcttgatagacctcccagatacaggcagtctgaggaaagcagactccacctagcaaagcagctgtcaaccaatggcactgttgcttccaatcttgtgctacctgtgactagagagggccatctcaaatctttggtggttccagaaaatgaatcatcgtcaaaagttatcattacatacttagaaaaatctggaaatgtaaataatcaagcaatgccaaaggctgatttcttattggcaggaactggagctactgatactacacaaccaatgaatttagaaaagaaagatgacgctggaaatagtgagacattgcttgtagaaggaatggatgatatcaaagagattgaacctcttgataatttctacgctcctgaagctatttgttcctcaaccattcgacctgttgaggattctttctcgcttgaagccagttattcctcaactaaacctattgtagagagtaaattgtcactctcttgcatttcttctaaagtacactcctctagtgagcttagttgtcaaggcaagtcagtcagtgatcccagtgcagcgatggacatggaaaactctaatgttggagatactgcacttagcgcttctttgtcgaaaggcaggagttgcactccagctcttgatttgttgcaaggattttattcatttgatcgccagaatattgaatgtcctatgctgatggaatcagtatctacaatatgtgcagaccagctgccacattgtgacagtttaagcgatgaaacgccagccctagctggcagtcattcagatttgaatgattctttgtgtgatgaagctaaacctgctttgtcaaaagaaccaaatactgaaggtgaaatggagcttcaaacaaacagtaccatagctgtaaaggaaactccgttgttagatgtggggtgtgggcatattcacaattataggaccacagattgttctacgagattggaagcacctacaccttgtgtggaaagacgtcatgctttattagtagaaccaaatatggaagaaaaaatggtgcttgacacaaacagattgtcagctatacagtacacaccacatatagaaaagaacaaggcactggaaagatcaccggcaaatacaatccgtaaagatcatctgaagaacttgataccatttacagaagaatggcttgctgtcatggagtcttgtgggcaggaagttttggaacaaaagaccggtgctgtgcaaaattctcctcctgacaaaacacctccagaaccgagtccttggtcaccggttaaacggaaggcgcaagatgttggaccatttgactgtacgaagtactccaaaagcatccgaacctctggtacctaactgcagacgtttgagttcacattctatcacggtatagccacggtgataaggtcagggcatccgagcttttggtaccctaactgcagaccttgaccttcacgctctgtcaactgacatggtacagtcactgtgataaggtcagggactcccagccgaacacggcgtaaatacctgctaccgattgtcatttttgaccaaactaactgcgatgtagttcagcagccttgttgacctgcatttttttgcttccccccccccccccccccccccccctttcccccctttttttgttattgtgaaatactgttgagatcacgccccaagcaaacgcttggtaattaagaagggaaaaaagagagagagagaggagaaaggatctattattatgtttgtctcgattgtccttttttggccattagtaggtgactattgatgtctgaaattccgaacgggatacctgatcgaattccttgagagttggtcaggccaatgcagaattgaggtttcacggcggcaagccggcaatcctgctgccccagccaccagagaagagagtcagattttctggtgaacacgagagagcatcttgatgtgcatcttccattcttcctacctcgtcctgttccccttctctagtgtcgtgtagcgctcagcgttgttatgtgtttggttgcagggcaactgaaacagttggagacagaacagctggaacagccacgtcctgttgccctattttgtccgtctaattctgacgaatagctagagatggttctgtcccaatttatgactctgtactaaacaatcttatttaaaaatcgttctatcgttgcaactaaacacatactggttttctggacggaatgtgtgttccattgttttagtgtttgttagactatttcagcaacttacctatccatgtatgcaaactccattataggaac

SEQ ID NO: 55234 - DNA, 3044 bp, Zea Mays
cccaaaatctcaaaccgtcaaacgggacctgatacctgagatacgcgcatggcgtcgccgcgccgcattccctctgtgcctgccagatccggcaacaaagagaatatatctcaagatggagaagctcccttggattttgcaaccttgcctaaagaagggcctgccactacaaggcggaagaagaagcttgcaggtttcaacttgaggaaaagcattgcctggaatcctgcttttttaactgaagaaggtgttttggataactcggagctttctgtgcttactggctcccaaccgatggcaaataggagccctggatcagggatgtcaagaataccaaaacaattacgaccttctcttcctaaggtcccaagaagtacttcatctgtgacaaacaatttggaatcacacaaaaaaatagctccagttaaagctgaactagttcacagagtaactggattccctgctagattgaagatcaatcctgtatcttctggacctagcatagagaaggctgtggtgcctgctgttactgccatacatgaagaagccactgtgaaatgcaaaaaaaacccagcacacccacaaattagcccatccaccccctttgatagcactgtgtcaaaacttgctaagccatcagcacttcgattgccttcaccttcacttggttttttcactcaggaaaaagcgcatgtgccacatggtgatgctgctaaaagaaacgtggggaggtgtttctcttcaaatacttcagcgcttgatagacctcccagatacaggcagtctgaggaaagcagactccacctagcaaagcagctgtcaaccaatggcactgttgcttccaatcttgtgctacctgtgactagagagggccatctcaaatctttggtggttccagaaaatgaatcatcgtcaaaagttatcattacatacttagaaaaatctggaaatgtaaataatcaagcaatgccaaaggctgatttcttattggcaggaactggagctactgatactacacaaccaatgaatttagaaaagaaagatgacgctggaaatagtgagacattgcttgtagaaggaatggatgatatcaaagagattgaacctcttgataatttctacgctcctgaagctatttgttcctcaaccattcgacctgttgaggattctttctcgcttgaagccagttattcctcaactaaacctattgtagagagtaaattgtcactctcttgcatttcttctaaagtacactcctctagtgagcttagttgtcaaggcaagtcagtcagtgatcccagtgcagcgatggacatggaaaactctaatgttggagatactgcacttagcgcttctttgtcgaaaggcaggagttgcactccagctcttgatttgttgcaaggattttattcatttgatcgccagaatattgaatgtcctatgctgatggaatcagtatctacaatatgtgcagaccagctgccacattgtgacagtttaagcgatgaaacgccagccctagctggcagtcattcagatttgaatgattctttgtgtgatgaagctaaacctgctttgtcaaaagaaccaaatactgaaggtgaaatggagcttcaaacaaacagtaccatagctgtaaaggaaactccgttgttagatgtggggtgtgggcatattcacaattataggaccacagattgttctacgagattggaagcacctacaccttgtgtggaaagacgtcatgctttattagtagaaccaaatatggaagaaaaaatggtgcttgacacaaacagattgtcagctatacagtacacaccacatatagaaaagaacaaggcactggaaagatcaccggcaaatacaatccgtaaagatcatctgaagaacttgataccatttacagaagaatggcttgctgtcatggagtcttgtgggcaggaagttttggaacaaaagaccggtgctgtgcaaaattctcctcctgacaaaacacctccagaaccgagtccttggtcaccggttaaacggaaggcgcaagatgttggaccatttgactgtacgaagtactccaaaagcatccgaacctctggtacctaactgcagacgtttgagttcacattctatcacggtatagccacggtgataaggtcagggcatccgagcttttggtaccctaactgcagaccttgaccttcacgctctgtcaactgacatggtacagtcactgtgataaggtcagggactcccagccgaacacggcgtaaatacctgctaccgattgtcatttttgaccaaactaactgcgatgtagttcagcagccttgttgacctgcatttttttgcttccccccccccccccccccccccccctttcccccctttttttgttattgtgaaatactgttgagatcacgccccaagcaaacgcttggtaattaagaagggaaaaaagagagagagagaggagaaaggatctattattatgtttgtctcgattgtccttttttggccattagtaggtgactattgatgtctgaaattccgaacgggatacctgatcgaattccttgagagttggtcaggccaatgcagaattgaggtttcacggcggcaagccggcaatcctgctgccccagccaccagagaagagagtcagattttctggtgaacacgagagagcatcttgatgtgcatcttccattcttcctacctcgtcctgttccccttctctagtgtcgtgtagcgctcagcgttgttatgtgtttggttgcagggcaactgaaacagttggagacagaacagctggaacagccacgtcctgttgccctattttgtccgtctaattctgacgaatagctagagatggttctgtcccaatttatgactctgtactaaacaatcttatttaaaaatcgttctatcgttgcaactaaacacatactggttttctggacggaatgtgtgttccattgttttagtgtttgttagactatttcagcaacttacctatccatgtatgcaaactccattataggaac

SEQ ID NO: 55235 - DNA, 2683 bp, Zea Mays
ccactgtctcctctacctcctccgtcctccggatcccaaaatctcaaaccgtcaaacgggacctgatacctgagatacgcgcatggcgtcgccgcgccgcattccctctgtgcctgccagatccggcaacaaagagaatatatctcaagatggagaagctcccttggattttgcaaccttgcctaaagaagggcctgccactacaaggcggaagaagaagcttgcaggtttcaacttgaggaaaagcattgcctggaatcctgcttttttaactgaagaaggtgttttggataactcggagctttctgtgcttactggctcccaaccgatggcaaataggagccctggatcaggggtcagtagtataatgtccccatcctgtcagtcagggagatatggtaacacatatgtacggaaggaagccgcagggaattcacatggaaaattgcctgcaagatatcacagggcagaaagccagggaaggaaattgttttcttcagcaaaaactcctcagggggacaatcagaaagaatctgctggaacacaaaacagaagctctgcaagaatcatccaaatatgtacaccaagagtaccagctggatctatagaagaaagtacaaaactcatctgcttctacatctcagatgtcaagaataccaaaacaattacgaccttctcttcctaaggtcccaagaagtacttcatctgtgacaaacaatttggaatcacacaaaaaaatagctccagttaaagctgaactagttcacagagtaactggattccctgctagattgaagatcaatcctgtatcttctggacctagcatagagaaggctgtggtgcctgctgttactgccatacatgaagaagccactgtgaaatgcaaaaaaaacccagcacacccacaaattagcccatccaccccctttgatagcactgtgtcaaaacttgctaagccatcagcacttcgattgccttcaccttcacttggttttttcactcaggaaaaagcgcatgtgccacatggtgatgctgctaaaagaaacgtggggaggtgtttctcttcaaatacttcagcgcttgatagacctcccagatacaggcagtctgaggaaagcagactccacctagcaaagcagctgtcaaccaatggcactgttgcttccaatcttgtgctacctgtgactagagagggccatctcaaatctttggtggttccagaaaatgaatcatcgtcaaaagttatcattacatacttagaaaaatctggaaatgtaaataatcaagcaatgccaaaggctgatttcttattggcaggaactggagctactgatactacacaaccaatgaatttagaaaagaaagatgacgctggaaatagtgagacattgcttgtagaaggaatggatgatatcaaagagattgaacctcttgataatttctacgctcctgaagctatttgttcctcaaccattcgacctgttgaggattctttctcgcttgaagccagttattcctcaactaaacctattgtagagagtaaattgtcactctcttgcatttcttctaaagtacactcctctagtgagcttagttgtcaaggcaagtcagtcagtgatcccagtgcagcgatggacatggaaaactctaatgttggagatactgcacttagcgcttctttgtcgaaaggcaggagttgcactccagctcttgatttgttgcaaggattttattcatttgatcgccagaatattgaatgtcctatgctgatggaatcagtatctacaatatgtgcagaccagctgccacattgtgacagtttaagcgatgaaacgccagccctagctggcagtcattcagatttgaatgattctttgtgtgatgaagctaaacctgctttgtcaaaagaaccaaatactgaaggtgaaatggagcttcaaacaaacagtaccatagctgtaaaggaaactccgttgttagatgtggggtgtgggcatattcacaattataggaccacagattgttctacgagattggaagcacctacaccttgtgtggaaagacgtcatgctttattagtagaaccaaatatggaagaaaaaatggtgcttgacacaaacagattgtcagctatacagtacacaccacatatagaaaagaacaaggcactggaaagatcaccggcaaatacaatccgtaaagatcatctgaagaacttgataccatttacagaagaatggcttgctgtcatggagtcttgtgggcaggaagttttggaacaaaagaccggtgctgtgcaaaattctcctcctgacaaaacacctccagaaccgagtccttggtcaccggttaaacggaaggcgcaagatgttggaccatttgactgtacgaagtactccaaaagcatccgaacctctgggcaactgaaacagttggagacagaacagctggaacagccacgtcctgttgccctattttgtccgtctaattctgacgaatagctagagatggttctgtcccaatttatgactctgtactaaacaatcttatttaaaaatcgttctatcgttgcaactaaacacatactggttttctggacggaatgtgtgttccattgttttagtgtttgttagactatttcagcaacttacctatccatgtatgcaaactccattataggaac

SEQ ID NO: 55236 - DNA, 2685 bp, Zea Mays
ccactgtctcctctacctcctccgtcctccggatcccaaaatctcaaaccgtcaaacgggacctgatacctgagatacgcgcatggcgtcgccgcgccgcattccctctgtgcctgccagatccggcaacaaagagaatatatctcaagatggagaagctcccttggattttgcaaccttgcctaaagaagggcctgccactacaaggcggaagaagaagcttgcaggtttcaacttgaggaaaagcattgcctggaatcctgcttttttaactgaagaaggtgttttggataactcggagctttctgtgcttactggctcccaaccgatggcaaataggagccctggatcaggggtcagtagtataatgtccccatcctgtcagtcagggagatatggtaacacatatgtacggaaggaagccgcagggaattcacatggaaaattgcctgcaagatatcacagggcagaaagccagggaaggaaattgttttcttcagcaaaaactcctcagggggacaatcagaaagaatctgctggaacacaaaacagaagctctgcaagaatcatccaaatatgtacaccaagagtaccagctggatctatacagaagaaagtacaaaactcatctgcttctacatctcagatgtcaagaataccaaaacaattacgaccttctcttcctaaggtcccaagaagtacttcatctgtgacaaacaatttggaatcacacaaaaaaatagctccagttaaagctgaactagttcacagagtaactggattccctgctagattgaagatcaatcctgtatcttctggacctagcatagagaaggctgtggtgcctgctgttactgccatacatgaagaagccactgtgaaatgcaaaaaaaacccagcacacccacaaattagcccatccaccccctttgatagcactgtgtcaaaacttgctaagccatcagcacttcgattgccttcaccttcacttggttttttcactcaggaaaaagcgcatgtgccacatggtgatgctgctaaaagaaacgtggggaggtgtttctcttcaaatacttcagcgcttgatagacctcccagatacaggcagtctgaggaaagcagactccacctagcaaagcagctgtcaaccaatggcactgttgcttccaatcttgtgctacctgtgactagagagggccatctcaaatctttggtggttccagaaaatgaatcatcgtcaaaagttatcattacatacttagaaaaatctggaaatgtaaataatcaagcaatgccaaaggctgatttcttattggcaggaactggagctactgatactacacaaccaatgaatttagaaaagaaagatgacgctggaaatagtgagacattgcttgtagaaggaatggatgatatcaaagagattgaacctcttgataatttctacgctcctgaagctatttgttcctcaaccattcgacctgttgaggattctttctcgcttgaagccagttattcctcaactaaacctattgtagagagtaaattgtcactctcttgcatttcttctaaagtacactcctctagtgagcttagttgtcaaggcaagtcagtcagtgatcccagtgcagcgatggacatggaaaactctaatgttggagatactgcacttagcgcttctttgtcgaaaggcaggagttgcactccagctcttgatttgttgcaaggattttattcatttgatcgccagaatattgaatgtcctatgctgatggaatcagtatctacaatatgtgcagaccagctgccacattgtgacagtttaagcgatgaaacgccagccctagctggcagtcattcagatttgaatgattctttgtgtgatgaagctaaacctgctttgtcaaaagaaccaaatactgaaggtgaaatggagcttcaaacaaacagtaccatagctgtaaaggaaactccgttgttagatgtggggtgtgggcatattcacaattataggaccacagattgttctacgagattggaagcacctacaccttgtgtggaaagacgtcatgctttattagtagaaccaaatatggaagaaaaaatggtgcttgacacaaacagattgtcagctatacagtacacaccacatatagaaaagaacaaggcactggaaagatcaccggcaaatacaatccgtaaagatcatctgaagaacttgataccatttacagaagaatggcttgctgtcatggagtcttgtgggcaggaagttttggaacaaaagaccggtgctgtgcaaaattctcctcctgacaaaacacctccagaaccgagtccttggtcaccggttaaacggaaggcgcaagatgttggaccatttgactgtacgaagtactccaaaagcatccgaacctctgggcaactgaaacagttggagacagaacagctggaacagccacgtcctgttgccctattttgtccgtctaattctgacgaatagctagagatggttctgtcccaatttatgactctgtactaaacaatcttatttaaaaatcgttctatcgttgcaactaaacacatactggttttctggacggaatgtgtgttccattgttttagtgtttgttagactatttcagcaacttacctatccatgtatgcaaactccattataggaac

SEQ ID NO: 55237 - DNA, 2419 bp, Zea Mays
ccaaactatcgtggcctcttggggcccactgtctcctctacctcctccgtcctccggatcccaaaatctcaaaccgtcaaacgggacctgatacctgagatacgcgcatggcgtcgccgcgccgcattccctctgtgcctgccagatccggcaacaaagagaatatatctcaagatggagaagctcccttggattttgcaaccttgcctaaagaagggcctgccactacaaggcggaagaagaagcttgcaggtttcaacttgaggaaaagcattgcctggaatcctgcttttttaactgaagaaggtgttttggataactcggagctttctgtgcttactggctcccaaccgatggcaaataggagccctggatcagggatgtcaagaataccaaaacaattacgaccttctcttcctaaggtcccaagaagtacttcatctgtgacaaacaatttggaatcacacaaaaaaatagctccagttaaagctgaactagttcacagagtaactggattccctgctagattgaagatcaatcctgtatcttctggacctagcatagagaaggctgtggtgcctgctgttactgccatacatgaagaagccactgtgaaatgcaaaaaaaacccagcacacccacaaattagcccatccaccccctttgatagcactgtgtcaaaacttgctaagccatcagcacttcgattgccttcaccttcacttggttttttcactcaggaaaaagcgcatgtgccacatggtgatgctgctaaaagaaacgtggggaggtgtttctcttcaaatacttcagcgcttgatagacctcccagatacaggcagtctgaggaaagcagactccacctagcaaagcagctgtcaaccaatggcactgttgcttccaatcttgtgctacctgtgactagagagggccatctcaaatctttggtggttccagaaaatgaatcatcgtcaaaagttatcattacatacttagaaaaatctggaaatgtaaataatcaagcaatgccaaaggctgatttcttattggcaggaactggagctactgatactacacaaccaatgaatttagaaaagaaagatgacgctggaaatagtgagacattgcttgtagaaggaatggatgatatcaaagagattgaacctcttgataatttctacgctcctgaagctatttgttcctcaaccattcgacctgttgaggattctttctcgcttgaagccagttattcctcaactaaacctattgtagagagtaaattgtcactctcttgcatttcttctaaagtacactcctctagtgagcttagttgtcaaggcaagtcagtcagtgatcccagtgcagcgatggacatggaaaactctaatgttggagatactgcacttagcgcttctttgtcgaaaggcaggagttgcactccagctcttgatttgttgcaaggattttattcatttgatcgccagaatattgaatgtcctatgctgatggaatcagtatctacaatatgtgcagaccagctgccacattgtgacagtttaagcgatgaaacgccagccctagctggcagtcattcagatttgaatgattctttgtgtgatgaagctaaacctgctttgtcaaaagaaccaaatactgaaggtgaaatggagcttcaaacaaacagtaccatagctgtaaaggaaactccgttgttagatgtggggtgtgggcatattcacaattataggaccacagattgttctacgagattggaagcacctacaccttgtgtggaaagacgtcatgctttattagtagaaccaaatatggaagaaaaaatggtgcttgacacaaacagattgtcagctatacagtacacaccacatatagaaaagaacaaggcactggaaagatcaccggcaaatacaatccgtaaagatcatctgaagaacttgataccatttacagaagaatggcttgctgtcatggagtcttgtgggcaggaagttttggaacaaaagaccggtgctgtgcaaaattctcctcctgacaaaacacctccagaaccgagtccttggtcaccggttaaacggaaggcgcaagatgttggaccatttgactgtacgaagtactccaaaagcatccgaacctctgggcaactgaaacagttggagacagaacagctggaacagccacgtcctgttgccctattttgtccgtctaattctgacgaatagctagagatggttctgtcccaatttatgactctgtactaaacaatcttatttaaaaatcgttctatcgttgcaactaaacacatactggttttctggacggaatgtgtgttccattgttttagtgtttgttagactatttcagcaacttacctatccatgtatgcaaactccattataggaac

SEQ ID NO: 55238 - DNA, 1622 bp, Zea Mays
aattcccgaatctcacacccaaaagtttcccactgccctggtcccccattcaattcttccaactccgccgcttcgcctcgttccgtccgccgcccccatggcgtccgccgccgccacgaccacctccgcccccgcccagaacctcaatccccttagtatcaacatcaagctccccccatggctcagcgggctgcgctgccccttcaccttcgtctgcccgcccccgcccccgcctccgccgccgccgccgcctcctcccccgctgccacctacggaacccgtggtcccacggtcgcggaggttaccaagcctgcgggtgaccacggagtacgatagcgaagagggcgtgtttgtgaacaaggtgtcgtgcaagcttgcgggggacctcgccaaactgcggctctccttccagagggacccgctacagcagctcttcgccgcgccgttggtggggctcatcaccaagcgtttctccgtgctctacgacgtcgaggcacgcaacgcgctgctccgcggagactgctcgcttcccggaggcgccgtccagctccgtgcctcgcatgatgtcaaggcacaacaaggagaagtttcggtgatcactagtttgggtgatccattgtataaaatggagttatcatctttggtgccttacagtggtttgccaagggcaacattccactttcctattggtcaagtttcagtggaagagaagagaaatgaagatgatgagaaggtgctgtctgtatatgggattggaaaatctgatttcttggacggtgttcttactgctcagtacaatgaaaatgatcttaatctaagatattgttataaggacaaggaattaactttagttccaagtgtctcgttgccttccaatgcagtatccatagacttcaaaaggcgttttggtcctgatgataagttgagctaccgttacatcttcgacactgatgaatggaatgctgtttataaacataaagtgggtaaaaatttcaaagtgaaagctggttatgattctgaggtgcgagtcggatgggcttctctttgggttggagaagaagggggcaaggcgaagactgcgccaatgaaaacaaaacttcagcttatgcttcaagtaccccaggataatcccagaaatccttattttctcttcaatgtgaagaaacgatgggatctgtaaataggtgtaagttatccattatgtggactccaaaggcttcggccaaccttttgttgcaatcttcgtaggtcaacagcaacacaatccatgagctctttctatttatcatatattttcaactactgtacgtagttagtacacagcgccccaagtaatccaaaatttatgtaaactctaaccctaaaccctaagtacttgttcgttttgttctcaatccatgtagattgagtgggattaagtgagtttcaattctaatcaagtcaaaatcttttatatttttttttcaatctcatctaatccacatgggataggaataaccgaacaaggtataaagtgggaaatttggtagtctcggcataccctaaatcttaaagttgtaataccatcaaagtcgtaatagcatctccaacttgagccctaaacgtagttatattttgaaata

SEQ ID NO: 55239 - DNA, 1612 bp, Zea Mays
aattcccgaatctcacacccaaaagtttcccactgccctggtcccccattcaattcttccaactccgccgcttcgcctcgttccgtccgccgcccccatggcgtccgccgccgccacgaccacctccgcccccgcccagaacctcaatccccttagtatcaacatcaagctccccccatggctcagcgggctgcgctgccccttcaccttcgtctgcccgcccccgcccccgcctccgccgccgccgccgcctcctcccccgctgccacctacggaacccgtggtcccacggtcgcggaggttaccaagcctgcgggtgaccacggagtacgatagcgaagagggcgtgtttgtgaacaaggtgtcgtgcaagcttgcgggggacctcgccaaactgcggctctccttccagagggacccgctacagcagctcttcgccgcgccgttggtggggctcatcaccaagcgtttctccgtgctctacgacgtcgaggcacgcaacgcgctgctccgcggagactgctcgcttcccggaggcgccgtccagctccgtgcctcgcatgatgtcaaggcacaacaaggagaagtttcggtgatcactagtttgggtgatccattgtataaaatggagttatcatctttggtgccttacagtggtttgccaagggcaacattccactttcctattggtcaagtttcagtggaagagaagagaaatgaagatgatgagaaggtgctgtctgtatatgggattggaaaatctgatttcttggacggtgttcttactgctcagtacaatgaaaatgatcttaatctaagatattgttataaggacaaggaattaactttagttccaagtgtctcgttgccttccaatgcagtatccatagacttcaaaaggcgttttggtcctgatgataagttgagctaccgttacatcttcgacactgatgaatggaatgctgtttataaacataaagtgggtaaaaatttcaaagtgaaagctggttatgattctgaggtgcgagtcggatgggcttctctttggaagggggcaaggcgaagactgcgccaatgaaaacaaaacttcagcttatgcttcaagtaccccaggataatcccagaaatccttattttctcttcaatgtgaagaaacgatgggatctgtaaataggtgtaagttatccattatgtggactccaaaggcttcggccaaccttttgttgcaatcttcgtaggtcaacagcaacacaatccatgagctctttctatttatcatatattttcaactactgtacgtagttagtacacagcgccccaagtaatccaaaatttatgtaaactctaaccctaaaccctaagtacttgttcgttttgttctcaatccatgtagattgagtgggattaagtgagtttcaattctaatcaagtcaaaatcttttatatttttttttcaatctcatctaatccacatgggataggaataaccgaacaaggtataaagtgggaaatttggtagtctcggcataccctaaatcttaaagttgtaataccatcaaagtcgtaatagcatctccaacttgagccctaaacgtagttatattttgaaata

SEQ ID NO: 55240 - DNA, 2035 bp, Zea Mays
cagcgctgctgctaaaacctcccgactaaaccctagcagcggttcctctccagtctccagcagtccagctcgatcgcgatcggaggccagaaatccatggccgctcccgccgccgcgccgctcgacgagggcaaggcgaagaaagtccttcgccaggtcgagttctacttcagcgacagcaacctcccccgcgataagttcctgcgggagacggtcgagcagagcgatgacggattggtgagcttgcccttgatatgctccttctcgcggatgaagtcccacctggggctggacgcagatgtcaagcccgagactgtgccggaggagaccgtgcttgcggttgctgaggtgctccggccttctcctgccctccgcgtatcggaggatggaaagaagattggtagagctagtgaactcttgaagccagatgagatcatagaacaagtagactctaggactattgctgtatctccgctgccttgcaatgtaaagcaggaagacgtccaatcttttttcacaaattatgcaaaggtaaacagcgtgagacttccacgcaatattgccaacaaaaaacacttctgtgggactgctttggttgagttttctgaagaagaggaagcaaaaagaattatggagactgctttagtatttgcaggggcaaatctggaaataaggccaaagaaggagtttgatgctgagcaaaagtccaaaaaagaagcatatgaaaagacacaccttaaaaaggacaaccagtatgaaggctatcaaaaaggcctaattgtggccttcaaattggagaaggccacagctgatactgtagtgcagcaagataacatagataaagagaatgactctgctacgaaattagatgtttccagttccatggaaaaaccttcaggccaggggccagaggagtctatccttgagagcgatgttattaagcaagggatgtcctcagatgacatgaccaaagagaaagatctaaacactggggaagctacagaatctgagaagtgtattagtgatgtccccatagaaagtgataaacatggtgatagtgaaccattgagcagggaaggcaaaatcatttctggcaatgtgaatgtgaagaaccaaatatcgagggaggatctaaaagaagcattcaaaaaatttggagctgtccggtatgtggacttcagcatcggagataattcaggataccttcgctttgaagattctaaggcagctgaaaaagcccgcatgtctgcagtacttgctgatggtggcttgataattaaggaccacattgttactttggagcctgtgactgctgagaaggattattgggacacaatccgcagtattcaaggaaagtacaaggatagtagaagctacaagggaagggcttcaaataaccagagaggaggaaagcgtttcaacgcgaagcgagatagaaacccagactcggagaagaattctaacaaggctcggaaggttgaagctatcgcatgaggttaatttaggtaccttagctcgactaaagaagtaacatgttatgccagcatgatcgacttcagtactctccaagtttctagaatcgacttgttttttagctatcgttttcattttggtcgttttgccaccttattcgatgttcgtcccttagctataatccttttgtaatggctttactgtgatgcgagggctcacccgatggcgtgtaatttgagcacaccaagcttaggcttcccttgcgaaagggtggaagcctttctattctttcactagcaaatatgcagttagggcttattcggttatttccatttctaacatagcctaaagcttaagggccgtttggatcccttgcggctgcttgctttaggaggatgggcaagaaattgtgtttggtttgtttattggctttctcaatttttgcactatcaatgtttcgtattgctaacttgggttgagatagaaatgctctccgctgctgccaaggttagtcttgctgagcggggcgaggccagttgcacaggttcaccgcaaaaaaaaa

SEQ ID NO: 55241 - DNA, 2037 bp, Zea Mays
cagcgctgctgctaaaacctcccgactaaaccctagcagcggttcctctccagtctccagcagtccagctcgatcgcgatcggaggccagaaatccatggccgctcccgccgccgcgccgctcgacgagggcaaggcgaagaaagtccttcgccaggtcgagttctacttcagcgacagcaacctcccccgcgataagttcctgcgggagacggtcgagcagagcgatgacggattggtgagcttgcccttgatatgctccttctcgcggatgaagtcccacctggggctggacgcagatgtcaagcccgagactgtgccggaggagaccgtgcttgcggttgctgaggtgctccggccttctcctgccctccgcgtatcggaggatggaaagaagattggtagagctagtgaactcttgaagccagatgagatcatagaacaagtagactctaggactattgctgtatctccgctgccttgcaatgtaaagcaggaagacgtccaatcttttttcacaaattatgcaaaggtaaacagcgtgagacttccacgcaatattgccaacaaaaaacacttctgtgggactgctttggttgagttttctgaagaagaggaagcaaaaagaattatggagactgctttagtatttgcaggggcaaatctggaaataaggccaaagagtttgatgctgagcaaaagtccaaaaaagaagcatatgaaaagacacaccttaaaaaggacaaccagtatgaaggctatcaaaaaggcctaattgtggccttcaaattggagaaggccacagctgatactgtagtgcagcaagataacatagataaagagaatgactctgctacgaaattagatgtttccagttccatggaaaaaccttcaggccaggggccagaggagtctatccttgagagcgatgttattaagcaagggatgtcctcagatgacatgaccaaagagaaagatctaaacactggggaagctacagaatctgagaagtgtattagtgatgtccccatagaaagtgataaacatggtgatagtgaaccattgagcagggaaggcaaaatcatttctggcaatgtgaatgtgaagaaccaaatatcgagggaggatctaaaagaagcattcaaaaaatttggagctgtccggtatgtggacttcagcatcggagataattcaggataccttcgctttgaagattctaaggcagctgaaaaagcccgcatgtctgcagtacttgctgatggtggcttgataattaaggaccacattgttactttggagcctgtgactggtgaagctgagaaggattattgggacacaatccgcagtattcaaggaaagtacaaggatagtagaagctacaagggaagggcttcaaataaccagagaggaggaaagcgtttcaacgcgaagcgagatagaaacccagactcggagaagaattctaacaaggctcggaaggttgaagctatcgcatgaggttaatttaggtaccttagctcgactaaagaagtaacatgttatgccagcatgatcgacttcagtactctccaagtttctagaatcgacttgttttttagctatcgttttcattttggtcgttttgccaccttattcgatgttcgtcccttagctataatccttttgtaatggctttactgtgatgcgagggctcacccgatggcgtgtaatttgagcacaccaagcttaggcttcccttgcgaaagggtggaagcctttctattctttcactagcaaatatgcagttagggcttattcggttatttccatttctaacatagcctaaagcttaagggccgtttggatcccttgcggctgcttgctttaggaggatgggcaagaaattgtgtttggtttgtttattggctttctcaatttttgcactatcaatgtttcgtattgctaacttgggttgagatagaaatgctctccgctgctgccaaggttagtcttgctgagcggggcgaggccagttgcacaggttcaccgcaaaaaaaaa

SEQ ID NO: 55242 - DNA, 1344 bp, Zea Mays
aactgctttcggcccaaaacacttccctgctctctcggtctctcccagagtcccagctccctcactctactctggacgcgactcgaacttaaaccctagagccgcagccccggtcgctccaccgaccccaaatctcaaatcagcgggagggaactcgcacgcgaaggcaaatacgctttagatcccccattgcttctggctactaggccagcgcgcctcgattttcttctccgttttggtctaattcattgtttcgctcttgcaggctgaactcatggctcgcgtctacgttgggaacctggatccgcgtgtcacggcgcgggagatcgaggacgagttccggatgtttggggttctgaggagtgtatgggttgctaggaaaccaccagggtttgccttcattgactttgatgaccgcagggatgcacaagatgccattcgtgaattggatggtaagaatggttggagggttgagctgtcaactaaagttggtggtggccgtggccgagaccgtaacggttctgatatgaagtgctatgagtgtggtgaagctggccactttgcacgtgaatgccgcttacggattggttcaggaggcttgggtagtggaaggcgtcgcagccgaagtcctagatatcgcagccgcagccgcagccgcagcccaagatatcgaaggagcccaagctatagcagaagcccgcgagatcgttctcctaggaggcgaagttacagcaggtcgccactgggatctcctgcacggagtctcagcaggtcaccgccgctgccgccgcctcctcccagaaataacagcaggtcaccaccggcagcccgagacgtgagcaggtcaccaccggcagcccgagacgtgagcaggtcgccaccaccacctcctgatgccagaagaagctatagtggatccccaggacagcagccacaacgcgacgagtccccatatgccaatgacgcctgagattctcttagctgccccaagatgctggaaaatgctaggggcccccagcatgttttgcctgtccggtcggcacaactgtaattctgtaggatcgagtctgagattttgttccagtgttttgggtttcccttgacacatcgctgctgatacaattgtggaggcaggagcacaacgtttctgttttaagtattgactggatgactttgggcgcttgtagttgtcaaggcaggacctgatttgtgttaggcttgtattactagactgcattcgaatttggagaaagtgttcatcgtgctgtatgttgagatatctcactaggtcaggctctatttttatttattttaactaaatttatttaggtctctaagaaattg

SEQ ID NO: 55243 - DNA, 1833 bp, Zea Mays
aactgctttcggcccaaaacacttccctgctctctcggtctctcccagagtcccagctccctcactctactctggacgcgactcgaacttaaaccctagagccgcagccccggtcgctccaccgaccccaaatctcaaatcagcgggagggaactcgcacgcgaaggcaaatacgctttagatcccccattgcttctggctactaggccagcgcgcctcgattttcttctccgttttggtctaattcgctgaactcatggctcgcgtctacgttgggaacctggatccgcgtgtcacggcgcgggagatcgaggacgagttccggatgtttggggttctgaggagtgtatgggttgctaggaaaccaccagggtttgccttcattgactttgatgaccgcagggatgcacaagatgccattcgtgaattggatggtaagaatggttggagggttgagctgtcaactaaagttggtggtggccgtggccgagaccgtaacggttctgatatgaagtgctatgagtgtggtgaagctggccactttgcacgtgaatgccgcttacggattggttcaggaggcttgggtagtggaaggcgtcgcagccgaagtcctagatatcgcagccgcagccgcagccgcagcccaagatatcgaaggagcccaagctatagcagaaggtaatttgctaatgacaccaattcaccacatgtattcatccagtagttttaattaagggttgggaaacacgacctagaaatcctaaaacttttgagaacgaagcaaaatttcggagataacacgttccctttaaccaagtgagtatccactatccagtatggtctcagatttgttggatagtatttaaccaaacattcgactatgcatttgacttattgagtgttgttctttatcttgcattggtactatataatacaatgcattctacaccccctcccacctgttatagctttgttagcgttggcctaatatttcaggggaacatgttgagagacttcataaaatacagatcaatgtcttcttgcctaactagcagccttttcaatgcgttattttatgttcatcctgaaaacaaatgttcggtttttccggagctacagcccgcgagatcgttctcctaggaggcgaagttacagcaggtcgccactgggatctcctgcacggagtctcagcaggtcaccgccgctgccgccgcctcctcccagaaataacagcaggtcaccacctggagcccgagaagtgagcaggtcgccgccgccacctcctcccagaaataacagcaggtcaccaccggcagcccgagacgtgagcaggtcaccaccggcagcccgagacgtgagcaggtcgccaccaccacctcctgatgccagaagaagctatagtggatccccaggacagcagccacaacgcgacgagtccccatatgccaatgacgcctgagattctcttagctgccccaagatgctggaaaatgctaggggcccccagcatgttttgcctgtccggtcggcacaactgtaattctgtaggatcgagtctgagattttgttccagtgttttgggtttcccttgacacatcgctgctgatacaattgtggaggcaggagcacaacgtttctgttttaagtattgactggatgactttgggcgcttgtagttgtcaaggcaggacctgatttgtgttaggcttgtattactagactgcattcgaatttggagaaagtgttcatcgtgctgtatgttgagatatctcactaggtcaggctctatttttatttattttaactaaatttatttaggtctctaagaaattg

SEQ ID NO: 55244 - DNA, 1699 bp, Zea Mays
ggcgtgactcgtcaactgctttcggcccaaaacacttccctgctctctcggtctctcccagagtcccagctccctcactctactctggacgcgactcgaacttaaaccctagagccgcagccccggtcgctccaccgaccccaaatctcaaatcagcgggagggaactcgcacgcgaaggctgaactcatggctcgcgtctacgttgggaacctggatccgcgtgtcacggcgcgggagatcgaggacgagttccggatgtttggggttctgaggagtgtatgggttgctaggaaaccaccagggtttgccttcattgactttgatgaccgcagggatgcacaagatgccattcgtgaattggatggtaagaatggttggagggttgagctgtcaactaaagttggtggtggccgtggccgagaccgtaacggttctgatatgaagtgctatgagtgtggtgaagctggccactttgcacgtgaatgccgcttacggattggttcaggaggcttgggtagtggaaggcgtcgcagccgaagtcctagatatcgcagccgcagccgcagccgcagcccaagatatcgaaggagcccaagctatagcagaaggtaatttgctaatgacaccaattcaccacatgtattcatccagtagttttaattaagggttgggaaacacgacctagaaatcctaaaacttttgagaacgaagcaaaatttcggagataacacgttccctttaaccaagtgagtatccactatccagtatggtctcagatttgttggatagtatttaaccaaacattcgactatgcatttgacttattgagtgttgttctttatcttgcattggtactatataatacaatgcattctacaccccctcccacctgttatagctttgttagcgttggcctaatatttcaggggaacatgttgagagacttcataaaatacagatcaatgtcttcttgcctaactagcagccttttcaatgcgttattttatgttcatcctgaaaacaaatgttcggtttttccggagctacagcccgcgagatcgttctcctaggaggcgaagttacagcaggtcgccactgggatctcctgcacggagtctcagcaggtcaccgccgctgccgccgcctcctcccagaaataacagcaggtcaccaccggcagcccgagacgtgagcaggtcaccaccggcagcccgagacgtgagcaggtcgccaccaccacctcctgatgccagaagaagctatagtggatccccaggacagcagccacaacgcgacgagtccccatatgccaatgacgcctgagattctcttagctgccccaagatgctggaaaatgctaggggcccccagcatgttttgcctgtccggtcggcacaactgtaattctgtaggatcgagtctgagattttgttccagtgttttgggtttcccttgacacatcgctgctgatacaattgtggaggcaggagcacaacgtttctgttttaagtattgactggatgactttgggcgcttgtagttgtcaaggcaggacctgatttgtgttaggcttgtattactagactgcattcgaatttggagaaagtgttcatcgtgctgtatgttgagatatctcactaggtcaggctctatttttatttattttaactaaatttatttaggtctctaagaaattg

SEQ ID NO: 55245 - DNA, 1281 bp, Zea Mays
cgaaaataccccggacaagtcagggcgtgactcgtcaactgctttcggcccaaaacacttccctgctctctcggtctctcccagagtcccagctccctcactctactctggacgcgactcgaacttaaaccctagagccgcagccccggtcgctccaccgaccccaaatctcaaatcagcgggagggaactcgcacgcgaaggctgaactcatggctcgcgtctacgttgggaacctggatccgcgtgtcacggcgcgggagatcgaggacgagttccggatgtttggggttctgaggagtgtatgggttgctaggaaaccaccagggtttgccttcattgactttgatgaccgcagggatgcacaagatgccattcgtgaattggatggtaagaatggttggagggttgagctgtcaactaaagttggtggtggccgtggccgagaccgtaacggttctgatatgaagtgctatgagtgtggtgaagctggccactttgcacgtgaatgccgcttacggattggttcaggaggcttgggtagtggaaggcgtcgcagccgaagtcctagatatcgcagccgcagccgcagccgcagcccaagatatcgaaggagcccaagctatagcagaagcccgcgagatcgttctcctaggaggcgaagttacagcaggtcgccactgggatctcctgcacggagtctcagcaggtcaccgccgctgccgccgcctcctcccagaaataacagcaggtcaccaccggcagcccgagacgtgagcaggtcaccaccggcagcccgagacgtgagcaggtcgccaccaccacctcctgatgccagaagaagctatagtggatccccaggacagcagccacaacgcgacgagtccccatatgccaatgacgcctgagattctcttagctgccccaagatgctggaaaatgctaggggcccccagcatgttttgcctgtccggtcggcacaactgtaattctgtaggatcgagtctgagattttgttccagtgttttgggtttcccttgacacatcgctgctgatacaattgtggaggcaggagcacaacgtttctgttttaagtattgactggatgactttgggcgcttgtagttgtcaaggcaggacctgatttgtgttaggcttgtattactagactgcattcgaatttggagaaagtgttcatcgtgctgtatgttgagatatctcactaggtcaggctctatttttatttattttaactaaatttatttaggtctctaagaaattg

SEQ ID NO: 55246 - DNA, 742 bp, Zea Mays
aagaaaaacgaaaaacgaaaaactagagggtggaggacaacggtgtccagcaaaagagagagaagaggaggggaggaggtggaagtagcaagaatggcgtgctccaccaatctctgcttctcggcgtcgattcctcctcttccagcctcttcttcttcttctgtctcctcccccttcctcacggtggagcgtgtgtcctatgttccgtccttgtccaggtggacaatccgatacaagcaattggggcatgcatatcagagaagccacgttctggcctttgctagtgcagatgcatcacagggtaaaagaagctcaggtgagaatgttgtgatggttgatccactggaagctaagcgtctagctgctaaacaaatgcaagaaattagggccaaagaaaagctgaagaggcgcagtcaagcagaagctatcaatgggccattggcaatgataggactgactgctggattgatagtggaagctcagacaggaaaaggcatcttagggcaggagctgatgacacctgcaatggaatgatgagtctattgcttcgatttaacgtgtgattacatatatcttgaacttattataagccagtatgtcgcctgtagagtgtagacaggtacttttataatatataatcacaacttccatatgtactgatacattttatctttgttctgcttgctactgttttaattgaatacaagacatactatggaatatttaaatttgtcatttgtag

SEQ ID NO: 55247 - DNA, 1044 bp, Zea Mays
aagaaaaacgaaaaacgaaaaactagagggtggaggacaacggtgtccagcaaaagagagagaagaggaggggaggaggtggaagtagcaagaatggcgtgctccaccaatctctgcttctcggcgtcgattcctcctcttccagcctcttcttcttcttctgtctcctcccccttcctcacggtggagcgtgtgtcctatgttccgtccttgtccaggtggacaatccgatacaagcaattggggcatgcatatcagagaagccacgttctggcctttgctagtgcagatgtatgcatcaggcatttcgagtaggccatctattttttagggttggtaggattatgacatataataatgtttattgaacataactttatgtgcttttgaatttttttagaagtttaagttcaatttcttaggcctatatcccaaccaggataccgttattccttagtactctttactttatgcattatactaacccaggtcctggagaaagttattcaactttctttagtgccagttgctgcattcttattctgtataatacattctctcttggtagctatattgtttttttaatgaatcaggcatcacagggtaaaagaagctcaggtgagaatgttgtgatggttgatccactggaagctaagcgtctagctgctaaacaaatgcaagaaattagggccaaagaaaagctgaagaggcgcagtcaagcagaagctatcaatgggccattggcaatgataggactgactgctggattgatagtggaagctcagacaggaaaaggcatcttagggcaggagctgatgacacctgcaatggaatgatgagtctattgcttcgatttaacgtgtgattacatatatcttgaacttattataagccagtatgtcgcctgtagagtgtagacaggtacttttataatatataatcacaacttccatatgtactgatacattttatctttgttctgcttgctactgttttaattgaatacaagacatactatggaatatttaaatttgtcatttgtag

SEQ ID NO: 55248 - DNA, 1041 bp, Zea Mays
aagaaaaacgaaaaacgaaaaactagagggtggaggacaacggtgtccagcaaaagagagagaagaggaggggaggaggtggaagtagcaagaatggcgtgctccaccaatctctgcttctcggcgtcgattcctcctcttccagcctcttcttcttcttctgtctcctcccccttcctcacggtggagcgtgtgtcctatgttccgtccttgtccaggtggacaatccgatacaagcaattggggcatgcatatcagagaagccacgttctggcctttgctagtgcagatgtatgcatcaggcatttcgagtaggccatctattttttagggttggtaggattatgacatataataatgtttattgaacataactttatgtgcttttgaatttttttagaagtttaagttcaatttcttaggcctatatcccaaccaggataccgttattccttagtactctttactttatgcattatactaacccaggtcctggagaaagttattcaactttctttagtgccagttgctgcattcttattctgtataatacattctctcttggtagctatattgtttttttaatgaatcaggcatcacagggtaaaagaagctcaggtgagaatgttgtgatggttgatccactggaagctaagcgtctagctgctaaacaaatgcaagaaattagggccaaagaaaagctgaagaggcgcagtcaagcagaagctatcaatgggccattggcaatgataggactgactgctggattgatagtggaagctcagacaggaaaaggcatcttagggcagctgatgacacctgcaatggaatgatgagtctattgcttcgatttaacgtgtgattacatatatcttgaacttattataagccagtatgtcgcctgtagagtgtagacaggtacttttataatatataatcacaacttccatatgtactgatacattttatctttgttctgcttgctactgttttaattgaatacaagacatactatggaatatttaaatttgtcatttgtag

SEQ ID NO: 55249 - DNA, 1781 bp, Zea Mays
aagaaaaacgaaaaacgaaaaactagagggtggaggacaacggtgtccagcaaaagagagagaagaggaggggaggaggtggaagtagcaagaatggcgtgctccaccaatctctgcttctcggcgtcgattcctcctcttccagcctcttcttcttcttctgtctcctcccccttcctcacggtggagcgtgtgtcctatgttccgtccttgtccaggtggacaatccgatacaagcaattggggcatgcatatcagagaagccacgttctggcctttgctagtgcagatgcatcacagggtaaaagaagctcaggtgagaatgttgtgatggttgatccactggaagctaagcgtctagctgctaaacaaatgcaagaaattagggccaaagaaaagctgaaggtgcattgcagctgtattggagtgtatcattccttagattaaatcaatcttatatgctaaaggaagaaaacttcatgataaggaaaggaggaaaacatttatctttttttttttggaccaatagttggtgatgaatcattgtttcagataactggagacagaactaggcttttacctgttcatgttgtcctgcgagttctccaattctaatttatttatttattgtgtgggtacaaacttgattgcatgttcttcagttgaggcatctaattaactgcaaaaggatattcaacttaatattacctagtggctgtaaattgcagtaatgttcacatgggcatttatattattatttaaaaaaaactctaccagcaggggaaattatagggaacatatcctgtgttcatggagctcttgtgctcatatgagcactttaaatctggtgcgttcatttctcatccagaaggtgagggcagcagtggcacacagagacagacggcgcggcgcaacaagggtggtcaagagtggcacacactagaaaatgtctattcacacttggatgagaaatgaaggcaccagatttaaagtgcatatgagcacaagagctccatgagcacaggatacgtcaaatttgacccaaatcactgctctgttttgcagaggcgcagtcaagcagaagctatcaatgggccattggcaatgataggactgactgctggattgatagtggaagctcagacaggaaaaggcatcttagggcagctagctggatatctgacggctatttctagtttatttggacaataatagtgggccatctttggagatttattttttcacgttccttggccaggagagctcttatctgttgcatccacccaatttttgtgggggagttaatccgagcccagacttgtatgtttatcaagcacgcatgggctgaacattaattatacatgtaacggggtcgttctatgtagcccaaccatttctgatgatagaacctgctaaagagcagttcttcatcatacttaaatgtgaaatgttaagtctttgagaactctcctttttgcccaaaccattgagcctgtaacatgtcgattggactcagaagtctctgactggttgtttgtatatgcaggagctgatgacacctgcaatggaatgatgagtctattgcttcgatttaacgtgtgattacatatatcttgaacttattataagccagtatgtcgcctgtagagtgtagacaggtacttttataatatataatcacaacttccatatgtactgatacattttatctttgttctgcttgctactgttttaattgaatacaagacatactatggaatatttaaatttgtcatttgtag

SEQ ID NO: 55250 - DNA, 1931 bp, Zea Mays
aagaaaaacgaaaaacgaaaaactagagggtggaggacaacggtgtccagcaaaagagagagaagaggaggggaggaggtggaagtagcaagaatggcgtgctccaccaatctctgcttctcggcgtcgattcctcctcttccagcctcttcttcttcttctgtctcctcccccttcctcacggtggagcgtgtgtcctatgttccgtccttgtccaggtggacaatccgatacaagcaattggggcatgcatatcagagaagccacgttctggcctttgctagtgcagatgtatgcatcaggcatttcgagtaggccatctattttttagggttggtaggattatgacatataataatgtttattgaacataactttatgtgcttttgaatttttttagaagtttaagttcaatttcttaggcctatatcccaaccaggataccgttattccttagtactctttactttatgcattatactaacccaggtcctggagaaagttattcaactttctttagtgccagttgctgcattcttattctgtataatacattctctcttggtagctatattgtttttttaatgaatcaggcatcacagggtaaaagaagctcaggtgagaatgttgtgatggttgatccactggaagctaagcgtctagctgctaaacaaatgcaagaaattagggccaaagaaaagctgaaggtgcattgcagctgtattggagtgtatcattccttagattaaatcaatcttatatgctaaaggaagaaaacttcatgataaggaaaggaggaaaacatttatctttttttttttggaccaatagttggtgatgaatcattgtttcagataactggagacagaactaggcttttacctgttcatgttgtcctgcgagttctccaattctaatttatttatttattgtgtgggtacaaacttgattgcatgttcttcagttgaggcatctaattaactgcaaaaggatattcaacttaatattacctagtggctgtaaattgcagtaatgttcacacagagacagacggcgcggcgcaacaagggtggtcaagagtggcacacactagaaaatgtctattcacacttggatgagaaatgaaggcaccagatttaaagtgcatatgagcacaagagctccatgagcacaggatacgtcaaatttgacccaaatcactgctctgttttgcagaggcgcagtcaagcagaagctatcaatgggccattggcaatgataggactgactgctggattgatagtggaagctcagacaggaaaaggcatcttagggcagctagctggatatctgacggctatttctagtttatttggacaataatagtgggccatctttggagatttattttttcacgttccttggccaggagagctcttatctgttgcatccacccaatttttgtgggggagttaatccgagcccagacttgtatgtttatcaagcacgcatgggctgaacattaattatacatgtaacggggtcgttctatgtagcccaaccatttctgatgatagaacctgctaaagagcagttcttcatcatacttaaatgtgaaatgttaagtctttgagaactctcctttttgcccaaaccattgagcctgtaacatgtcgattggactcagaagtctctgactggttgtttgtatatgcaggagctgatgacacctgcaatggaatgatgagtctattgcttcgatttaacgtgtgattacatatatcttgaacttattataagccagtatgtcgcctgtagagtgtagacaggtacttttataatatataatcacaacttccatatgtactgatacattttatctttgttctgcttgctactgttttaattgaatacaagacatactatggaatatttaaatttgtcatttgtag

SEQ ID NO: 55251 - DNA, 1801 bp, Zea Mays
aagaaaaacgaaaaacgaaaaactagagggtggaggacaacggtgtccagcaaaagagagagaagaggaggggaggaggtggaagtagcaagaatggcgtgctccaccaatctctgcttctcggcgtcgattcctcctcttccagcctcttcttcttcttctgtctcctcccccttcctcacggtggagcgtgtgtcctatgttccgtccttgtccaggtggacaatccgatacaagcaattggggcatgcatatcagagaagccacgttctggcctttgctagtgcagatgtatgcatcaggcatttcgagcatcacagggtaaaagaagctcaggtgagaatgttgtgatggttgatccactggaagctaagcgtctagctgctaaacaaatgcaagaaattagggccaaagaaaagctgaaggtgcattgcagctgtattggagtgtatcattccttagattaaatcaatcttatatgctaaaggaagaaaacttcatgataaggaaaggaggaaaacatttatctttttttttttggaccaatagttggtgatgaatcattgtttcagataactggagacagaactaggcttttacctgttcatgttgtcctgcgagttctccaattctaatttatttatttattgtgtgggtacaaacttgattgcatgttcttcagttgaggcatctaattaactgcaaaaggatattcaacttaatattacctagtggctgtaaattgcagtaatgttcacatgggcatttatattattatttaaaaaaaactctaccagcaggggaaattatagggaacatatcctgtgttcatggagctcttgtgctcatatgagcactttaaatctggtgcgttcatttctcatccagaaggtgagggcagcagtggcacacagagacagacggcgcggcgcaacaagggtggtcaagagtggcacacactagaaaatgtctattcacacttggatgagaaatgaaggcaccagatttaaagtgcatatgagcacaagagctccatgagcacaggatacgtcaaatttgacccaaatcactgctctgttttgcagaggcgcagtcaagcagaagctatcaatgggccattggcaatgataggactgactgctggattgatagtggaagctcagacaggaaaaggcatcttagggcagctagctggatatctgacggctatttctagtttatttggacaataatagtgggccatctttggagatttattttttcacgttccttggccaggagagctcttatctgttgcatccacccaatttttgtgggggagttaatccgagcccagacttgtatgtttatcaagcacgcatgggctgaacattaattatacatgtaacggggtcgttctatgtagcccaaccatttctgatgatagaacctgctaaagagcagttcttcatcatacttaaatgtgaaatgttaagtctttgagaactctcctttttgcccaaaccattgagcctgtaacatgtcgattggactcagaagtctctgactggttgtttgtatatgcaggagctgatgacacctgcaatggaatgatgagtctattgcttcgatttaacgtgtgattacatatatcttgaacttattataagccagtatgtcgcctgtagagtgtagacaggtacttttataatatataatcacaacttccatatgtactgatacattttatctttgttctgcttgctactgttttaattgaatacaagacatactatggaatatttaaatttgtcatttgtag

SEQ ID NO: 55252 - DNA, 1402 bp, Zea Mays
aagaaaaacgaaaaacgaaaaactagagggtggaggacaacggtgtccagcaaaagagagagaagaggaggggaggaggtggaagtagcaagaatggcgtgctccaccaatctctgcttctcggcgtcgattcctcctcttccagcctcttcttcttcttctgtctcctcccccttcctcacggtggagcgtgtgtcctatgttccgtccttgtccaggtggacaatccgatacaagcaattggggcatgcatatcagagaagccacgttctggcctttgctagtgcagatgcatcacagggtaaaagaagctcaggtgagaatgttgtgatggttgatccactggaagctaagcgtctagctgctaaacaaatgcaagaaattagggccaaagaaaagctgaaggtgcattgcagctgtattggagtgtatcattccttagattaaatcaatcttatatgctaaaggaagaaaacttcatgataaggaaaggaggaaaacatttatctttttttttttggaccaatagttggtgatgaatcattgtttcagataactggagacagaactaggcttttacctgttcatgttgtcctgcgagttctccaattctaatttatttatttattgtgtgggtacaaacttgattgcatgttcttcagttgaggcatctaattaactgcaaaaggatattcaacttaatattacctagtggctgtaaattgcagtaatgttcacatgggcatttatattattatttaaaaaaaactctaccagcaggggaaattatagggaacatatcctgtgttcatggagctcttgtgctcatatgagcactttaaatctggtgcgttcatttctcatccagaaggtgagggcagcagtggcacacagagacagacggcgcggcgcaacaagggtggtcaagagtggcacacactagaaaatgtctattcacacttggatgagaaatgaaggcaccagatttaaagtgcatatgagcacaagagctccatgagcacaggatacgtcaaatttgacccaaatcactgctctgttttgcagaggcgcagtcaagcagaagctatcaatgggccattggcaatgataggactgactgctggattgatagtggaagctcagacaggaaaaggcatcttagggcaggagctgatgacacctgcaatggaatgatgagtctattgcttcgatttaacgtgtgattacatatatcttgaacttattataagccagtatgtcgcctgtagagtgtagacaggtacttttataatatataatcacaacttccatatgtactgatacattttatctttgttctgcttgctactgttttaattgaatacaagacatactatggaatatttaaatttgtcatttgtag

SEQ ID NO: 55253 - DNA, 628 bp, Zea Mays
aagaaaaacgaaaaacgaaaaactagagggtggaggacaacggtgtccagcaaaagagagagaagaggaggggaggaggtggaagtagcaagaatggcgtgctccaccaatctctgcttctcggcgtcgattcctcctcttccagcctcttcttcttcttctgtctcctcccccttcctcacggtggagcgtgtgtcctatgttccgtccttgtccaggtggacaatccgatacaagcaattggggcatgcatatcagagaagccacgttctggcctttgctagtgcagataggcgcagtcaagcagaagctatcaatgggccattggcaatgataggactgactgctggattgatagtggaagctcagacaggaaaaggcatcttagggcaggagctgatgacacctgcaatggaatgatgagtctattgcttcgatttaacgtgtgattacatatatcttgaacttattataagccagtatgtcgcctgtagagtgtagacaggtacttttataatatataatcacaacttccatatgtactgatacattttatctttgttctgcttgctactgttttaattgaatacaagacatactatggaatatttaaatttgtcatttgtag

SEQ ID NO: 55254 - DNA, 1704 bp, Zea Mays
aagaaaaacgaaaaacgaaaaactagagggtggaggacaacggtgtccagcaaaagagagagaagaggaggggaggaggtggaagtagcaagaatggcgtgctccaccaatctctgcttctcggcgtcgattcctcctcttccagcctcttcttcttcttctgtctcctcccccttcctcacggtggagcgtgtgtcctatgttccgtccttgtccaggtggacaatccgatacaagcaattggggcatgcatatcagagaagccacgttctggcctttgctagtgcagatgtatgcatcaggcatttcgagtaggccatctattttttagggttggtaggattatgacatataataatgtttattgaacataactttatgtgcttttgaatttttttagaagtttaagttcaatttcttaggcctatatcccaaccaggataccgttattccttagtactctttactttatgcattatactaacccaggtcctggagaaagttattcaactttctttagtgccagttgctgcattcttattctgtataatacattctctcttggtagctatattgtttttttaatgaatcaggcatcacagggtaaaagaagctcaggtgagaatgttgtgatggttgatccactggaagctaagcgtctagctgctaaacaaatgcaagaaattagggccaaagaaaagctgaaggtgcattgcagctgtattggagtgtatcattccttagattaaatcaatcttatatgctaaaggaagaaaacttcatgataaggaaaggaggaaaacatttatctttttttttttggaccaatagttggtgatgaatcattgtttcagataactggagacagaactaggcttttacctgttcatgttgtcctgcgagttctccaattctaatttatttatttattgtgtgggtacaaacttgattgcatgttcttcagttgaggcatctaattaactgcaaaaggatattcaacttaatattacctagtggctgtaaattgcagtaatgttcacatgggcatttatattattatttaaaaaaaactctaccagcaggggaaattatagggaacatatcctgtgttcatggagctcttgtgctcatatgagcactttaaatctggtgcgttcatttctcatccagaaggtgagggcagcagtggcacacagagacagacggcgcggcgcaacaagggtggtcaagagtggcacacactagaaaatgtctattcacacttggatgagaaatgaaggcaccagatttaaagtgcatatgagcacaagagctccatgagcacaggatacgtcaaatttgacccaaatcactgctctgttttgcagaggcgcagtcaagcagaagctatcaatgggccattggcaatgataggactgactgctggattgatagtggaagctcagacaggaaaaggcatcttagggcaggagctgatgacacctgcaatggaatgatgagtctattgcttcgatttaacgtgtgattacatatatcttgaacttattataagccagtatgtcgcctgtagagtgtagacaggtacttttataatatataatcacaacttccatatgtactgatacattttatctttgttctgcttgctactgttttaattgaatacaagacatactatggaatatttaaatttgtcatttgtag

SEQ ID NO: 55255 - DNA, 1413 bp, Zea Mays
aagaaaaacgaaaaacgaaaaactagagggtggaggacaacggtgtccagcaaaagagagagaagaggaggggaggaggtggaagtagcaagaatggcgtgctccaccaatctctgcttctcggcgtcgattcctcctcttccagcctcttcttcttcttctgtctcctcccccttcctcacggtggagcgtgtgtcctatgttccgtccttgtccaggtggacaatccgatacaagcaattggggcatgcatatcagagaagccacgttctggcctttgctagtgcagatgtatgcatcaggcatttcgaggtaaaagaagctcaggtgagaatgttgtgatggttgatccactggaagctaagcgtctagctgctaaacaaatgcaagaaattagggccaaagaaaagctgaaggtgcattgcagctgtattggagtgtatcattccttagattaaatcaatcttatatgctaaaggaagaaaacttcatgataaggaaaggaggaaaacatttatctttttttttttggaccaatagttggtgatgaatcattgtttcagataactggagacagaactaggcttttacctgttcatgttgtcctgcgagttctccaattctaatttatttatttattgtgtgggtacaaacttgattgcatgttcttcagttgaggcatctaattaactgcaaaaggatattcaacttaatattacctagtggctgtaaattgcagtaatgttcacatgggcatttatattattatttaaaaaaaactctaccagcaggggaaattatagggaacatatcctgtgttcatggagctcttgtgctcatatgagcactttaaatctggtgcgttcatttctcatccagaaggtgagggcagcagtggcacacagagacagacggcgcggcgcaacaagggtggtcaagagtggcacacactagaaaatgtctattcacacttggatgagaaatgaaggcaccagatttaaagtgcatatgagcacaagagctccatgagcacaggatacgtcaaatttgacccaaatcactgctctgttttgcagaggcgcagtcaagcagaagctatcaatgggccattggcaatgataggactgactgctggattgatagtggaagctcagacaggaaaaggcatcttagggcaggagctgatgacacctgcaatggaatgatgagtctattgcttcgatttaacgtgtgattacatatatcttgaacttattataagccagtatgtcgcctgtagagtgtagacaggtacttttataatatataatcacaacttccatatgtactgatacattttatctttgttctgcttgctactgttttaattgaatacaagacatactatggaatatttaaatttgtcatttgtag

SEQ ID NO: 55256 - DNA, 733 bp, Zea Mays
aagaaaaacgaaaaacgaaaaactagagggtggaggacaacggtgtccagcaaaagagagagaagaggaggggaggaggtggaagtagcaagaatggcgtgctccaccaatctctgcttctcggcgtcgattcctcctcttccagcctcttcttcttcttctgtctcctcccccttcctcacggtggagcgtgtgtcctatgttccgtccttgtccaggtggacaatccgatacaagcaattggggcatgcatatcagagaagccacgttctggcctttgctagtgcagatggtaaaagaagctcaggtgagaatgttgtgatggttgatccactggaagctaagcgtctagctgctaaacaaatgcaagaaattagggccaaagaaaagctgaagaggcgcagtcaagcagaagctatcaatgggccattggcaatgataggactgactgctggattgatagtggaagctcagacaggaaaaggcatcttagggcaggagctgatgacacctgcaatggaatgatgagtctattgcttcgatttaacgtgtgattacatatatcttgaacttattataagccagtatgtcgcctgtagagtgtagacaggtacttttataatatataatcacaacttccatatgtactgatacattttatctttgttctgcttgctactgttttaattgaatacaagacatactatggaatatttaaatttgtcatttgtag

SEQ ID NO: 55257 - DNA, 1393 bp, Zea Mays
aagaaaaacgaaaaacgaaaaactagagggtggaggacaacggtgtccagcaaaagagagagaagaggaggggaggaggtggaagtagcaagaatggcgtgctccaccaatctctgcttctcggcgtcgattcctcctcttccagcctcttcttcttcttctgtctcctcccccttcctcacggtggagcgtgtgtcctatgttccgtccttgtccaggtggacaatccgatacaagcaattggggcatgcatatcagagaagccacgttctggcctttgctagtgcagatggtaaaagaagctcaggtgagaatgttgtgatggttgatccactggaagctaagcgtctagctgctaaacaaatgcaagaaattagggccaaagaaaagctgaaggtgcattgcagctgtattggagtgtatcattccttagattaaatcaatcttatatgctaaaggaagaaaacttcatgataaggaaaggaggaaaacatttatctttttttttttggaccaatagttggtgatgaatcattgtttcagataactggagacagaactaggcttttacctgttcatgttgtcctgcgagttctccaattctaatttatttatttattgtgtgggtacaaacttgattgcatgttcttcagttgaggcatctaattaactgcaaaaggatattcaacttaatattacctagtggctgtaaattgcagtaatgttcacatgggcatttatattattatttaaaaaaaactctaccagcaggggaaattatagggaacatatcctgtgttcatggagctcttgtgctcatatgagcactttaaatctggtgcgttcatttctcatccagaaggtgagggcagcagtggcacacagagacagacggcgcggcgcaacaagggtggtcaagagtggcacacactagaaaatgtctattcacacttggatgagaaatgaaggcaccagatttaaagtgcatatgagcacaagagctccatgagcacaggatacgtcaaatttgacccaaatcactgctctgttttgcagaggcgcagtcaagcagaagctatcaatgggccattggcaatgataggactgactgctggattgatagtggaagctcagacaggaaaaggcatcttagggcaggagctgatgacacctgcaatggaatgatgagtctattgcttcgatttaacgtgtgattacatatatcttgaacttattataagccagtatgtcgcctgtagagtgtagacaggtacttttataatatataatcacaacttccatatgtactgatacattttatctttgttctgcttgctactgttttaattgaatacaagacatactatggaatatttaaatttgtcatttgtag

SEQ ID NO: 55258 - DNA, 1805 bp, Zea Mays
aagataaagtcgacatggttgattttataaagaaagaaaaacgaaaaacgaaaaactagagggtggaggacaacggtgtccagcaaaagagagagaagaggaggggaggaggtggaagtagcaagaatggcgtgctccaccaatctctgcttctcggcgtcgattcctcctcttccagcctcttcttcttcttctgtctcctcccccttcctcacggtggagcgtgtgtcctatgttccgtccttgtccaggtggacaatccgatacaagcaattggggcatgcatatcagagaagccacgttctggcctttgctagtgcagatggtaaaagaagctcaggtgagaatgttgtgatggttgatccactggaagctaagcgtctagctgctaaacaaatgcaagaaattagggccaaagaaaagctgaaggtgcattgcagctgtattggagtgtatcattccttagattaaatcaatcttatatgctaaaggaagaaaacttcatgataaggaaaggaggaaaacatttatctttttttttttggaccaatagttggtgatgaatcattgtttcagataactggagacagaactaggcttttacctgttcatgttgtcctgcgagttctccaattctaatttatttatttattgtgtgggtacaaacttgattgcatgttcttcagttgaggcatctaattaactgcaaaaggatattcaacttaatattacctagtggctgtaaattgcagtaatgttcacatgggcatttatattattatttaaaaaaaactctaccagcaggggaaattatagggaacatatcctgtgttcatggagctcttgtgctcatatgagcactttaaatctggtgcgttcatttctcatccagaaggtgagggcagcagtggcacacagagacagacggcgcggcgcaacaagggtggtcaagagtggcacacactagaaaatgtctattcacacttggatgagaaatgaaggcaccagatttaaagtgcatatgagcacaagagctccatgagcacaggatacgtcaaatttgacccaaatcactgctctgttttgcagaggcgcagtcaagcagaagctatcaatgggccattggcaatgataggactgactgctggattgatagtggaagctcagacaggaaaaggcatcttagggcagctagctggatatctgacggctatttctagtttatttggacaataatagtgggccatctttggagatttattttttcacgttccttggccaggagagctcttatctgttgcatccacccaatttttgtgggggagttaatccgagcccagacttgtatgtttatcaagcacgcatgggctgaacattaattatacatgtaacggggtcgttctatgtagcccaaccatttctgatgatagaacctgctaaagagcagttcttcatcatacttaaatgtgaaatgttaagtctttgagaactctcctttttgcccaaaccattgagcctgtaacatgtcgattggactcagaagtctctgactggttgtttgtatatgcaggagctgatgacacctgcaatggaatgatgagtctattgcttcgatttaacgtgtgattacatatatcttgaacttattataagccagtatgtcgcctgtagagtgtagacaggtacttttataatatataatcacaacttccatatgtactgatacattttatctttgttctgcttgctactgttttaattgaatacaagacatactatggaatatttaaatttgtcatttgtag

SEQ ID NO: 55259 - DNA, 1200 bp, Zea Mays
ttggcccgtgggccgacccaataccatgaagaagcccatctaacggtgaggaaacaagataaagtcgacatggttgattttataaagaaagaaaaacgaaaaacgaaaaactagagggtggaggacaacggtgtccagcaaaagagagagaagaggaggggaggaggtggaagtagcaagaatggcgtgctccaccaatctctgcttctcggcgtcgattcctcctcttccagcctcttcttcttcttctgtctcctcccccttcctcacggtggagcgtgtgtcctatgttccgtccttgtccaggtggacaatccgatacaagcaattggggcatgcatatcagagaagccacgttctggcctttgctagtgcagatggtaaaagaagctcaggtgagaatgttgtgatggttgatccactggaagctaagcgtctagctgctaaacaaatgcaagaaattagggccaaagaaaagctgaagaggcgcagtcaagcagaagctatcaatgggccattggcaatgataggactgactgctggattgatagtggaagctcagacaggaaaaggcatcttagggcagctagctggatatctgacggctatttctagtttatttggacaataatagtgggccatctttggagatttattttttcacgttccttggccaggagagctcttatctgttgcatccacccaatttttgtgggggagttaatccgagcccagacttgtatgtttatcaagcacgcatgggctgaacattaattatacatgtaacggggtcgttctatgtagcccaaccatttctgatgatagaacctgctaaagagcagttcttcatcatacttaaatgtgaaatgttaagtctttgagaactctcctttttgcccaaaccattgagcctgtaacatgtcgattggactcagaagtctctgactggttgtttgtatatgcaggagctgatgacacctgcaatggaatgatgagtctattgcttcgatttaacgtgtgattacatatatcttgaacttattataagccagtatgtcgcctgtagagtgtagacaggtacttttataatatataatcacaacttccatatgtactgatacattttatctttgttctgcttgctactgttttaattgaatacaagacatactatggaatatttaaatttgtcatttgtag

SEQ ID NO: 55260 - DNA, 1532 bp, Zea Mays
accgtgatctcattgttccgcttggcccgtgggccgacccaataccatgaagaagcccatctaacggtgaggaaacaagataaagtcgacatggttgattttataaagaaagaaaaacgaaaaacgaaaaactagagggtggaggacaacggtgtccagcaaaagagagagaagaggaggggaggaggtggaagtagcaagaatggcgtgctccaccaatctctgcttctcggcgtcgattcctcctcttccagcctcttcttcttcttctgtctcctcccccttcctcacggtggagcgtgtgtcctatgttccgtccttgtccaggtggacaatccgatacaagcaattggggcatgcatatcagagaagccacgttctggcctttgctagtgcagatgtatgcatcaggcatttcgagtaggccatctattttttagggttggtaggattatgacatataataatgtttattgaacataactttatgtgcttttgaatttttttagaagtttaagttcaatttcttaggcctatatcccaaccaggataccgttattccttagtactctttactttatgcattatactaacccaggtcctggagaaagttattcaactttctttagtgccagttgctgcattcttattctgtataatacattctctcttggtagctatattgtttttttaatgaatcaggcatcacagggtaaaagaagctcaggtgagaatgttgtgatggttgatccactggaagctaagcgtctagctgctaaacaaatgcaagaaattagggccaaagaaaagctgaagaggcgcagtcaagcagaagctatcaatgggccattggcaatgataggactgactgctggattgatagtggaagctcagacaggaaaaggcatcttagggcagctagctggatatctgacggctatttctagtttatttggacaataatagtgggccatctttggagatttattttttcacgttccttggccaggagagctcttatctgttgcatccacccaatttttgtgggggagttaatccgagcccagacttgtatgtttatcaagcacgcatgggctgaacattaattatacatgtaacggggtcgttctatgtagcccaaccatttctgatgatagaacctgctaaagagcagttcttcatcatacttaaatgtgaaatgttaagtctttgagaactctcctttttgcccaaaccattgagcctgtaacatgtcgattggactcagaagtctctgactggttgtttgtatatgcaggagctgatgacacctgcaatggaatgatgagtctattgcttcgatttaacgtgtgattacatatatcttgaacttattataagccagtatgtcgcctgtagagtgtagacaggtacttttataatatataatcacaacttccatatgtactgatacattttatctttgttctgcttgctactgttttaattgaatacaagacatactatggaatatttaaatttgtcatttgtag

SEQ ID NO: 55261 - DNA, 378 bp, Zea Mays
cgacgatgacctttgccacgtcatcaggcccctgcgctgctgcgcaaccccgctccacgccccagcgatgggatcacccattcctcctttcgttgcgcgatgggatctagcagcggcaagaggtcctcaattttcgacgacgagctcctgtaggtcctgacgacccgccctcggccacggcaccgcggacggcctccccgagcgccatgaccaggctgccgccacgccgtagagccaacgctccctgtagcacctgcggtcctggaaggaggcgatggagagaggtctggaggagaatgtgaggattgtggaggtggacaacgtctcctgaaaatgctaaatttagtttacgtgctgcttctgaatgtaggcgatggg

SEQ ID NO: 55262 - DNA, 4815 bp, Zea Mays
cagctctccaccaagagctgtaccccacaccactaggcactagtccactacctaacgctacctgccttttcaccgcgtcgtgcgccaccgccacgttgagctcgcgtccgtcccagatccgccgtgctcctccatcgctcgcgcaaggttggttactggcctcgcctgctcgcctttccttcaactccttcccgcccgcaggatttgggctttctcgatcacgaggcgctccgatgaagatcacggtgcgggggtcggagatggtgtacccggcggcggagacgccgcgccgccggctctggaactcggggcccgacctggtggtgccgcggttccacacgcccagcgtctacttcttccgccgcgaggacgcggacgggaacgacctggcgggcgcggacgggagcttcttcgacggggcgcggatgcggcgcgcgctggccgaggcgctcgtgcccttctacccgatggccggccggctggcgcgcgacgaggacggccgcgtcgagatcgactgcaacgcgggcggggtgctgttccaggaggcggacgcgcccgacgccaccatcgactacttcggcgacttcgcgcccaccatggagctcaagcgcctcatccccaccgtcgacttcacggacgacatctcctccttcccgctgctcgtgctccaggtgaggaaaatcgatccatccccacctaacatcttcgggcttcagttctctgcatttcactagagttttgacgatttgatcggggtcggggaagggttgaaacaaagtggtgggcttcggttatctgagtcgccgccagcgcacaacgtctgggtcaacgtaggtagactcgtcacaattgttgggtgcatgtgcggcgtgtgtatagtatacatgggctggcgccgacgcggatcgatgcgcgtggagacaacctgtcaggcctgcatccgttgttcagctgactagccgaggtgtggaggacgatctccagatcttcttacatttatgaatgaaagatgtggccaaaaaaaaaacctgcaaaggactccgtcattcatgtagctagcagtgctctataaagaaatcgtacctgtagtcaaatgagcgttcaatagtgcgtgccgacgtgccgtgccatagtattaagctaatctagtaatctgtcaaggggttcgatgttttgcaccaatcggtgtgtgcatcgtgtttcgaatacaaaacgctctctgctccaaatatcactcctccaaatatagggaatattataatttggaaaagtcaaatatatgactatatagatatttaccatcacattcgtaggttcatactgatgtgccttttagtactttgcttttgcaatggctaataacagatcgtagagaaaatcaattgtaagagtacacaccttgaaatgcttcgaaatcctaatatgccttgtaaaaacaacccgagggagtactcaaaacttgtttcttattttttttttagagtagcgctctgtttattttttagaagcatttatgcgaatgaaagtgttgtgttaccatctggccttgaacatgcactgtctaaatgtttagagcatctttaaaatcttgttaaaacagttcacttaatcggttgtttcggccaaaaaaaccaaaaagggtcatccaacagttttataaacaactcccctaatgttaagcacgtgttccctcaactcttaggccccgtttggtttggtgttactaaagtttagtcacttttagttcttaaagaagcaaacatggtgactaaagtagagtgactaaacttaagttctttagtcaccaagaaactgactaaaatagactaaaatatgatttttacctcatttgacctcacctctttcttagtgcagcagacatccactaattaatagcggtaatgcagtcattattcgcaccaattaatgtttttagccaggtttagccattgaaaccaaacggggtacttagtcactaaagtttagtcaggtgactaaattgaaccaaatgagagcttagataggtatgtcttttgtgctcgttaagcttagcaatttttggaagaaaaaaaaaccaagtattactggatattattaagtgttataagactggttctatgcagggtttcatgaacgttaaggagcttttagaaatgctgatatttaaggatatcagcataaaatcatcagttcaccaaatgatatttaaggagcttttagaaatgctcatgttcgtggaatccgtggaaatcatacgggtagccccccttcccatatagatcggataaaattatactaccttatctgttttatttgacgccaaatagtgtaaaattaaactacaaaacgtcaaagcacagtaccatggttggtgttgttaggccgaaatatcctctctctctttttttcttcgagaaaagaaactatcgtgacagcaacgtgccaccacctcgagaatgcgttaatacgtaagctagcgtatgcctatggctatgctctatcatgtgtttgccatcaactaacgaacagatgcctagcacctacggagtgtatcatttagctactgcacatgacagcaccttctggaacacatggattggaaataaaaacagcttcttttatttgtttaaggttcacagatgtgacagatccaatcaaatcaagccatgactcgatcagagccaaaccgcgcaacttcccgcggtgtgacccagtaaccactagctagccacactgatgattaaagtaggttgctgctttcgttgaacagccgaatgtggttgcgcgctagttgttctttgcttggcaggcacgcgttgcttgctcgatcaaagaaaatgatagcctaacaggggcgcccagaaagatgatgctttggacttttcttgaggcagcaagcaaagtttggtggtttcttctgttgtgatctgcaaggtcttttgctctgtatagcacccgttcgtgttagctgtgcatccatgattatgactggcctcaactactgtgaaaacgtagcatggagcgaggtgccgagaaacagcaagattggacaaacagaatttttagattttcttcaattgttggggccggggtgtgggtttgtgcaataatccgacaacaataatggtatccaattggaattgcaaaactgtatacgtactacgctagaaacgtgggatccgcttggagtcttggtattggattgaagttgcaaggtgctatagttaattcatctagtccattcggttttggtgcgatgattgtttcgtgttagctgtgctacctaccaggcaacaatctgctgatgaaatcatatgcagattaccataatcccaagcagcttagttgtcggtccttctttttctacggtagagaagaaagattgccagcctcctatctcattcagtcacctaccgtcatctggtatatgctgaatattgacttcagtctcgtgctctcgtcttgtattcttcgtttgatagggacaaaagttaaaagaatgcttatacttcaaaaaaagtggtatatgcatgaaacaatttcggcacctaaccaaaattggcgcgcgcttttgctcattgctgcaggtgacccacttcaagtgcggtggcgtggctatcggcgttggcatgcagcaccacgtagccgacggcttctccggcctgcacttcatcaactcgtgggcggacctctgccgcggcgtcccgatcgccgtcatgcccttcattgaccgctcgctcctccgcgcgcgcgatccgccgaccccggcctacccgcacatcgagtaccagccggcgcccgccatgctatctgagccgccacaggcggccctcacgtccaagccggcgacgccgcccacagccgtggctatcttcaagctctcccgcgccgagctcgtccgcctccgttcgcaggtccccgcgcgcgagggcgcgccgcggttcagcacgtacgctgtgctggcggcgcacgtgtggcggtgcgcgtccctggcgcgcggcctgccggccgaccagcccaccaagctgtactgcgccacggacgggcggcagcggctgcagccgccgcttccggagggctacttcggcaacgtgatcttcacggcgacgccgctggccaacgccggcacggtgacggccggggtggcagagggcgcgtccgtgatccaggccgcgttggaccggatggacgacgggtactgccggtcagcgctggactacctggagctgcagccggacctgtcggcgctggtccgcggggcgcacacgttccggtgccccaacctggggctcaccagctgggtgcgcctgcccatccacgacgcggacttcgggtgggggcggcccgtgttcatgggccccggcggcatcgcctacgaggggctcgcgttcgtgctccccagcgccaaccgcgacggcagcctgtccgtggccatctcgctgcaggcggagcacatggagaagttccggaagctcatctacgacttctgatctccaactcctccccacaagtcatcagtaccagtacgcgcaacacaaagaagcaagagaccgttgggagtaggttgcagcaatattctttgatttcacacatagttcctgcacacttttccgttcctgcctgccccctttgggcagggcgcataccttttgtgccgaattatttacgagcccctgcaattgtatgatgaatgaacaatgaatgatacagattaataagattaattaacttatctcttgagctttttttcttatataggcatagaagagtatatgcatgacagtgataccattcaaaacgctgggttggatcgag

SEQ ID NO: 55263 - DNA, 4730 bp, Zea Mays
ccgctgttgctttccgctggtcatccatcccaccaaacgcccagcatttttcttttcttcatccaaaaaaaaccccaacccgagactcgggcagattcacgggggacgaccacgaaggggcgcgcgcacggcagcctggctataaaagatgaagatcacggtgcgggggtcggagatggtgtacccggcggcggagacgccgcgccgccggctctggaactcggggcccgacctggtggtgccgcggttccacacgcccagcgtctacttcttccgccgcgaggacgcggacgggaacgacctggcgggcgcggacgggagcttcttcgacggggcgcggatgcggcgcgcgctggccgaggcgctcgtgcccttctacccgatggccggccggctggcgcgcgacgaggacggccgcgtcgagatcgactgcaacgcgggcggggtgctgttccaggaggcggacgcgcccgacgccaccatcgactacttcggcgacttcgcgcccaccatggagctcaagcgcctcatccccaccgtcgacttcacggacgacatctcctccttcccgctgctcgtgctccaggtgaggaaaatcgatccatccccacctaacatcttcgggcttcagttctctgcatttcactagagttttgacgatttgatcggggtcggggaagggttgaaacaaagtggtgggcttcggttatctgagtcgccgccagcgcacaacgtctgggtcaacgtaggtagactcgtcacaattgttgggtgcatgtgcggcgtgtgtatagtatacatgggctggcgccgacgcggatcgatgcgcgtggagacaacctgtcaggcctgcatccgttgttcagctgactagccgaggtgtggaggacgatctccagatcttcttacatttatgaatgaaagatgtggccaaaaaaaaaacctgcaaaggactccgtcattcatgtagctagcagtgctctataaagaaatcgtacctgtagtcaaatgagcgttcaatagtgcgtgccgacgtgccgtgccatagtattaagctaatctagtaatctgtcaaggggttcgatgttttgcaccaatcggtgtgtgcatcgtgtttcgaatacaaaacgctctctgctccaaatatcactcctccaaatatagggaatattataatttggaaaagtcaaatatatgactatatagatatttaccatcacattcgtaggttcatactgatgtgccttttagtactttgcttttgcaatggctaataacagatcgtagagaaaatcaattgtaagagtacacaccttgaaatgcttcgaaatcctaatatgccttgtaaaaacaacccgagggagtactcaaaacttgtttcttattttttttttagagtagcgctctgtttattttttagaagcatttatgcgaatgaaagtgttgtgttaccatctggccttgaacatgcactgtctaaatgtttagagcatctttaaaatcttgttaaaacagttcacttaatcggttgtttcggccaaaaaaaccaaaaagggtcatccaacagttttataaacaactcccctaatgttaagcacgtgttccctcaactcttaggccccgtttggtttggtgttactaaagtttagtcacttttagttcttaaagaagcaaacatggtgactaaagtagagtgactaaacttaagttctttagtcaccaagaaactgactaaaatagactaaaatatgatttttacctcatttgacctcacctctttcttagtgcagcagacatccactaattaatagcggtaatgcagtcattattcgcaccaattaatgtttttagccaggtttagccattgaaaccaaacggggtacttagtcactaaagtttagtcaggtgactaaattgaaccaaatgagagcttagataggtatgtcttttgtgctcgttaagcttagcaatttttggaagaaaaaaaaaccaagtattactggatattattaagtgttataagactggttctatgcagggtttcatgaacgttaaggagcttttagaaatgctgatatttaaggatatcagcataaaatcatcagttcaccaaatgatatttaaggagcttttagaaatgctcatgttcgtggaatccgtggaaatcatacgggtagccccccttcccatatagatcggataaaattatactaccttatctgttttatttgacgccaaatagtgtaaaattaaactacaaaacgtcaaagcacagtaccatggttggtgttgttaggccgaaatatcctctctctctttttttcttcgagaaaagaaactatcgtgacagcaacgtgccaccacctcgagaatgcgttaatacgtaagctagcgtatgcctatggctatgctctatcatgtgtttgccatcaactaacgaacagatgcctagcacctacggagtgtatcatttagctactgcacatgacagcaccttctggaacacatggattggaaataaaaacagcttcttttatttgtttaaggttcacagatgtgacagatccaatcaaatcaagccatgactcgatcagagccaaaccgcgcaacttcccgcggtgtgacccagtaaccactagctagccacactgatgattaaagtaggttgctgctttcgttgaacagccgaatgtggttgcgcgctagttgttctttgcttggcaggcacgcgttgcttgctcgatcaaagaaaatgatagcctaacaggggcgcccagaaagatgatgctttggacttttcttgaggcagcaagcaaagtttggtggtttcttctgttgtgatctgcaaggtcttttgctctgtatagcacccgttcgtgttagctgtgcatccatgattatgactggcctcaactactgtgaaaacgtagcatggagcgaggtgccgagaaacagcaagattggacaaacagaatttttagattttcttcaattgttggggccggggtgtgggtttgtgcaataatccgacaacaataatggtatccaattggaattgcaaaactgtatacgtactacgctagaaacgtgggatccgcttggagtcttggtattggattgaagttgcaaggtgctatagttaattcatctagtccattcggttttggtgcgatgattgtttcgtgttagctgtgctacctaccaggcaacaatctgctgatgaaatcatatgcagattaccataatcccaagcagcttagttgtcggtccttctttttctacggtagagaagaaagattgccagcctcctatctcattcagtcacctaccgtcatctggtatatgctgaatattgacttcagtctcgtgctctcgtcttgtattcttcgtttgatagggacaaaagttaaaagaatgcttatacttcaaaaaaagtggtatatgcatgaaacaatttcggcacctaaccaaaattggcgcgcgcttttgctcattgctgcaggtgacccacttcaagtgcggtggcgtggctatcggcgttggcatgcagcaccacgtagccgacggcttctccggcctgcacttcatcaactcgtgggcggacctctgccgcggcgtcccgatcgccgtcatgcccttcattgaccgctcgctcctccgcgcgcgcgatccgccgaccccggcctacccgcacatcgagtaccagccggcgcccgccatgctatctgagccgccacaggcggccctcacgtccaagccggcgacgccgcccacagccgtggctatcttcaagctctcccgcgccgagctcgtccgcctccgttcgcaggtccccgcgcgcgagggcgcgccgcggttcagcacgtacgctgtgctggcggcgcacgtgtggcggtgcgcgtccctggcgcgcggcctgccggccgaccagcccaccaagctgtactgcgccacggacgggcggcagcggctgcagccgccgcttccggagggctacttcggcaacgtgatcttcacggcgacgccgctggccaacgccggcacggtgacggccggggtggcagagggcgcgtccgtgatccaggccgcgttggaccggatggacgacgggtactgccggtcagcgctggactacctggagctgcagccggacctgtcggcgctggtccgcggggcgcacacgttccggtgccccaacctggggctcaccagctgggtgcgcctgcccatccacgacgcggacttcgggtgggggcggcccgtgttcatgggccccggcggcatcgcctacgaggggctcgcgttcgtgctccccagcgccaaccgcgacggcagcctgtccgtggccatctcgctgcaggcggagcacatggagaagttccggaagctcatctacgacttctgatctccaactcctccccacaagtcatcagtaccagtacgcgcaacacaaagaagcaagagaccgttgggagtaggttgcagcaatattctttgatttcacacatagttcctgcacacttttccgttcctgcctgccccctttgggcagggcgcataccttttgtgccgaattatttacgagcccctgcaattgtatgatgaatgaacaatgaatgatacagattaataagattaattaacttatctcttgagctttttttcttatataggcatagaagagtatatgcatgacagtgataccattcaaaacgctgggttggatcgag

SEQ ID NO: 55264 - DNA, 1179 bp, Zea Mays
gtcccttctctgaacaccaattttgttgatagtggtagtaatgatctgcaacagctttgcattgacttttgtggacgaattttttgtcctaacttgttagggaggatccagaaaccgaagttactggagagagtgctgcagatgacagtgctggaagcacagacgaaactccatctattattgtgacaacactgcaatcatacagagtagctctgattaatgatgatgacgcaaaagctgctgagatagaatcctttttactttctatcgaggatgagaagaactctcttttgaacaaaatcactgctctagatgtggaactagcaactcaacgagaacgtatcttgcggattagtgctgattttgacaatttcaggaaaaggacagaaaatgagaagcttaacatgatggaaaatgtgcaaggggaacttatagagagttttttgcctgttctcgataactttgaaagagcaaaaatgcaaataaaggtggaaacagagggagaggagaaaataaacaatagctatcagagcattaataagcaattcatcgagattcttaattcattgggtgttgaagatgttgaaactgttggcaaaccatttgatcctatgctgcacgaggctattatgagagaagaatcatcggagtatgaagaggggatcatactccaggaattcagaaaaggcttcaaacttggggaaagactacttcgcccagcaatggtcaaggtgtctgcagggccaggccctgaaaattctggagatgatgaccctacagttgttgaagatagtgtggcacctcaaaaggttgaggatgttgaagaagacggttttgatgacggcgatgcagaataggtggctggagcttcagctgtgaatcaacaagaacaggtccagaaattttgatgtttttctggagcgtgccaagcaggtaataggatagtgccaattcgttcaagctagagttaggtccccaaatgtgctgttctttactgctactgacatgggggtgttggtattgcgacaaatttgtgtttctacccgccgtggtcaactttttgttcttacgaaggggaattttcgtggttcatacatgaaaaaaaaaatgatatttgtaaggactaaattggctcagtttgctattgataatcaatatatgaattccattgtttgtaca

SEQ ID NO: 55265 - DNA, 1122 bp, Zea Mays
attttggtgaccgtagcttatctaacctctgccgatcctcctttgaggatccagaaaccgaagttactggagagagtgctgcagatgacagtgctggaagcacagacgaaactccatctattattgtgacaacactgcaatcatacagagtagctctgattaatgatgatgacgcaaaagctgctgagatagaatcctttttactttctatcgaggatgagaagaactctcttttgaacaaaatcactgctctagatgtggaactagcaactcaacgagaacgtatcttgcggattagtgctgattttgacaatttcaggaaaaggacagaaaatgagaagcttaacatgatggaaaatgtgcaaggggaacttatagagagttttttgcctgttctcgataactttgaaagagcaaaaatgcaaataaaggtggaaacagagggagaggagaaaataaacaatagctatcagagcattaataagcaattcatcgagattcttaattcattgggtgttgaagatgttgaaactgttggcaaaccatttgatcctatgctgcacgaggctattatgagagaagaatcatcggagtatgaagaggggatcatactccaggaattcagaaaaggcttcaaacttggggaaagactacttcgcccagcaatggtcaaggtgtctgcagggccaggccctgaaaattctggagatgatgaccctacagttgttgaagatagtgtggcacctcaaaaggttgaggatgttgaagaagacggttttgatgacggcgatgcagaataggtggctggagcttcagctgtgaatcaacaagaacaggtccagaaattttgatgtttttctggagcgtgccaagcaggtaataggatagtgccaattcgttcaagctagagttaggtccccaaatgtgctgttctttactgctactgacatgggggtgttggtattgcgacaaatttgtgtttctacccgccgtggtcaactttttgttcttacgaaggggaattttcgtggttcatacatgaaaaaaaaaatgatatttgtaaggactaaattggctcagtttgctattgataatcaatatatgaattccattgtttgtaca

SEQ ID NO: 55266 - DNA, 956 bp, Zea Mays
aaaaacacctcaatctgtttctgtttcagtttcagatttcagcaacaacacctcaatctgtttcagtttcagatttcagcaacaacacctcaatctgtttcagtttcagattttagcaacaagatgcaacaacacactgatttcagcacatgcatcacatcaattcagtccgcgaagctcttacaacacatgcaaatttctgtcatttcagcaaagctcctacaacacaatgagcctacaagcctactgtcgttcactgaaaccccaccgcgaggggaggaggccgcagaagttgctaatgtccccgcttgacggagacggatagtgccgcggacggggcatgaacagctctgttgttcgatggagcaggagcgcgacgcgaggagaggagctcgacaaggccggagtcctgacgaagccgaaggaagcagcagatcgacgcgtacaggaacacgcagctcgagtctcgctgcatcacgacgcgcagctgaaggtcgggcgaaggtgggcgtggagtagggaggagcacaccgccggccgtgggcatcgcagcgacgaaagctgacatgaggttgtgcggcgccggcgcagaggagcacgccgccacgacatgggaaacacagagacgggcgcgacgccggcgaagaggactcctcgacgacgggaccggatggagcaggcgagcacgacggtctgcctcgggcgatgggggcgcaaggaggcacagcgggccgcgcgtccgcctcctgcttgcgcatccgacggaggcgcagcggaccgcacgggccgcgcgcgcggcatcggagaagtagcagtcgacaccatccggagaattagtagcccgcccagagagctagcaggccgccgcgtcgtggagccagggagaggaggtgcttcgaggagggagacgagatgcggcccggcggcgcgtgctggccgactcgggagcaagaagc

SEQ ID NO: 55267 - DNA, 2305 bp, Zea Mays
tagcagcaaaaacacctcaatctgtttctgtttcagtttcagatttcagcaacaacacctcaatctgtttcagtttcagatttcagcaacaacacctcaatctgtttcagtttcagattttagcaacaagatgcaacaacacactgatttcagcacatgcatcacatcaattcagtccgcgaagctcttacaacacatgcaaatttctgtcatttcagcaaagctcctacaacacaatgagcctacaagcctactgtcgttcactgaaaccccaccgcgaggggaggaggccgcagaagttgctaatgtccccgcttgacggagacggatagtgccgcggacggggcatgaacagctctgttgttcgatggagcaggagcgcgacgcgaggagaggagctcgacaaggccggagtcctgacgaagccgaaggaagcagcagatcgacgcgtacaggaacacgcagctcgagtctcgctgcatcacgacgcgcagctgaaggtcgggcgaaggtgggcgtggagtagggaggagcacaccgccggccgtgggcatcgcagcgacgaaagctgacatgaggttgtgcggcgccggcgcagaggagcacgccgccacgacatgggaaacacagagacgggcgcgacgccggcgaagaggactcctcgacgacgggaccggatggagcaggcgagcacgacggtctgcctcgggcgatgggggcgcaaggaggcacagcgggccgcgcgtccgcctcctgcttgcgcatccgacggaggcgcagcggaccgcacgggccgcgcgcgcggcatcggagaagtagcagtcgacaccatccggagaattagtagcccgcccagagagctagcaggccgccgcgtcgtggagccagggagaggaggtgcttcgaggagggagacgagatgcggcccggcggcgcgtgctggccgactcgggagcaagaagctgctgtttgattcagaatgagattggggaaagttttaggtgggccccactgtcaagcacaataaagtggacggaaatcagatgtaaaccgcgtataagtgtccccctgaggtcagttagctcgtggaggggcaaaactgagcacaaagtaaaattaggggtagcaatgagaaggcagtccaaagtaagggcaccaatataaagatcccaagataattcgacgtatgtcagttgcaaatatttgaataataaagcaaatgtaaaagataaagaattcataagtgttcatacataaaaatacaaacaaattttacattaccattgcatgtgagaaattatgtcatactaaaacaaaaaattatatctctagagactcgatgtttaatgaagttttgaaggaaaacataaatgtgaccgcttcataattgtaaaaatacattgcattactataccaactgaacttacaggatatgaagctcgacacttgaacaatgccatgaattacaatcactagtaatttgcccgcgccatgcgcgagtctttggttgatttgtttacaccatttaaaaagtgtagctttagatgtatagaagcaacaatagtatgtagtattaaaacagttcattctataaatataacaacataagcaccctagaagcaacaatattataatggtgctgcttgcagagggtgtggatacatgcatgtattgaagtaaataaatattggtcttaacggccacaaaaaatggtactttgaaccaatgtttaaagtgagtttatgcagtagggtactaagagtggatcaaccatatgtacaaatttcttatagcaataaaatattggtcttaaaggctatcggagatcaacataactaaaatatgtggtgcttcttatgattgtgtttaatctttatggagtttattatcctctttttcctatatgtagcgtttgtttcttcagactgtatatgttgtgtagagtagtaaatgcgaagcttattggtttctaactttagagaaagatatccagttacttgttaatgcttccatatattcgtctctcaaatgacaatattaccaagctgttgtatcgagcactaagcctaatgctaaatgggtacaacctaatcaaatggcggatgaggacgactcgtgcttcatgttgtcttgtattgagtaataagttccaccaccgtagataggtttttgttccggtgtgtagagttggttagtacaaaattgcagtagaacattgcaattcacgaacttacactgtgaagagcctagatactatattacaatggttctggtcgcagctagttaaagcaatagaaacttggtc

SEQ ID NO: 55268 - DNA, 1757 bp, Zea Mays
aagcaaccccgaaatcttcaacgctattgccactgcgccatgcctgtcccgcacctcctctcgagtctcgccacttcccctaacctagtcaccgccgctccaccggaatggagcaacgtggcggtgcccgacacaacttcgtgccgcactacgactcccgcctccgcttcaccagggactcaccgcccgtgatgatatggcgtgaggcgatttgtggggaagttgggctcgaagagagcgtgagtggttggtgatgaaccaaaaaaggcatcaaccatgttcgtcggaggattttgtcgcagaggcgacgaagagggggtctaggaggctctcgcctttcgacaaatagccaacaactcaacgcaatgtgcaagagcttctatatagtattgacaatgaaatatatgacattacacatatgaggctatatggtttgcaaaaaatacaaaaggaaaatttatccgaaagcacttatgctttagctctaattgccccatgtataagtttaagttcaaaatagtgtggtatgtctgctgacgaactgttttttgcaggtaaccaactaaccatgcatgaatcacccttgctaaaccagaggagctgatctcatcgcggacggaattacctgagaggataaaaggctaaaactggcgcatatggatttctcaacgaaacacaactggctgacctcagttttaggaggtgcaaaattggccgtccaatgtagagacccaggtgaagacatgtattgggaatccagtaaaatgacacagcagaactcacattttcacaagagatttttcaagagattttcattttcttcggtttgggaatcccattttcctaaaagatttccatttttcgaagaaaaattagttcatttttcattgggaaaatagaaatcccttaaaaaatggactttccaaactagttctaaatgtgagttatgttgtgtcatttgtccctcaccttggagatccaaggcctgcacaccccatactagatagaaacagagaattgaattgtattacttagggctagtttggaaacctcaaatttccaagtgttttctatttttccatgggaaaatgaactaattttccttggaaaaatagaaatcccttggggaattggggttcccaaactagcccaccccaatttttcatgggatttctattttcccaaactagcctttataggtctcagaaaagcactcgactgagcaggtgctccccccttctctcgacttctattccttttttactttttggtctctaggagcagcacaccatcgtgtctgtcttaacatgatgttgcgcaacacaccagctgagtatttttttctagtattcatagaagcttactatttggggctttggcgggccaaggttcaggtataaatttaatccatacttttggcacatttaaacttttattaaatagatgtattttattcattgcgctatttactattttacctatgatacgcttctcatggaacaaaatctcaaaaagtgtactttatgatctgtggagagatgtccaagggcctttgttgatgcactaccggaatcgacggctttgccgagtgcctgaagcactcggcaaagccttaaaaacactcactagactctgagcaatggatgcccagtccaatacatttcgcattctgcatctgacatggtgtcaacaaaactcgctgccctgacaagtacgcaacattgcttgactgctattcttgcagaggtttgttttct

SEQ ID NO: 55269 - DNA, 1595 bp, Zea Mays
  misc_feature (895)..(994): n is a, c, g, or t
cttcactcgagccaaaccccctcaactcaactgctgaacgcagagttcgatctagcacgcgcagcggcggccgccgcccacaatggcgtcccttttcaaggacccgagcaagctctcagcgtacagggaccgccgattcaagggcacacaggaggagtatgaggcaacgctgcatgcgtcgacaacgctgtacattgggaatatgtccttctacaccacggaggagcaggcctacgagctcttctcccgcgctggcgagatcaagaagatcatcatggggctcgacaagaactctaagaccccatgcggtttctgcttcgtactgtactactccagggaggatgctgaagatgctgtcaaatacatcagtggaacgatgcttgacgatcgtccaatccgtgttgatttcgattggggctttgaagaaggcaggcaatggggccgtggacgaagtggtggacaagtgagagatgagtaccgtacagattatgatcctgatatccttcgatgctattctattacagtttactccattccgatttggtgttatagaatatagaaagccatatgatgtttccataaatgccccacacctcctggagttaccaagtttccttaatgaatcaaacgtagaggtggttacggtaagatggttcagagggaactagaagcacaaagagaactagttgactatggtggatctttccaaccaaatgcaccacctccctatgagagaggtgagcggaagagaggatacggggactctcataggaatgacagaggagattaccagcggaaacgctaccggagcagcgatgaccggtcagcaccagaggagtccaagagagcgcccgactctgatccagcggagaagaatcctagatttcgcgagaannnnnnnnnnnnnnnnnnnnnnnnnnnnnnnnnnnnnnnnnnnnnnnnnnnnnnnnnnnnnnnnnnnnnnnnnnnnnnnnnnnnnnnnnnnnnnnnnnnngttgactttgatgaagaagaggatgattacgtccaagagacgtcgtcgctaaaagctgtgtggaacagtcgttgctacatgcagctgtttctggtgtccagtcgctgcagaagagtccacagcgagcagcaagtatccggatttcgccctgctgtgcctgtactgttcctccttttcgggctagtttggagccacaaaactagagcagattggaggggccaaaatacacttcttattcaaaatttgaataataagtggatttttgtttctccaatcccttccggttttatggctcccaaactagtccatctagtgcgtcggttttacatgtggttcaagtggggtactgtgtgctaacagatacaacaacgaggcttgtctgtatgtctgctgacactagagaccaatgcatataatgattctaatttaggccccgtttgatgattctaatttaggctccgtttggtaaggcttcggtttctttaaaaacagttctgactcggagccggagccgttttacaattcgtttggtaaaatagtttttcttgtatttattttgaattatgtattagagaaatgatagagaagccagtagaaacca

SEQ ID NO: 55270 - DNA, 1566 bp, Zea Mays
  misc_feature (866)..(965): n is a, c, g, or t
aaacatccaagtaatgtgtgagaatgtgagttcagatattataatttagtagtggaatcggaaggatgaggcaataaaaaaaaattgcccacgcccgactcttcttcactcgagccaaaccccctcaactcaactgctgaacgcagagttcgatctagcacgcgcagcggcggccgccgcccacaatggcgtcccttttcaaggacccgagcaagctctcagcgtacagggaccgccgattcaagggcacacaggaggagtatgaggcaacgctgcatgcgtcgacaacgctgtacattgggaatatgtccttctacaccacggaggagcaggcctacgagctcttctcccgcgctggcgagatcaagaagatcatcatggggctcgacaagaactctaagaccccatgcggtttctgcttcgtactgtactactccagggaggatgctgaagatgctgtcaaatacatcagtggaacgatgcttgacgatcgtccaatccgtgttgatttcgattggggctttgaagaaggcaggcaatggggccgtggacgaagtggtggacaagtgagagatgagtaccgtacagattatgatcctggtagaggtggttacggtaagatggttcagagggaactagaagcacaaagagaactagttgactatggtggatctttccaaccaaatgcaccacctccctatgagagaggtgagcggaagagaggatacggggactctcataggaatgacagaggagattaccagcggaaacgctaccggagcagcgatgaccggtcagcaccagaggagtccaagagagcgcccgactctgatccagcggagaagaatcctagatttcgcgagaannnnnnnnnnnnnnnnnnnnnnnnnnnnnnnnnnnnnnnnnnnnnnnnnnnnnnnnnnnnnnnnnnnnnnnnnnnnnnnnnnnnnnnnnnnnnnnnnnnngttgactttgatgaagaagaggatgattacgtccaagagacgtcgtcgctaaaagctgtgtggaacagtcgttgctacatgcagctgtttctggtgtccagtcgctgcagaagagtccacagcgagcagcaagtatccggatttcgccctgctgtgcctgtactgttcctccttttcgggctagtttggagccacaaaactagagcagattggaggggccaaaatacacttcttattcaaaatttgaataataagtggatttttgtttctccaatcccttccggttttatggctcccaaactagtccatctagtgcgtcggttttacatgtggttcaagtggggtactgtgtgctaacagatacaacaacgaggcttgtctgtatgtctgctgacactagagaccaatgcatataatgattctaatttaggccccgtttgatgattctaatttaggctccgtttggtaaggcttcggtttctttaaaaacagttctgactcggagccggagccgttttacaattcgtttggtaaaatagtttttcttgtatttattttgaattatgtattagagaaatgatagagaagccagtagaaacca

SEQ ID NO: 55271 - DNA, 711 bp, Zea Mays
actcgagccaaaccccctcaactcaactgctgaacgcagagttcgatctagcacgcgcagcggcggccgccgcccacaatggcgtcccttttcaaggacccgagcaagctctcagcgtacagggaccgccgattcaagggcacacaggaggagtatgaggcaacgctgcatgcgtcgacaacgctgtacattgggaatatgtccttctacaccacggaggagcaggcctacgagctcttctcccgcgctggcgagatcaagaagatcatcatggggctcgacaagaactctaagaccccatgcggtactactccagggaggatgctgaagatgctgtcaaatacatcagtggaacgatgcttgacgatcgtccaatccgtgttgatttcgattggggctttgaagaaggcaggcaatggggccgtggacgaagtggtggacaagtgagagatgagtaccgtacagattatgatcctggtagaggtggttacggtaagatggttcagagggaactagaagcacaaagagaactagttgactatggtggatctttccaaccaaatgcaccacctccctatgagagaggtgagcggaagagaggatacggggactctcataggaatgacagaggagattaccagcggaaacgctaccggagcagcgatgaccggtcagcaccagaggagtccaagagagcgcccgactctgatc

SEQ ID NO: 55272 - DNA, 1871 bp, Zea Mays
agatatgaatgtaatgcatgatcgttcacttcactaggtagaattggatggtttgggaggtggatgatggcaagctctctgaaaggactatttctgatgaattgcctcaggaatcttcaaaggcagagcaagatgttagccgtcctgaacaagacggtacttgtatgaatggtaatacagatactgatcagttgaaatctgaccacaatgaaggtgcggagttcgatactgcaaagcccgaaaagaaagctgccgttgattcagacaaaagtgctaagcttaaactgtccgataaatgtgaagcacctgtgcattctgatgctgacactaaaaaggaagcatctgcagagggtaccgatggagccgctgatgatacatcaacggctgctgattgtacacctaaaccaaagcgaggccgtcctcctggcccaaagtcatcgcagaagaaggctgctggaaaggatcaatcttcaggttcagatttgaaaaaggtcaatgaggcaggtgattcagccggaaagttggcgaaacgatcagcgaaggatgagaagtccacaaagaaggctggtgaaggagaatcatctaagaagacccaaaagtacaattcaaagcaacagaaggatgaaaacctatctgaggatcctgccaaggatctgagtttaaaggaaatgataacaccaaaatcttcgactaaggtcccaggtagaaccaaagggcaaagcacagagaatagcacacctaaaatgaagcaagaacaagaaactgaagagcctcctcgttcaaggaaaagcaaaggacttgataaaagtctagttggtgcaaggatcaaagtttggtggccagatgataagatgttctacaatggtgttgtggagtcatttgattctgtttctaagaggcacaaggtcgcatatgatgatggggacgtagaggtactactgttgagggatgaaaagtgggaattcatcagtgaggagaagggagcttctgtggcatctgaaacgccaggaggcagaaaaagaaaagctgatgcagtgaaggaagaaaatacagagacacctaaaagtgatgctgttgatcatccaaagaaaagaggacgtccaaaaggtgtaagatccagcaatggcacacctagtaactcagctactccgagcacaaaggggaaaactgccggcaagaataccaaagaaacaccaaaaactggccccaatcttataaaggaactcgagaagagctccaaggacaaagctagtgtatcaactgagacaaaggatgaattgcctaaagatgacaggagtgcaagcagacctaaggaggctattagcaaaggcaaggattcaaaagacgaaggcaagtccactgaaggaaaagctaggccaggtcggaaactaaaaaatgctggtactcctgcgggtgacgctgacaaagagaaggggaaggagaaagaagttaaggcagctgaaatagagcaggaggcaccaggaaacgcttctacaggaaagaagcgcagaaggaaggcttgaagctaacactgatggaacttcttttgtaaatggatgtgcaccttgtattattgagtgttaactcgaaatttcgtcagtttggtctctgatagttaggtgtggaagcaacatttgctatagctgtaatgctaggattaacatgtgttcattgtggtcagatgcatggtgcattggtgttgagctttgagcggaatcaacccaatgctcgctgtgaggcccatggcatcgtgttgtctggtggtgttgtagcttattgatgttctatttattataagcaatttaagcagtggattttgtagcaaatgcaccttttcggctaggatgttggcctggtttttaagttgggca

SEQ ID NO: 55273 - DNA, 2915 bp, Zea Mays
acccccaggcagaagcgaacacaacagccccttccgcgccgaaacctcgtcgcgtcgcgcggaagagaggagagggacgggggccgcggcccgcgggggcgagaagagaacaccactacggattgcctcgtcatccaccaccgctccaccgctaaaccctcgagtgctcttccgcgcggcggggcgccgagcgtgaaagccacctgctctcgtccagtcgcactcgcgccgcgaggggaaaccctaggagcggcagatctagagcgggcgctctcgatccggccgcgtagacgcccgttttggccggggaaatggcggaggatcctgccgccgaacaggagacgcggcagctagaggaccggctcagggaggtcggggaacggctgcaggcgcctcccgacgacgcggaggacctgctcaacctcctcatcgaagttgaggagtgtttactaaaagttgagcagtcacctcctgaaagcacatcgaatgctcttcaactagcaactgcagctcttgtcaagaaagagctgctggcccatgctgattcaaatattagacttgccgtggcatcatgcatatctgagatcacacggatcacagcgccagatgctccatatgatgacgatgcaatgaaggatgtattctctttaattgtggaggccttcaagcatctggatgacatagagagccccttctttggaaggagaacttcaattcttgatacagtcgcaaaagttcggtcctgtgtggtgatgctagatcttgaatgtgacgatttgataaatgatatgttccatcacttcttgaggactgttaattctgggcattcagaagccgtcatatgctgcatggaaacaataatgagattggtaattgaggagagtgaggatgtccaaccacagattgcttcatgtctactccaaaatgttagaaaagaagaaaaggaatcttcttcagcttcctttgagcttgctgaaaaagtgataggcacatgccgtgagaaacttaagccagtctttctgcaatcactaaaaggcacttccttgagcgaatacagccaaatcgtcgcatcggtttgtgaagatgtttcagatgacagggaagataacaatgctgatccttctgggaaggacacggtggatgatggcaagctctctgaaaggactatttctgatgaattgcctcaggaatcttcaaaggcagagcaagatgttagccgtcctgaacaagacggtacttgtatgaatggtaatacaggtgcggagttcgatactgcaaagcccgaaaagaaagctgccgttgattcagacaaaagtgctaagcttaaactgtccgataaatgtgaagcacctgtgcattctgatgctgacactaaaaaggaagcatctgcagagggtaccgatggagccgctgatgatacatcaacggctgctgattgtacacctaaaccaaagcgaggccgtcctcctggcccaaagtcatcgcagaagaaggctgctggaaaggatcaatcttcaggttcagatttgaaaaaggtcaatgaggcaggtgattcagccggaaagttggcgaaacgatcagcgaaggatgagaagtccacaaagaaggctggtgaaggagaatcatctaagaagacccaaaagtacaattcaaagcaacagaaggatgaaaacctatctgaggatcctgccaaggatctgagtttaaaggaaatgataacaccaaaatcttcgactaaggtcccaggtagaaccaaagggcaaagcacagagaatagcacacctaaaatgaagcaagaacaagaaactgaagagcctcctcgttcaaggaaaagcaaaggacttgataaaagtctagttggtgcaaggatcaaagtttggtggccagatgataagatgttctacaatggtgttgtggagtcatttgattctgtttctaagaggcacaaggtcgcatatgatgatggggacgtagaggtactactgttgagggatgaaaagtgggaattcatcagtgaggagaagggagcttctgtggcatctgaaacgccaggaggcagaaaaagaaaagctgatgcagtgaaggaagaaaatacagagacacctaaaagtgatgctgttgatcatccaaagaaaagaggacgtccaaaaggtgtaagatccagcaatggcacacctagtaactcagctactccgagcacaaaggggaaaactgccggcaagaataccaaagaaacaccaaaaactggccccaatcttataaaggaactcgagaagagctccaaggacaaagctagtgtatcaactgagacaaaggatgaattgcctaaagatgacaggagtgcaagcagacctaaggaggctattagcaaaggcaaggattcaaaagacgaaggcaagtccactgaaggaaaagctaggccaggtcggaaactaaaaaatgctggtactcctgcgggtgacgctgacaaagagaaggggaaggagaaagaagttaaggcagctgaaatagagcaggaggcaccaggaaacgcttctacaggaaagaagcgcagaaggaaggcttgaagctaacactgatggaacttcttttgtaaatggatgtgcaccttgtattattgagtgttaactcgaaatttcgtcagtttggtctctgatagttaggtgtggaagcaacatttgctatagctgtaatgctaggattaacatgtgttcattgtggtcagatgcatggtgcattggtgttgagctttgagcggaatcaacccaatgctcgctgtgaggcccatggcatcgtgttgtctggtggtgttgtagcttattgatgttctatttattataagcaatttaagcagtggattttgtagcaaatgcaccttttcggctaggatgttggcctggtttttaagttgggca

SEQ ID NO: 55274 - DNA, 2762 bp, Zea Mays
ctcaatacccccaggcagaagcgaacacaacagccccttccgcgccgaaacctcgtcgcgtcgcgcggaagagaggagagggacgggggccgcggcccgcgggggcgagaagagaacaccactacggattgcctcgtcatccaccaccgctccaccgctaaaccctcgagtgctcttccgcgcggcggggcgccgagcgtgaaagccacctgctctcgtccagtcgcactcgcgccgcgaggggaaaccctaggagcggcagatctagagcgggcgctctcgatccggccgcgtagacgcccgttttggccggggaaatggcggaggatcctgccgccgaacaggagacgcggcagctagaggaccggctcagggaggtcggggaacggctgcaggcgcctcccgacgacgcggaggacctgctcaacctcctcatcgaagttgaggagtgtttactaaaagttgagcagtcacctcctgaaagcacatcgaatgctcttcaactagcaactgcagctcttgtcaagaaagagctgctggcccatgctgattcaaatattagacttgccgtggcatcatgcatatctgagatcacacggatcacagcgccagatgctccatatgatgacgatgcaatgaaggatgtattctctttaattgtggaggccttcaagcatctggatgacatagagagccccttctttggaaggagaacttcaattcttgatacagtcgcaaaagttcggtcctgtgtggtgatgctagatcttgaatgtgacgatttgataaatgatatgttccatcacttcttgaggactgttaattctgggcattcagaagccgtcatatgctgcatggaaacaataatgagattggtaattgaggagagtgaggatgtccaaccacagattgcttcatgtctactccaaaatgttagaaaagaagaaaaggtggatgatggcaagctctctgaaaggactatttctgatgaattgcctcaggaatcttcaaaggcagagcaagatgttagccgtcctgaacaagacggtacttgtatgaatggtaatacagatactgatcagttgaaatctgaccacaatgaaggtgcggagttcgatactgcaaagcccgaaaagaaagctgccgttgattcagacaaaagtgctaagcttaaactgtccgataaatgtgaagcacctgtgcattctgatgctgacactaaaaaggaagcatctgcagagggtaccgatggagccgctgatgatacatcaacggctgctgattgtacacctaaaccaaagcgaggccgtcctcctggcccaaagtcatcgcagaagaaggctgctggaaaggatcaatcttcaggttcagatttgaaaaaggtcaatgaggcaggtgattcagccggaaagttggcgaaacgatcagcgaaggatgagaagtccacaaagaaggctggtgaaggagaatcatctaagaagacccaaaagtacaattcaaagcaacagaaggatgaaaacctatctgaggatcctgccaaggatctgagtttaaaggaaatgataacaccaaaatcttcgactaaggtcccaggtagaaccaaagggcaaagcacagagaatagcacacctaaaatgaagcaagaacaagaaactgaagagcctcctcgttcaaggaaaagcaaaggacttgataaaagtctagttggtgcaaggatcaaagtttggtggccagatgataagatgttctacaatggtgttgtggagtcatttgattctgtttctaagaggcacaaggtcgcatatgatgatggggacgtagaggtactactgttgagggatgaaaagtgggaattcatcagtgaggagaagggagcttctgtggcatctgaaacgccaggaggcagaaaaagaaaagctgatgcagtgaaggaagaaaatacagagacacctaaaagtgatgctgttgatcatccaaagaaaagaggacgtccaaaaggtgtaagatccagcaatggcacacctagtaactcagctactccgagcacaaaggggaaaactgccggcaagaataccaaagaaacaccaaaaactggccccaatcttataaaggaactcgagaagagctccaaggacaaagctagtgtatcaactgagacaaaggatgaattgcctaaagatgacaggagtgcaagcagacctaaggaggctattagcaaaggcaaggattcaaaagacgaaggcaagtccactgaaggaaaagctaggccaggtcggaaactaaaaaatgctggtactcctgcgggtgacgctgacaaagagaaggggaaggagaaagaagttaaggcagctgaaatagagcaggaggcaccaggaaacgcttctacaggaaagaagcgcagaaggaaggcttgaagctaacactgatggaacttcttttgtaaatggatgtgcaccttgtattattgagtgttaactcgaaatttcgtcagtttggtctctgatagttaggtgtggaagcaacatttgctatagctgtaatgctaggattaacatgtgttcattgtggtcagatgcatggtgcattggtgttgagctttgagcggaatcaacccaatgctcgctgtgaggcccatggcatcgtgttgtctggtggtgttgtagcttattgatgttctatttattataagcaatttaagcagtggattttgtagcaaatgcaccttttcggctaggatgttggcctggtttttaagttgggca

SEQ ID NO: 55275 - DNA, 1554 bp, Zea Mays
atggcttctctcaggtatgtgcatttaaaaactacacacatctttatttgttacagcgacttattttctcaactatatttaataagaatgttcttttaccatactaacgatttataacaattgttacagatcgatggactacatacttctaccagatttaacaacgtataaaaaacatgcgataatccaggtccatgtctcaagaaaatggtctttccatggcgccactgaaaagggtcccttgcagcacatcgacatggtcctttcagattgcaagatgttcttggaactataaccgagataactgctttgaagatagtacacatagaaggtcagctcagccccactattattagagacgtaatgatagaagatctaagccgcaaaactctcaagatcactctttgggcaaaacgagcaacatcatttacaatacaagatgtgtatgacccagttagcaaaaagccaattcttgctctttttgttggttgcctacctaaattctacaaaggtgtttacttaagtggtggtgcggcttgccattggtatttcaatcccacaatacctgaagctgaagcgtaccaaaatagacgtggtggtgaaacaattcagctgcaccttcctacacaaccgaaacatgcactacaaaccttccaacctccaacaatagaacataaaactctggagcaactcctgacaatgaacccatatgattacccagacacgggatatgaatgcacagtgacaatcaccgaaatagatacatcaaacacatggtggtatccatcatgcacaaaatgcggccgaaaaacaactccacataatacagcatattattgtgattggtgtaaatgggatggctacaaattcaaatacaagctcaaatttcgagcatcagatgcaacagccatggcacaaatgttttgctttgataacatagcacgatatattgttggcaaatcttgcgaagttatcttacgatctacaaatgcagcgacaccaattcctccagatttagctcagattgtttcactcaaattcacctttagagtaataccagatgatagttctttcaataaccaagaccaggtccccattgcccttcgcatcatctctataactacagcgcatggtagacaacatgcactaccattgaagccaaccaatatcatagaaggtacatcaacaccacagaacaagttacaactgcagttaatcgagaactcaccatcaaatccttttcaaaatttatccacaagtactccaccacccatacaggctgcaaggaagctaatatatccaccgctcagtaaccccgtcacatatcaacatactcccaagtctgatggtgaagaagaaattacagagcagcaaacaatgaacaccagtcaaatcaaaggaaaaaagtatgccctcattcgaatttcctccaaaaagtacattcaattacaaattaatagcattagcatacgtaatatcatgccatatttaagtgaaccattattccaagtatccacaggttcatattgcataactgctttcaccgtttgctaa

SEQ ID NO: 55276 - DNA, 1616 bp, Zea Mays
atggcttctctcaggtatgtgcatttaaaaactacacacatctttatttgttacagcgacttattttctcaactatatttaataagaatgttcttttaccatactaacgatttataacaattgttacagatcgatggactacatacttctaccagatttaacaacgtataaaaaacatgcgataatccaggtccatgtctcaagaaaatggtctttccatggcgccactgaaaagggtcccttgcagcacatcgacatggtcctttcagattgcaagggtaatagcatttatgctgaaataccagcaaatcttgccgaagaaaagggagcactcatcgaaacaaatcagatctacgacatcagtcgttttagagttactgcagcaaaaacagcctacaaacccattgatggtgacaagatgatacaatttacgacttacacaattatcaagcctgcaagtaacccaccacctacatttcctttatatatctatcaattaactccatttgatgagattgaatctcagattcagcacaagaccaaattcctagatgttcttggaactataaccgagataactgctttgaagatagtacacatagaaggtcagctcagccccactattattagagacgtaatgatagaagatctaagccgcaaaactctcaagatcactctttgggcaaaacgagcaacatcatttacaatacaagatgtgtatgacccagttagcaaaaagccaattcttgctctttttgttggttgcctacctaaattctacaaaggtgtttacttaagtggtggtgcggcttgccattggtatttcaatcccacaatacctgaagctgaagcgtaccaaaatagacgtggtggtgaaacaattcagctgcaccttcctacacaaccgaaacatgcactacaaaccttccaacctccaacaatagaacataaaactctggagcaactcctgacaatgaacccatatgattacccagacacgggatatgaatgcacagtgacaatcaccgaaatagatacatcaaacacatggtggtatccatcatgcacaaaatgcggccgaaaaacaactccacataatacagcatattattgtgattggtgtaaatgggatggctacaaattcaaaccaggtccccattgcccttcgcatcatctctataactacagcgcatggtagacaacatgcactaccattgaagccaaccaatatcatagaaggtacatcaacaccacagaacaagttacaactgcagttaatcgagaactcaccatcaaatccttttcaaaatttatccacaagtactccaccacccatacaggctgcaaggaagctaatatatccaccgctcagtaaccccgtcacatatcaacatactcccaagtctgatggtgaagaagaaattacagagcagcaaacaatgaacaccagtcaaatcaaaggaaaaaagtatgccctcattcgaatttcctccaaaaagtacattcaattacaaattaatagcattagcatacgtaatatcatgccatatttaagtgaaccattattccaagtatccacaggttcatattgcataactgctttcaccgtttgctaa

SEQ ID NO: 55277 - DNA, 2616 bp, Zea Mays
ttccgcctccgttttcctccccctccgacaccagcccaccacgcgagaactcgtcagatatttatgagcgcagccgcgggttaaccttcccttctcgctgccgtgctcctgctcgtgcgcgcgttcgcaatcgtagcgctggggttgagccgcgagtggataaaccctagccggtggtgtagctgggttggtggctttgatgccggcgacggcccgcttgtccccgggtgggtgagaattctgcgaccgaatggagtgaggtgacgaaggctgccatgggctctaactatgccacgattggattataggatagtagctggcagctaccagtttcctagaaccaatttgtggatagcgagaggagtgactgttgttcagtactttcacctcgatcatgggtggtgtctgctcaaggaagagaagccaattggtggatgaaggtgacgctctccagacatccccaaggttctcaaagaccagcagcttaaaatggctgttgcttacactgcctcgcagcagttctgatgtttccgggaagggacagggaaatgaacctgggcggtgcccgtccctcatggagctttgtgtggctagagtttgccaggatatcgacaggtattctacttttgcaatgctgccaagggatctcagccagcagattttcaatgaattagtaaattcaaaccgtcttacagaggcatcacttcaagtttttagggattgtgctctgcaggacattggcttaggggagtaccctggagtaaaggatgcttggatggaagtagtggcatctcaaaagcagtcattgttgtcggttgatatttcttgctctgaagtagctgatagtgggatagatcttcttagagattgctcaagcatgcaaagtttggcatgtaattactgtgatcaaatatccgaaagtggtctgggagtactgtcaggattgtcaaacctatcttctttaagcttcaagcgaagtaatgctgttactgctgaaggaatgagagcctttgcaaatttagttaacttactaaatctcgaccttgaaggttgcctaaagattcatggtggccttattcatttaaaagatctgacaaagctcgagtcattgaatatgagatattgcaattatattgcggattcagatatcaaatatttaacagatctgacaaatttgaaggaccttcaattgtcatgttgtaagatcacagatctgggggtgtcgtatatcagaggcttgcagaagctcactcacttgaacctagagggctgcccagtgactgctgcttgtttggaagctatttcaggattgtcttcattggtattgttgaacttgaaccgttgtggtatatacgatgatggctgtgaaaactttgaaggtcttaaaaggttgaaggttttaaacttggggtttaactatattacagatgcttgtttggtgcatctgaaagaattaatcagtttggagtctttgaacttggattcgtgcaagattggagatgatggtctatcacatctgaaaggtcttgtgctactgcaaagcttggagctttctgatactgaagttggaaacaatggactccagcatctatctggtcttcgtaatctgcaaagtattaatctctcatttactttggtcacggacattggtgtgaagaagatctctgtgttgaattcgctgaagtcagttaaccttgacaatcgccaaattactgatgttggcctggcagcacttataagtctcactaggctgactcatcttgacctttttggagcttgcataactgacaatggcacaaattgcttcagattctgtggtgggttcgttactgatgctggagtgaagaacatcaaggatctgaaggccctgacgttgctgaatctttctcaaaatgctaatctgacagacaaaaccttggagctgatctctggcctgactgctttgatcaacttgaacgtgtcaaactcacgggtgtccaatgctggtctcaaacacctgaatgacctgcacaacctgcgttcactgtctctagattccacccgggtgacggcaaacgagatgaggaagcttcgagcaacagtgctgcataatctgatcagcatgcggccagagtagtacccatttggcacctgctgtaaataatcattaggttcgagcaggttgttctgttggtaagtactgccttcgttctcgaatatttgtcgtccgctagttcatttttgaactagaccgcgataaataaaaaagaacggagggaatatcttgtaagaacctgaattgaaggcaggcatataattatataagttaacaatgtggtcttgtgctgtgtcagcgagctcgttcgtttcagggtgatgctgaagaaatggcactatggcagctgctttgcactgaattgtaaatagcctttctcgccatctgggaactgggatgcatacgtgggtcgcccttttttatgtttgggtagattagagttgaatgtgcgttatgtacttgtgttctgatgagcaccgaatgcttattttgtcacatgctgttatttaccggccttccccagtttactctgcaacagagggcttgtttgtttgagattattatattatataatctgatta

SEQ ID NO: 55278 - DNA, 2519 bp, Zea Mays
ttccgcctccgttttcctccccctccgacaccagcccaccacgcgagaactcgtcagatatttatgagcgcagccgcgggttaaccttcccttctcgctgccgtgctcctgctcgtgcgcgcgttcgcaatcgtagcgctggggttgagccgcgagtggataaaccctagccggtggtgtagctgggttggtggctttgatgccggcgacggcccgcttgtccccggaatggagtgaggtgacgaaggctgccatgggctctaactatgccacgattggattataggatagtagctggcagctaccagtttcctagaaccaatttgtggatagcgagaggagtgactgttgttcagtactttcacctcgatcatgggtggtgtctgctcaaggaagagaagccaattggtggatgaaggtgacgctctccagacatccccaaggttctcaaagaccagcagcttaaaatggctgttgcttacactgcctcgcagcagttctgatgtttccgggaagggacagggaaatgaacctgggcggtgcccgtccctcatggagctttgtgtggctagagtttgccaggatatcgacaggtattctacttttgcaatgctgccaagggatctcagccagcagattttcaatgaattagtaaattcaaaccgtcttacagaggcatcacttcaagtttttagggattgtgctctgcaggacattggcttaggggagtaccctggagtaaaggatgcttggatggaagtagtggcatctcaaaagcagtcattgttgtcggttgatatttcttgctctgaagtagctgatagtgggatagatcttcttagagattgctcaagcatgcaaagtttggcatgtaattactgtgatcaaatatccgaaagtggtctgggagtactgtcaggattgtcaaacctatcttctttaagcttcaagcgaagtaatgctgttactgctgaaggaatgagagcctttgcaaatttagttaacttactaaatctcgaccttgaaggttgcctaaagattcatggtggccttattcatttaaaagatctgacaaagctcgagtcattgaatatgagatattgcaattatattgcggattcagatatcaaatatttaacagatctgacaaatttgaaggaccttcaattgtcatgttgtaagatcacagatctgggggtgtcgtatatcagaggcttgcagaagctcactcacttgaacctagagggctgcccagtgactgctgcttgtttggaagctatttcaggattgtcttcattggtattgttgaacttgaaccgttgtggtatatacgatgatggctgtgaaaactttgaaggtcttaaaaggttgaaggttttaaacttggggtttaactatattacagatgcttgtttggtgcatctgaaagaattaatcagtttggagtctttgaacttggattcgtgcaagattggagatgatggtctatcacatctgaaaggtcttgtgctactgcaaagcttggagctttctgatactgaagttggaaacaatggactccagcatctatctggtcttcgtaatctgcaaagtattaatctctcatttactttggtcacggacattggtgtgaagaagatctctgtgttgaattcgctgaagtcagttaaccttgacaatcgccaaattactgatgttggcctggcagcacttataagtctcactaggctgactcatcttgacctttttggagcttgcataactgacaatggcacaaattgcttcagatattttaagaatcttgtttctcttgaagtctgtggtgggttcgttactgatgctggagtgaagaacatcaaggatctgaaggccctgacgttgctgaatctttctcaaaatgctaatctgacagacaaaaccttggagctgatctctgattccacccgggtgacggcaaacgagatgaggaagcttcgagcaacagtgctgcataatctgatcagcatgcggccagagtagtacccatttggcacctgctgtaaataatcattaggttcgagcaggttgttctgttggtaagtactgccttcgttctcgaatatttgtcgtccgctagttcatttttgaactagaccgcgataaataaaaaagaacggagggaatatcttgtaagaacctgaattgaaggcaggcatataattatataagttaacaatgtggtcttgtgctgtgtcagcgagctcgttcgtttcagggtgatgctgaagaaatggcactatggcagctgctttgcactgaattgtaaatagcctttctcgccatctgggaactgggatgcatacgtgggtcgcccttttttatgtttgggtagattagagttgaatgtgcgttatgtacttgtgttctgatgagcaccgaatgcttattttgtcacatgctgttatttaccggccttccccagtttactctgcaacagagggcttgtttgtttgagattattatattatataatctgatta

SEQ ID NO: 55279 - DNA, 2604 bp, Zea Mays
ttccgcctccgttttcctccccctccgacaccagcccaccacgcgagaactcgtcagatatttatgagcgcagccgcgggttaaccttcccttctcgctgccgtgctcctgctcgtgcgcgcgttcgcaatcgtagcgctggggttgagccgcgagtggataaaccctagccggtggtgtagctgggttggtggctttgatgccggcgacggcccgcttgtccccgggtgggtgagaattctgcgaccgaatggagtgaggtgacgaaggctgccatgggctctaactatgccacgattggattataggatagtagctggcagctaccagtttcctagaaccaatttgtggatagcgagaggagtgactgttgttcagtactttcacctcgatcatgggtggtgtctgctcaaggaagagaagccaattggtggatgaaggtgacgctctccagacatccccaaggttctcaaagaccagcagcttaaaatggctgttgcttacactgcctcgcagcagttctgatgtttccgggaagggacagggaaatgaacctgggcggtgcccgtccctcatggagctttgtgtggctagagtttgccaggatatcgacaggtattctacttttgcaatgctgccaagggatctcagccagcagattttcaatgaattagtaaattcaaaccgtcttacagaggcatcacttcaagtttttagggattgtgctctgcaggacattggcttaggggagtaccctggagtaaaggatgcttggatggaagtagtggcatctcaaaagcagtcattgttgtcggttgatatttcttgctctgaagtagctgatagtgggatagatcttcttagagattgctcaagcatgcaaagtttggcatgtaattactgtgatcaaatatccgaaagtggtctgggagtactgtcaggattgtcaaacctatcttctttaagcttcaagcgaagtaatgctgttactgctgaaggaatgagagcctttgcaaatttagttaacttactaaatctcgaccttgaagatctgacaaagctcgagtcattgaatatgagatattgcaattatattgcggattcagatatcaaatatttaacagatctgacaaatttgaaggaccttcaattgtcatgttgtaagatcacagatctgggggtgtcgtatatcagaggcttgcagaagctcactcacttgaacctagagggctgcccagtgactgctgcttgtttggaagctatttcaggattgtcttcattggtattgttgaacttgaaccgttgtggtatatacgatgatggctgtgaaaactttgaaggtcttaaaaggttgaaggttttaaacttggggtttaactatattacagatgcttgtttggtgcatctgaaagaattaatcagtttggagtctttgaacttggattcgtgcaagattggagatgatggtctatcacatctgaaaggtcttgtgctactgcaaagcttggagctttctgatactgaagttggaaacaatggactccagcatctatctggtcttcgtaatctgcaaagtattaatctctcatttactttggtcacggacattggtgtgaagaagatctctgtgttgaattcgctgaagtcagttaaccttgacaatcgccaaattactgatgttggcctggcagcacttataagtctcactaggctgactcatcttgacctttttggagcttgcataactgacaatggcacaaattgcttcagatattttaagaatcttgtttctcttgaagtctgtggtgggttcgttactgatgctggagtgaagaacatcaaggatctgaaggccctgacgttgctgaatctttctcaaaatgctaatctgacagacaaaaccttggagctgatctctggcctgactgctttgatcaacttgaacgtgtcaaactcacgggtgtccaatgctggtctcaaacacctgaatgacctgcacaacctgcgttcactgtctctagattccacccgggtgacggcaaacgagatgaggaagcttcgagcaacagtgctgcataatctgatcagcatgcggccagagtagtacccatttggcacctgctgtaaataatcattaggttcgagcaggttgttctgttggtaagtactgccttcgttctcgaatatttgtcgtccgctagttcatttttgaactagaccgcgataaataaaaaagaacggagggaatatcttgtaagaacctgaattgaaggcaggcatataattatataagttaacaatgtggtcttgtgctgtgtcagcgagctcgttcgtttcagggtgatgctgaagaaatggcactatggcagctgctttgcactgaattgtaaatagcctttctcgccatctgggaactgggatgcatacgtgggtcgcccttttttatgtttgggtagattagagttgaatgtgcgttatgtacttgtgttctgatgagcaccgaatgcttattttgtcacatgctgttatttaccggccttccccagtttactctgcaacagagggcttgtttgtttgagattattatattatataatctgatta

SEQ ID NO: 55280 - DNA, 3996 bp, Zea Mays
ccctcgccttatccctccgctccacgggcccacccgtacagccctgttcgcctctctcctttccacaagccgctcttgtgggttgtgagtgacacctttcggtagaggtagaagtgtagaacccacccatcagcggaactggtccgtcggcccatgggacacgtggagctctgtcgcggcgccggctctctccctcaccacttgcatttcctcccttcctttttccgcctccgttttcctccccctccgacaccagcccaccacgcgagaactcgtcagatatttatgagcgcagccgcgggttaaccttcccttctcgctgccgtgctcctgctcgtgcgcgcgttcgcaatcgtagcgctggggttgagccgcgagtggataaaccctagccggtggtgtagctgggttggtggctttgatgccggcgacggcccgcttgtccccggaatggagtgaggtgacgaaggctgccatgggctctaactatgccacgattggattataggatagtagctggcagctaccagtttcctagaaccaatttgtggatagcgagaggagtgactgttgttcagtactttcacctcgatcatgggtggtgtctgctcaaggaagagaagccaattggtggatgaaggtgacgctctccagacatccccaaggttctcaaagaccagcagcttaaaatggctgttgcttacactgcctcgcagcagttctgatgtttccgggaagggacagggaaatgaacctgggcggtgcccgtccctcatggagctttgtgtggctagagtttgccaggatatcgacaggtattctacttttgcaatgctgccaagggatctcagccagcagattttcaatgaattagtaaattcaaaccgtcttacagaggcatcacttcaagtttttagggattgtgctctgcaggacattggcttaggggagtaccctggagtaaaggatgcttggatggaagtagtggcatctcaaaagcagtcattgttgtcggttgatatttcttgctctgaagtagctgatagtgggatagatcttcttagagattgctcaagcatgcaaagtttggcatgtaattactgtgatcaaatatccgaaagtggtctgggagtactgtcaggattgtcaaacctatcttctttaagcttcaagcgaagtaatgctgttactgctgaaggaatgagagcctttgcaaatttagttaacttactaaatctcgaccttgaaggttgcctaaagattcatggtggccttattcatttaaaagatctgacaaagctcgagtcattgaatatgagatattgcaattatattgcggattcagatatcaaatatttaacagatctgacaaatttgaaggaccttcaattgtcatgttgtaagatcacagatctgggggtgtcgtatatcagaggtaaacagtatcagaagtttatttatttgtttggaggttgatcggttttgctgtggatgtactgctgtctactttgtgctttatttagccttttaatgtatatttatttttattacctgtgtttacctgtgctgtaagtcaatcaaaaagtttgacaagtatgcttattgttccctctaggcttgcagaagctcactcacttgaacctagagggctgcccagtgactgctgcttgtttggaagctatttcaggattgtcttcattggtattgttgaacttgaaccgttgtggtatatacgatgatggctgtgaaaactttgaaggtcttaaaaggttgaaggttttaaacttggggtttaactatattacagatgcttgtttggtgcatctgaaaggtatgattatcttataatgtagttgagacctcatatcttttaacatttggacgtctgcacaatacaatgtatgtattggatctatattttatttatcatttcaataatggttatttgtttcaagtaattgatttcgtacatagtatacctaactagtttatccaattttattgcctttcaaaaattaaactagattggttcgttcaggggcatggatggatattattcttcatcgataaaagtgtgctagtgatttttatttcttgatgccccgatcaataagcaagaaacactatttgtagggctaagtgtttgatctaagaagaatcaaaataacaaaatacatagattagacattagagagagatgttccataaccaaaagatataaaattaaatcatgtgatttccactggacacaagtacattttatatccatgcatattgctgccaaagtatgacccccctcttctgctttgttgcttttaaagatactgaaaatccaaaaatcattgtagagtagaacttcaatgtggttaaagctaagttcttgtaattttgttgcttctagaattaatcagtttggagtctttgaacttggattcgtgcaagattggagatgatggtctatcacatctgaaaggtcttgtgctactgcaaagcttggagctttctgatactgaagttggaaacaatggactccagcatctatctggtttgtcttgacttttgaaaaaaacgaaatcgtctttttagctcttacctcgtagattgattgaatcctctacatcgtagaacccttgatgaaagttgtagggttgcttttgacagcaatatactaacgtatgtgctttcgtcaagtataaaaagagaatgttctaaacttttagcttatgatgcaaaattgctaactttctatgtggaaactgtatgtgactgacaaatcatggtttatttgaatattggagttatatacttatatgtgtttcttttacttgtttcactatgcacctttttctcttctaaatgatttatttcagtggcatgcttatgaattatgcagcagcagcaacaacaacgaagccttttcccaagcaagttgggtaggctagagttgaaacccaacagaagccacaaattcatgcttacgaattatggatgcacttttttttctagtcattaaatagtttaatgaagaagatctctatgtatttctgcaggtcttcgtaatctgcaaagtattaatctctcatttactttggtcacggacattggtgtgaagaagatctctgtgttgaattcgctgaagtcagttaaccttgacaatcgccaaattactgatgttggcctggcagcacttataagtctcactaggctgactcatcttgacctttttggagcttgcataactgacaatggcacaaattgcttcagatattttaagaatcttgtttctcttgaagtctgtggtgggttcgttactgatgctggagtgaagaacatcaaggatctgaaggccctgacgttgctgaatctttctcaaaatgctaatctgacagacaaaaccttggagctgatctctgattccacccgggtgacggcaaacgagatgaggaagcttcgagcaacagtgctgcataatctgatcagcatgcggccagagtagtacccatttggcacctgctgtaaataatcattaggttcgagcaggttgttctgttggtaagtactgccttcgttctcgaatatttgtcgtccgctagttcatttttgaactagaccgcgataaataaaaaagaacggagggaatatcttgtaagaacctgaattgaaggcaggcatataattatataagttaacaatgtggtcttgtgctgtgtcagcgagctcgttcgtttcagggtgatgctgaagaaatggcactatggcagctgctttgcactgaattgtaaatagcctttctcgccatctgggaactgggatgcatacgtgggtcgcccttttttatgtttgggtagattagagttgaatgtgcgttatgtacttgtgttctgatgagcaccgaatgcttattttgtcacatgctgttatttaccggccttccccagtttactctgcaacagagggcttgtttgtttgagattattatattatataatctgatta

SEQ ID NO: 55281 - DNA, 765 bp, Zea Mays
cttcaacttaccatcggttcatttcattttagcagcttgttctggtgggattggaggaggctataggctgcccaataaccggtttagggagcgggcaaaatcggtagaaatgttacgaatgggagagaccaaagcctgggaggagacctgatatcttccctaagttcagcccaatgaagacaccattaccgcatccgttaccagctgatgatcctctggatgatgatcaagaggaggaagaggaagaacaaccaccaccacaggaggagccacaagaggatgatccagacaaggaagaacctgaggaagatgacccggacaagccaaccgagtaacttctggatggcttgaactgtggtagatataggcagcgggcaaagatgtgctacatctttggagcacgccaagagatctcagttctattcgaactgtttgttctgccggcttatataggctctagatgcataagtttgttatgacctttgagcttttctaaagctatggaagttttgttttacggattacagattacggtgccatatctgtgatgatatgcattcacacttctatcttaagttagcgtgtacattacaacaagaagtctgcagcaagccagcaactgttactccaaattcttttgctcaggtgtgtttggtcataggaactaaagtttagcatatgtcacgttgaatgtttgaatgactattaagagcattaaatatagtctaattgtaaaattaattatatatctgaagaataaatagt

SEQ ID NO: 55282 - DNA, 763 bp, Zea Mays
cggagtcccgtacacgctagtgttggcgactccaagagtgttcttatcgccccgaaggcggtctccactctctacagacagccgccaccgccgccggtggttcacaagcagccggaatgggagagaccaaagcctgggaggagacctgatatcttccctaagttcagcccaatgaagacaccattaccgcatccgttaccagctgatgatcctctggatgatgatcaagaggaggaagaggaagaacaaccaccaccacaggaggagccacaagaggatgatccagacaaggaagaacctgaggaagatgacccggacaagccaaccgagtaacttctggatggcttgaactgtggtagatataggcagcgggcaaagatgtgctacatctttggagcacgccaagagatctcagttctattcgaactgtttgttctgccggcttatataggctctagatgcataagtttgttatgacctttgagcttttctaaagctatggaagttttgttttacggattacagattacggtgccatatctgtgatgatatgcattcacacttctatcttaagttagcgtgtacattacaacaagaagtctgcagcaagccagcaactgttactccaaattcttttgctcaggtgtgtttggtcataggaactaaagtttagcatatgtcacgttgaatgtttgaatgactattaagagcattaaatatagtctaattgtaaaattaattatatatctgaagaataaatagt

SEQ ID NO: 55283 - DNA, 2160 bp, Zea Mays
cacacttcacgcgctgagggagcaaccagaacaaggctcctctcgtcgttattgctgaggctccggccgagtagagctcagacgaccaggagacgacgacggcaacatttgccgttcccttcgtttggcaagcagttccctaaggtcacctaccaagatctcgcccaagcaacgaaggacttctcggagtctaacctggtcggcagaggaagctacgggtcagtgtacagatgcaggttaaaggagcacggaatggaggaggagatggcggtgaaggtcttcgacctcgagatgccaggcgcggagaggagcttcttggccgagtgcgaagcgctgaggagcatccagcatcgcaaccttctgcccatcagaaccgcgtgctcggcggtcgacaacaggggcggcatgttcaaggccttgctctacgagttcatgcctaacgggagcctggacacgtggttgcaccctagagcggcgccgccggcggggggcgggaaagctccgaagcgtctaggcttctctcagagagtgaacgtcatcgtcaacgtagccgatgtgctggactatttgcaccacgagtgcgggaggccgactgttcattgcgacctgaagcccagcaacatcctcctggacgacgacctcaacgcccttctgggagatttcggcatcgcgaggttttacgctgactccaagtcagcaccgccgccggcggtagacgacccaactagttccgtcggtgtgagagggactataggatacatcgctccagagtacgcgggaggtgtccgcctggcgtctacctctggagatgtttacagctttggtgtagttgttttggagatggtgacaggcaagcgaccaacagaccctaccttcaaagatgggctggatatcgtcaactttgtgagcagcaactttccgcatcagatatcccgcgtcgtcgatcctcgtctcagcgaggagtgcaaggagttttcccgagataaggtggaaccagaaaatgcagcttaccagtgtttactgtgcctgctacaagtagctctttcatgcacgcacccgtcaccaagtgaaagggtcagcataaaagaagtagccaacaaactgcatgcaacccagatggcatatgaaggagcgaaagaaaagaaataaaatacatgtttcagcatagtgatagtgtgataccatgctacgagaaaaagggaccagagtggttgtcttagccgtgtttgaccgcgttcctcctgccgcggctaagctgccattatacatgtccaaacgggtcgggcctaacgggtagcccgaagcacggcacgggttaggcccgacccgtaccccggcacggcacggaaggcgacgggctcgggccggcccggcacgacacccgggccgtggttgggcctgagtcggggcacgtcgggcggagcccgagcacggcccgtttaaacttacggcccgttccaagcccggctcacatcaaaatatccctccccgactcccccgtccgccgcaccgcccgcacgcgcacacattccagtcttccacattttcgtctcctctctcgccctcgcgacctcgccctctccgtctccgtcacactcgcggactcgccctctctggatctccttcgtggagtggctccgtggatccgtgctttgcgctcgtcggccgtcgactgtcgtgttcctcttgctccggtgagccgacatagcccctgccccctgtctgtaagttcgactacttctcggcttctcctaaccctaaacctaaactggtgagtggtggtcgtcggtgacttttcggtgctcttgctcttccgatttgttcttagatctcttgtttcctctcgccttctccgtctcgcttcttcgcttagggtttagggtttgtgcctccctgattctgtgcgactgtgcgtgcctctccggctctccgtctcgcttctttgttctaatctgctctgcctacactcgtccaatcctccttgacctcaagcaacatcagctctgctcctctggttgcccctcgtcgacgactccggtgctccggccactcaggtcgttgaggaacccggtgacgtcgttgaggagacggtcaagtatccctccatctccatggatcttgatcaggacgccgagtcggcggagcgtgagcttgaggatc

SEQ ID NO: 55284 - DNA, 187 bp, Zea Mays
cacacttcacgcgctgagggagcaaccagaacaaggctcctctcgtcgttattgctgaggctccggccgagtagagctcaggtcgttgaggaacccggtgacgtcgttgaggagacggtcaagtatccctccatctccatggatcttgatcaggacgccgagtcggcggagcgtgagcttgaggatc

SEQ ID NO: 55285 - DNA, 134 bp, Zea Mays
cacacttcacgcgctgagggagcaaccagaacaaggctcctctcgtcgttattgctgaggctccggccgagtagagctcagctctgctcctctggttgcccctcgtcgacgactccggtgctccggccactcag

SEQ ID NO: 55286 - DNA, 3408 bp, Zea Mays
cacacttcacgcgctgagggagcaaccagaacaaggctcctctcgtcgttattgctgaggctccggccgagtagagctcaggccatgaacctctacatgcttaaacaaacgtccctcctcctaccgctgctcctttgctgtgtctgtaataccgtccgctgctcggcagccccggacaccaacaccagcgcggaaacggacgcgctcgcgctgctcgagttcaagcgcgccgccagcgatccagggggagcgctgagcagctggaacgcgagcaccagtctctgccagtggaagggcgtgacgtgcgccgacgaccccaagaacaacggagcagggcgagtgacggagctccgcctcgcggaccgcgggctgtcgggcgccatcgccggctccgtcggaaacctgaccgccctccgcgtcctcgacctgtccaacaaccggttctccggccggatacctgctgtcgacagtatccgcggcctccaagtccttgatctgagcaccaactcgttagaggggagcgttccagatgcactcacaaactgctccagcctggaaaggttgtggctctattccaacgcgcttacgggttcaattcctcgaaatataggctacctttcgaacctagtgaatttcgacctgtccgggaacaaccttaccgggaccatcccgccgtcgatcggaaacgccagcagactggacgtgctgtaccttggtggaaatcagctgacggggagcattccggacggtgtaggggagctgtcagctatgtctgtgctggaactaaacaacaatttgctgtcaggtagcatcccatcgaccctttttaatctgtcgtctcttcaaacgctggacttgggttcaaatatgctggtcgacacccttccgtctgacatgggggactggctcgtcagcctccaatctctcttcttaaacgggaaccagctccaaggtcagataccatcgtccattggcagagcttcagagctacaatctatacacatctcagccaaccgcttctctggcccgatcccagcttctctgggcaacctctccaagctctcaactctcaacctcgaggaaaacgccctcgaaacacggggagacgaccagagctgggggttcttggccgccctgggaaactgtgcccttctgaactcactctcactagataacaataatctacagggagagctaccagattcgatcggtaacctggccccaggtcttcaagtcctgcgtatgggcttcaacaacatgtcaggaacagtccctccaggcataggcaagctgcggaacctaacgacgcttgggctaagccacaacaggtttactggtgtacttggaggatggctcggaaacctggagaacctgcagtacgtagatcttgagagcaacggttttactgggcccatcccaccttctgctgggaaccttacacagctcttggcgctcaagctagcgaacaacgggttccagggctccgtaccagcgagcttcggtaaccttcagcagctcgcgtatctggatctgagctataataatctccgaggcagcgtacctggcgaggccctcacttcaccaagaatgaggacgtgtgttttgtcctacaacagtttggaaggctccataccgcttgattttagcaggcttcaggagttaactgagctatctctctcctctaacgcgttcacaggggatatccctgacagcataggccagtgtcaaatgctacagacagtcgagatggacaggaacctcctcacgggcaacgtcccagtatcgttcggcaacttgaagagcttgagcactctgaatctttcgcacaacaatttgtcaggtcccatcccgtcagcagctctcactggcctacagtacctgacacgcctagatatctcttacaatgacttcaccggagaagttccgagagacggagtgttcgcaaacgccacggctgtttcactccaaggcaaccggggactgtgcggaggagcaacgaccctccatatgccttcgtgccgaactagatctaataagagggcggaaacacagtactatctgatagaagttttgatcccagtatttggcttcatgtcgcttgcattgctgatatacttcttgctcattgagaagacgaccaggagacgacgacggcaacatttgccgttcccttcgtttggcaagcagttccctaaggtcacctaccaagatctcgcccaagcaacgaaggacttctcggagtctaacctggtcggcagaggaagctacgggtcagtgtacagatgcaggttaaaggagcacggaatggaggaggagatggcggtgaaggtcttcgacctcgagatgccaggcgcggagaggagcttcttggccgagtgcgaagcgctgaggagcatccagcatcgcaaccttctgcccatcagaaccgcgtgctcggcggtcgacaacaggggcggcatgttcaaggccttgctctacgagttcatgcctaacgggagcctggacacgtggttgcaccctagagcggcgccgccggcggggggcgggaaagctccgaagcgtctaggcttctctcagagagtgaacgtcatcgtcaacgtagccgatgtgctggactatttgcaccacgagtgcgggaggccgactgttcattgcgacctgaagcccagcaacatcctcctggacgacgacctcaacgcccttctgggagatttcggcatcgcgaggttttacgctgactccaagtcagcaccgccgccggcggtagacgacccaactagttccgtcggtgtgagagggactataggatacatcgctccagagtacgcgggaggtgtccgcctggcgtctacctctggagatgtttacagctttggtgtagttgttttggagatggtgacaggcaagcgaccaacagaccctaccttcaaagatgggctggatatcgtcaactttgtgagcagcaactttccgcatcagatatcccgcgtcgtcgatcctcgtctcagcgaggagtgcaaggagttttcccgagataaggtggaaccagaaaatgcagcttaccagtgtttactgtgcctgctacaagtagctctttcatgcacgcacccgtcaccaagtgaaagggtcagcataaaagaagtagccaacaaactgcatgcaacccagatggcatatgaaggagcgaaagaaaagaaataaaatacatgtttcagcatagtgatagtgtgataccatgctacgagaaaaagggaccagagtggttgtcttagccgtgtttgaccgcgttcctcctgccgcggctaagctgccattatacatgtccaaacgggtcgggcctaacgggtagcccgaagcacggcacgggttaggcccgacccgtaccccggcacggcacggaaggcgacg

SEQ ID NO: 55287 - DNA, 682 bp, Zea Mays
cggagcatccagctcacacttcacgcgctgagggagcaaccagaacaaggctcctctcgtcgttattgctgaggctccggccgagtagagctcagagtacgcgggaggtgtccgcctggcgtctacctctggagatgtttacagctttggtgtagttgttttggagatggtgacaggcaagcgaccaacagaccctaccttcaaagatgggctggatatcgtcaactttgtgagcagcaactttccgcatcagatatcccgcgtcgtcgatcctcgtctcagcgaggagtgcaaggagttttcccgagataaggtggaaccagaaaatgcagcttaccagtgtttactgtgcctgctacaagtagctctttcatgcacgcacccgtcaccaagtgaaagggtcagcataaaagaagtagccaacaaactgcatgcaacccagatggcatatgaaggagcgaaagaaaagaaataaaatacatgtttcagcatagtgatagtgtgataccatgctacgagaaaaagggaccagagtggttgtcttagccgtgtttgaccgcgttcctcctgccgcggctaagctgccattatacatgtccaaacgggtcgggcctaacgggtagcccgaagcacggcacgggttaggcccgacccgtaccccggcacggcacggaaggcgacg

SEQ ID NO: 55288 - DNA, 3247 bp, Zea Mays
gcactctcccactccctcccagaccctcccacttaaacccgccgccgccgccgatgccgctccttctcccggtctccactaggctgcgaatgctcggcgcccgcgcctcgtgagggtttcatgttccaaatggactgttttaagctggggtgacgatgacaattcttcaagcagaaaatgtaacacatcatcattaaaaatgttactagagaaggagatgtctaaagaagcagagtcaaagagaagacatccaagtgtcattgccagattaatgggtcttgaggaggatttacctactaaagaaccaactgtacaccataccgtaagtgacttgagtagagatttgaatgccacaaacaacaccttacagggaaaagaacaccatcactttataatgtcgaagacacaaaactaccaatcctgtcatgaaaaaatcgaatacaatgatgtttttgaagtatctgaaggacaaccgggaacagactgttttcatgatagaacttcacagaaaggatggtcttccgagaacaagagtgagcaattcaatattgcacgagacaagatcatggaaccagaacagttagctattgaagagaagctcctttgtacaaaggagttgcctgaagctcttgtttttccatgttcaaatagagatttatttcttgaatttcctgaagaacataaccccacattctcaagacagtcgagtgggcttcatgcaaaccaagcaccgcctcaaacaaaacgcattacagtgctgaaaccaattagatctgttgatagtgatggcataagacgacccagagcagaaattggtaagcaaaatgtattgaagatgagaaggttccatcagattcctagttcaaaggaagagataccttcccaaccaagtagaataatccttttgaggcctaccccagggaagccaggtatatcaaaggcaaagctgacatccagggcaacttcatttcagttacctaaccgtaacagtctcaatggatcattagatgataaccaggcatccataggatctgcaggactagtgcatggtatgatgcagtgccggcaagatggatgtcaccaaagagatgattctttattatcttctgcatactcaaatggatatgggggagatgaaagctcattcagtgattcagaagttgattataccagtggctctgaaatcaactatattgaagattgtgataccctcagtgactccgagggaggtagccctctgtcaagacactcatggaattacataagaagatatgaaggtcaatgctcaagttcatcctttagcaaaatatcccacttttctgagtcgtcagttgtaacggaggccaaaaaacagatttcagagcgatggtcaatggttacatgcaatgagatgagtcaagtgcaactgtcgagaagaaaatgcacgttaggtgagatgctctccattaaggaagcaaaggaagacgaggccaccactgggatgttttatgtttccagcaaccagtcatgtggcctggagaatgaactgactacacgttctacaaatgtaactacttctagaaaaaatggtgacaatggggagagatcttcgaaattgccaagatcaaaatctgttccagtgatttcatccacgtctgataacatgacggtgaacatgcaagcttcaaatcctgagagctgcaaacttaaagtggctgttgtgtcaaataaaggaaaatcagctttcaagggaagagtttcagattttttcttgtctaaaagtaaaaggccaagaaggcagatgcctgcttatcatcaatctgattgtattgctgaggggcttgaaggctgtattactcataatagacaggactgcaatcataaaatggatgccatcgagaaagcgatgcattacgatgatgaattcaatagtttttcgacacgaatatcaactagcataccagatagaacaacttctggtgcatctgtttcattgggcagttcaaccggaaacctggataaactaggagtaaacaaatgcctaaatggtaaccgtgatcaaccaagccctacctcagttcttgatgcaccctctgaagatagcagttgtaatgagcctgaaacacttggaacaactacttccaagaatgcgatatcaagatcttcagcaattgaaactgtggcccgtttcttgtcattggatgacaccgcctcagagtcacagtcactttgtaacccaagaccgagttctcttctccctgatgcagatgatgatgagtcagagtgccacgtccttgtgcaaaatataatgtcatcagctggattaggcacttcacagtcacgtatggttttcgccggctggcatttacctgatcaccctcttgacccggtgctgcgtaacaaagtatctcagctgcaggagaaaagttcatacagaaggcttctttttgactgcgtgaatgttgctctaattgagatcggtgagaacgccttactgagcgccctcccatggagtaaaagaagttccagaacatggaggggcacctcatctcctgatctgggggtggaggtctggagtattctcaaggactggatacacggggcacggatgtttgtggtgagcaagagagataatgctgggatcatactggacagaattgtgaagcaggaggtcgaagcaagagggtgggtgaaactgatgatggcgcaggtggttgtcatcaccgaggagctcgaagggggagtaatggaggagctggttgaagaagcggtgctggatttttacagtctgttttcagtggtgagatatcgattgtgactggtaaaactttccacggagcagctggtttgtgtatgctcttgttttgcagctacaccggtcgttcgccgccgtatccattcccccctggttctctttctagctggttctgcttcttgtattacaaagtttgtataaacttctggtagatgagaacatggtaattgtgcagttcatgagaagttttgtaggcaaaataaagtgagccaaactttccatggtgggatctgctgtttgtgcatttcacattgttcgttcattgttaatgagcaagagcagcgaaaggttttgccagattaataagtgctgtggagcatatattatctcattgagaatgtatttattaggcgcatagtaaaatgtaatgtaaacactacatacctcaaaagacaaaacgactcataataaagattggagaatattcgaagacaattattattaataattagc

SEQ ID NO: 55289 - DNA, 3401 bp, Zea Mays
aaacaagccaaaccaaacggctcgcaaaggactcgctaccttaagtccagcactctcccactccctcccagaccctcccacttaaacccgccgccgccgccgatgccgctccttctcccggtctccactaggctgcgaatgctcggcgcccgcgcctcgtgagggtttcatgttccaaatggactgttttaagctgggtgagctacattttatcaggagaaattgatcaattgatttgaagtttgaacaatgtaccagaatgtatgaaataaagccagtaattgatcacgctcatggagatgggtgacgatgacaattcttcaagcagaaaatgtaacacatcatcattaaaaatgttactagagaaggagatgtctaaagaagcagagtcaaagagaagacatccaagtgtcattgccagattaatgggtcttgaggaggatttacctactaaagaaccaactgtacaccataccgtaagtgacttgagtagagatttgaatgccacaaacaacaccttacagggaaaagaacaccatcactttataatgtcgaagacacaaaactaccaatcctgtcatgaaaaaatcgaatacaatgatgtttttgaagtatctgaaggacaaccgggaacagactgttttcatgatagaacttcacagaaaggatggtcttccgagaacaagagtgagcaattcaatattgcacgagacaagatcatggaaccagaacagttagctattgaagagaagctcctttgtacaaaggagttgcctgaagctcttgtttttccatgttcaaatagagatttatttcttgaatttcctgaagaacataaccccacattctcaagacagtcgagtgggcttcatgcaaaccaagcaccgcctcaaacaaaacgcattacagtgctgaaaccaattagatctgttgatagtgatggcataagacgacccagagcagaaattggtaagcaaaatgtattgaagatgagaaggttccatcagattcctagttcaaaggaagagataccttcccaaccaagtagaataatccttttgaggcctaccccagggaagccaggtatatcaaaggcaaagctgacatccagggcaacttcatttcagttacctaaccgtaacagtctcaatggatcattagatgataaccaggcatccataggatctgcaggactagtgcatggtatgatgcagtgccggcaagatggatgtcaccaaagagatgattctttattatcttctgcatactcaaatggatatgggggagatgaaagctcattcagtgattcagaagttgattataccagtggctctgaaatcaactatattgaagattgtgataccctcagtgactccgagggaggtagccctctgtcaagacactcatggaattacataagaagatatgaaggtcaatgctcaagttcatcctttagcaaaatatcccacttttctgagtcgtcagttgtaacggaggccaaaaaacagatttcagagcgatggtcaatggttacatgcaatgagatgagtcaagtgcaactgtcgagaagaaaatgcacgttaggtgagatgctctccattaaggaagcaaaggaagacgaggccaccactgggatgttttatgtttccagcaaccagtcatgtggcctggagaatgaactgactacacgttctacaaatgtaactacttctagaaaaaatggtgacaatggggagagatcttcgaaattgccaagatcaaaatctgttccagtgatttcatccacgtctgataacatgacggtgaacatgcaagcttcaaatcctgagagctgcaaacttaaagtggctgttgtgtcaaataaaggaaaatcagctttcaagggaagagtttcagattttttcttgtctaaaagtaaaaggccaagaaggcagatgcctgcttatcatcaatctgattgtattgctgaggggcttgaaggctgtattactcataatagacaggactgcaatcataaaatggatgccatcgagaaagcgatgcattacgatgatgaattcaatagtttttcgacacgaatatcaactagcataccagatagaacaacttctggtgcatctgtttcattgggcagttcaaccggaaacctggataaactaggagtaaacaaatgcctaaatggtaaccgtgatcaaccaagccctacctcagttcttgatgcaccctctgaagatagcagttgtaatgagcctgaaacacttggaacaactacttccaagaatgcgatatcaagatcttcagcaattgaaactgtggcccgtttcttgtcattggatgacaccgcctcagagtcacagtcactttgtaacccaagaccgagttctcttctccctgatgcagatgatgatgagtcagagtgccacgtccttgtgcaaaatataatgtcatcagctggattaggcacttcacagtcacgtatggttttcgccggctggcatttacctgatcaccctcttgacccggtgctgcgtaacaaagtatctcagctgcaggagaaaagttcatacagaaggcttctttttgactgcgtgaatgttgctctaattgagatcggtgagaacgccttactgagcgccctcccatggagtaaaagaagttccagaacatggaggggcacctcatctcctgatctgggggtggaggtctggagtattctcaaggactggatacacggggcacggatgtttgtggtgagcaagagagataatgctgggatcatactggacagaattgtgaagcaggaggtcgaagcaagagggtgggtgaaactgatgatggcgcaggtggttgtcatcaccgaggagctcgaagggggagtaatggaggagctggttgaagaagcggtgctggatttttacagtctgttttcagtggtgagatatcgattgtgactggtaaaactttccacggagcagctggtttgtgtatgctcttgttttgcagctacaccggtcgttcgccgccgtatccattcccccctggttctctttctagctggttctgcttcttgtattacaaagtttgtataaacttctggtagatgagaacatggtaattgtgcagttcatgagaagttttgtaggcaaaataaagtgagccaaactttccatggtgggatctgctgtttgtgcatttcacattgttcgttcattgttaatgagcaagagcagcgaaaggttttgccagattaataagtgctgtggagcatatattatctcattgagaatgtatttattaggcgcatagtaaaatgtaatgtaaacactacatacctcaaaagacaaaacgactcataataaagattggagaatattcgaagacaattattattaataattagc

SEQ ID NO: 55290 - DNA, 2787 bp, Zea Mays
cgcaactggcaacccacaacacgcgaagccgtgaaccgaagttgcttcgagttttggcgcgcgccgacccaaacaacggcgctccgcgcggcggaggcgatggaccgactccagcgcaggaaccctagcagccggacccatgccacttcgctgaagcacccacggcctccgcgagtgccgaccttccagccccagccggcgtcgaggtccctacaggagccggagccctcctccccagatggaaggcaaaggaaaagggttcgatttgcaaatgaagctggtagtcattgtatcagcgggaaacaagtcgtgaacatacacgaagatgcgaaaaacaaacctcatggtgcgccaccccaactgtcaccgtaacccgtctcttttctacaacgatgcatgcaaatatccctcccttttggaatttcgtattagatcaatgtcgttttgattagcaatctgtttcttcatcttcatgtcttgacatttcggtacttccaggaccaggagtgttactgtaataacataaattctacattgttcttatataggattatatgatgtacctagtcaacatttcagctgtaaattgtaataataagaagtatttttctgcctgtagctgttagatgcctgagcatttcaacattttcatttatatgctaactcgtcattttctatgtagtatgtgatgctaaaactgcagaatataagttctttaagaaattgtgtgaacagccaggccatagctctctttcatacaaacattctcatcaaagccttgaatcaaatgtgtacaggcaaaaacaaggatcgcgcaatgtaactgccccaaaaaagttacatgtccatgataatactgtgtactgtgatgaaccccttgctacaccagctaagaatgaggaaattcctggcgagaaaattagcgtgcaatcctcccattctgaatatgacgataaagatacacctcaagtcggtccacatgatcgcttgctgggtattcatgttctcacacctatatctcatacatcatttgatgttaccgggatttcagtaaatgttgacagagagcctatcagtggacatatcttttcaggaaagagaagcaaattattgaagatagcagccaaaaccatgtccatgggaagtgctgagttgtttcaaagaaggtcggaatttatagttggcatcctgcagagactaggcaccaacaacatcatgagaaagcaagaagggtccatgagtcacagaaaaatggactgcagacatgctcttgctattcccgaaggccattttgataacttgatagactacaagcgaagcaactttaatccattagctaagctgaggaatggtaaaattccatcctcttatgcaagtgatgaagcatgtgagttcatggctttaccatcaggatacaatcagggccctggaagtattgttgatcagaaaaatgacttatctcatgggggtagtggagcaagtgagtgcatggcattgccatgggcgtgtgttaatgatactctgagttctgatcggaagggagacattgttcacaaccaggtttcaaacttgttactagaagatgtcgatcgatacgtccatggaagacatgcttctgctaatgaattgagtttgaatggtcaaacagattcatatggtcaacacagatgggaccctatgttgtcagtaacgttcttgaagtcatttcatgacagactgtacttcccctgtcagaatgaggagcggcatgcagtaccatatgggatttcaaatacctctgagcaacctgaactatgcagctccatagaactgtgtacttgtagttcaataggactggagatagaagacccaaaagaggcgggattgtgtggtaattctgatgctgggtttccatcgtggcttgctcaattagttgggaaaccaactatttcaagcatttttgacagtgggaatgaaattctggatcacaatgacttcagatgcatctccaacttccacagcaacatgttcagttcaaactcaagttgtttgaattccatgtcgactccagagcagtcgtacaaggttggcgcaaagggcctgcttgattcttcatttggtctctcttgtttggctggactggaggagtactccacggacgcagaactgccagatgattctgatagatttcttcaggtgttggaccagttacctgtgaaattcatctcttcagggttttcaaacaacgattccagaatctgggaccatcggtcttcaaatgcagaacctccttttaaccaagattggggcactacacaaccgtggtcatcagtgcatcaactccaacctcattctgattcaggaaccgtgcttggtttcatgccaaatggaagtgcttacagtgatttggtggaacgccatcacagcctcatgctagtccaaggaaacctgagcactgacgttcttggtgctactgatttatcgttctttggatcttgctcaagtttggataacatcacggaggctcctacgttatcttctgatggcataacgtggtagctgtgttggtccactctgaaattttcatccagatcagttcgctacacaaccaaccgttcgctgtatgaaattttgaattcgaagttgcaccacgtataggtgaagttattagctttaatataagttgggaagcaatgtccagaaaattgtgtaatgttagcaaccattactagactttagcatgaagagataccatctggtccaaaattttgacctgaattttggtacctaattactgaagaacagtag

SEQ ID NO: 55291 - DNA, 2091 bp, Zea Mays
cgcaactggcaacccacaacacgcgaagccgtgaaccgaagttgcttcgagttttggcgcgcgccgacccaaacaacggcgctccgcgcggcggaggcgatggaccgactccagcgcaggaaccctagcagccggacccatgccacttcgctgaagcacccacggcctccgcgagtgccgaccttccagccccagccggcgtcgaggtccctacaggagccggagccctcctccccagtatgtgatgctaaaactgcagaatataagttctttaagaaattgtgtgaacagccaggccatagctctctttcatacaaacattctcatcaaagccttgaatcaaatgtgtacaggcaaaaacaagacagagagcctatcagtggacatatcttttcaggaaagagaagcaaattattgaagatagcagccaaaaccatgtccatgggaagtgctgagttgtttcaaagaaggtcggaatttatagttggcatcctgcagagactaggcaccaacaacatcatgagaaagcaagaagggtccatgagtcacagaaaaatggactgcagacatgctcttgctattcccgaaggccattttgataacttgatagactacaagcgaagcaactttaatccattagctaagctgaggaatggtaaaattccatcctcttatgcaagtgatgaagcatgtgagttcatggctttaccatcaggatacaatcagggccctggaagtattgttgatcagaaaaatgacttatctcatgggggtagtggagcaagtgagtgcatggcattgccatgggcgtgtgttaatgatactctgagttctgatcggaagggagacattgttcacaaccaggtttcaaacttgttactagaagatgtcgatcgatacgtccatggaagacatgcttctgctaatgaattgagtttgaatggtcaaacagattcatatggtcaacacagatgggaccctatgttgtcagtaacgttcttgaagtcatttcatgacagactgtacttcccctgtcagaatgaggagcggcatgcagtaccatatgggatttcaaatacctctgagcaacctgaactatgcagctccatagaactgtgtacttgtagttcaataggactggagatagaagacccaaaagaggcgggattgtgtggtaattctgatgctgggtttccatcgtggcttgctcaattagttgggaaaccaactatttcaagcatttttgacagtgggaatgaaattctggatcacaatgacttcagatgcatctccaacttccacagcaacatgttcagttcaaactcaagttgtttgaattccatgtcgactccagagcagtcgtacaaggttggcgcaaagggcctgcttgattcttcatttggtctctcttgtttggctggactggaggagtactccacggacgcagaactgccagatgattctgatagatttcttcaggtgttggaccagttacctgtgaaattcatctcttcagggttttcaaacaacgattccagaatctgggaccatcggtcttcaaatgcagaacctccttttaaccaagattggggcactacacaaccgtggtcatcagtgcatcaactccaacctcattctgattcaggaaccgtgcttggtttcatgccaaatggaagtgcttacagtgatttggtggaacgccatcacagcctcatgctagtccaaggaaacctgagcactgacgttcttggtgctactgatttatcgttctttggatcttgctcaagtttggataacatcacggaggctcctacgttatcttctgatggcataacgtggtagctgtgttggtccactctgaaattttcatccagatcagttcgctacacaaccaaccgttcgctgtatgaaattttgaattcgaagttgcaccacgtataggtgaagttattagctttaatataagttgggaagcaatgtccagaaaattgtgtaatgttagcaaccattactagactttagcatgaagagataccatctggtccaaaattttgacctgaattttggtacctaattactgaagaacagtag

SEQ ID NO: 55292 - DNA, 2343 bp, Zea Mays
cgcaactggcaacccacaacacgcgaagccgtgaaccgaagttgcttcgagttttggcgcgcgccgacccaaacaacggcgctccgcgcggcggaggcgatggaccgactccagcgcaggaaccctagcagccggacccatgccacttcgctgaagcacccacggcctccgcgagtgccgaccttccagccccagccggcgtcgaggtccctacaggagccggagccctcctccccagtatgtgatgctaaaactgcagaatataagttctttaagaaattgtgtgaacagccaggccatagctctctttcatacaaacattctcatcaaagccttgaatcaaatgtgtacaggcaaaaacaaggatcgcgcaatgtaactgccccaaaaaagttacatgtccatgataatactgtgtactgtgatgaaccccttgctacaccagctaagaatgaggaaattcctggcgagaaaattagcgtgcaatcctcccattctgaatatgacgataaagatacacctcaagtcggtccacatgatcgcttgctgggtattcatgttctcacacctatatctcatacatcatttgatgttaccgggatttcagtaaatgttgacagagagcctatcagtggacatatcttttcaggaaagagaagcaaattattgaagatagcagccaaaaccatgtccatgggaagtgctgagttgtttcaaagaaggtcggaatttatagttggcatcctgcagagactaggcaccaacaacatcatgagaaagcaagaagggtccatgagtcacagaaaaatggactgcagacatgctcttgctattcccgaaggccattttgataacttgatagactacaagcgaagcaactttaatccattagctaagctgaggaatggtaaaattccatcctcttatgcaagtgatgaagcatgtgagttcatggctttaccatcaggatacaatcagggccctggaagtattgttgatcagaaaaatgacttatctcatgggggtagtggagcaagtgagtgcatggcattgccatgggcgtgtgttaatgatactctgagttctgatcggaagggagacattgttcacaaccaggtttcaaacttgttactagaagatgtcgatcgatacgtccatggaagacatgcttctgctaatgaattgagtttgaatggtcaaacagattcatatggtcaacacagatgggaccctatgttgtcagtaacgttcttgaagtcatttcatgacagactgtacttcccctgtcagaatgaggagcggcatgcagtaccatatgggatttcaaatacctctgagcaacctgaactatgcagctccatagaactgtgtacttgtagttcaataggactggagatagaagacccaaaagaggcgggattgtgtggtaattctgatgctgggtttccatcgtggcttgctcaattagttgggaaaccaactatttcaagcatttttgacagtgggaatgaaattctggatcacaatgacttcagatgcatctccaacttccacagcaacatgttcagttcaaactcaagttgtttgaattccatgtcgactccagagcagtcgtacaaggttggcgcaaagggcctgcttgattcttcatttggtctctcttgtttggctggactggaggagtactccacggacgcagaactgccagatgattctgatagatttcttcaggtgttggaccagttacctgtgaaattcatctcttcagggttttcaaacaacgattccagaatctgggaccatcggtcttcaaatgcagaacctccttttaaccaagattggggcactacacaaccgtggtcatcagtgcatcaactccaacctcattctgattcaggaaccgtgcttggtttcatgccaaatggaagtgcttacagtgatttggtggaacgccatcacagcctcatgctagtccaaggaaacctgagcactgacgttcttggtgctactgatttatcgttctttggatcttgctcaagtttggataacatcacggaggctcctacgttatcttctgatggcataacgtggtagctgtgttggtccactctgaaattttcatccagatcagttcgctacacaaccaaccgttcgctgtatgaaattttgaattcgaagttgcaccacgtataggtgaagttattagctttaatataagttgggaagcaatgtccagaaaattgtgtaatgttagcaaccattactagactttagcatgaagagataccatctggtccaaaattttgacctgaattttggtacctaattactgaagaacagtag

SEQ ID NO: 55293 - DNA, 2251 bp, Zea Mays
gcaccatttccaccgtatcactgcacggccgcgcgaaaatgtgcagcgccacaagtgcattccggccccgtgagtaatcgtaacagaggatcgctagctagtgtgctaccctgtacggcgcaggcgcagccatgagcaacagcggcaggtggcggaggaggacgaggtccgtagccccttcgccggccacctcttctccgtcgtctcctggcctccgagaagcgcagccgttccggcttccccagtggaagttctcccaggtcctcggcgaactgccgcccgcggccgaagcccgccgcgacggcgctccccgtccgcaggacgacgacgatgcggacgaaatctcggctatcgagttcgacggccgcggcgagtacttggccggcggcgacaacgccgggcgcgtcatcctcttccggaggaccgacggcgacggcgacgacgcgcggcctcgcgcggagcttgagcgcacggaccgtgccggagcgccgccgccgaggtacagctacgcgacggagttccagagccacgaacgggagttcgacgtgctggacagcttggacatcagcgagaggattaagaaggtgaggtggtgcgcgcggcccaacagctccctgctcatgctcgccgcgaacgaccgcacggtcaagctctggaagggcaggtctccgaacacaaggcggaggcgccgaagaaagggaacggtcggccgagttggggcaccgcggcgctgtcggcagccacgaaactgccgaggggctgttcgtctgcagagcctgacgaacgtcctgaaaaggcagcaggcgatgtcggagacggctactctgcgaaatgccggagagtcttcggccgcgctcacgagttcaacatccactccgtctcgaccaactgtgacggggagacgctggtgtccgcggacgacgtgcggatcaacctgtggcatgcggaggtgacgcgccagtgcttcaacatcgtggacatgaagcccgcggacatggaggacctcgtaggtgatttcgttgtttttcttcttgtccttccttacccaccgacgtacgtacgtacgtacgtaggagtggtatactagcatatgctgtcctccagtttgtgaaagccgcagcgatcactggcacttacattacattacatccgagattccgagtgttgtgttggttgggtgatgatgatgaagcagaggtgatcaccacggccgagttccacccgtcgtcctgcagcatgctggcctacggcagctccagcggcctcgtcaggctggtcgatctgcggcgatcggcgctgtgcgaccacagcgttccaggaccgcgagaaccgccctcagcccagcacatttttcagtgagataatctcctgcatcaccgaccttaagttcacaggcgacggggaacaccttctgactcgcgactacatgaacctcaagctctgggacctgcgcgtggaaacctcacccgtcgcaacgtacaaagtccacgagttccttcgcccaaagctgtcggagctgtacaccgacgactacatcttcgacaggttcggctgctgcgccagcaacgacggggcctacttcgctaccggatcttacagcaaaaccttcagagttttctcccgtgccgctgcgcagacatgcggcgctacgttggaggccagcaccaacccttacaggtcaggatggtcatccgaggtcagacggcaaggaacaagtctcgtgcaacatggcgtccaaggtgaagcatctagcatggcacccggcagaaaacttcatcgtttgcgcagccaatagcagcttgtacatgtaccatacataagcacgctcatgttatgtgtgcagagtgcaaatcacagaacagcgttcgtagctaattagattgaagccagaaaagaagatacttttcccatgttagggcttgttcggttattcccaatacacatggattatatgggattggaaaaaattgagaagaagtttgacttgtttgggattcaaaccaatccaatcccgctcaatccacatggattgagagctaaccgaacaagcccttacggttgcatgttgtgaacagggatattgaactgactgtacattgtcaaggatcttggatcttcagcagatcatagaaaggaaaagatactctcgtaacgaacgaaaggatcgcctccctgactgtcctttctgctcctcgatacatccttgcaatattcctgaatttcgaagggttgacctgcaactcagacttgc

SEQ ID NO: 55294 - DNA, 2254 bp, Zea Mays
gcaccatttccaccgtatcactgcacggccgcgcgaaaatgtgcagcgccacaagtgcattccggccccgtgagtaatcgtaacagaggatcgctagctagtgtgctaccctgtacggcgcaggcgcagccatgagcaacagcggcaggtggcggaggaggacgaggtccgtagccccttcgccggccacctcttctccgtcgtctcctggcctccgagaagcgcagccgttccggcttccccagtggaagttctcccaggtcctcggcgaactgccgcccgcggccgaagcccgccgcgacggcgctccccgtccgcaggacgacgacgatgcggacgaaatctcggctatcgagttcgacggccgcggcgagtacttggccggcggcgacaacgccgggcgcgtcatcctcttccggaggaccgacggcgacggcgacgacgcgcggcctcgcgcggagcttgagcgcacggaccgtgccggagcgccgccgccgaggtacagctacgcgacggagttccagagccacgaacgggagttcgacgtgctggacagcttggacatcagcgagaggattaagaaggtgaggtggtgcgcgcggcccaacagctccctgctcatgctcgccgcgaacgaccgcacggtcaagctctggaaggtctccgaacacaaggcggaggcgccgaagaaagggaacggtcggccgagttggggcaccgcggcgctgtcggcagccacgaaactgccgaggggctgttcgtctgcagagcctgacgaacgtcctgaaaaggcagcaggcgatgtcggagacggctactctgcgaaatgccggagagtcttcggccgcgctcacgagttcaacatccactccgtctcgaccaactgtgacggggagacgctggtgtccgcggacgacgtgcggatcaacctgtggcatgcggaggtgacgcgccagtgcttcaacatcgtggacatgaagcccgcggacatggaggacctcgtaggtgatttcgttgtttttcttcttgtccttccttacccaccgacgtacgtacgtacgtacgtaggagtggtatactagcatatgctgtcctccagtttgtgaaagccgcagcgatcactggcacttacattacattacatccgagattccgagtgttgtgttggttgggtgatgatgatgaagcagaggtgatcaccacggccgagttccacccgtcgtcctgcagcatgctggcctacggcagctccagcggcctcgtcaggctggtcgatctgcggcgatcggcgctgtgcgaccacagcgtgagaatgttccaggaccgcgagaaccgccctcagcccagcacatttttcagtgagataatctcctgcatcaccgaccttaagttcacaggcgacggggaacaccttctgactcgcgactacatgaacctcaagctctgggacctgcgcgtggaaacctcacccgtcgcaacgtacaaagtccacgagttccttcgcccaaagctgtcggagctgtacaccgacgactacatcttcgacaggttcggctgctgcgccagcaacgacggggcctacttcgctaccggatcttacagcaaaaccttcagagttttctcccgtgccgctgcgcagacatgcggcgctacgttggaggccagcaccaacccttacaggtcaggatggtcatccgaggtcagacggcaaggaacaagtctcgtgcaacatggcgtccaaggtgaagcatctagcatggcacccggcagaaaacttcatcgtttgcgcagccaatagcagcttgtacatgtaccatacataagcacgctcatgttatgtgtgcagagtgcaaatcacagaacagcgttcgtagctaattagattgaagccagaaaagaagatacttttcccatgttagggcttgttcggttattcccaatacacatggattatatgggattggaaaaaattgagaagaagtttgacttgtttgggattcaaaccaatccaatcccgctcaatccacatggattgagagctaaccgaacaagcccttacggttgcatgttgtgaacagggatattgaactgactgtacattgtcaaggatcttggatcttcagcagatcatagaaaggaaaagatactctcgtaacgaacgaaaggatcgcctccctgactgtcctttctgctcctcgatacatccttgcaatattcctgaatttcgaagggttgacctgcaactcagacttgc

SEQ ID NO: 55295 - DNA, 2074 bp, Zea Mays
gcaccatttccaccgtatcactgcacggccgcgcgaaaatgtgcagcgccacaagtgcattccggccccgtgagtaatcgtaacagaggatcgctagctagtgtgctaccctgtacggcgcaggcgcagccatgagcaacagcggcaggtggcggaggaggacgaggtccgtagccccttcgccggccacctcttctccgtcgtctcctggcctccgagaagcgcagccgttccggcttccccagtggaagttctcccaggtcctcggcgaactgccgcccgcggccgaagcccgccgcgacggcgctccccgtccgcaggacgacgacgatgcggacgaaatctcggctatcgagttcgacggccgcggcgagtacttggccggcggcgacaacgccgggcgcgtcatcctcttccggaggaccgacggcgacggcgacgacgcgcggcctcgcgcggagcttgagcgcacggaccgtgccggagcgccgccgccgaggtacagctacgcgacggagttccagagccacgaacgggagttcgacgtgctggacagcttggacatcagcgagaggattaagaaggtgaggtggtgcgcgcggcccaacagctccctgctcatgctcgccgcgaacgaccgcacggtcaagctctggaagggcaggtctccgaacacaaggcggaggcgccgaagaaagggaacggtcggccgagttggggcaccgcggcgctgtcggcagccacgaaactgccgaggggctgttcgtctgcagagcctgacgaacgtcctgaaaaggcagcaggcgatgtcggagacggctactctgcgaaatgccggagagtcttcggccgcgctcacgagttcaacatccactccgtctcgaccaactgtgacggggagacgctggtgtccgcggacgacgtgcggatcaacctgtggcatgcggaggtgacgcgccagtgcttcaacatcgtggacatgaagcccgcggacatggaggacctcgtagaggtgatcaccacggccgagttccacccgtcgtcctgcagcatgctggcctacggcagctccagcggcctcgtcaggctggtcgatctgcggcgatcggcgctgtgcgaccacagcgtgagaatgttccaggaccgcgagaaccgccctcagcccagcacatttttcagtgagataatctcctgcatcaccgaccttaagttcacaggcgacggggaacaccttctgactcgcgactacatgaacctcaagctctgggacctgcgcgtggaaacctcacccgtcgcaacgtacaaagtccacgagttccttcgcccaaagctgtcggagctgtacaccgacgactacatcttcgacaggttcggctgctgcgccagcaacgacggggcctacttcgctaccggatcttacagcaaaaccttcagagttttctcccgtgccgctgcgcagacatgcggcgctacgttggaggccagcaccaacccttacaggtcaggatggtcatccgaggtcagacggcaaggaacaagtctcgtgcaacatggcgtccaaggtgaagcatctagcatggcacccggcagaaaacttcatcgtttgcgcagccaatagcagcttgtacatgtaccatacataagcacgctcatgttatgtgtgcagagtgcaaatcacagaacagcgttcgtagctaattagattgaagccagaaaagaagatacttttcccatgttagggcttgttcggttattcccaatacacatggattatatgggattggaaaaaattgagaagaagtttgacttgtttgggattcaaaccaatccaatcccgctcaatccacatggattgagagctaaccgaacaagcccttacggttgcatgttgtgaacagggatattgaactgactgtacattgtcaaggatcttggatcttcagcagatcatagaaaggaaaagatactctcgtaacgaacgaaaggatcgcctccctgactgtcctttctgctcctcgatacatccttgcaatattcctgaatttcgaagggttgacctgcaactcagacttgc

SEQ ID NO: 55296 - DNA, 5755 bp, Zea Mays
gagatgccggcggtttcgtcactgacttgtgggccatgttttgcagtgacacaaaaactccgccgcaacaagggccaacatggcgaggcggcaaaccatttctttcccttaaaccctagccaaaaacccttctgctgctccccgcccgccgcccgccaccatgtcgatggcggtggcctccctccgctccctggcgcgccgccaaccccgcctgcgcttgccccctgcgccgctcgtcgtacccggcggccgggcagcattactttccggcgcggccgaggaggcggccccgttggctgccgcggaagcggcggcgccgccacctgttcccggtcggaaggtgctggagagtttccgcgaggagtttgagatcggggggcgctccatcgccttcgagacgggaaagatggcgcgcttcgccaacggttccgtggtgatctccatggaggacacccacgtcctctcaactgtcgccgccgccaagtcctctgagcccattcgagacttcctcccactaactgttgactatcaagagaaacaatatgctcaaggtgttatccccacaacatatatgcgcagggaaggtgctcctaaggaaagagaacttctatgtgggcgtataattgatcgaccaataagaccattgtttcctcctggcttttaccatgaagttcagatcatggtaaatgttctttcatcagatggaaagcaagatccagatgtaatggctgcaaatgcctcttcagctgcactaatgctatctgatataccttggaacgggccgattggagtaatacgtgtagggaggattgatggggcttttatattaaaccctacagtggatgagctaggtttgagtgacctcaatcttgtttatgcatgttctcgggataaaactttaatgattgatgtacaagctcgtgaaataagcgagagggatcttcaggcaggaatgaaacttgcacactctgaggcaattaaatgtatcgaccctcaaataagtttggctaagcgagctggcaaaaagaagaaagaatacaagatatcactgatttcagatacatcctatgagaaaattagaacattctcagaagcacccattgaggaagtcttcactgattcatcatatggcaagtttgaacgggggggagctttagaaaaaatcacacaatctgtgaaggcaaagcttgaagaagaaaatgatgaggacagcttgaagtttcttcacaaggcagttgacacagtgagaaaacaggttatacgtaaaagaataattgaagagggacttagagtagatggtagacaacttgatgaagtgagaccattgtattgtgaatccaacacatatccattattacatggttctgccctgttttcacgtggagacacacaggttctatgtacagttacccttggtgctcctggcgatgctcagcgactggattccattgttggtcctccaacaaagcgtttcatgcttcactatagctttccaccattttcaatagatgaagttgccaaacgtggaggccttaatcgacgagaagttggacatggcactcttgcggagaaagcattgcttgctgtgcttcctccagaaagtgattttccatacaccgttcgggtaaatgcagaagtcatggcatctgatggttcaacatcaatggcatcagtatgtggaggaagtatggctttaatggatgctgggatacctgtaagagaacatgttgccggtgtttcagtgggtcttgtaagtcaggtggatccagctactggagatatttctaattatcgcatattaacagatattctgggccttgaggatcacttgggtgacatggacttcaaaattgcagggacaaggaaaggtattactgctattcagctggatataaaacctgctggaataccattggacataatatgtgaaagtttagagcctgcacgtaaggctcgaaatcaaatccttgaccgcatggaccaggaaataagtaccgcacgtggtattaacgatggaagttcccctcgattagctacactgagcttcagcaacgagtctcttaggaaactgcttttccacaggaaaaaaatcgagcaagaaacaggttgagttcctcgtgggacgtgaaattgaagttggtcgtacatacaaaggaattgtttcttcgattaaggagtatggcgcttttgtggagttcaatggtggacaacaaggcttacttcatatttcggagttgtcacatcaaccggttacgaaagtctcggatgttgtaactcttgggcaatctctctctctgagatgcattggacaggacatgcggggtaacattaaactttcacttaaagcaaccttaccccaaccacgtatcaagaaggatttgaaaaataaggatcctttgccaagtgaagttactggttgggctgctgtggagaacatgagtagtgtggatgttgatgctcagctatcaagtaccgaacatgaaaatggcacaactgaggaggcagctgcattttcgactccttcagttataattcgaagtgctgctgactgtgatgctcaagatgatgcaaatggttctaagaagcgggcgaaggttgcaaagtcatctcctagaccaaataaaccagccagcgaatgccatgatgttaggaaagctaccgctaagaaagctacaggtgccactaccaagaaaactaagaaagtaaagattgaggaatctgtgagtaatggactagaaaccagtggttctgatgttccagaacagagtgctgacaacacttctgaccagaatcagagtcccacgaaattccaatctggggcaatgaagttgggtgatgtagttacagcaaaggtctaccagattcgagcctatggactagtacttgagttgagtgatggtgtgcgtggaatgcataaatttgaggcaaatggcctaaaggaatttgaagttggacaggaactagtagtgaaatgttctagtttcaatgcgaaggggattccgttattctcattgctggactagcaatgccaccatttgggaaccggatacaaatgacaccttagcagctaaccaatcaacttgtggaacacatggctagcgaagttttgttctttcgctgttgttgaagcgttggtcaagttctttattcgtacaaccatgaatagaatggaggtcaatcacatgaagtgtagagcgtacggactgagtacgaaccatcggaacctgctgtagccattatatataactaggattacgttacttatctatctattggttaaaataatagggacgatgaattctttgtaagacgtactgaagcagagtgtcccacttacaggaatccagttccagtttgtagtttctttacctaagattgttcagctgtacctttattttatttttagcagggctgtttacaaaatctgatttttttagttttgaaaagttagcaggagcattgcttatgtttgggtgggttcagattacatgcagtataaactttgaagactatatatatatataatagaaaaaaagaagtgcgagaaataacagaagacgataacaacaggcgagtggccacggatgctcgagaaaccggactagcaccatttccaccgtatcactgcacggccgcgcgaaaatgtgcagcgccacaagtgcattccggccccgtgagtaatcgtaacagaggatcgctagctagtgtgctaccctgtacggcgcaggcgcagccatgagcaacagcggcaggtggcggaggaggacgaggtccgtagccccttcgccggccacctcttctccgtcgtctcctggcctccgagaagcgcagccgttccggcttccccagtggaagttctcccaggtcctcggcgaactgccgcccgcggccgaagcccgccgcgacggcgctccccgtccgcaggacgacgacgatgcggacgaaatctcggctatcgagttcgacggccgcggcgagtacttggccggcggcgacaacgccgggcgcgtcatcctcttccggaggaccgacggcgacggcgacgacgcgcggcctcgcgcggagcttgagcgcacggaccgtgccggagcgccgccgccgaggtacagctacgcgacggagttccagagccacgaacgggagttcgacgtgctggacagcttggacatcagcgagaggattaagaaggtgaggtggtgcgcgcggcccaacagctccctgctcatgctcgccgcgaacgaccgcacggtcaagctctggaagctccagggcaggtctccgaacacaaggcggaggcgccgaagaaagggaacggtcggccgagttggggcaccgcggcgctgtcggcagccacgaaactgccgaggggctgttcgtctgcagagcctgacgaacgtcctgaaaaggcagcaggcgatgtcggagacggctactctgcgaaatgccggagagtcttcggccgcgctcacgagttcaacatccactccgtctcgaccaactgtgacggggagacgctggtgtccgcggacgacgtgcggatcaacctgtggcatgcggaggtgacgcgccagtgcttcaacatcgtggacatgaagcccgcggacatggaggacctcgtagaggtgatcaccacggccgagttccacccgtcgtcctgcagcatgctggcctacggcagctccagcggcctcgtcaggctggtcgatctgcggcgatcggcgctgtgcgaccacagcgtgagaatgttccaggaccgcgagaaccgccctcagcccagcacatttttcagtgagataatctcctgcatcaccgaccttaagttcacaggcgacggggaacaccttctgactcgcgactacatgaacctcaagctctgggacctgcgcgtggaaacctcacccgtcgcaacgtacaaagtccacgagttccttcgcccaaagctgtcggagctgtacaccgacgactacatcttcgacaggttcggctgctgcgccagcaacgacggggcctacttcgctaccggatcttacagcaaaaccttcagagttttctcccgtgccgctgcgcagacatgcggcgctacgttggaggccagcaccaacccttacaggatacaattacatgctcctacgaagatcccagcgctgcttagcaatttctctctcggagttcatagaaaaggtcaggatggtcatccgaggtcagacggcaaggaacaagtctcgtgcaacatggcgtccaaggtgaagcatctagcatggcacccggcagaaaacttcatcgtttgcgcagccaatagcagcttgtacatgtaccatacataagcacgctcatgttatgtgtgcagagtgcaaatcacagaacagcgttcgtagctaattagattgaagccagaaaagaagatacttttcccatgttagggcttgttcggttattcccaatacacatggattatatgggattggaaaaaattgagaagaagtttgacttgtttgggattcaaaccaatccaatcccgctcaatccacatggattgagagctaaccgaacaagcccttacggttgcatgttgtgaacagggatattgaactgactgtacattgtcaaggatcttggatcttcagcagatcatagaaaggaaaagatactctcgtaacgaacgaaaggatcgcctccctgactgtcctttctgctcctcgatacatccttgcaatattcctgaatttcgaagggttgacctgcaactcagacttgc

SEQ ID NO: 55297 - DNA, 5745 bp, Zea Mays
gagatgccggcggtttcgtcactgacttgtgggccatgttttgcagtgacacaaaaactccgccgcaacaagggccaacatggcgaggcggcaaaccatttctttcccttaaaccctagccaaaaacccttctgctgctccccgcccgccgcccgccaccatgtcgatggcggtggcctccctccgctccctggcgcgccgccaaccccgcctgcgcttgccccctgcgccgctcgtcgtacccggcggccgggcagcattactttccggcgcggccgaggaggcggccccgttggctgccgcggaagcggcggcgccgccacctgttcccggtcggaaggtgctggagagtttccgcgaggagtttgagatcggggggcgctccatcgccttcgagacgggaaagatggcgcgcttcgccaacggttccgtggtgatctccatggaggacacccacgtcctctcaactgtcgccgccgccaagtcctctgagcccattcgagacttcctcccactaactgttgactatcaagagaaacaatatgctcaaggtgttatccccacaacatatatgcgcagggaaggtgctcctaaggaaagagaacttctatgtgggcgtataattgatcgaccaataagaccattgtttcctcctggcttttaccatgaagttcagatcatggtaaatgttctttcatcagatggaaagcaagatccagatgtaatggctgcaaatgcctcttcagctgcactaatgctatctgatataccttggaacgggccgattggagtaatacgtgtagggaggattgatggggcttttatattaaaccctacagtggatgagctaggtttgagtgacctcaatcttgtttatgcatgttctcgggataaaactttaatgattgatgtacaagctcgtgaaataagcgagagggatcttcaggcaggaatgaaacttgcacactctgaggcaattaaatgtatcgaccctcaaataagtttggctaagcgagctggcaaaaagaagaaagaatacaagatatcactgatttcagatacatcctatgagaaaattagaacattctcagaagcacccattgaggaagtcttcactgattcatcatatggcaagtttgaacgggggggagctttagaaaaaatcacacaatctgtgaaggcaaagcttgaagaagaaaatgatgaggacagcttgaagtttcttcacaaggcagttgacacagtgagaaaacaggttatacgtaaaagaataattgaagagggacttagagtagatggtagacaacttgatgaagtgagaccattgtattgtgaatccaacacatatccattattacatggttctgccctgttttcacgtggagacacacaggttctatgtacagttacccttggtgctcctggcgatgctcagcgactggattccattgttggtcctccaacaaagcgtttcatgcttcactatagctttccaccattttcaatagatgaagttgccaaacgtggaggccttaatcgacgagaagttggacatggcactcttgcggagaaagcattgcttgctgtgcttcctccagaaagtgattttccatacaccgttcgggtaaatgcagaagtcatggcatctgatggttcaacatcaatggcatcagtatgtggaggaagtatggctttaatggatgctgggatacctgtaagagaacatgttgccggtgtttcagtgggtcttgtaagtcaggtggatccagctactggagatatttctaattatcgcatattaacagatattctgggccttgaggatcacttgggtgacatggacttcaaaattgcagggacaaggaaaggtattactgctattcagctggatataaaacctgctggaataccattggacataatatgtgaaagtttagagcctgcacgtaaggctcgaaatcaaatccttgaccgcatggaccaggaaataagtaccgcacgtggtattaacgatggaagttcccctcgattagctacactgagcttcagcaacgagtctcttaggaaactgcttttccacaggaaaaaaatcgagcaagaaacaggttgagttcctcgtgggacgtgaaattgaagttggtcgtacatacaaaggaattgtttcttcgattaaggagtatggcgcttttgtggagttcaatggtggacaacaaggcttacttcatatttcggagttgtcacatcaaccggttacgaaagtctcggatgttgtaactcttgggcaatctctctctctgagatgcattggacaggacatgcggggtaacattaaactttcacttaaagcaaccttaccccaaccacgtatcaagaaggatttgaaaaataaggatcctttgccaagtgaagttactggttgggctgctgtggagaacatgagtagtgtggatgttgatgctcagctatcaagtaccgaacatgaaaatggcacaactgaggaggcagctgcattttcgactccttcagttataattcgaagtgctgctgactgtgatgctcaagatgatgcaaatggttctaagaagcgggcgaaggttgcaaagtcatctcctagaccaaataaaccagccagcgaatgccatgatgttaggaaagctaccgctaagaaagctacaggtgccactaccaagaaaactaagaaagtaaagattgaggaatctgtgagtaatggactagaaaccagtggttctgatgttccagaacagagtgctgacaacacttctgaccagaatcagagtcccacgaaattccaatctggggcaatgaagttgggtgatgtagttacagcaaaggtctaccagattcgagcctatggactagtacttgagttgagtgatggtgtgcgtggaatgcataaatttgaggcaaatggcctaaaggaatttgaagttggacaggaactagtagtgaaatgttctagtttcaatgcgaaggggattccgttattctcattgctggactagcaatgccaccatttgggaaccggatacaaatgacaccttagcagctaaccaatcaacttgtggaacacatggctagcgaagttttgttctttcgctgttgttgaagcgttggtcaagttctttattcgtacaaccatgaatagaatggaggtcaatcacatgaagtgtagagcgtacggactgagtacgaaccatcggaacctgctgtagccattatatataactaggattacgttacttatctatctattggttaaaataatagggacgatgaattctttgtaagacgtactgaagcagagtgtcccacttacaggaatccagttccagtttgtagtttctttacctaagattgttcagctgtacctttattttatttttagcagggctgtttacaaaatctgatttttttagttttgaaaagttagcaggagcattgcttatgtttgggtgggttcagattacatgcagtataaactttgaagactatatatatatataatagaaaaaaagaagtgcgagaaataacagaagacgataacaacaggcgagtggccacggatgctcgagaaaccggactagcaccatttccaccgtatcactgcacggccgcgcgaaaatgtgcagcgccacaagtgcattccggccccgtgagtaatcgtaacagaggatcgctagctagtgtgctaccctgtacggcgcaggcgcagccatgagcaacagcggcaggtggcggaggaggacgaggtccgtagccccttcgccggccacctcttctccgtcgtctcctggcctccgagaagcgcagccgttccggcttccccagtggaagttctcccaggtcctcggcgaactgccgcccgcggccgaagcccgccgcgacggcgctccccgtccgcaggacgacgacgatgcggacgaaatctcggctatcgagttcgacggccgcggcgagtacttggccggcggcgacaacgccgggcgcgtcatcctcttccggaggaccgacggcgacggcgacgacgcgcggcctcgcgcggagcttgagcgcacggaccgtgccggagcgccgccgccgaggtacagctacgcgacggagttccagagccacgaacgggagttcgacgtgctggacagcttggacatcagcgagaggattaagaaggtgaggtggtgcgcgcggcccaacagctccctgctcatgctcgccgcgaacgaccgcacggtcaagctctggaagggcaggtctccgaacacaaggcggaggcgccgaagaaagggaacggtcggccgagttggggcaccgcggcgctgtcggcagccacgaaactgccgaggggctgttcgtctgcagagcctgacgaacgtcctgaaaaggcagcaggcgatgtcggagacggctactctgcgaaatgccggagagtcttcggccgcgctcacgagttcaacatccactccgtctcgaccaactgtgacggggagacgctggtgtccgcggacgacgtgcggatcaacctgtggcatgcggaggtgacgcgccagtgcttcaacatcgtggacatgaagcccgcggacatggaggacctcaggtgatcaccacggccgagttccacccgtcgtcctgcagcatgctggcctacggcagctccagcggcctcgtcaggctggtcgatctgcggcgatcggcgctgtgcgaccacagcgtgagaatgttccaggaccgcgagaaccgccctcagcccagcacatttttcagtgagataatctcctgcatcaccgaccttaagttcacaggcgacggggaacaccttctgactcgcgactacatgaacctcaagctctgggacctgcgcgtggaaacctcacccgtcgcaacgtacaaagtccacgagttccttcgcccaaagctgtcggagctgtacaccgacgactacatcttcgacaggttcggctgctgcgccagcaacgacggggcctacttcgctaccggatcttacagcaaaaccttcagagttttctcccgtgccgctgcgcagacatgcggcgctacgttggaggccagcaccaacccttacaggatacaattacatgctcctacgaagatcccagcgctgcttagcaatttctctctcggagttcatagaaaaggtcaggatggtcatccgaggtcagacggcaaggaacaagtctcgtgcaacatggcgtccaaggtgaagcatctagcatggcacccggcagaaaacttcatcgtttgcgcagccaatagcagcttgtacatgtaccatacataagcacgctcatgttatgtgtgcagagtgcaaatcacagaacagcgttcgtagctaattagattgaagccagaaaagaagatacttttcccatgttagggcttgttcggttattcccaatacacatggattatatgggattggaaaaaattgagaagaagtttgacttgtttgggattcaaaccaatccaatcccgctcaatccacatggattgagagctaaccgaacaagcccttacggttgcatgttgtgaacagggatattgaactgactgtacattgtcaaggatcttggatcttcagcagatcatagaaaggaaaagatactctcgtaacgaacgaaaggatcgcctccctgactgtcctttctgctcctcgatacatccttgcaatattcctgaatttcgaagggttgacctgcaactcagacttgc

SEQ ID NO: 55298 - DNA, 3333 bp, Zea Mays
aaaaactccgccgcaacaagggccaacatggcgaggcggcaaaccatttctttcccttaaaccctagccaaaaacccttctgctgctccccgcccgccgcccgccaccatgtcgatggcggtggcctccctccgctccctggcgcgccgccaaccccgcctgcgcttgccccctgcgccgctcgtcgtacccggcggccgggcagcattactttccggcgcggccgaggaggcggccccgttggctgccgcggaagcggcggcgccgccacctgttcccggtcggaaggtgctggagagtttccgcgaggagtttgagatcggggggcgctccatcgccttcgagacgggaaagatggcgcgcttcgccaacggttccgtggtgatctccatggaggacacccacgtcctctcaactgtcgccgccgccaagtcctctgagcccattcgagacttcctcccactaactgttgactatcaagagaaacaatatgctcaaggtgttatccccacaacatatatgcgcagggaaggtgctcctaaggaaagagaacttctatgtgggcgtataattgatcgaccaataagaccattgtttcctcctggcttttaccatgaagttcagatcatggtaaatgttctttcatcagatggaaagcaagatccagatgtaatggctgcaaatgcctcttcagctgcactaatgctatctgatataccttggaacgggccgattggagtaatacgtgtagggaggattgatggggcttttatattaaaccctacagtggatgagctaggtttgagtgacctcaatcttgtttatgcatgttctcgggataaaactttaatgattgatgtacaagctcgtgaaataagcgagagggatcttcaggcaggaatgaaacttgcacactctgaggcaattaaatgtatcgaccctcaaataagtttggctaagcgagctggcaaaaagaagaaagaatacaagatatcactgatttcagatacatcctatgagaaaattagaacattctcagaagcacccattgaggaagtcttcactgattcatcatatggcaagtttgaacgggggggagctttagaaaaaatcacacaatctgtgaaggcaaagcttgaagaagaaaatgatgaggacagcttgaagtttcttcacaaggcagttgacacagtgagaaaacaggttatacgtaaaagaataattgaagagggacttagagtagatggtagacaacttgatgaagtgagaccattgtattgtgaatccaacacatatccattattacatggttctgccctgttttcacgtggagacacacaggcactcttgcggagaaagcattgcttgctgtgcttcctccagaaagtgattttccatacaccgttcgggtaaatgcagaagtcatggcatctgatggttcaacatcaatggcatcagtatgtggaggaagtatggctttaatggatgctgggatacctgtaagagaacatgttgccggtgtttcagtgggtcttgtaagtcaggtggatccagctactggagatatttctaattatcgcatattaacagatattctgggccttgaggatcacttgggtgacatggacttcaaaattgcagggacaaggaaaggtattactgctattcagctggatataaaacctgctggaataccattggacataatatgtgaaagtttagagcctgcacgtaaggctcgaaatcaaatccttgaccgcatggaccaggaaataagtaccgcacgtggtattaacgatggaagttcccctcgattagctacactgagcttcagcaacgagtctcttaggaaactgcttttccacaggaaaaaaatcgagcaagaaacaggtgcacgggtatcaatcagtgatggtacagtcactattgttgctaaaactcaagaaattatggataaagctattgagaaggttgagttcctcgtgggacgtgaaattgaagttggtcgtacatacaaaggaattgtttcttcgattaaggagtatggcgcttttgtggagttcaatggtggacaacaaggcttacttcatatttcggagttgtcacatcaaccggttacgaaagtctcggatgttgtaactcttgggcaatctctctctctgagatgcattggacaggacatgcggggtaacattaaactttcacttaaagcaaccttaccccaaccacgtatcaagaaggatttgaaaaataaggatcctttgccaagtgaagttactggttgggctgctgtggagaacatgagtagtgtggatgttgatgctcagctatcaagtaccgaacatgaaaatggcacaactgaggaggcagctgcattttcgactccttcagttataattcgaagtgctgctgactgtgatgctcaagatgatgcaaatggttctaagaagcgggcgaaggttgcaaagtcatctcctagaccaaataaaccagccagcgaatgccatgatgttaggaaagctaccgctaagaaagctacaggtgccactaccaagaaaactaagaaagtaaagattgaggaatctgtgagtaatggactagaaaccagtggttctgatgttccagaacagagtgctgacaacacttctgaccagaatcagagtcccacgaaattccaatctggggcaatgaagttgggtgatgtagttacagcaaaggtctaccagattcgagcctatggactagtacttgagttgagtgatggtgtgcgtggaatgcataaatttgaggcaaatggcctaaaggaatttgaagttggacaggaactagtagtgaaatgttctagtttcaatgcgaaggggattccgttattctcattgctggactagcaatgccaccatttgggaaccggatacaaatgacaccttagcagctaaccaatcaacttgtggaacacatggctagcgaagttttgttctttcgctgttgttgaagcgttggtcaagttctttattcgtacaaccatgaatagaatggaggtcaatcacatgaagtgtagagcgtacggactgagtacgaaccatcggaacctgctgtagccattatatataactaggattacgttacttatctatctattggttaaaataatagggacgatgaattctttgtaagacgtactgaagcagagtgtcccacttacaggaatccagttccagtttgtagtttctttacctaagattgttcagctgtacctttattttatttttagcagggctgtttacaaaatctgatttttttagttttgaaaagttagcaggagcattgcttatg

SEQ ID NO: 55299 - DNA, 3175 bp, Zea Mays
cccagtcggcgggcgtgctccggccgccggtggggagagccggaaccggaagtctgcgtggttcactggttctttaggttgactatcaagagaaacaatatgctcaaggtgttatccccacaacatatatgcgcagggaaggtgctcctaaggaaagagaacttctatgtgggcgtataattgatcgaccaataagaccattgtttcctcctggcttttaccatgaagttcagatcatggtaaatgttctttcatcagatggaaagcaagatccagatgtaatggctgcaaatgcctcttcagctgcactaatgctatctgatataccttggaacgggccgattggagtaatacgtgtagggaggattgatggggcttttatattaaaccctacagtggatgagctaggtttgagtgacctcaatcttgtttatgcatgttctcgggataaaactttaatgattgatgtacaagctcgtgaaataagcgagagggatcttcaggcaggaatgaaacttgcacactctgaggcaattaaatgtatcgaccctcaaataagtttggctaagcgagctggcaaaaagaagaaagaatacaagatatcactgatttcagatacatcctatgagaaaattagaacattctcagaagcacccattgaggaagtcttcactgattcatcatatggcaagtttgaacgggggggagctttagaaaaaatcacacaatctgtgaaggcaaagcttgaagaagaaaatgatgaggacagcttgaagtttcttcacaaggcagttgacacagtgagaaaacaggttatacgtaaaagaataattgaagagggacttagagtagatggtagacaacttgatgaagtgagaccattgtattgtgaatccaacacatatccattattacatggttctgccctgttttcacgtggagacacacaggttctatgtacagttacccttggtgctcctggcgatgctcagcgactggattccattgttggtcctccaacaaagcgtttcatgcttcactatagctttccaccattttcaatagatgaagttgccaaacgtggaggccttaatcgacgagaagttggacatggcactcttgcggagaaagcattgcttgctgtgcttcctccagaaagtgattttccatacaccgttcgggtaaatgcagaagtcatggcatctgatggttcaacatcaatggcatcagtatgtggaggaagtatggctttaatggatgctgggatacctgtaagagaacatgttgccggtgtttcagtgggtcttgtaagtcaggtggatccagctactggagatatttctaattatcgcatattaacagatattctgggccttgaggatcacttgggtgacatggacttcaaaattgcagggacaaggaaaggtattactgctattcagctggatataaaacctgctggaataccattggacataatatgtgaaagtttagagcctgcacgtaaggctcgaaatcaaatccttgaccgcatggaccaggaaataagtaccgcacgtggtattaacgatggaagttcccctcgattaggtttgtacagtactttgtttttgttgctagcatgatataattaaggtttgaactgaccctccattttcagctacactgagcttcagcaacgagtctcttaggaaactgcttttccacaggaaaaaaatcgagcaagaaacaggtgcacgggtatcaatcagtgatggtacagtcactattgttgctaaaactcaagaaattatggataaagctattgagaaggttgagttcctcgtgggacgtgaaattgaagttggtcgtacatacaaaggaattgtttcttcgattaaggagtatggcgcttttgtggagttcaatggtggacaacaaggcttacttcatatttcggagttgtcacatcaaccggttacgaaagtctcggatgttgtaactcttgggcaatctctctctctgagatgcattggacaggacatgcggggtaacattaaactttcacttaaagcaaccttaccccaaccacgtatcaagaaggatttgaaaaataaggatcctttgccaagtgaagttactggttgggctgctgtggagaacatgagtagtgtggatgttgatgctcagctatcaagtaccgaacatgaaaatggcacaactgaggaggcagctgcattttcgactccttcagttataattcgaagtgctgctgactgtgatgctcaagatgatgcaaatggttctaagaagcgggcgaaggttgcaaagtcatctcctagaccaaataaaccagccagcgaatgccatgatgttaggaaagctaccgctaagaaagctacaggtgccactaccaagaaaactaagaaagtaaagattgaggaatctgtgagtaatggactagaaaccagtggttctgatgttccagaacagagtgctgacaacacttctgaccagaatcagagtcccacgaaattccaatctggggcaatgaagttgggtgatgtagttacagcaaaggtctaccagattcgagcctatggactagtacttgagttgagtgatggtgtgcgtggaatgcataaatttgaggcaaatggcctaaaggaatttgaagttggacaggaactagtagtgaaatgttctagtttcaatgcgaaggggattccgttattctcattgctggactagcaatgccaccatttgggaaccggatacaaatgacaccttagcagctaaccaatcaacttgtggaacacatggctagcgaagttttgttctttcgctgttgttgaagcgttggtcaagttctttattcgtacaaccatgaatagaatggaggtcaatcacatgaagtgtagagcgtacggactgagtacgaaccatcggaacctgctgtagccattatatataactaggattacgttacttatctatctattggttaaaataatagggacgatgaattctttgtaagacgtactgaagcagagtgtcccacttacaggaatccagttccagtttgtagtttctttacctaagattgttcagctgtacctttattttatttttagcagggctgtttacaaaatctgatttttttagttttgaaaagttagcaggagcattgcttatg

SEQ ID NO: 55300 - DNA, 1413 bp, Zea Mays
atattttgtagcatataaccacaaggtcacaaccagtttgtatgatttaattggcgtatgaatccgagatgagtgtttcatatgatttttttacagtctatgtacacaagcatttcatgaagaaattatttacttgactcaataagttccaagttcctgcttttgacatttattttcttggtcatcaacatgcgaagctttacatgtcttcatgtcagtggtcgtcaaattttctccagtattgccttgagtagctgcagtggtgaccacacaagtgaacgagatgcaaacaaggcaggtaagctactgcaaatttatacaataatttattgtcaagaaacggacgctagattactgtgccggatagatcttagcaggcaaacagtaggagaactgatgtaaatgagaatacaaagttcttcatgtgaggtaaaatgttgtccagtttttttttcttaaaatgaaatatctatgtctttgctgatttatttgtccagttttttgttcttcaggtgagaagacaaagttcttcagataaacagtaggagtataaccagggagtgtggattttctgaatctaaatggaaaagaggggatatggtactttagaatttggttttcggtgaaactataaattccattggcatgcttgatttaatgttcacttaaattgcctagatccttatccacttgtcctcatggaagcctctcaaccctcaaatgtttgtctttgctgatttatttgtttaggcagccctcgtttagctgcaccttttcctattaaggaaaaaaagaagctttgcgttcaatttctcctagaatctttctgtgataccagctgatttatttattctcttatttggaacgttatgacaacaagaagccactagctagaaagaataaaggaacagaatgcagtgacaccaccgctccatcattgttcttcaaactattcagcaattaaactgttcaaacatgttactgaagattggcagctgaaacacatgatcaccggctgaacatggtaggtgtgaaaattaagatcaccgactgaacagtttatgatcaccagctgaaacacaagatctgggaggcgtggaacatggtagctgaactcttcaaacatgttaggcaatagcaggcaacaacagtgaaacacaatcatcaactgaaaagctgtccggcacctgaactgagcaaatttggttgcctggtagagggaggtctaatggctaacgctgctattcaattatttttttactttagtttgtatcctccttacagatgttggatgaaagcaaaccttcattttttgtttagcaggcctactaaaacaagcttagtgaacctgggtgaacaacatgcactgattcaaaattttattttcattcattgcatttagcttgccttgat

SEQ ID NO: 55301 - DNA, 982 bp, Zea Mays
gttgcttctatggtaacctgaaacctatgtttgcacaaggtttgaacaacaacttctatggttgagcacaattccatggttcaaacatgagcttctatgtcacatagtttggttcagatttaacatagacttaaaacttgtgctcaacacagatctatttaatgctatctattcaattatctataatgaaacaaatgttgacatcaatgactcagtgtttgctttcaaaatttgagatattagttggcagttcaacacaacggtgaatttggtttatcagttggcaaaatgataattcctttactcattggacacatcgttggagatggaaaattggatgttgggaaggcaccattagaataccacatggctgccaactttggagcaataatggctaaagaaattcctcgtcaaatccattagctagaggagttcctggacccatgcctctgctacctttctagtagaaacttgcagttcgttgtgaagagattcgttgaattgttgctaataatactcttgtgctagaggatattcatggccttaggcaagaattatttgtcattgaagatgagatccatatacttgccaaacaatccattcctagagttagtgttgataatgaaatggaatacaaggatattatcaagggtggcatgaaagaagtgttggtgctaagttatgaaagatggagttcgaagctttgcgcaaagagttgtttgtgaaggttcagtcattgtaccgggagctagagcagatcagatttgagaacaagcagctacctgctataagagaaggattgcatgatatacaagaggagatttcgagggctaggtttgtgttttgtgatcttatgtacaatgcattgatgtgggaaatgactccataatgttatgctttcattacagatgtataattttaaacttgaatgtttataaacggagagattaagttcgatgacaataaaataattctttctttt

SEQ ID NO: 55302 - DNA, 909 bp, Zea Mays
cgcacacgtcgcgcgcagccgtgtccctatgctcgccgtggccggtcccctgcgtcgcgcccgggattttgtcgcgcatccctgcgccccactgttccgtgacactcgtgctggctcacttcatcaccgatttctaaagaaccagcttcgtctgtttgtcggtctcattctaatttgatttggaattattgcgcctcagccttgatctgtcaaggctgtcacggccgccgccaaatcgttagagtcgttcaactcgccgatcacatcttggtcggtcgtcgatttcttattcgccatggtacaacaccgctgttagatcctgtctccaacctgtcatggcgcttgccggacttcgccggtgaagttcgtcgtggtcatctggtcccagcccgacccatccgtacgctcgctcctcatccatcgggtttcggcgtgttcgcgtttaccgtcgagtcatcgaacccatcatcccctgctcgacccccaccttaccagctcgctccagacttcaatcgaaggtcgtcgtcgttccgcgcgtcatcaagaaatcccaaacgtcgggtgaagacgaagccagcagcgtggtgttcaccaagtgcgcgacaaaaagctcgaacaagtcgtcgatttcgtggtttcaaatcggatgtcataagggtaccttaattaatcatgtgatgcggaagacgacccaagtcgatcccaagcgtgggctaatccgcatggtgatgttgatggatgaacctgaagataggatgatctaatcaagtgctaggacaaggatgatcgccaagtggacgtcacctaacaacactgacctagtgttattcaggcaagccccggtgcatttgtcacctccttgtgttttaaaatctttatcaccttgtttgatgcattaggtgataggag

SEQ ID NO: 55303 - DNA, 606 bp, Zea Mays
  misc_feature (1)..(2): n is a, c, g, or t
nnaggtacttgatacatgttgggaatgaggggagtagcagcacgtccactttcactctcacaataacgctgcccaggcgcaaccatgatttaattagaaacttattgtcaaaggaagtttgtttttttaactagtcgtgcgcactagttaattcacttcatgtggtatgtttaacttctctttgctagccgattaataatacttagtatgtttttgtcatgatatatgtttgtacactattgccccctcatttatgcaattttgcaagggggatgctgccgaaattttatatatagatgtcagaagtgttgtttagtagcattccggggtgttggtggaccccggggtgttacagttggtatcaaagcataggctttagattctacgcaatttgaagataaatttgacacacttgcacatataggaagggtatgggttcgtatctctttcatattagtattttattgtatagatgactagaacttccttactccaaatccctttatggtttgatggggtatgtcgttaacgacgtaatgcttgatatgatatgttacttctatttagtattggtttcttgatgtggttgttattgaagatattatg

SEQ ID NO: 55304 - DNA, 1394 bp, Zea Mays
accgtagatggcagcaccatgtcacaacctgtgcccgttacagcacctgcagctacaaatcattcgacccccggcattgttgatactgactggatgttgcctgattataggtatgcattgactgaattcttacatatgttcaatgacgatgattgtgtttgcaccacctggatgggtatatatgttcaatgaggatgattttgtttgcagcacctgaatggtaatggttgtatgtgtttcatttcatttcctgctcctatcatatattttgtatttgtgctgaatgattgtctatgtttactgattgtggttgcctctattaaatactgattgtgataattttgtttgaatagttgttccctattagctgatacaaggtccttggcatgtctatatattactttttttttgcagtaccatgtcctccacaggcaactacttcacaaatttgcttaaccaagatggattacagtctttagggtcgggggacaatgtggagtatgattctgaattctcagagtcaccgcttgcagctgacatgaattctcagacaaagtcaaagggtcgatcaaaaagtttcagtgaagaggaggacatgttgcttgtgtcggcttatctaaatgttagcaaagacgctattgcaggacgaagccaaagttcttaggcacgagccaaagtggacatcaataaaaagtcccattatggtctcaaatttggatgctgaaaatggtactgacggtggcaccattaacaattctagacctcttggaaggaaggctgagaaggaaaatttgcgggccagaaagagggaagacaatgattatgatccattcattgaagaaatgaaaaaaattagagaatcaagagtgcagacagacaacaatcggaaggcacgtgatgacatgttcttggagctggagaagcataagcttgaacttgaaaaagagatggagaagcaaaagctagaccttgaaagagatcagcatgacaaaaaggtgatggaaactgacacaagtgggatggatgatgaggccaaacagtatttcaagttactgaaacaggagattttagctcgacgttttgggagtccacaaccatagatgttttttggttatgctctgtttactggtttagtttggttttctttatatactgctgtcagtatgcattttagttcaataatagtgtctgaaacatgtgacctgaaagatgttagtatgctgttagtatgcattttcgtttctgaaggtaacaaaggtgcaaggatacatatgtgctactgaaattaaagcaaacatatgtgctcatagactataaaatgatttattgttgctgcttcatgtgtccagaaagctacacaagatgctcaaacataaagctactgctgaaacata

SEQ ID NO: 55305 - DNA, 767 bp, Zea Mays
aaagagacaccacttgtggttgcaaaattgcaaatattcgtgtttgttgtgtcatccctgcgttctgatccaagatgtatctccagtattacatcaacgagaagggtgacaaggtctacaccaccaagaaggagtcgcctcttggggtgccgacgcagtctgctcacccagctcgcttctcaccagatgacaagtactctcgccagcggtacctgttgaagaagagatttggacttctgccaacgcagaagccagcactgaagtactgaagcttcaactttccaaccatggatgtgcagtttgtgtcactgcttaatgcttgttggttggaatgtagaaataggtatctgaggaaacatatcaaacactgctaggcactactatgacatctcagcgcattcaggcactatatgtaatgctatgtgtttgacaggtcttgttcttattatgtacttggtgtgtgggccaaagcatcgtttttggcgttctcttttcgtcttgattgatgacgtcccctttgctaaatcaatttgaagtcaggtctcaagtgctaatcaaggagggtaacagctttggacagctcgaatgtccagaggagacttgggaagaggttgctgaaaaagttcacaaagaccaatggcttaaattcaatggcacaatgatttatattatatggaacctttgaaggatcaattactaaattcaacggcacaatgatttatattatatatggaacatttgaaggatcaattactaaattcaatggc

SEQ ID NO: 55306 - DNA, 744 bp, Zea Mays
gcaaccgcctctgcttatatcaaaagtgtcatccctgcgttctgatccaagatgtatctccagtattacatcaacgagaagggtgacaaggtctacaccaccaagaaggagtcgcctcttggggtgccgacgcagtctgctcacccagctcgcttctcaccagatgacaagtactctcgccagcggtacctgttgaagaagagatttggacttctgccaacgcagaagccagcactgaagtactgaagcttcaactttccaaccatggatgtgcagtttgtgtcactgcttaatgcttgttggttggaatgtagaaataggtatctgaggaaacatatcaaacactgctaggcactactatgacatctcagcgcattcaggcactatatgtaatgctatgtgtttgacaggtcttgttcttattatgtacttggtgtgtgggccaaagcatcgtttttggcgttctcttttcgtcttgattgatgacgtcccctttgctaaatcaatttgaagtcaggtctcaagtgctaatcaaggagggtaacagctttggacagctcgaatgtccagaggagacttgggaagaggttgctgaaaaagttcacaaagaccaatggcttaaattcaatggcacaatgatttatattatatggaacctttgaaggatcaattactaaattcaacggcacaatgatttatattatatatggaacatttgaaggatcaattactaaattcaatggc

SEQ ID NO: 55307 - DNA, 767 bp, Zea Mays
acggatgcggagcggcgtgcatgctcgcgagtcttgacgacggtaacggtgtcatccctgcgttctgatccaagatgtatctccagtattacatcaacgagaagggtgacaaggtctacaccaccaagaaggagtcgcctcttggggtgccgacgcagtctgctcacccagctcgcttctcaccagatgacaagtactctcgccagcggtacctgttgaagaagagatttggacttctgccaacgcagaagccagcactgaagtactgaagcttcaactttccaaccatggatgtgcagtttgtgtcactgcttaatgcttgttggttggaatgtagaaataggtatctgaggaaacatatcaaacactgctaggcactactatgacatctcagcgcattcaggcactatatgtaatgctatgtgtttgacaggtcttgttcttattatgtacttggtgtgtgggccaaagcatcgtttttggcgttctcttttcgtcttgattgatgacgtcccctttgctaaatcaatttgaagtcaggtctcaagtgctaatcaaggagggtaacagctttggacagctcgaatgtccagaggagacttgggaagaggttgctgaaaaagttcacaaagaccaatggcttaaattcaatggcacaatgatttatattatatggaacctttgaaggatcaattactaaattcaacggcacaatgatttatattatatatggaacatttgaaggatcaattactaaattcaatggc

SEQ ID NO: 55308 - DNA, 694 bp, Zea Mays
acggatgcggagcggcgtgcatgctcgcgagtcttgacgacggtaacggtatgggctttcatccgtggcctcttatatcctcctcctgcctcttccgtaggcgcgcctcttccgtaaaccctagccgcctgtcttgctgaagctgaactgctgatccgtcttccaagctgtggtgtcatccctgcgttctgatccaagatgtatctccagtattacatcaacgagaagggtgacaaggtctacaccaccaagaaggagtcgcctcttggggtgccgacgcagtctgctcacccagctcgcttctcaccagatgacaagtactctcgccagcggtacctgttgaagaagagatttggacttctgccaacgcagaagccagcactgaagtactgaagcttcaactttccaaccatggatgtgcagtttgtgtcactgcttaatgcttgttggttggaatgtagaaataggtctcaagtgctaatcaaggagggtaacagctttggacagctcgaatgtccagaggagacttgggaagaggttgctgaaaaagttcacaaagaccaatggcttaaattcaatggcacaatgatttatattatatggaacctttgaaggatcaattactaaattcaacggcacaatgatttatattatatatggaacatttgaaggatcaattactaaattcaatggc

SEQ ID NO: 55309 - DNA, 2462 bp, Zea Mays
agaacacatccaaagtagatgcatcatgcatctttttccagagatttttgggatgtcgcagtcagtttgctagtttgcctagatatccttcgaggcgctttgagacgggtcaatgccgcttgctttgtcctgtgtgatatgcatagcttaacagaatgtgtgcaatatgttttgattccatgaagccaggtcttggacaagccctattcactgctgaatgttctcatatgtttcacttccactgcatctcctctagtgtgaaacatggaaaccatgtatgcccagtatgccgggcaaaatggaaagagatccccttcaatcgctcattatcttctatagttcctcgtggaagaggtggactgaatgtaaaccaagctcgattgccccaacaaggtgcctacatggctcttctccgccaggttccaaaccgtcagcgagaaggtccagtattggttacttctgagccatcagacttcaatgatgatgaacctttgcataagatggagcctgctaatattggatctagtagaactgtggaaattaagacatattcagagttttcagccattcaacagtcatctcaagatgactttgctgttctgatccatctgaaagccccatatgctaacccagagcaggtcataggcagaccggtcaatgcaacctcagttggttatcctactgcccgcgccccagttgatcttgttaccgtgcttgatgttagtggaagtatggcaggcactaaactggcactcttgaagcgagccatgggttttgttatacagcatcttggcccatcggatcgcctttcagtcatcgctttctcttcaaccgccagaaggttgttccatctccaacggatgtcacactctggccggcagcaggccctgcagactgtcaactcgcttgttgctagtggtggcacaaacattgctgatgcactgaagaaagctgctaaggttattgaggaccgaagccatcaaaatccagtatgcagcatcattctcttgtctgatggccaagatacgtacaatattccctcaaatattaggggtgcccggccagaatacagttcactagttccatcctccattctaaaccgcacatttggcttagtgccggtgcatgggtttggttttggagtagaccatgattcggatgctttgcattcgattgcggaggcctctggcggtacattctcctttatcgaggatgaaggtgtgattcaggacgcatttgctcagtgcataggtgggctcctcagcgttgttgttcaaaacatgcaagtaaatgtggagtgtgtccatcctggtgtccagcttcgctccatcaaatctggtagttaccacagcaaggtggctgcacatgggcgaaatggttccattgatgttggccatctctacgccgacgaggaaagggacttcctactgtcggtgagcttaccacattgtcgtgaacagaccacacttctgaaagttgcctgtgcctacagagattcattgaccaacgaagagatcaagattcagggtggcgaggtagcaatcttgaggcctagatcacccgtatctgagccagtttgcatggaggttgaccgcgagaggaaccgtgtccgtgctgcggatgctatcgaggccgcaagggctgctgctgagagaggtgctctttctgatgctgtgtcaatcctcgaagactgccggaggatactttcagaaactttttcaagccggagcggggaccggctgtgcatggcccttgatgcagagctgagggagatgcaagagaggatggctaaccggcaacgctacgaggcttcagggcgggcatatctgctgtctggcctcagctcacattcttggcagagggccactgcgcgaggcgactccactgacagtgacacacttgtttattcctaccagacaccatccatggttcacatgctacagcgctcacagaaccactgcccttctcctcaaggcccttcacaacctagggtcttggtgaaaccccagccaagaggcggtgaggcgggcttggagttaagcacttcactattttcggtggatgttggatccatcaaaagtacaaccacgccctccctctgctccgagctccgtcctcaaatcgtggtgggtgtatgcactcacggctcacgggaaaaaggcgggtacggagatggagccgccgagatgcggaggcgcggggctgcacggacacctaggccagcgcgcgagcttcgggcgccccagcgttgccgcatctgggagacgagcggaggaagccaaagatccgcatcagcaccgcaaggggggctgccgacggccgacctacgcgttgccgaggctggcacgcggagcttcgagcatgccagggcggggacgcgcgaagatgagtggacgagcagagcaagcgccggggcagagaagccacatatcatgagtggtggtgcaggaggtggggtttga

SEQ ID NO: 55310 - DNA, 2833 bp, Zea Mays
cccccctccgcctcctactcctccacttgccccccagcctgtctctctccgcagcacagaggtcaaaccaaaaggcgcaccccgccgcaacccagcccaacccaccgccgccagcgctctgcaatggcggctccgcgcccccttcaaaaccggctttctcctctccccctctccatccccatcctcctcgcaatctccctctactagtgctgctgctctcattcctccaacaatccaaggttcgagctcattcattacacgaatctgcggccgcgtgggtgccggagagcggcgagcaatggagggggtgtggaggaaggccaagagggcgctgggcgccagcctctgtgtgcgcctccccgccgtcgccggcgaccgcgaggacggcgccagcgagcgccgcgcctcggatgcgctctccctcgactctacagcggcggcgcacgcatcggcgcccaacacgccggccgcgccggggaccggcgcgctgcggaggtccaagtccggaggcaagtcctccaagagaatgtgtgcaatatgttttgattccatgaagccaggtcttggacaagccctattcactgctgaatgttctcatatgtttcacttccactgcatctcctctagtgtgaaacatggaaaccatgtatgcccagtatgccgggcaaaatggaaagagatccccttcaatcgctcattatcttctatagttcctcgtggaagaggtggactgaatgtaaaccaagctcgattgccccaacaaggtgcctacatggctcttctccgccaggttccaaaccgtcagcgagaaggtccagtattggttacttctgagccatcagacttcaatgatgatgaacctttgcataagatggagcctgctaatattggatctagtagaactgtggaaattaagacatattcagagttttcagccattcaacagtcatctcaagatgactttgctgttctgatccatctgaaagccccatatgctaacccagagcaggtcataggcagaccggtcaatgcaacctcagttggttatcctactgcccgcgccccagttgatcttgttaccgtgcttgatgttagtggaagtatggcaggcactaaactggcactcttgaagcgagccatgggttttgttatacagcatcttggcccatcggatcgcctttcagtcatcgctttctcttcaaccgccagaaggttgttccatctccaacggatgtcacactctggccggcagcaggccctgcagactgtcaactcgcttgttgctagtggtggcacaaacattgctgatgcactgaagaaagctgctaaggttattgaggaccgaagccatcaaaatccagtatgcagcatcattctcttgtctgatggccaagatacgtacaatattccctcaaatattaggggtgcccggccagaatacagttcactagttccatcctccattctaaaccgcacatttggcttagtgccggtgcatgggtttggttttggagtagaccatgattcggatgctttgcattcgattgcggaggcctctggcggtacattctcctttatcgaggatgaaggtgtgattcaggacgcatttgctcagtgcataggtgggctcctcagcgttgttgttcaaaacatgcaagtaaatgtggagtgtgtccatcctggtgtccagcttcgctccatcaaatctggtagttaccacagcaaggtggctgcacatgggcgaaatggttccattgatgttggccatctctacgccgacgaggaaagggacttcctactgtcggtgagcttaccacattgtcgtgaacagaccacacttctgaaagttgcctgtgcctacagagattcattgaccaacgaagagatcaagattcagggtggcgaggtagcaatcttgaggcctagatcacccgtatctgagccagtttgcatggaggttgaccgcgagaggaaccgtgtccgtgctgcggatgctatcgaggccgcaagggctgctgctgagagaggtgctctttctgatgctgtgtcaatcctcgaagactgccggaggatactttcagaaactttttcaagccggagcggggaccggctgtgcatggcccttgatgcagagctgagggagatgcaagagaggatggctaaccggcaacgctacgaggcttcagggcgggcatatctgctgtctggcctcagctcacattcttggcagagggccactgcgcgaggcgactccactgacagtgacacacttgtttattcctaccagacaccatccatggttcacatgctacagcgctcacagaaccactgcccttctcctcaaggcccttcacaacctagggtcttggtgaaaccccagccaagaggcggtgaggcgggcttggagttaagcacttcactattttcggtggatgttggatccatcaaaagtacaaccacgccctccctctgctccgagctccgtcctcaaatcgtggtgggtgtatgcactcacggctcacgggaaaaaggcgggtacggagatggagccgccgagatgcggaggcgcggggctgcacggacacctaggccagcgcgcgagcttcgggcgccccagcgttgccgcatctgggagacgagcggaggaagccaaagatccgcatcagcaccgcaaggggggctgccgacggccgacctacgcgttgccgaggctggcacgcggagcttcgagcatgccagggcggggacgcgcgaagatgagtggacgagcagagcaagcgccggggcagagaagccacatatcatgagtggtggtgcaggaggtggggtttga

SEQ ID NO: 55311 - DNA, 2568 bp, Zea Mays
atccccatcctcctcgcaatctccctctactagtgctgctgctctcattcctccaacaatccaaggttcgagctcattcattacacgaatctgcggccgcgtgggtgccggagagcggcgagcaatggagggggtgtggaggaaggccaagagggcgctgggcgccagcctctgtgtgcgcctccccgccgtcgccggcgaccgcgaggacggcgccagcgagcgccgcgcctcggatgcgctctccctcgactctacagcggcggcgcacgcatcggcgcccaacacgccggccgcgccggggaccggcgcgctgcggaggtccaagtccggaggcaagtcctccaagagaatgtgtgcaatatgttttgattccatgaagccaggtcttggacaagccctattcactgctgaatgttctcatatgtttcacttccactgcatctcctctagtgtgaaacatggaaaccatgtatgcccagtatgccgggcaaaatggaaagagatccccttcaatcgctcattatcttctatagttcctcgtggaagaggtggactgaatgtaaaccaagctcgattgccccaacaaggtgcctacatggctcttctccgccaggttccaaaccgtcagcgagaaggtccagtattggttacttctgagccatcagacttcaatgatgatgaacctttgcataagatggagcctgctaatattggatctagtagaactgtggaaattaagacatattcagagttttcagccattcaacagtcatctcaagatgactttgctgttctgatccatctgaaagccccatatgctaacccagagcaggtcataggcagaccggtcaatgcaacctcagttggttatcctactgcccgcgccccagttgatcttgttaccgtgcttgatgttagtggaagtatggcaggcactaaactggcactcttgaagcgagccatgggttttgttatacagcatcttggcccatcggatcgcctttcagtcatcgctttctcttcaaccgccagaaggttgttccatctccaacggatgtcacactctggccggcagcaggccctgcagactgtcaactcgcttgttgctagtggtggcacaaacattgctgatgcactgaagaaagctgctaaggttattgaggaccgaagccatcaaaatccagtatgcagcatcattctcttgtctgatggccaagatacgtacaatattccctcaaatattaggggtgcccggccagaatacagttcactagttccatcctccattctaaaccgcacatttggcttagtgccggtgcatgggtttggttttggagtagaccatgattcggatgctttgcattcgattgcggaggcctctggcggtacattctcctttatcgaggatgaaggtgtgattcaggacgcatttgctcagtgcataggtgggctcctcagcgttgttgttcaaaacatgcaagtaaatgtggagtgtgtccatcctggtgtccagcttcgctccatcaaatctggtagttaccacagcaaggtggctgcacatgggcgaaatggttccattgatgttggccatctctacgccgacgaggaaagggacttcctactgtcggtgagcttaccacattgtcgtgaacagaccacacttctgaaagttgcctgtgcctacagagattcattgaccaacgaagagatcaagattcagggtggcgaggtagcaatcttgaggcctagatcacccgtatctgagccagtttgcatggaggttgaccgcgagaggaaccgtgtccgtgctgcggatgctatcgaggccgcaagggctgctgctgagagaggtgctctttctgatgctgtgtcaatcctcgaagactgccggaggatactttcagaaactttttcaagccggagcggggaccggctgtgcatggcccttgatgcagagctgagggagatgcaagagaggatggctaaccggcaacgctacgaggcttcagggcgggcatatctgctgtctggcctcagctcacattcttggcagagggccactgcgcgaggcgactccactgacagtgacacacttgtttattcctaccagacaccatccatggttcacatgctacagcgctcacagaaccactgcccttctcctcaaggcccttcacaacctagggtcttggtgaaaccccagccaagaggcggtgaggcgggcttggaggtaaatataatctggttgggtatactggggaacctaaggtgggggctttggtggtaaatacattgtggggggtatactcctgtggtgttaagaaataagtagggtagtagtagtagtagatgaggggctggagaaattgtgtaatagtttcaacgggttggagctaggtagtttagtggaggtcagttcttgtcaaagtctttatttgatctttggtgatgtagataagagggtatgatctcggggtggtatatcatggaatctctgtttttttgggtggtgatggtggtgttcaatgctattccatggattcaaactttcaattttattagctg

SEQ ID NO: 55312 - DNA, 2796 bp, Zea Mays
cgccgccagcgctctgcaatggcggctccgcgcccccttcaaaaccggctttctcctctccccctctccatccccatcctcctcgcaatctccctctactagtgctgctgctctcattcctccaacaatccaaggttcgagctcattcattacacgaatctgcggccgcgtgggtgccggagagcggcgagcaatggagggggtgtggaggaaggccaagagggcgctgggcgccagcctctgtgtgcgcctccccgccgtcgccggcgaccgcgaggacggcgccagcgagcgccgcgcctcggatgcgctctccctcgactctacagcggcggcgcacgcatcggcgcccaacacgccggccgcgccggggaccggcgcgctgcggaggtccaagtccggaggcaagtcctccaagatgcggtgttctcctggtcggcaaattttggatgatttgatggggcggcttggtttggatgctcctgctcgcctccagcatttattttccagagatttttgggatgtcgcagtcagtttgctagtttgcctagatatccttcgaggcgctttgagacggagaatgtgtgcaatatgttttgattccatgaagccaggtcttggacaagccctattcactgctgaatgttctcatatgtttcacttccactgcatctcctctagtgtgaaacatggaaaccatgtatgcccagtatgccgggcaaaatggaaagagatccccttcaatcgctcattatcttctatagttcctcgtggaagaggtggactgaatgtaaaccaagctcgattgccccaacaaggtgcctacatggctcttctccgccaggttccaaaccgtcagcgagaaggtccagtattggttacttctgagccatcagacttcaatgatgatgaacctttgcataagatggagcctgctaatattggatctagtagaactgtggaaattaagacatattcagagttttcagccattcaacagtcatctcaagatgactttgctgttctgatccatctgaaagccccatatgctaacccagagcaggtcataggcagaccggtcaatgcaacctcagttggttatcctactgcccgcgccccagttgatcttgttaccgtgcttgatgttagtggaagtatggcaggcactaaactggcactcttgaagcgagccatgggttttgttatacagcatcttggcccatcggatcgcctttcagtcatcgctttctcttcaaccgccagaaggttgttccatctccaacggatgtcacactctggccggcagcaggccctgcagactgtcaactcgcttgttgctagtggtggcacaaacattgctgatgcactgaagaaagctgctaaggttattgaggaccgaagccatcaaaatccagtatgcagcatcattctcttgtctgatggccaagatacgtacaatattccctcaaatattaggggtgcccggccagaatacagttcactagttccatcctccattctaaaccgcacatttggcttagtgccggtgcatgggtttggttttggagtagaccatgattcggatgctttgcattcgattgcggaggcctctggcggtacattctcctttatcgaggatgaaggtgtgattcaggacgcatttgctcagtgcataggtgggctcctcagcgttgttgttcaaaacatgcaagtaaatgtggagtgtgtccatcctggtgtccagcttcgctccatcaaatctggtagttaccacagcaaggtggctgcacatgggcgaaatggttccattgatgttggccatctctacgccgacgaggaaagggacttcctactgtcggtgagcttaccacattgtcgtgaacagaccacacttctgaaagttgcctgtgcctacagagattcattgaccaacgaagagatcaagattcagggtggcgaggtagcaatcttgaggcctagatcacccgtatctgagccagtttgcatggaggttgaccgcgagaggaaccgtgtccgtgctgcggatgctatcgaggccgcaagggctgctgctgagagaggtgctctttctgatgctgtgtcaatcctcgaagactgccggaggatactttcagaaactttttcaagccggagcggggaccggctgtgcatggcccttgatgcagagctgagggagatgcaagagaggatggctaaccggcaacgctacgaggcttcagggcgggcatatctgctgtctggcctcagctcacattcttggcagagggccactgcgcgaggcgactccactgacagtgacacacttgtttattcctaccagacaccatccatggttcacatgctacagcgctcacagaaccactgcccttctcctcaaggcccttcacaacctagggtcttggtgaaaccccagccaagaggcggtgaggcgggcttggaggtaaatataatctggttgggtatactggggaacctaaggtgggggctttggtggtaaatacattgtggggggtatactcctgtggtgttaagaaataagtagggtagtagtagtagtagatgaggggctggagaaattgtgtaatagtttcaacgggttggagctaggtagtttagtggaggtcagttcttgtcaaagtctttatttgatctttggtgatgtagataagagggtatgatctcggggtggtatatcatggaatctctgtttttttgggtggtgatggtggtgttcaatgctattccatggattcaaactttcaattttattagctg

SEQ ID NO: 55313 - DNA, 781 bp, Zea Mays
ctcgctcgtgctgcgccctagccaccggcctgccgctgtccgcccttggctcgccagccgtcgcggtgctgccctgaggcctccgtggcgctccgccgcttgctcgctccctcactcaccccaccgttccgcgcagcgagacgagcacgtcgcgcctgcctagccgccggcgacgtacccgacccagctggggcggtcgcggctgtggccactagtggacggcccgggcgcccggcgttgcgtagatgtacagccggtcagctctcgagaagaccacgccacacggacgccgggacgcggccaggccatagcgggcgggcgctggagcagcttctggcatcctgatttgtagcagcggctaattacgtgaagccttgaaccagtgggtttctgctagtggtactgtgccatggcagtactagtggtaagcacgggagtcggataaacgtgcgtggacggggaacgacgtaccaaaggaaaaaatctcatataatagtagtagagatgttgtttggatgagccacgtaaaaaacacaggaaatgcctacatcctacacaacgaaagagaaacaaagaacttgaagtggcttcgttttttcagatttttctcaatttgtttttcctataaaactgattgcacacagaagtttcctatgttattcgtatgatttttcaatgtttctcctgcaatccaaaggcaaaatccaactatttctacagcaatatgattatatatgtttgtttctatagtacccaaacctgtgaactcgcgagcttttta

SEQ ID NO: 55314 - DNA, 772 bp, Zea Mays
ctcgctcgtgctgcgccctagccaccggcctgccgctgtccgcccttggctcgccagccgtcgcggtgctgccctgaggcctccgtggcgctccgccgcttgctcgctccctcactcaccccaccgttccgcgcagcgagacgagcacgtcgcgcctgcctagccgccggcgacgtacccgacccagctggggcggtcgcggctgtggccactagtggacggcccgggcgcccggcgttgcgtagatgtacagccggtcagctctcgagaagaccacgccacacggacgccgggacgcggccaggccatagcgggcgggcgctggagcagcttctggcatcctgatttgtagcagcggctaattacgtgaagccttgaaccagtgggtttctgctagtggtactgtgccatggcagtactagtgggagtcggataaacgtgcgtggacggggaacgacgtaccaaaggaaaaaatctcatataatagtagtagagatgttgtttggatgagccacgtaaaaaacacaggaaatgcctacatcctacacaacgaaagagaaacaaagaacttgaagtggcttcgttttttcagatttttctcaatttgtttttcctataaaactgattgcacacagaagtttcctatgttattcgtatgatttttcaatgtttctcctgcaatccaaaggcaaaatccaactatttctacagcaatatgattatatatgtttgtttctatagtacccaaacctgtgaactcgcgagcttttta

SEQ ID NO: 55315 - DNA, 2445 bp, Zea Mays
cgggggccaagccccccccccccccccccccccccccccccaaaaaaaacacccactcaaaaggccaaagcccgcgcccgggcggagccgccgagccgctatcccaccgcgacttcgtcgccgtgctctcccgctgctccacccgcgcgcacctcgagcagctccacgctcacgccctcgtcgcgggggcgcgccgccgcgcagcccaccaccttccacctcatccgcttcgccgccctccgcctttcctgcctcgcctatgccccgccacctcttcgacgccacgccccaccccaacgtcttcctctactccgctattctctctgcatatgcctccgccgcagccgctgcctcaccttcatcctacgcccacgcccgcgacgcgctcgcgctcttccttcgcatgcttcgtcacggtcgcccatcgcccaaccagttcgtgtacccgctcgtgctccgcgctgcctgcgccgtcgacgtccgcattgtcaggtcgatccactcccacgcctgcaagagtggtttctgtggatatgaatacgatgtcataaggacctcactcctcgattgttattcgaggcacgctatgatggccgacgcgcgcaagctgtttgacggtttgacagagaggagcgtggtctcctggactgcgctggtgtccgggtatgcaagggcaggaaagattggggatgcgatcatgctcttcgagcgtatgaccgaaagggacgtggctgcatggaatgcaatcatcactggctgctctcagaacaggctgtttgcagaggcggttgggatttttgggaggatggtgggcacagggttgaggccaaatgcaaccaccatttcttgtgtactatctgcttgtgggcatcttggaatgctgaagatcgggaagttgatccactgctgcgcgtggaggacctgtgttggttttggctcatccgttctgaatgggttgattgatatgtacggtaaatgtgggaatctggagggggcaacgtggatattttatgaggtttcagatagaagcctaacagcttggaattctctgatcaattgtctggcactgcatgggcacagcaagtgtgcaatatcagtgtttaatgagatgaggggtgaaggggttgaacctgatgtgattactttcgttggactgcttaatgcatgcacccatggagggtttgttgatgaaggcattaagtactttgaattgatgcagcatgagcacggaattgaaccagagattgaacattatgggtgtatcattaaccttcttggtcgggcaggccggtttcaggatgcattgaatgttatcagcaatatgagaattgaatcagatgaagtcatatgggggtcattgctcaatgcatgtagagtacacagaaatgtagaacttgctgagttagcaattcgaaagttactagaattggatccaaataatgcaaactatgtggtgatgctagcaaatgtgtacagtgaaggtggcttgtgggaagaggtgaggaaagcaagaaagttcatggaggaggagaatataggcaagaagctgcctggttgtagctggatcgaggtggaccgcaagatacaccggttttactctggtgatgatgctcattctgagtcagagaatatatatgacactcttgaggatttagctgcctcaatggaattatgaaaaaaatatactgccagctaaccatgtttccagaaacttgcatagctgcataactttcataaattgtcttcattattggaaggtcatgaacttaacttctgtgtggtaaacaaagtgggcttccctaagacaaacatttgacctagatcgcacatttattggaggtacacaagaagttcttccatcaaagccttctatcaagctatacttcatggcaagagtacaaaggtgtaaaaaaggaaaggtgataggagaagctgaagatgctagtatcaagtcaaccatgctgtactcaacaagaaacttcgaattggaaggtgcgggagctgtttggacgaccaataagcctcctaattcagttgaatgtacaatgatgcaagtcaggatcagttatagctgctggtattattactagcattggaagtgccaaagcgttaccttggatgaacggtggtgccactgtcctaagattattgtgtccgtgccgtaccattcatagctgtttcctcctcttctttttttagcttagctgcctagctgggttcttcttattggatctatcccagtcgtctccaacctattcttccaactcaacttttccagttttcctcgttttattaacttgtttaccaattccattgatttttttgaaagggtatcgatccattgttggtccatgccatcctttgatcgtaacacttggtgaaaaggagatgctttgatcgaagagatcaagattcaaggctctggatgtagttacgtgatggccg

SEQ ID NO: 55316 - DNA, 2547 bp, Zea Mays
cgggggccaagccccccccccccccccccccccccccccccaaaaaaaacacccactcaaaaggccaaagcccgcgcccgggcggagccgccgagccgctatcccaccgcgacttcgtcgccgtgctctcccgctgctccacccgcgcgcacctcgagcagctccacgctcacgccctcgtcgcgggggcgcgccgccgcgcagcccaccaccttccacctcatccgcttcgccgccctccgcctttcctgcctcgcctatgccccgccacctcttcgacgccacgccccaccccaacgtcttcctctactccgctattctctctgcatatgcctccgccgcagccgctgcctcaccttcatcctacgcccacgcccgcgacgcgctcgcgctcttccttcgcatgcttcgtcacggtcgcccatcgcccaaccagttcgtgtacccgctcgtgctccgcgctgcctgcgccgtcgacgtccgcattgtcaggtcgatccactcccacgcctgcaagagtggtttctgtggatatgaatacgatgtcataaggacctcactcctcgattgttattcgaggcacgctatgatggccgacgcgcgcaagctgtttgacggtttgacagagaggagcgtggtctcctggactgcgctggtgtccgggtatgcaagggcaggaaagattggggatgcgatcatgctcttcgagcgtatgaccgaaagggacgtggctgcatggaatgcaatcatcactggctgctctcagaacaggctgtttgcagaggcggttgggatttttgggaggatggtgggcacagggttgaggccaaatgcaaccaccatttcttgtgtactatctgcttgtgggcatcttggaatgctgaagatcgggaagttgatccactgctgcgcgtggaggacctgtgttggttttggctcatccgttctgaatgggttgattgatatgtacggtaaatgtgggaatctggagggggcaacgtggatattttatgaggtttcagatagaagcctaacagcttggaattctctgatcaattgtctggcactgcatgggcacagcaagtgtgcaatatcagtgtttaatgagatgaggggtgaaggggttgaacctgatgtgattactttcgttggactgcttaatgcatgcacccatggagggtttgttgatgaaggcattaagtactttgaattgatgcagcatgagcacggaattgaaccagagattgaacattatgggtgtatcattaaccttcttggtcgggcaggccggtttcaggatgcattgaatgttatcagcaatatgagaattgaatcagatgaagtcatatgggggtcattgctcaatgcatgtagagtacacagaaatgtagaacttgctgagttagcaattcgaaagttactagaattggatccaaataatgcaaactatgtggtgatgctagcaaatgtgtacagtgaaggtggcttgtgggaagaggtgaggaaagcaagaaagttcatggaggaggagaatataggcaagaagctgcctggttgtagctggatcgaggtggaccgcaagatacaccggttttactctggtgatgatgctcattctgagtcagagaatatatatgacactcttgaggatttagctgcctcaatggaattatgaaaaaaatatactgccagctaaccatgtttccagaaacttgcatagctgcataactttcataaattgtcttcattattggaaggtcatgaacttaacttctgtgtggtaaacaaagtgggcttccctaagacaaacatttgacctagatcgcacatttattggaggtacacaagaagttcttccatcaaagccttctatcaagctatacttcatggcaagagagtacaaaggtgtaaaaaaggaaaggtgataggagaagctgaaggtggaccgaacaaaactgccatctattgccatttagtttcagattcacagaaggcagttccatatttttagcctactcagcttgtggaattccattacagatgctagtatcaagtcaaccatgctgtactcaacaagaaacttcgaattggaaggtgcgggagctgtttggacgaccaataagcctcctaattcagttgaatgtacaatgatgcaagtcaggatcagttatagctgctggtattattactagcattggaagtgccaaagcgttaccttggatgaacggtggtgccactgtcctaagattattgtgtccgtgccgtaccattcatagctgtttcctcctcttctttttttagcttagctgcctagctgggttcttcttattggatctatcccagtcgtctccaacctattcttccaactcaacttttccagttttcctcgttttattaacttgtttaccaattccattgatttttttgaaagggtatcgatccattgttggtccatgccatcctttgatcgtaacacttggtgaaaaggagatgctttgatcgaagagatcaagattcaaggctctggatgtagttacgtgatggccg

SEQ ID NO: 55317 - DNA, 2558 bp, Zea Mays
cgggggccaagccccccccccccccccccccccccccccccaaaaaaaacacccactcaaaaggccaaagcccgcgcccgggcggagccgccgagccgctatcccaccgcgacttcgtcgccgtgctctcccgctgctccacccgcgcgcacctcgagcagctccacgctcacgccctcgtcgcgggggcgcgccgccgcgcagcccaccaccttccacctcatccgcttcgccgccctccgcctttcctgcctcgcctatgccccgccacctcttcgacgccacgccccaccccaacgtcttcctctactccgctattctctctgcatatgcctccgccgcagccgctgcctcaccttcatcctacgcccacgcccgcgacgcgctcgcgctcttccttcgcatgcttcgtcacggtcgcccatcgcccaaccagttcgtgtacccgctcgtgctccgcgctgcctgcgccgtcgacgtccgcattgtcaggtcgatccactcccacgcctgcaagagtggtttctgtggatatgaatacgatgtcataaggacctcactcctcgattgttattcgaggcacgctatgatggccgacgcgcgcaagctgtttgacggtttgacagagaggagcgtggtctcctggactgcgctggtgtccgggtatgcaagggcaggaaagattggggatgcgatcatgctcttcgagcgtatgaccgaaagggacgtggctgcatggaatgcaatcatcactggctgctctcagaacaggctgtttgcagaggcggttgggatttttgggaggatggtgggcacagggttgaggccaaatgcaaccaccatttcttgtgtactatctgcttgtgggcatcttggaatgctgaagatcgggaagttgatccactgctgcgcgtggaggacctgtgttggttttggctcatccgttctgaatgggttgattgatatgtacggtaaatgtgggaatctggagggggcaacgtggatattttatgaggtttcagatagaagcctaacagcttggaattctctgatcaattgtctggcactgcatgggcacagcaagtgtgcaatatcagtgtttaatgagatgaggggtgaaggggttgaacctgatgtgattactttcgttggactgcttaatgcatgcacccatggagggtttgttgatgaaggcattaagtactttgaattgatgcagcatgagcacggaattgaaccagagattgaacattatgggtgtatcattaaccttcttggtcgggcaggccggtttcaggatgcattgaatgttatcagcaatatgagaattgaatcagatgaagtcatatgggggtcattgctcaatgcatgtagagtacacagaaatgtagaacttgctgagttagcaattcgaaagttactagaattggatccaaataatgcaaactatgtggtgatgctagcaaatgtgtacagtgaaggtggcttgtgggaagaggtgaggaaagcaagaaagttcatggaggaggagaatataggcaagaagctgcctggttgtagctggatcgaggtggaccgcaagatacaccggttttactctggtgatgatgctcattctgagtcagagaatatatatgacactcttgaggatttagctgcctcaatggaattatgaaaaaaatatactgccagctaaccatgtttccagaaacttgcatagctgcataactttcataaattgtcttcattattggaaggtcatgaacttaacttctgtgtggtaaacaaagtgggcttccctaagacaaacatttgacctagatcgcacatttattggaggtacacaagaagttcttccatcaaagccttctatcaagctatacttcatggcaagaggtacagcaaaaaatacaaaggtgtaaaaaaggaaaggtgataggagaagctgaaggtggaccgaacaaaactgccatctattgccatttagtttcagattcacagaaggcagttccatatttttagcctactcagcttgtggaattccattacagatgctagtatcaagtcaaccatgctgtactcaacaagaaacttcgaattggaaggtgcgggagctgtttggacgaccaataagcctcctaattcagttgaatgtacaatgatgcaagtcaggatcagttatagctgctggtattattactagcattggaagtgccaaagcgttaccttggatgaacggtggtgccactgtcctaagattattgtgtccgtgccgtaccattcatagctgtttcctcctcttctttttttagcttagctgcctagctgggttcttcttattggatctatcccagtcgtctccaacctattcttccaactcaacttttccagttttcctcgttttattaacttgtttaccaattccattgatttttttgaaagggtatcgatccattgttggtccatgccatcctttgatcgtaacacttggtgaaaaggagatgctttgatcgaagagatcaagattcaaggctctggatgtagttacgtgatggccg

SEQ ID NO: 55318 - DNA, 2546 bp, Zea Mays
cgggggccaagccccccccccccccccccccccccccccccaaaaaaaacacccactcaaaaggccaaagcccgcgcccgggcggagccgccgagccgctatcccaccgcgacttcgtcgccgtgctctcccgctgctccacccgcgcgcacctcgagcagctccacgctcacgccctcgtcgcgggggcgcgccgccgcgcagcccaccaccttccacctcatccgcttcgccgccctccgcctttcctgcctcgcctatgccccgccacctcttcgacgccacgccccaccccaacgtcttcctctactccgctattctctctgcatatgcctccgccgcagccgctgcctcaccttcatcctacgcccacgcccgcgacgcgctcgcgctcttccttcgcatgcttcgtcacggtcgcccatcgcccaaccagttcgtgtacccgctcgtgctccgcgctgcctgcgccgtcgacgtccgcattgtcaggtcgatccactcccacgcctgcaagagtggtttctgtggatatgaatacgatgtcataaggacctcactcctcgattgttattcgaggcacgctatgatggccgacgcgcgcaagctgtttgacggtttgacagagaggagcgtggtctcctggactgcgctggtgtccgggtatgcaagggcaggaaagattggggatgcgatcatgctcttcgagcgtatgaccgaaagggacgtggctgcatggaatgcaatcatcactggctgctctcagaacaggctgtttgcagaggcggttgggatttttgggaggatggtgggcacagggttgaggccaaatgcaaccaccatttcttgtgtactatctgcttgtgggcatcttggaatgctgaagatcgggaagttgatccactgctgcgcgtggaggacctgtgttggttttggctcatccgttctgaatgggttgattgatatgtacggtaaatgtgggaatctggagggggcaacgtggatattttatgaggtttcagatagaagcctaacagcttggaattctctgatcaattgtctggcactgcatgggcacagcaagtgtgcaatatcagtgtttaatgagatgaggggtgaaggggttgaacctgatgtgattactttcgttggactgcttaatgcatgcacccatggagggtttgttgatgaaggcattaagtactttgaattgatgcagcatgagcacggaattgaaccagagattgaacattatgggtgtatcattaaccttcttggtcgggcaggccggtttcaggatgcattgaatgttatcagcaatatgagaattgaatcagatgaagtcatatgggggtcattgctcaatgcatgtagagtacacagaaatgtagaacttgctgagttagcaattcgaaagttactagaattggatccaaataatgcaaactatgtggtgatgctagcaaatgtgtacagtgaaggtggcttgtgggaagaggtgaggaaagcaagaaagttcatggaggaggagaatataggcaagaagctgcctggttgtagctggatcgaggtggaccgcaagatacaccggttttactctggtgatgatgctcattctgagtcagagaatatatatgacactcttgaggatttagctgcctcaatggaattatgaaaaaaatatactgccagctaaccatgtttccagaaacttgcatagctgcataactttcataaattgtcttcattattggaaggtcatgaacttaacttctgtgtggtaaacaaagtgggcttccctaagacaaacatttgacctagatcgcacatttattggaggtacacaagaagttcttccatcaaagccttctatcaagctatacttcatggcaagaggtacaaaggtgtaaaaaaggaaaggtgataggagaagctgaaggtggaccgaacaaaactgccatctattgccatttagtttcagattcacagaaggcagttccatatttttagcctactcagcttgtggaattccattacagatgctagtatcaagtcaaccatgctgtactcaacaagaaacttcgaattggaaggtgcgggagctgtttggacgaccaataagcctcctaattcagttgaatgtacaatgatgcaagtcaggatcagttatagctgctggtattattactagcattggaagtgccaaagcgttaccttggatgaacggtggtgccactgtcctaagattattgtgtccgtgccgtaccattcatagctgtttcctcctcttctttttttagcttagctgcctagctgggttcttcttattggatctatcccagtcgtctccaacctattcttccaactcaacttttccagttttcctcgttttattaacttgtttaccaattccattgatttttttgaaagggtatcgatccattgttggtccatgccatcctttgatcgtaacacttggtgaaaaggagatgctttgatcgaagagatcaagattcaaggctctggatgtagttacgtgatggccg

SEQ ID NO: 55319 - DNA, 2403 bp, Zea Mays
cgggggccaagccccccccccccccccccccccccccccccaaaaaaaacacccactcaaaaggccaaagcccgcgcccgggcggagccgccgagccgctatcccaccgcgacttcgtcgccgtgctctcccgctgctccacccgcgcgcacctcgagcagctccacgctcacgccctcgtcgcgggggcgcgccgccgcgcagcccaccaccttccacctcatccgcttcgccgccctccgcctttcctgcctcgcctatgccccgccacctcttcgacgccacgccccaccccaacgtcttcctctactccgctattctctctgcatatgcctccgccgcagccgctgcctcaccttcatcctacgcccacgcccgcgacgcgctcgcgctcttccttcgcatgcttcgtcacggtcgcccatcgcccaaccagttcgtgtacccgctcgtgctccgcgctgcctgcgccgtcgacgtccgcattgtcaggtcgatccactcccacgcctgcaagagtggtttctgtggatatgaatacgatgtcataaggacctcactcctcgattgttattcgaggcacgctatgatggccgacgcgcgcaagctgtttgacggtttgacagagaggagcgtggtctcctggactgcgctggtgtccgggtatgcaagggcaggaaagattggggatgcgatcatgctcttcgagcgtatgaccgaaagggacgtggctgcatggaatgcaatcatcactggctgctctcagaacaggctgtttgcagaggcggttgggatttttgggaggatggtgggcacagggttgaggccaaatgcaaccaccatttcttgtgtactatctgcttgtgggcatcttggaatgctgaagatcgggaagttgatccactgctgcgcgtggaggacctgtgttggttttggctcatccgttctgaatgggttgattgatatgtacggtaaatgtgggaatctggagggggcaacgtggatattttatgaggtttcagatagaagcctaacagcttggaattctctgatcaattgtctggcactgcatgggcacagcaagtgtgcaatatcagtgtttaatgagatgaggggtgaaggggttgaacctgatgtgattactttcgttggactgcttaatgcatgcacccatggagggtttgttgatgaaggcattaagtactttgaattgatgcagcatgagcacggaattgaaccagagattgaacattatgggtgtatcattaaccttcttggtcgggcaggccggtttcaggatgcattgaatgttatcagcaatatgagaattgaatcagatgaagtcatatgggggtcattgctcaatgcatgtagagtacacagaaatgtagaacttgctgagttagcaattcgaaagttactagaattggatccaaataatgcaaactatgtggtgatgctagcaaatgtgtacagtgaaggtggcttgtgggaagaggtgaggaaagcaagaaagttcatggaggaggagaatataggcaagaagctgcctggttgtagctggatcgaggtggaccgcaagatacaccggttttactctggtgatgatgctcattctgagtcagagaatatatatgacactcttgaggatttagctgcctcaatggaattatgaaaaaaatatactgccagctaaccatgtttccagaaacttgcatagctgcataactttcataaattgtcttcattattggaaggtcatgaacttaacttctgtgtggtaaacaaagtgggcttccctaagacaaacatttgacctagatcgcacatttattggaggtacacaagaagttcttccatcaaagccttctatcaagctatacttcatggcaagagatgctagtatcaagtcaaccatgctgtactcaacaagaaacttcgaattggaaggtgcgggagctgtttggacgaccaataagcctcctaattcagttgaatgtacaatgatgcaagtcaggatcagttatagctgctggtattattactagcattggaagtgccaaagcgttaccttggatgaacggtggtgccactgtcctaagattattgtgtccgtgccgtaccattcatagctgtttcctcctcttctttttttagcttagctgcctagctgggttcttcttattggatctatcccagtcgtctccaacctattcttccaactcaacttttccagttttcctcgttttattaacttgtttaccaattccattgatttttttgaaagggtatcgatccattgttggtccatgccatcctttgatcgtaacacttggtgaaaaggagatgctttgatcgaagagatcaagattcaaggctctggatgtagttacgtgatggccg

SEQ ID NO: 55320 - DNA, 1973 bp, Zea Mays
cgggggccaagccccccccccccccccccccccccccccccaaaaaaaacacccactcaaaaggccaaagcccgcgcccgggcggagccgccgagccgctatcccaccgcgacttcgtcgccgtgctctcccgctgctccacccgcgcgcacctcgagcagctccacgctcacgccctcgtcgcgggggcgcgccgccgcgcagcccaccaccttccacctcatccgcttcgccgccctccgcctttcctgcctcgcctatgccccgccacctcttcgacgccacgccccaccccaacgtcttcctctactccgctattctctctgcatatgcctccgccgcagccgctgcctcaccttcatcctacgcccacgcccgcgacgcgctcgcgctcttccttcgcatgcttcgtcacggtcgcccatcgcccaaccagttcgtgtacccgctcgtgctccgcgctgcctgcgccgtcgacgtccgcattgtcaggtcgatccactcccacgcctgcaagagtggtttctgtggatatgaatacgatgtcataaggacctcactcctcgattgttattcgaggcacgctatgatggccgacgcgcgcaagctgtttgacggtttgacagagaggagcgtggtctcctggactgcgctggtgtccgggtatgcaagggcaggaaagattggggatgcgatcatgctcttcgagcgtatgaccgaaagggacgtggctgcatggaatgcaatcatcactggctgctctcagaacaggctgtttgcagaggcggttgggatttttgggaggatggtgggcacagggttgaggccaaatgcaaccaccatttcttgtgtactatctgcttgtgggcatcttggaatgctgaagatcgggaagttgatccactgctgcgcgtggaggacctgtgttggttttggctcatccgttctgaatgggttgattgatatgtacggtaaatgtgggaatctggagggggcaacgtggatattttatgaggtttcagatagaagcctaacagcttggaattctctgatcaattgtctggcactgcatgggcacagcaagtgtgcaatatcagtgtttaatgagatgaggggtgaaggggttgaacctgatgtgattactttcgttggactgcttaatgcatgcacccatggagggtttgttgatgaaggcattaagtactttgaattgatgcagcatgagcacggaattgaaccagagattgaacattatgggtgtatcattaaccttcttggtcgggcaggccggtttcaggatgcattgaatgttatcagcaatatgagaattgaatcagatgaagtcatatgggggtcattgctcaatgcatgtagagtacacagaaatgtagaacttgctgagttagcaattcgaaagttactagaattggatccaaataatgcaaactatgtggtgatgctagcaaatgtgtacagtgaaggtggcttgtgggaagaggtgaggaaagcaagaaagttcatggaggaggagaatataggcaagaagctgcctggttgtagctggatcgaggtggaccgcaagatacaccggttttactctggtgatgatgctcattctgagtcagagaatatatatgacactcttgaggatttagctgcctcaatggaattatgaaaaaaatatactgccagctaaccatgtttccagaaacttgcatagctgcataactttcataaattgtcttcattattggaaggtcatgaacttaacttctgtgtggtaaacaaagtgggcttccctaagacaaacatttgacctagatcgcacatttattggaggtacacaagaagttcttccatcaaagccttctatcaagctatacttcatggcaagagggatgttgcatgctgcgtctttggaaggatcgtgtcttattgtatttgatgatatgatcacgaggcttgaaactggc

SEQ ID NO: 55321 - DNA, 1986 bp, Zea Mays
cgggggccaagccccccccccccccccccccccccccccccaaaaaaaacacccactcaaaaggccaaagcccgcgcccgggcggagccgccgagccgctatcccaccgcgacttcgtcgccgtgctctcccgctgctccacccgcgcgcacctcgagcagctccacgctcacgccctcgtcgcgggggcgcgccgccgcgcagcccaccaccttccacctcatccgcttcgccgccctccgcctttcctgcctcgcctatgccccgccacctcttcgacgccacgccccaccccaacgtcttcctctactccgctattctctctgcatatgcctccgccgcagccgctgcctcaccttcatcctacgcccacgcccgcgacgcgctcgcgctcttccttcgcatgcttcgtcacggtcgcccatcgcccaaccagttcgtgtacccgctcgtgctccgcgctgcctgcgccgtcgacgtccgcattgtcaggtcgatccactcccacgcctgcaagagtggtttctgtggatatgaatacgatgtcataaggacctcactcctcgattgttattcgaggcacgctatgatggccgacgcgcgcaagctgtttgacggtttgacagagaggagcgtggtctcctggactgcgctggtgtccgggtatgcaagggcaggaaagattggggatgcgatcatgctcttcgagcgtatgaccgaaagggacgtggctgcatggaatgcaatcatcactggctgctctcagaacaggctgtttgcagaggcggttgggatttttgggaggatggtgggcacagggttgaggccaaatgcaaccaccatttcttgtgtactatctgcttgtgggcatcttggaatgctgaagatcgggaagttgatccactgctgcgcgtggaggacctgtgttggttttggctcatccgttctgaatgggttgattgatatgtacggtaaatgtgggaatctggagggggcaacgtggatattttatgaggtttcagatagaagcctaacagcttggaattctctgatcaattgtctggcactgcatgggcacagcaagtgtgcaatatcagtgtttaatgagatgaggggtgaaggggttgaacctgatgtgattactttcgttggactgcttaatgcatgcacccatggagggtttgttgatgaaggcattaagtactttgaattgatgcagcatgagcacggaattgaaccagagattgaacattatgggtgtatcattaaccttcttggtcgggcaggccggtttcaggatgcattgaatgttatcagcaatatgagaattgaatcagatgaagtcatatgggggtcattgctcaatgcatgtagagtacacagaaatgtagaacttgctgagttagcaattcgaaagttactagaattggatccaaataatgcaaactatgtggtgatgctagcaaatgtgtacagtgaaggtggcttgtgggaagaggtgaggaaagcaagaaagttcatggaggaggagaatataggcaagaagctgcctggttgtagctggatcgaggtggaccgcaagatacaccggttttactctggtgatgatgctcattctgagtcagagaatatatatgacactcttgaggatttagctgcctcaatggaattatgaaaaaaatatactgccagctaaccatgtttccagaaacttgcatagctgcataactttcataaattgtcttcattattggaaggtcatgaacttaacttctgtgtggtaaacaaagtgggcttccctaagacaaacatttgacctagatcgcacatttattggaggtacacaagaagttcttccatcaaagccttctatcaagctatacttcatggcaagaggtacagcaaaaaaggatgttgcatgctgcgtctttggaaggatcgtgtcttattgtatttgatgatatgatcacgaggcttgaaactggc

SEQ ID NO: 55322 - DNA, 2277 bp, Zea Mays
gcctgccctgcacctgcgcggttataaaacgctagggagagggcgggagcaagagcgcttggcgaggtcctggatgactgactgaccacactagcgcagcgcgcacaggagcaaaggggggcatcctctatcgcgcgcgcgccatggccaccaggccgggccctttgactgaatggccatggcaaaggcttggaaacttcaagtacttggtgatggctcccgtggcggtccacggcgcgcggcgggtggtcgcgcggggctggggcgacatcgacctggccttcgcgctcatcctgccgtcgctgctgctgcggatggtgcacaaccagatctggatcagcgccgcgcgctaccagacggcgcgcagcaagcaccgcatcgtcgaccgcggcatcgagttcgaccaggtcgaccgggagcgcggctgggacgaccagatcatcctcaacggcctgctcttctacgttggctacctggcgatccccagcgcgaggcgcatgccggcgtggaggtcggacggcgccgtggcgatggcgctgctccacgccgggcccgtggagttcctctactactggttccaccgggcgctgcaccaccacttcctctactcgcgctaccactcgcaccaccactcctccatcgtcaccgagcccatcacatccgtgatccatcccttcgctgagcacatggtctactacgtcctgttcgccatccccatgctttcgactctctacatggggaacgcctccgtcctgggcatcgtgctctacatcgcctacatcgacttcatgaacaacatggggcactgcaacttcgagctggtgcccagcaccatggacaagtcgtctgaccagctgtacgagacctcgctcaggggagcggaggagacgcctggcctcgtccacctcacgcacatgaccgacctgcagtcggtctaccacctgcggatcggcttcgcctccgtggcgtccagaccgtctgccaccggcgccatgtggtggtacatgtgggtgctgtggcccgtggcgtggctgtccatggcgctcgcgtgggcctacgggtcctccgcgttcgtcgtcgagaggatcaaactcgggaagctgaggatgcaaacgtgggcagtgccaagatacaacttccagtacggcctgagctgggagagagaatcgatcaacggcctaatcgaaagggcgatactagatgctgatgcgagaggtgtcaaggtgctcagcctaggactgttgaaccaggcgaaacagctgaacggcggcggcgagctgttcaggcacaggttctcctccacgcaggcccttctaaggtagcgtgcgccacggctgctgcgttgtgcgagaggggcgtccaggtcgtcatgaacccaaacaaggaatatgatatgctcaagtcacagattgcagatagcaaagcaagctatttggaacgacgctccgacaaccaccacacgcctcaggtttggctagtagacagcatcgacgacgaggaacagaagatggcaccgaaaggagccgtattcgtcccaatctcacagttccccatcaagaaaatccgcaaggattgcacctacctgagcactccagcaatgaagatccctgaaaccatgcaaaatatccatgcctgcgagaactggctgccaagacgggtgatgagcgcctggcgcatcggcgggatacttcacgccctggaagggtggaccgtgcacgagtgtggggacgccatggtgcatgctgacaaagcatggtcagctgctattaggcacggattcgttcctttgacgaaagcctgaaagcctgcgaagcccggggttctgtggctggggcctgcgatagatatatgtacgcagatctggacgccattcgacgatggctggaaaactacgtttcagcaatcggtagcacaaattctcccccgctagagaaggcgacttatatggtcggcgtgatgaatgacgaccttgattccaacagcatatagtaactacagttatgttgtggcattgtatgatgcaagtgcgagaaactgctttgtggctgtctgggtgacatatacaattataataaaatgtcgatttggcttgtccttttgaaatgtgccgaggaatactcttttgctgaaaaacggatagggctagtttggatattacaattttccaagaaattactatttttccaagtaaaaataaactaactttctttgggaaaaattaaaatctcgtggaaaaataggatttccaagctagccctaagcagttttttttataca

SEQ ID NO: 55323 - DNA, 1946 bp, Zea Mays
gcctgccctgcacctgcgcggttataaaacgctagggagagggcgggagcaagagcgcttggcgaggtcctggatgactgactgaccacactagcgcagcgcgcacaggagcaaaggggggcatcctctatcgcgcgcgcgccatggccaccaggccgggccctttgactgaatggccatggcaaaggcttggaaacttcaagccgtgatccatcccttcgctgagcacatggtctactacgtcctgttcgccatccccatgctttcgactctctacatggggaacgcctccgtcctgggcatcgtgctctacatcgcctacatcgacttcatgaacaacatggggcactgcaacttcgagctggtgcccaggtggatgttccagctcttccctcccctcaagtacctcatgtacacgccgtcgttccattctctgcaccacacgcagttccgcacgaactactcgctgttcatgccgctctacgactacgtatacagcaccatggacaagtcgtctgaccagctgtacgagacctcgctcaggggagcggaggagacgcctggcctcgtccacctcacgcacatgaccgacctgcagtcggtctaccacctgcggatcggcttcgcctccgtggcgtccagaccgtctgccaccggcgccatgtggtggtacatgtgggtgctgtggcccgtggcgtggctgtccatggcgctcgcgtgggcctacgggtcctccgcgttcgtcgtcgagaggatcaaactcgggaagctgaggatgcaaacgtgggcagtgccaagatacaacttccagtacggcctgagctgggagagagaatcgatcaacggcctaatcgaaagggcgatactagatgctgatgcgagaggtgtcaaggtgctcagcctaggactgttgaaccaggcgaaacagctgaacggcggcggcgagctgttcaggcacaggttctcctccacgcaggcccttctaaggtagcgtgcgccacggctgctgcgttgtgcgagaggggcgtccaggtcgtcatgaacccaaacaaggaatatgatatgctcaagtcacagattgcagatagcaaagcaagctatttggaacgacgctccgacaaccaccacacgcctcaggtttggctagtagacagcatcgacgacgaggaacagaagatggcaccgaaaggagccgtattcgtcccaatctcacagttccccatcaagaaaatccgcaaggattgcacctacctgagcactccagcaatgaagatccctgaaaccatgcaaaatatccatgcctgcgagaactggctgccaagacgggtgatgagcgcctggcgcatcggcgggatacttcacgccctggaagggtggaccgtgcacgagtgtggggacgccatggtgcatgctgacaaagcatggtcagctgctattaggcacggattcgttcctttgacgaaagcctgaaagcctgcgaagcccggggttctgtggctggggcctgcgatagatatatgtacgcagatctggacgccattcgacgatggctggaaaactacgtttcagcaatcggtagcacaaattctcccccgctagagaaggcgacttatatggtcggcgtgatgaatgacgaccttgattccaacagcatatagtaactacagttatgttgtggcattgtatgatgcaagtgcgagaaactgctttgtggctgtctgggtgacatatacaattataataaaatgtcgatttggcttgtccttttgaaatgtgccgaggaatactcttttgctgaaaaacggatagggctagtttggatattacaattttccaagaaattactatttttccaagtaaaaataaactaactttctttgggaaaaattaaaatctcgtggaaaaataggatttccaagctagccctaagcagttttttttataca

SEQ ID NO: 55324 - DNA, 2328 bp, Zea Mays
gcctgccctgcacctgcgcggttataaaacgctagggagagggcgggagcaagagcgcttggcgaggtcctggatgactgactgaccacactagcgcagcgcgcacaggagcaaaggggggcatcctctatcgcgcgcgcgccatggccaccaggccgggccctttgactgaatggccatggcaaaggcttggaaacttcaagtacttggtgatggctcccgtggcggtccacggcgcgcggcgggtggtcgcgcggggctggggcgacatcgacctggccttcgcgctcatcctgccgtcgctgctgctgcggatggtgcacaaccagatctggatcagcgccgcgcgctaccagacggcgcgcagcaagcaccgcatcgtcgaccgcggcatcgagttcgaccaggtcgaccgggagcgcggctgggacgaccagatcatcctcaacggcctgctcttctacgttggctacctggcgatccccagcgcgaggcgcatgccggcgtggaggtcggacggcgccgtggcgatggcgctgctccacgccgggcccgtggagttcctctactactggttccaccgggcgctgcaccaccacttcctctactcgcgctaccactcgcaccaccactcctccatcgtcaccgagcccatcacatccgtgatccatcccttcgctgagcacatggtctactacgtcctgttcgccatccccatgctttcgactctctacatggggaacgcctccgtcctgggcatcgtgctctacatcgcctacatcgacttcatgaacaacatggggcactgcaacttcgagctggtgcccaggtggatgttccagctcttccctcccctcaagtacctcatgtacacgccgtccaccatggacaagtcgtctgaccagctgtacgagacctcgctcaggggagcggaggagacgcctggcctcgtccacctcacgcacatgaccgacctgcagtcggtctaccacctgcggatcggcttcgcctccgtggcgtccagaccgtctgccaccggcgccatgtggtggtacatgtgggtgctgtggcccgtggcgtggctgtccatggcgctcgcgtgggcctacgggtcctccgcgttcgtcgtcgagaggatcaaactcgggaagctgaggatgcaaacgtgggcagtgccaagatacaacttccagtacggcctgagctgggagagagaatcgatcaacggcctaatcgaaagggcgatactagatgctgatgcgagaggtgtcaaggtgctcagcctaggactgttgaaccaggcgaaacagctgaacggcggcggcgagctgttcaggcacaggttctcctccacgcaggcccttctaaggtagcgtgcgccacggctgctgcgttgtgcgagaggggcgtccaggtcgtcatgaacccaaacaaggaatatgatatgctcaagtcacagattgcagatagcaaagcaagctatttggaacgacgctccgacaaccaccacacgcctcaggtttggctagtagacagcatcgacgacgaggaacagaagatggcaccgaaaggagccgtattcgtcccaatctcacagttccccatcaagaaaatccgcaaggattgcacctacctgagcactccagcaatgaagatccctgaaaccatgcaaaatatccatgcctgcgagaactggctgccaagacgggtgatgagcgcctggcgcatcggcgggatacttcacgccctggaagggtggaccgtgcacgagtgtggggacgccatggtgcatgctgacaaagcatggtcagctgctattaggcacggattcgttcctttgacgaaagcctgaaagcctgcgaagcccggggttctgtggctggggcctgcgatagatatatgtacgcagatctggacgccattcgacgatggctggaaaactacgtttcagcaatcggtagcacaaattctcccccgctagagaaggcgacttatatggtcggcgtgatgaatgacgaccttgattccaacagcatatagtaactacagttatgttgtggcattgtatgatgcaagtgcgagaaactgctttgtggctgtctgggtgacatatacaattataataaaatgtcgatttggcttgtccttttgaaatgtgccgaggaatactcttttgctgaaaaacggatagggctagtttggatattacaattttccaagaaattactatttttccaagtaaaaataaactaactttctttgggaaaaattaaaatctcgtggaaaaataggatttccaagctagccctaagcagttttttttataca

SEQ ID NO: 55325 - DNA, 863 bp, Zea Mays
gatcctttacttctgtggaaagggttgattcaagtcctccagttctttgagaccaacatacataattcaaaggtatatccgatacgtggtaagagatacaaatgccaggactgcactgagttaataggctttgacctttgcgaagcctgctacaactccagttcaaagctcccaggacgctttaaccagcggcacacccctaatcacagaatggaagttgacaattcagcactcgtgcataggatactgagacaccatggcatacccgaggaaggccctgagggactgatgatggaagtggttggtcctgatgcaatggtgcagatactcattgataatcaaggaatggaggagggcaatgacgagggcccaggagaggcggccattgaagaaccagttggttctcttggctcaatgtcgcgtctgtcgcatctattcatgtataatccagaaatggaggatggcaatgacgaggactcaggagaggaggcggccattgaagaaccagttggttctcttggcgcaatggcgcctctattcatgtatgatcaagaaatggaggacaacgaggaggatcaggcacactagatgcagattgcaccagctgcagcgaagcctttgttttgtgttgctggggcggctctacttatgtaatgtggaatggagggattgcgcaagcttaaaagtatggctggatcggccttgttttttaactggttctctagttactgccatctaatagccaacatttttcccgcttttgtaaatccgtgcagttgtttgtttcaaaggaaaatgcaataaggatatgcagaactatattccttattttaaactctactcctttcgtcccgtgaagcaag

SEQ ID NO: 55326 - DNA, 907 bp, Zea Mays
gcaggtcgtcgctcgccagaggtcaaggtacttcaggcagaaaaggaagcactagggcactgcatgctgaagacccgtcaaatattcacattggagtaggatgcgactcatgtggggtatatccgatacgtggtaagagatacaaatgccaggactgcactgagttaataggctttgacctttgcgaagcctgctacaactccagttcaaagctcccaggacgctttaaccagcggcacacccctaatcacagaatggaagttgacaattcagcactcgtgcataggatactgagacaccatggcatacccgaggaaggccctgagggactgatgatggaagtggttggtcctgatgcaatggtgcagatactcattgataatcaaggaatggaggagggcaatgacgagggcccaggagaggcggccattgaagaaccagttggttctcttggctcaatgtcgcgtctgtcgcatctattcatgtataatccagaaatggaggatggcaatgacgaggactcaggagaggaggcggccattgaagaaccagttggttctcttggcgcaatggcgcctctattcatgtatgatcaagaaatggaggacaacgaggaggatcaggcacactagatgcagattgcaccagctgcagcgaagcctttgttttgtgttgctggggcggctctacttatgtaatgtggaatggagggattgcgcaagcttaaaagtatggctggatcggccttgttttttaactggttctctagttactgccatctaatagccaacatttttcccgcttttgtaaatccgtgcagttgtttgtttcaaaggaaaatgcaataaggatatgcagaactatattccttattttaaactctactcctttcgtcccgtgaagcaag

SEQ ID NO: 55327 - DNA, 1818 bp, Zea Mays
aatttatctagaggaaaaagtcaaaacaaacagcgctacgccatcggtcccctgcccctccccgacgcttccggctttccgtgcgaccgtgcccttttcctcctctcgcagctcgcaggcgcaacagattccacccgttccttcgggtggccggacggaacgaggaaggaggcaggatggcctccgatggccacccgccggagccggggaagaaggaggatgtcgccaccacggccgccgggcctggagcaaacgatctggacgacccgcaattcatgtgctgcgtatgtctggatcttctgtacaaaccagttgttatatcatgtggtcatatgtcatgtttctggtgtgtccacaaagctatgcatattttccgggaatcgcattgtgctgtgtgtaggcagccctatatacacttcccgagtatttgtcagctcttgcatcatttgcttctaaagcttgaaactaatgattacaaaagaagggaaaaagaagtactagaggaagagaagcgcatgcaaacatactctccccaaatcattgagttcttaaactacaagactaacgctataaggagaacagaaatgaagacagtaaagctagacctccacaagaagttccattgaatgacagcgttccagatgagcatttgaagaaaattaaattggaggatgtttcatgccctctctgtatggagatgctgtatcaacctgctgttcttaattgtggtcatgtgtattgtgtatcctgtttgtcatccttgaatgaggaaacgctgaagtgccatgtttgtggaagtcttcaccctggagatttccctaatgtttgcctggaccttgatcatttccttgaagaatattttccagcagaatatgaattgagagggcagaaagttcaatttaagaaggatcagtgcaatcgtgaaacatcatcttcaggtacttcaggcagaaaaggaagcactagggcactgcatgctgaagacccgtcaaatattcacattggagtaggatgcgactcatgtggggtatatccgatacgtggtaagagatacaaatgccaggactgcactgagttaataggctttgacctttgcgaagcctgctacaactccagttcaaagctcccaggacgctttaaccagcggcacacccctaatcacagaatggaagttgacaattcagcactcgtgcataggatactgagacaccatggcatacccgaggaaggccctgagggactgatgatggaagtggttggtcctgatgcaatggtgcagatactcattgataatcaaggaatggaggagggcaatgacgagggcccaggagaggcggccattgaagaaccagttggttctcttggctcaatgtcgcgtctgtcgcatctattcatgtataatccagaaatggaggatggcaatgacgaggactcaggagaggaggcggccattgaagaaccagttggttctcttggcgcaatggcgcctctattcatgtatgatcaagaaatggaggacaacgaggaggatcaggcacactagatgcagattgcaccagctgcagcgaagcctttgttttgtgttgctggggcggctctacttatgtaatgtggaatggagggattgcgcaagcttaaaagtatggctggatcggccttgttttttaactggttctctagttactgccatctaatagccaacatttttcccgcttttgtaaatccgtgcagttgtttgtttcaaaggaaaatgcaataaggatatgcagaactatattccttattttaaactctactcctttcgtcccgtgaagcaag

SEQ ID NO: 55328 - DNA, 1599 bp, Zea Mays
aatttatctagaggaaaaagtcaaaacaaacagcgctacgccatcggtcccctgcccctccccgacgcttccggctttccgtgcgaccgtgcccttttcctcctctcgcagctcgcaggcgcaacagattccacccgttccttcgggtggccggacggaacgaggaaggaggcaggatggcctccgatggccacccgccggagccggggaagaaggaggatgtcgccaccacggccgccgggcctggagcaaacgatctggacgacccgcaattcatgtgctgcaggaagagaagcgcatgcaaacatactctccccaaatcattgagttcttaaactacaagactaacgttggaagctataaggagaacagaaatgaagacagtaaagctagacctccacaagaagttccattgaatgacagcgttccagatgagcatttgaagaaaattaaattggaggatgtttcatgccctctctgtatggagatgctgtatcaacctgctgttcttaattgtggtcatgtgtattgtgtatcctgtttgtcatccttgaatgaggaaacgctgaagtgccatgtttgtggaagtcttcaccctggagatttccctaatgtttgcctggaccttgatcatttccttgaagaatattttccagcagaatatgaattgagagggcagaaagttcaatttaagaaggatcagtgcaatcgtgaaacatcatcttcaggcagaaaaggaagcactagggcactgcatgctgaagacccgtcaaatattcacattggagtaggatgcgactcatgtggggtatatccgatacgtggtaagagatacaaatgccaggactgcactgagttaataggctttgacctttgcgaagcctgctacaactccagttcaaagctcccaggacgctttaaccagcggcacacccctaatcacagaatggaagttgacaattcagcactcgtgcataggatactgagacaccatggcatacccgaggaaggccctgagggactgatgatggaagtggttggtcctgatgcaatggtgcagatactcattgataatcaaggaatggaggagggcaatgacgagggcccaggagaggcggccattgaagaaccagttggttctcttggctcaatgtcgcgtctgtcgcatctattcatgtataatccagaaatggaggatggcaatgacgaggactcaggagaggaggcggccattgaagaaccagttggttctcttggcgcaatggcgcctctattcatgtatgatcaagaaatggaggacaacgaggaggatcaggcacactagatgcagattgcaccagctgcagcgaagcctttgttttgtgttgctggggcggctctacttatgtaatgtggaatggagggattgcgcaagcttaaaagtatggctggatcggccttgttttttaactggttctctagttactgccatctaatagccaacatttttcccgcttttgtaaatccgtgcagttgtttgtttcaaaggaaaatgcaataaggatatgcagaactatattccttattttaaactctactcctttcgtcccgtgaagcaag

SEQ ID NO: 55329 - DNA, 1816 bp, Zea Mays
aatttatctagaggaaaaagtcaaaacaaacagcgctacgccatcggtcccctgcccctccccgacgcttccggctttccgtgcgaccgtgcccttttcctcctctcgcagctcgcaggcgcaacagattccacccgttccttcgggtggccggacggaacgaggaaggaggcaggatggcctccgatggccacccgccggagccggggaagaaggaggatgtcgccaccacggccgccgggcctggagcaaacgatctggacgacccgcaattcatgtgctgcgtatgtctggatcttctgtacaaaccagttgttatatcatgtggtcatatgtcatgtttctggtgtgtccacaaagctatgcatattttccgggaatcgcattgtgctgtgtgtaggcagccctatatacacttcccgagtatttgtcagctcttgcatcatttgcttctaaagcttgaaactaatgattacaaaagaagggaaaaagaagtactagaggaagagaagcgcatgcaaacatactctccccaaatcattgagttcttaaactacaagactaacgttggaagctataaggagaacagaaatgaagacagtaaagctagacctccacaagaagttccattgaatgacagcgttccagatgagcatttgaagaaaattaaattggaggatgtttcatgccctctctgtatggagatgctgtatcaacctgctgttcttaattgtggtcatgtgtattgtgtatcctgtttgtcatccttgaatgaggaaacgctgaagtgccatgtttgtggaagtcttcaccctggagatttccctaatgtttgcctggaccttgatcatttccttgaagaatattttccagcagaatatgaattgagagggcagaaagttcaatttaagaaggatcagtgcaatcgtgaaacatcatcttcaggcagaaaaggaagcactagggcactgcatgctgaagacccgtcaaatattcacattggagtaggatgcgactcatgtggggtatatccgatacgtggtaagagatacaaatgccaggactgcactgagttaataggctttgacctttgcgaagcctgctacaactccagttcaaagctcccaggacgctttaaccagcggcacacccctaatcacagaatggaagttgacaattcagcactcgtgcataggatactgagacaccatggcatacccgaggaaggccctgagggactgatgatggaagtggttggtcctgatgcaatggtgcagatactcattgataatcaaggaatggaggagggcaatgacgagggcccaggagaggcggccattgaagaaccagttggttctcttggctcaatgtcgcgtctgtcgcatctattcatgtataatccagaaatggaggatggcaatgacgaggactcaggagaggaggcggccattgaagaaccagttggttctcttggcgcaatggcgcctctattcatgtatgatcaagaaatggaggacaacgaggaggatcaggcacactagatgcagattgcaccagctgcagcgaagcctttgttttgtgttgctggggcggctctacttatgtaatgtggaatggagggattgcgcaagcttaaaagtatggctggatcggccttgttttttaactggttctctagttactgccatctaatagccaacatttttcccgcttttgtaaatccgtgcagttgtttgtttcaaaggaaaatgcaataaggatatgcagaactatattccttattttaaactctactcctttcgtcccgtgaagcaag

SEQ ID NO: 55330 - DNA, 1387 bp, Zea Mays
atcactttcacctaaaagccctaacagtgccacctctgcggcgcgacttttcgcctctacggctgttgatattcctaccctctgttccacctccaagttggctccgcagatctcccctttttaggacaaacaatccatccaccaccgccctacacaccctccttcctaaaaatagtagccggcgccatgcaaatgcgattccccacagctccccgttcctgatggagctcctccgcagatcaatggacctatgagacgacgagcgacgccagtcagcaaccaggtcgtccaggtaccgcaggaactcccagcggccacccctactagcaaccactccagtctccagctgagctgagctgagcaacaaaggttcagctccattccaacgcgcggccgctgcctcggctgccaccgccgagatcagccgccatctccaccaaaggttaatcgatggacctgcccccaaaccccgagagcccgggaggcggtggtgatggcggcggaggaggcggagccggtggatcgagcggcggggcgtcttcgtcggcgccgggcggcggcacgccgcagacgccgagccggtacgaggcgcagaacctggcgcagtgcagcggcgcgcacgtgctggagttcctgcggtacctggaccagttcggcaagaccaaggtccacacggcggcgtgccccttcttcggccacccgagcccgcccgcgccgtgcccctgcccgctgcgccaggcgtggggcagcctcgacgcgctggtgggccgcctccgcgccgccttcgaggagaacggaggccgcccggagtccaaccccttcgcggcgcgcgccgtccgcctctacctccgcgaggtccgcgagcaccaggcccgcgcgcgcggcgtcagctacgagaagaagaagcgcaagaagccgcagccagctgatcacgccagcgggagcggaggacaaggccctcaccacccgccgcctccggcaccgccgcccgccggcgcggcgtgctgaggcctgaggaacagtactacgacacacgcaccccatttggtatgccggccggactgagcatattttatgtaggtttcgatcgatttgccggtgcatgcatgcatggtttatttgctactaccgttttgctcgcgctgctggtgctgcttcttcttcgcttagactctctctaccgatcgtgtgccgtgctacattgttatttcttcttctccgtctctctctctctctctcctgctacacgcttcagttcctagctaccgcttattttcgtttcaagcagtttaatttgcttgtagaagcaaatcttatcattggatcattgaattgaagcctatatatatatgcttttcattcagtactgctcattgtagagatgaac

SEQ ID NO: 55331 - DNA, 1378 bp, Zea Mays
cttttcatcactttcacctaaaagccctaacagtgccacctctgcggcgcgacttttcgcctctacggctgttgatattcctaccctctgttccacctccaagttggctccgcagatctcccctttttaggacaaacaatccatccaccaccgccctacacaccctccttcctaaaaatagtagccggcgccatgcaaatgcgattccccacagctccccgttcctgatggagctcctccgcagatcaatggacctatgagacgacgagcgacgccagtcagcaaccaggtcgtccaggtaccgcaggaactcccagcggccacccctactagcaaccactccagtctccagctgagctgagctgagcaacaaagggttaatcgatggacctgcccccaaaccccgagagcccgggaggcggtggtgatggcggcggaggaggcggagccggtggatcgagcggcggggcgtcttcgtcggcgccgggcggcggcacgccgcagacgccgagccggtacgaggcgcagaagcggcgggactggaacacgttcgggcagtacctgcggaaccaccggccgccgctgagcctggcgcagtgcagcggcgcgcacgtgctggagttcctgcggtacctggaccagttcggcaagaccaaggtccacacggcggcgtgccccttcttcggccacccgagcccgcccgcgccgtgcccctgcccgctgcgccaggcgtggggcagcctcgacgcgctggtgggccgcctccgcgccgccttcgaggagaacggaggccgcccggagtccaaccccttcgcggcgcgcgccgtccgcctctacctccgcgaggtccgcgagcaccaggcccgcgcgcgcggcgtcagctacgagaagaagaagcgcaagaagccgcagccagctgatcacgccagcgggagcggaggacaaggccctcaccacccgccgcctccggcaccgccgcccgccggcgcggcgtgctgaggcctgaggaacagtactacgacacacgcaccccatttggtatgccggccggactgagcatattttatgtaggtttcgatcgatttgccggtgcatgcatgcatggtttatttgctactaccgttttgctcgcgctgctggtgctgcttcttcttcgcttagactctctctaccgatcgtgtgccgtgctacattgttatttcttcttctccgtctctctctctctctctcctgctacacgcttcagttcctagctaccgcttattttcgtttcaagcagtttaatttgcttgtagaagcaaatcttatcattggatcattgaattgaagcctatatatatatgcttttcattcagtactgctcattgtagagatgaac

SEQ ID NO: 55332 - DNA, 440 bp, Zea Mays
cctgacctgctcggagctggataaccggcttccgcccgagggggaataaatccctgcgcagatcgctgacctttagccctcaatcacgagaactacttggccactgccaccggcgtcatgggagggaaccgagaggagaggggttgtgctccgccgtgggggggaaatcccctgccgcgcagtcgtctgccccgtgaagtgctcggggactttcctcaagttctgggaaggacgtgtggggccgcgctactcgtgatcaactgccggttttgctccaattcctcgccgtcgtatcgctccgccggatctccgccgtgcaacgaagacagagaaaagcactacgcaatccatcggaatggaaaatgtgcatatatgctgctgactgcagtgagattagcctcgtccaagttaggggatctgccatgactagacaagattag

SEQ ID NO: 55333 - DNA, 2340 bp, Zea Mays
taccatgtacaccaaattgacgcacagtttttaactactgtcaagctgtgttcagccctgactctttttgttttcaacgttcacaaattagcacgtctagctactgcatctcaacgccggaatcttcggcaccggcagcgacgggcacacgctgccgtcggaggtcacccgcgcggcgatgctggtgcgcatcaacaccctcctccagggctactccggcatccgcttcgagatcctcgaggccatcacgaagctgctcaacaccggtgtcagcccctgcctgccgctccggggcaccatcaccgcgtcgggcgacctggtcccgctctcctacatcgccggcctcatcacgggccgccccaacgcgcaggccgtcaccgtcgacgggaggaaggtggacgccgccgaggcgttcaagatcgccggcatcgagggcggcttcttcaagctcaaccccaaggagggcctcgccatcgtcaacggcacgtccgtgggctccgcgctcgcggccaccgtgatgtacgacgccaacgtcctggccgtcctgtcggaggtcctgtccgccgtcttctgcgaggtcatgaacggcaagcccgagtacacggaccacctgacccacaagctgaagcaccacccggggtccatcgaggccgcggccatcatggagcacatcctggatggcagctccttcatgaagcaggccaagaagttgaacgagctggacccgctgctgaagcccaagcaggacaggtacgcgctccgcacgtcgccgcagtggctgggcccccagatcgaggtcatccgcgccgccaccaagtccatcgagcgcgaggtcaactccgtgaacgacaacccggtcatcgacgtccaccgcggcaaggcgctgcacggcggcaacttccagggcacccccatcggcgtgtccatggacaacgcccgcctcgccatcgccaacatcggcaagctcatgttcgcgcagttctccgagctcgtcaacgagttctacaacaacgggctcacctccaacctggccggcagccgcaaccccagcctggactacggcttcaagggcaccgagatcgccatggcctcctactgctccgagctccagtacctgggcaaccccatcaccaaccacgtgcagagcgcggagcagcacaaccaggacgtgaactccctgggcctcgtctcggccaggaagaccgccgaggcgatcgacatcctgaagctcatgtcgtccacctacatcgtggcgctgtgccaggccgtggacctgcgccacctcgaggagaacatcaaggcgtcggtgaagaacaccgtgacccaggtggccaagaaggtgctgaccatgaacccctcgggcgagctctccagcgcccgcttcagcgagaaggagctgatcagcgccatcgaccgcgaggccgtgttcacgtacgcggaggacgcggccagcggcagcctgccgctgatgcagaagctgcgcgccgtgctggtggaccacgccctcagcagcggcgacgcggagcgggagccctccgtgttctccaagatcaccaggttcgaggaggagctccgcgcggtgctgccccaggaggtggaggccgcccgcgtggcggtcgccgagggcaccgcccccgtggcgaaccggatcgcggacagccggtcgttcccgctgtaccgcttcgtgcgcgaggagctcggctgcgtgttcctgaccggcgagaggctcaagtcccccggcgaggagtgcaacaaggtgttcgtcggcatcagccagggcaagctcgtggaccccatgctcgagtgcctcaaggagtgggacggcaagccgctgcccatcaacgtcaagtaaagaacgccaaggagaagaggagggaggggaggaaatacgtggaaaaaaaaataaaacctgtacacgtgtatgtccagatcgcgtgccgtcgatcgttcttcgttgttgatttttggttgtattgatcgatccgtatgtgtgcgtgcgtgtgtggcgttgctctttcttcttttgtgtagctgccctgccaccggccgacgtgcatgccatggtggcggacagcgttttctaaggtcatatactgttgttgtgtttaagtacatcttgcgtactcaattccttctaagtaagtatcctaatactagaatgttcctctactactgtctcgtcttgtggaaattgtgccagacagttgatcatcgctactttcaggggaactggggaagtaggatgtcatttttgttacttgactgtagtggcaaaagacccatgcttctaaaataagccgcctaccgctgtggtcgccatggtgggggagcagcagaacg

SEQ ID NO: 55334 - DNA, 2392 bp, Zea Mays
ggctcacatgtgtacctgtcctacgccgcagggcacggctctgccggatggcatgaccatgatcacgctgccggaaaacggcttcctcctatcctagcctgcaggccggcgtgggacaagtagatccacactctgcacaaggcatcatgtcttttaggcatctcaacgccggaatcttcggcaccggcagcgacgggcacacgctgccgtcggaggtcacccgcgcggcgatgctggtgcgcatcaacaccctcctccagggctactccggcatccgcttcgagatcctcgaggccatcacgaagctgctcaacaccggtgtcagcccctgcctgccgctccggggcaccatcaccgcgtcgggcgacctggtcccgctctcctacatcgccggcctcatcacgggccgccccaacgcgcaggccgtcaccgtcgacgggaggaaggtggacgccgccgaggcgttcaagatcgccggcatcgagggcggcttcttcaagctcaaccccaaggagggcctcgccatcgtcaacggcacgtccgtgggctccgcgctcgcggccaccgtgatgtacgacgccaacgtcctggccgtcctgtcggaggtcctgtccgccgtcttctgcgaggtcatgaacggcaagcccgagtacacggaccacctgacccacaagctgaagcaccacccggggtccatcgaggccgcggccatcatggagcacatcctggatggcagctccttcatgaagcaggccaagaagttgaacgagctggacccgctgctgaagcccaagcaggacaggtacgcgctccgcacgtcgccgcagtggctgggcccccagatcgaggtcatccgcgccgccaccaagtccatcgagcgcgaggtcaactccgtgaacgacaacccggtcatcgacgtccaccgcggcaaggcgctgcacggcggcaacttccagggcacccccatcggcgtgtccatggacaacgcccgcctcgccatcgccaacatcggcaagctcatgttcgcgcagttctccgagctcgtcaacgagttctacaacaacgggctcacctccaacctggccggcagccgcaaccccagcctggactacggcttcaagggcaccgagatcgccatggcctcctactgctccgagctccagtacctgggcaaccccatcaccaaccacgtgcagagcgcggagcagcacaaccaggacgtgaactccctgggcctcgtctcggccaggaagaccgccgaggcgatcgacatcctgaagctcatgtcgtccacctacatcgtggcgctgtgccaggccgtggacctgcgccacctcgaggagaacatcaaggcgtcggtgaagaacaccgtgacccaggtggccaagaaggtgctgaccatgaacccctcgggcgagctctccagcgcccgcttcagcgagaaggagctgatcagcgccatcgaccgcgaggccgtgttcacgtacgcggaggacgcggccagcggcagcctgccgctgatgcagaagctgcgcgccgtgctggtggaccacgccctcagcagcggcgacgcggagcgggagccctccgtgttctccaagatcaccaggttcgaggaggagctccgcgcggtgctgccccaggaggtggaggccgcccgcgtggcggtcgccgagggcaccgcccccgtggcgaaccggatcgcggacagccggtcgttcccgctgtaccgcttcgtgcgcgaggagctcggctgcgtgttcctgaccggcgagaggctcaagtcccccggcgaggagtgcaacaaggtgttcgtcggcatcagccagggcaagctcgtggaccccatgctcgagtgcctcaaggagtgggacggcaagccgctgcccatcaacgtcaagtaaagaacgccaaggagaagaggagggaggggaggaaatacgtggaaaaaaaaataaaacctgtacacgtgtatgtccagatcgcgtgccgtcgatcgttcttcgttgttgatttttggttgtattgatcgatccgtatgtgtgcgtgcgtgtgtggcgttgctctttcttcttttgtgtagctgccctgccaccggccgacgtgcatgccatggtggcggacagcgttttctaaggtcatatactgttgttgtgtttaagtacatcttgcgtactcaattccttctaagtaagtatcctaatactagaatgttcctctactactgtctcgtcttgtggaaattgtgccagacagttgatcatcgctactttcaggggaactggggaagtaggatgtcatttttgttacttgactgtagtggcaaaagacccatgcttctaaaataagccgcctaccgctgtggtcgccatggtgggggagcagcagaacg

SEQ ID NO: 55335 - DNA, 1760 bp, Zea Mays
ataaaaatgcctctgccttgcgtctctctcttcttcctccccaccccacgaggcgctagctgcggcacggaaccagcgccattagaggccacaagcccgcaccacgcctccctcgttctcgcgcgcgcgcacgcatgcacgaggagctgctgcagagaagaggaggcctgtcgatttgattgaactttccaagtaggattccgttggatcatattgtaccacctcgggccagagcgaacccaccgattcagattcagaagctggccaagatgactgccggtttccagctcggcgtgatcgggtctctcacgctctccgtcgcgtcgtcggttgccattgtcatctgcaacaaagccctcatcagcaccctaggctttccattcgctacgactctgacaagctggcacctgatggtgaccttctgcaccctccacgtggcgcagcgcctgcgctttttcgagcccaaggcgatcgacgggcagacggtagttctgtttggcttgctcaacgggacctcgattggccttctgaaccttagtttagggttcaactccatcggattctaccagatgacgaagttggccataatacccttcacggtgctgttggagactatattcctgaagaaaagattcagtgagacgatcaagttttctctgctggtcttgctgctcggagttggcatcgcctcagttacggacctcaagttaaactgcctcgggtccgttctttccggcctcgccatcgccaccacttgtgtcggccaaattctcacgaatacgatacagaggaagctgaaggtctcgtcaacgcagctcctgtaccagtcagcgccttaccaagcagccattctgttcgccactggccccttcgtggaccatctcctcaccggccgcagcgtcttcgcccatagatacactttcccggttgtgggcttcatcgtcctgtcgtgcttgatcgcggtgtcggtgaacttcagcacgttcctggtgatcgggacgacgtcgccggtgacgtaccaggtgctgggccacctcaagacgtgcctggtgctgtcgttcgggtacacgctgctgcacgatcctttcaccgtgcggaacatcctgggcatcctcgtcgccatcttcgggatggcgctctactccatcttctcggtgcgtgagggcaagaagaagtccgcaggcgacgccctcccggtgtcacagatgcctgacaaggagacggagccgctgttggcgaccaaggacaacagcgacaccaaaaaggcgaacggggttgctcacgactgctaagatgttcccgtttgccgttgcttatagcctaattagtccagctctagtgttactacgacgcactgttctgaatctcagaaagtcagggaagaagtcattcctttttgtttcttataatattgtatatgtaatattcctctattgcgaattataagccgtttcaatttttttgaagagtcaagatatctcaaatttaattaaaattataaaaaaaattaagacaataaatacatacactattaaaatacaattaatgaaaatataataaaatttatttggtataataatagttattattttagtatataaatttagtgaaatttatatttttttattctaaaaagcaaaaatgaaatataatttaaaacagaaaaatgtactgtattttcacggcaacaggggtgtttagcacggtgtacaattgatgcaacagctcttaaaacgttaggacgcctcgaggagtgctaa

SEQ ID NO: 55336 - DNA, 1728 bp, Zea Mays
ataaaaatgcctctgccttgcgtctctctcttcttcctccccaccccacgaggcgctagctgcggcacggaaccagcgccattagaggccacaagcccgcaccacgcctccctcgttctcgcgcgcgcgcacgcatgcacgaggagctgctgcagagaagaggaggcctgtcgatttgattgaactttccaaattcagattcagaagctggccaagatgactgccggtttccagctcggcgtgatcgggtctctcacgctctccgtcgcgtcgtcggttgccattgtcatctgcaacaaagccctcatcagcaccctaggctttccattcgctacgactctgacaagctggcacctgatggtgaccttctgcaccctccacgtggcgcagcgcctgcgctttttcgagcccaaggcgatcgacgggcagacggtagttctgtttggcttgctcaacgggacctcgattggccttctgaaccttagtttagggttcaactccatcggattctaccagatgacgaagttggccataatacccttcacggtgctgttggagactatattcctgaagaaaagattcagtgagacgatcaagttttctctgctggtcttgctgctcggagttggcatcgcctcagttacggacctcaagttaaactgcctcgggtccgttctttccggcctcgccatcgccaccacttgtgtcggccaaattctcacgaatacgatacagaggaagctgaaggtctcgtcaacgcagctcctgtaccagtcagcgccttaccaagcagccattctgttcgccactggccccttcgtggaccatctcctcaccggccgcagcgtcttcgcccatagatacactttcccggttgtgggtgcgtgagctatgttgcagggcttcatcgtcctgtcgtgcttgatcgcggtgtcggtgaacttcagcacgttcctggtgatcgggacgacgtcgccggtgacgtaccaggtgctgggccacctcaagacgtgcctggtgctgtcgttcgggtacacgctgctgcacgatcctttcaccgtgcggaacatcctgggcatcctcgtcgccatcttcgggatggcgctctactccatcttctcggtgcgtgagggcaagaagaagtccgcaggcgacgccctcccggtgtcacagatgcctgacaaggagacggagccgctgttggcgaccaaggacaacagcgacaccaaaaaggcgaacggggttgctcacgactgctaagatgttcccgtttgccgttgcttatagcctaattagtccagctctagtgttactacgacgcactgttctgaatctcagaaagtcagggaagaagtcattcctttttgtttcttataatattgtatatgtaatattcctctattgcgaattataagccgtttcaatttttttgaagagtcaagatatctcaaatttaattaaaattataaaaaaaattaagacaataaatacatacactattaaaatacaattaatgaaaatataataaaatttatttggtataataatagttattattttagtatataaatttagtgaaatttatatttttttattctaaaaagcaaaaatgaaatataatttaaaacagaaaaatgtactgtattttcacggcaacaggggtgtttagcacggtgtacaattgatgcaacagctcttaaaacgttaggacgcctcgaggagtgctaa

SEQ ID NO: 55337 - DNA, 1256 bp, Zea Mays
ctaggtagtcccccatcagctagagctcagcttccgcgtgcctgcactgcacatacgcacgcacagctccagacacagctacgactcgaccacaagccagccatgccggccttcgcggggggcgcagcggagccgccgctggcagacagctactacgcgctcctccgccgcggcaatgacgatgaaggcgcctacacgacgtcgacagcgccatgggacgacgtctcactgcccgtggcggagtgcgagctcccgatgatcgacgtcgggtgcctgacgaccgccgacgacggcagctccccggaggcggaggcggagcgggcggcgtgcgcggccgccatcgcgcgcgccgccgaggagtggggcttcttccaggtgcgcaaccacggcgtgccgcaggagctcctggaggagatgcgccgggagcaggcgcgcctgttccgcctgccgttcgagaccaaggccacggccggcctgctcaacgactcctaccgctggggcaccccgaccgcgacgtctccgcgccagctgtcctggtccgaggccttccacgtcccgctcgccggcgtctccggctccggcaccacctgcgacttcggcgacctcaccaccctcagggatgtgactcgggaggtggcgggcgcgatgtcaaagctggccggcacgctggcgcgcgtcctggcggaggccctcctgggtcggcggcccgccggcgagcgcttcccggaggggtgcgacgagacgacgtgcttcctgcggctgaaccggtacccggcgtgccccatctccccaggcgccttgggcctggtcccgcacacggacagcgacttcctcaccgtgctctgccaggaccagcaggtcggcggcctgcagctcatgaagggggacagttgggtggccgtcaagccaatccccggcaccctcgtcgtcaacatcggggacctcttccaggcgtggagcaacaacagatacaagagcgtggagcacaaggtgatgacgaacgccaggacggagcgctactccgtcgcctactttctctgcccgtcctacgactcgccgatcggcacgtgcgaggagccttctctctacaggacgttcaccttcggggagtacaggagaaaggtgcaggaagacgtcaagaggaccgggaagaagctaccaccatacaagaatgtagcaggatcgagcggttgtgtgtgtgcgtgtgatcgttgccgatgataaggagctgatcgttttttttttgtgtgtgtgtg

SEQ ID NO: 55338 - DNA, 1649 bp, Zea Mays
gaatcccggcgccagtgtttccatccccagcgctgaattccgagagatctcgtctgccctctcgtcctcgtcgggccgtcacggcagcggctcggctctcactagttcgctagtggtgtgcgccaagttgtggaactggccttttgcccgcccgcccccttccttttttgagcgcatataagcgagcagcgtttcgcctttgggatcggcggggccgccgctttttggttgcgctctcccctcctctcctctcccctgtaccctgcctttccattggagcgcccaaagccggacggcaccaccatttaaaggaggccaagcgcgcacacggcggaggagaagagaccaacacctcacactccattcacgccagggatcgatcgcgccgctatagctgctgcacctgcacgctttgcctcttcttcgttctctgccgctgcgctagctagctgcggctccgagcctccgacgcaggaagtctaatgtggaagtctctcagaactgagtacttttgttagaacaaagatttgttcagtcaagctttgcaaattatcatcatagtttggatgatatccatggttactttaatgagtttatggagccctggttgcggagcttatctgggttctctgacaatggaactgtaatatttgcaaaagaacctttcttgtattggaagaaagtttcaagaggggttgacaacttataagtgtaagcttgatgacgtgttcatgagggcaaagtgggagagcaaaatttcttcgcatgcagatgtcaacaggttctaaccactatggtgtatttccacatccattctgcaaccaacatgttgtttcgtttcagacgagttcaattactagtgggtcaggagccataccagtttgtctagacacctccagtggaatgaatggcgacatggcaatgttgaacactacatcttcaacaattgtatccactggttcaccaaacatggttgctgattcttcttgccagaacctcaagtatagtgcacccttggctgtggagtggtcctatccagagctgcaattgttgaacgatggcctcaacaagtatgcaaatgaaccaggaatcatgaagtacataaagatagcagccacgttaccagacaagacagttagagatgttgccatgagatgtcaatggatggcagcgagaaaagaagctacaagacgacggaaacctgaagaacgctatcttgggaaaaagataaaagataggaaggacaaaatggctcagccatcatcatggggtaccaatcctcctgttcaggctgagatgagatcttcctcttttatgcctcgtaacgccaaacacaatggatttctctctggagactctcaaattgatcatgaaatgctaaatatattggaagaaaatgctcgactactcaatcaaatagaagtaaatattttaacatctcaggctcataacaacattaatcttttccatcacataagaaggaatattaatggtcttctacaaagcatgtgccagattcccggaataatgagcaagatgcccccattgcctgtttctgtggatgaaaggctagctagctacatactccctcgtgctcatacgcattgtatgtaaaaacaacatagagatcaaacaggtcaaaatgtcag

SEQ ID NO: 55339 - DNA, 789 bp, Zea Mays
cttttttcaatgtcaagaaaaaaagaagctacaagacgacggaaacctgaagaacgctatcttgggaaaaagataaaagataggaaggacaaaatggctcagccatcatcatggggtaccaatcctcctgttcaggctgagatgagatcttcctcttttatgcctcgtaacgccaaacacaatggatttctctctggagactctcaaattgatcatgaaatgctaaatatattggaagaaaatgctcgactactcaatcaaatagaagtaaatattttaacatctcaggctcataacaacattaatcttttccatcacataagaaggaatattaatggtcttctacaaagcatgtgccagattcccggaataatgagcaagatgcccccattgcctgtttctgtggatgaaaggctagctagctacatactccctcgtgctcatacggttgcgttcttgattaaagataatatccaacgcttcaacttcaatgatgaaaccggatccgacaccagtgatcgtgctatctcatatctttctaggatcttagaaccgggtaccgatacatcaaataatgatatcagaaatctaatttttgggtattcagattcagctatggtcggatataaatgttcgaattcagatacaaattatccatatatcgtttgattggttacctgtactatcccgttctgaaccaccacatgtattaacttttattgagcgtctgtttagttggctacaccggcttcatgatcagatgcaaaataaactattttaagaacattt

SEQ ID NO: 55340 - DNA, 1514 bp, Zea Mays
cttcctttcagttcaagtctacccgtgccgcttccttagtgaagtctaatgtggaagtctctcagaactgagtacttttgttagaacaaagatttgttcagtcaagctttgcaaattatcatcatagtttggatgatatccatggttactttaatgagtttatggagccctggttgcggagcttatctgggttctctgacaatggaactgtaatatttgcaaaagaacctttcttgtattggaagaaagtttcaagaggggttgacaacttataagtgtaagcttgatgacgtgttcatgagggcaaagtgggagagcaaaatttcttcgcatgcagatgtcaacaggttctaaccactatggtgtatttccacatccattctgcaaccaacatgttgtttcgtttcagacgagttcaattactagtgggtcaggagccataccagtttgtctagacacctccagtggaatgaatggcgacatggcaatgttgaacactacatcttcaacaattgtatccactggttcaccaaacatggttgctgattcttcttgccagaacctcaagtatagtgcacccttggctgtggagtggtcctatccagagctgcaattgttgaacgatggcctcaacaagtatgcaaatgaaccaggaatcatgaagtacataaagatagcagccacgttaccagacaagacagttagagatgttgccatgagatgtcaatggatggcagcgagaaaagaagctacaagacgacggaaacctgaagaacgctatcttgggaaaaagataaaagataggaaggacaaaatggctcagccatcatcatggggtaccaatcctcctgttcaggctgagatgagatcttcctcttttatgcctcgtaacgccaaacacaatggatttctctctggaggttgactctcaaattgatcatgaaatgctaaatatattggaagaaaatgctcgactactcaatcaaatagaagtaaatattttaacatctcaggctcataacaacattaatcttttccatcacataagaaggaatattaatggtcttctacaaagcatgtgccagattcccggaataatgagcaagatgcccccattgcctgtttctgtggatgaaaggctagctagctacatactccctcgtgctcatacggttgcgttcttgattaaagataatatccaacgcttcaacttcaatgatgaaaccggatccgacaccagtgatcgtgctatctcatatctttctaggatcttagaaccgggtaccgatacatcaaataatgatatcagaaatctaatttttgggtattcagattcagctatggtcggatataaatgttcgaattcagatacaaattatccatatatcgtttgattggttacctgtactatcccgttctgaaccaccacatgtattaacttttattgagcgtctgtttagttggctacaccggcttcatgatcagatgcaaaataaactattttaagaacattt

SEQ ID NO: 55341 - DNA, 1663 bp, Zea Mays
cgatgcgtggcctaagaaaggagactggcgctggcggtcgctcgggtcggcgtggaattcgatgtggaaagcgagatcgtctcggatagtgcccctgcgtgcgcgcctgggggccgctgtctttcgtgcaatcgtcgttgcttgatttggtttcttcctttcagttcaagtctacccgtgccgcttccttagtgaagtctaatgtggaagtctctcagaactgagtacttttgttagaacaaagatttgttcagtcaagctttgcaaattatcatcatagtttggatgatatccatggttactttaatgagtttatggagccctggttgcggagcttatctgggttctctgacaatggaactgtaatatttgcaaaagaacctttcttgtattggaagaaagtttcaagaggggttgacaacttataagtgtaagcttgatgacgtgttcatgagggcaaagtgggagagcaaaatttcttcgcatgcagatgtcaacaggttctaaccactatggtgtatttccacatccattctgcaaccaacatgttgtttcgtttcagacgagttcaattactagtgggtcaggagccataccagtttgtctagacacctccagtggaatgaatggcgacatggcaatgttgaacactacatcttcaacaattgtatccactggttcaccaaacatggttgctgattcttcttgccagaacctcaagtatagtgcacccttggctgtggagtggtcctatccagagctgcaattgttgaacgatggcctcaacaagtatgcaaatgaaccaggaatcatgaagtacataaagatagcagccacgttaccagacaagacagttagagatgttgccatgagatgtcaatggatggcagcgagaaaagaagctacaagacgacggaaacctgaagaacgctatcttgggaaaaagataaaagataggaaggacaaaatggctcagccatcatcatggggtaccaatcctcctgttcaggctgagatgagatcttcctcttttatgcctcgtaacgccaaacacaatggatttctctctggagactctcaaattgatcatgaaatgctaaatatattggaagaaaatgctcgactactcaatcaaatagaagtaaatattttaacatctcaggctcataacaacattaatcttttccatcacataagaaggaatattaatggtcttctacaaagcatgtgccagattcccggaataatgagcaagatgcccccattgcctgtttctgtggatgaaaggctagctagctacatactccctcgtgctcatacggttgcgttcttgattaaagataatatccaacgcttcaacttcaatgatgaaaccggatccgacaccagtgatcgtgctatctcatatctttctaggatcttagaaccgggtaccgatacatcaaataatgatatcagaaatctaatttttgggtattcagattcagctatggtcggatataaatgttcgaattcagatacaaattatccatatatcgtttgattggttacctgtactatcccgttctgaaccaccacatgtattaacttttattgagcgtctgtttagttggctacaccggcttcatgatcagatgcaaaataaactattttaagaacattt

SEQ ID NO: 55342 - DNA, 2080 bp, Zea Mays
tccatccccagcgctgaattccgagagatctcgtctgccctctcgtcctcgtcgggccgtcacggcagcggctcggctctcactagttcgctagtggtgtgcgccaagttgtggaactggccttttgcccgcccgcccccttccttttttgagcgcatataagcgagcagcgtttcgcctttgggatcggcggggccgccgctttttggttgcgctctcccctcctctcctctcccctgtaccctgcctttccattggagcgcccaaagccggacggcaccaccatttaaaggaggccaagcgcgcacacggcggaggagaagagaccaacacctcacactccattcacgccagggatcgatcgcgccgctatagctgctgcacctgcacgctttgcctcttcttcgttctctgccgctgcgctagctagctgcggctccgagcctccgacgcaggaagtctaatgtggaagtctctcagaactgagtacttttgttagaacaaagatttgttcagtcaagctttgcaaattatcatcatagtttggatgatatccatggttactttaatgagtttatggagccctggttgcggagcttatctgggttctctgacaatggaactgtaatatttgcaaaagaacctttcttgtattggaagaaagtttcaagaggggttgacaacttataagtgtaagcttgatgacgtgttcatgagggcaaagtgggagagcaaaatttcttcgcatgcagatgtcaacaggttctaaccactatggtgtatttccacatccattctgcaaccaacatgttgtttcgtttcagacgagttcaattactagtgggtcaggagccataccagtttgtctagacacctccagtggaatgaatggcgacatggcaatgttgaacactacatcttcaacaattgtatccactggttcaccaaacatggttgctgattcttcttgccagaacctcaagtatagtgcacccttggctgtggagtggtcctatccagagctgcaattgttgaacgatggcctcaacaagtatgcaaatgaaccaggaatcatgaagtacataaagatagcagccacgttaccagacaagacagttagagatgttgccatgagatgtcaatggatggcagcgagaaaagaagctacaagacgacggaaacctgaagaacgctatcttgggaaaaagataaaagataggaaggacaaaatggctcagccatcatcatggggtaccaatcctcctgttcaggctgagatgagatcttcctcttttatgcctcgtaacgccaaacacaatggatttctctctggagactctcaaattgatcatgaaatgctaaatatattggaagaaaatgctcgactactcaatcaaatagaagtaaatattttaacatctcaggctcataacaacattaatcttttccatcacataagaaggaatattaatggtcttctacaaagcatgtgccagattcccggaataatgagcaagatgcccccattgcctgtttctgtggatgaaaggctagctagctacatactccctcgtgctcatacggcacaagttcttggcagcagtcatttgaaagaagaaccaagagtgtggtaggccactgctagacagacagcagcttaatttgcagcgacagtttgatactgtagaaaaaatatctgaagagccatgtgcttgggaatctgcatggagaagcataggttgcgttcttgattaaagataatatccaacgcttcaacttcaatgatgaaaccggatccgacaccagtgatcgtgctatctcatatctttctaggatcttagaaccgggtaccgatacatcaaataatgatatcagaaatctaatttttgggtattcagattcagctatggtcggatataaatgttcgaattcagatacaaattatccatatatcgtttgattggttacctgtactatcccgttctgaaccaccacatgtattaacttttattgagcgtctgtttagttggctacaccggcttcatgatcagatgcaaaataaactattttaagaacattt

SEQ ID NO: 55343 - DNA, 2270 bp, Zea Mays
tccatccccagcgctgaattccgagagatctcgtctgccctctcgtcctcgtcgggccgtcacggcagcggctcggctctcactagttcgctagtggtgtgcgccaagttgtggaactggccttttgcccgcccgcccccttccttttttgagcgcatataagcgagcagcgtttcgcctttgggatcggcggggccgccgctttttggttgcgctctcccctcctctcctctcccctgtaccctgcctttccattggagcgcccaaagccggacggcaccaccatttaaaggaggccaagcgcgcacacggcggaggagaagagaccaacacctcacactccattcacgccagggatcgatcgcgccgctatagctgctgcacctgcacgctttgcctcttcttcgttctctgccgctgcgctagctagctgcggctccgagcctccgacgcaggaagtctaatgtggaagtctctcagaactgagtacttttgttagaacaaagatttgttcagtcaagctttgcaaattatcatcatagtttggatgatatccatggttactttaatgagtttatggagccctggttgcggagcttatctgggttctctgacaatggaactgtaatatttgcaaaagaacctttcttgtattggaagaaagtttcaagaggggttgacaacttataagtgtaagcttgatgacgtgttcatgagggcaaagtgggagagcaaaatttcttcgcatgcagatgtcaacaggagccataccagtttgtctagacacctccagtggaatgaatggcgacatggcaatgttgaacactacatcttcaacaattgtatccactggttcaccaaacatggttgctgattcttcttgccagaacctcaagtatagtgcacccttggctgtggagtggtcctatccagagctgcaattgttgaacgatggcctcaacaagtatgcaaatgaaccaggaatcatgaagtacataaagatagcagccacgttaccagacaagacagttagagatgttgccatgagatgtcaatggatggcagcgagaaaagaagctacaagacgacggaaacctgaagaacgctatcttgggaaaaagataaaagataggaaggacaaaatggctcagccatcatcatggggtaccaatcctcctgttcaggctgagatgagatcttcctcttttatgcctcgtaacgccaaacacaatggatttctctctggagactctcaaattgatcatgaaatgctaaatatattggaagaaaatgctcgactactcaatcaaatagaagtaaatattttaacatctcaggctcataacaacattaatcttttccatcacataagaaggaatattaatggtcttctacaaagcatgtgccagattcccggaataatgagcaagatgcccccattgcctgtttctgtggatgaaaggctagctagctacatactccctcgtgctcatacggcacaagttcttggcagcagtcatttgaaagaagaaccaagagtgtggtaggccactgctagacagacagcagcttaatttgcagcgacagtttgatactgtagaaaaaatatctgaagagccatgtgcttgggaatctgcatggagaagcataggtgaaaagaaggatctggcttttctgatgtctgaaagctatagaagcaatacgatccacttttcaccacatggccttaaaaaacgctgtccagcttatgagtttgagatagggagagtttccgtaatctgcagttttcctcaccttggttgcacatatcgattcttttttcgggttttgtcctggcgatcgatgttaacggaagcgtagcatagaaactaagcttggtatgaataattagcaggaaaagcttagcctttttgccagttactacaaaggttgcgttcttgattaaagataatatccaacgcttcaacttcaatgatgaaaccggatccgacaccagtgatcgtgctatctcatatctttctaggatcttagaaccgggtaccgatacatcaaataatgatatcagaaatctaatttttgggtattcagattcagctatggtcggatataaatgttcgaattcagatacaaattatccatatatcgtttgattggttacctgtactatcccgttctgaaccaccacatgtattaacttttattgagcgtctgtttagttggctacaccggcttcatgatcagatgcaaaataaactattttaagaacattt

SEQ ID NO: 55344 - DNA, 2120 bp, Zea Mays
tccatccccagcgctgaattccgagagatctcgtctgccctctcgtcctcgtcgggccgtcacggcagcggctcggctctcactagttcgctagtggtgtgcgccaagttgtggaactggccttttgcccgcccgcccccttccttttttgagcgcatataagcgagcagcgtttcgcctttgggatcggcggggccgccgctttttggttgcgctctcccctcctctcctctcccctgtaccctgcctttccattggagcgcccaaagccggacggcaccaccatttaaaggaggccaagcgcgcacacggcggaggagaagagaccaacacctcacactccattcacgccagggatcgatcgcgccgctatagctgctgcacctgcacgctttgcctcttcttcgttctctgccgctgcgctagctagctgcggctccgagcctccgacgcaggaagtctaatgtggaagtctctcagaactgagtacttttgttagaacaaagatttgttcagtcaagctttgcaaattatcatcatagtttggatgatatccatggttactttaatgagtttatggagccctggttgcggagcttatctgggttctctgacaatggaactgtaatatttgcaaaagaacctttcttgtattggaagaaagtttcaagaggggttgacaacttataagtgtaagcttgatgacgtgttcatgagggcaaagtgggagagcaaaatttcttcgcatgcagatgtcaacagacgagttcaattactagtgggtcaggagccataccagtttgtctagacacctccagtggaatgaatggcgacatggcaatgttgaacactacatcttcaacaattgtatccactggttcaccaaacatggttgctgattcttcttgccagaacctcaagtatagtgcacccttggctgtggagtggtcctatccagagctgcaattgttgaacgatggcctcaacaagtatgcaaatgaaccaggaatcatgaagtacataaagatagcagccacgttaccagacaagacagttagagatgttgccatgagatgtcaatggatggcagcgagaaaagaagctacaagacgacggaaacctgaagaacgctatcttgggaaaaagataaaagataggaaggacaaaatggctcagccatcatcatggggtaccaatcctcctgttcaggctgagatgagatcttcctcttttatgcctcgtaacgccaaacacaatggatttctctctggagactctcaaattgatcatgaaatgctaaatatattggaagaaaatgctcgactactcaatcaaatagaagtaaatattttaacatctcaggctcataacaacattaatcttttccatcacataagaaggaatattaatggtcttctacaaagcatgtgccagattcccggaataatgagcaagatgcccccattgcctgtttctgtggatgaaaggctagctagctacatactccctcgtgctcatacggcacaagttcttggcagcagtcatttgaaagaagaaccaagagtgtggtaggccactgctagacagacagcagcttaatttgcagcgacagtttgatactgtagaaaaaatatctgaagagccatgtgcttgggaatctgcatggagaagcataggtgaaaagaaggatctggcttttctgatgtctgaaagctatagaagcaatacgatccacttttcaccacatggccttaaaaaacgctgtccagcttatgagtttgagatagggagagtttccgtaatctgcagttttcctcaccttggttgcacatatcgattcttttttcgggttttgtcctggcgatcgatgttaacggaagcgtagcatagaaactaagcttggtatgaataattagcaggaaaagcttagcctttttgccagttactacaaaggtaactaaccttctgtgtgtatctagttttctagtataatgcatatgcaagcctggtcctctaaattgcaacctctctcctcatgtatgtgctgcgtctctttacaaccgcaagaaattagcagaattctaatcaaagggcctgtttggctatcgagggtcccagta

SEQ ID NO: 55345 - DNA, 2103 bp, Zea Mays
tccatccccagcgctgaattccgagagatctcgtctgccctctcgtcctcgtcgggccgtcacggcagcggctcggctctcactagttcgctagtggtgtgcgccaagttgtggaactggccttttgcccgcccgcccccttccttttttgagcgcatataagcgagcagcgtttcgcctttgggatcggcggggccgccgctttttggttgcgctctcccctcctctcctctcccctgtaccctgcctttccattggagcgcccaaagccggacggcaccaccatttaaaggaggccaagcgcgcacacggcggaggagaagagaccaacacctcacactccattcacgccagggatcgatcgcgccgctatagctgctgcacctgcacgctttgcctcttcttcgttctctgccgctgcgctagctagctgcggctccgagcctccgacgcaggaagtctaatgtggaagtctctcagaactgagtacttttgttagaacaaagatttgttcagtcaagctttgcaaattatcatcatagtttggatgatatccatggttactttaatgagtttatggagccctggttgcggagcttatctgggttctctgacaatggaactgtaatatttgcaaaagaacctttcttgtattggaagaaagtttcaagaggggttgacaacttataagtgtaagcttgatgacgtgttcatgagggcaaagtgggagagcaaaatttcttcgcatgcagatgtcaacagacgagttcaattactagtgggtcaggagccataccagtttgtctagacacctccagtggaatgaatggcgacatggcaatgttgaacactacatcttcaacaattgtatccactggttcaccaaacatggttgctgattcttcttgccagaacctcaagtatagtgcacccttggctgtggagtggtcctatccagagctgcaattgttgaacgatggcctcaacaagaatcatgaagtacataaagatagcagccacgttaccagacaagacagttagagatgttgccatgagatgtcaatggatggcagcgagaaaagaagctacaagacgacggaaacctgaagaacgctatcttgggaaaaagataaaagataggaaggacaaaatggctcagccatcatcatggggtaccaatcctcctgttcaggctgagatgagatcttcctcttttatgcctcgtaacgccaaacacaatggatttctctctggagactctcaaattgatcatgaaatgctaaatatattggaagaaaatgctcgactactcaatcaaatagaagtaaatattttaacatctcaggctcataacaacattaatcttttccatcacataagaaggaatattaatggtcttctacaaagcatgtgccagattcccggaataatgagcaagatgcccccattgcctgtttctgtggatgaaaggctagctagctacatactccctcgtgctcatacggcacaagttcttggcagcagtcatttgaaagaagaaccaagagtgtggtaggccactgctagacagacagcagcttaatttgcagcgacagtttgatactgtagaaaaaatatctgaagagccatgtgcttgggaatctgcatggagaagcataggtgaaaagaaggatctggcttttctgatgtctgaaagctatagaagcaatacgatccacttttcaccacatggccttaaaaaacgctgtccagcttatgagtttgagatagggagagtttccgtaatctgcagttttcctcaccttggttgcacatatcgattcttttttcgggttttgtcctggcgatcgatgttaacggaagcgtagcatagaaactaagcttggtatgaataattagcaggaaaagcttagcctttttgccagttactacaaaggtaactaaccttctgtgtgtatctagttttctagtataatgcatatgcaagcctggtcctctaaattgcaacctctctcctcatgtatgtgctgcgtctctttacaaccgcaagaaattagcagaattctaatcaaagggcctgtttggctatcgagggtcccagta

SEQ ID NO: 55346 - DNA, 2175 bp, Zea Mays
tccatccccagcgctgaattccgagagatctcgtctgccctctcgtcctcgtcgggccgtcacggcagcggctcggctctcactagttcgctagtggtgtgcgccaagttgtggaactggccttttgcccgcccgcccccttccttttttgagcgcatataagcgagcagcgtttcgcctttgggatcggcggggccgccgctttttggttgcgctctcccctcctctcctctcccctgtaccctgcctttccattggagcgcccaaagccggacggcaccaccatttaaaggaggccaagcgcgcacacggcggaggagaagagaccaacacctcacactccattcacgccagggatcgatcgcgccgctatagctgctgcacctgcacgctttgcctcttcttcgttctctgccgctgcgctagctagctgcggctccgagcctccgacgcaggaagtctaatgtggaagtctctcagaactgagtacttttgttagaacaaagatttgttcagtcaagctttgcaaattatcatcatagtttggatgatatccatggttactttaatgagtttatggagccctggttgcggagcttatctgggttctctgacaatggaactgtaatatttgcaaaagaacctttcttgtattggaagaaagtttcaagaggggttgacaacttataagtgtaagcttgatgacgtgttcatgagggcaaagtgggagagcaaaatttcttcgcatgcagatgtcaacaggttctaaccactatggtgtatttccacatccattctgcaaccaacatgttgtttcgtttcagacgagttcaattactagtgggtcaggagccataccagtttgtctagacacctccagtggaatgaatggcgacatggcaatgttgaacactacatcttcaacaattgtatccactggttcaccaaacatggttgctgattcttcttgccagaacctcaagtatagtgcacccttggctgtggagtggtcctatccagagctgcaattgttgaacgatggcctcaacaagtatgcaaatgaaccaggaatcatgaagtacataaagatagcagccacgttaccagacaagacagttagagatgttgccatgagatgtcaatggatggcagcgagaaaagaagctacaagacgacggaaacctgaagaacgctatcttgggaaaaagataaaagataggaaggacaaaatggctcagccatcatcatggggtaccaatcctcctgttcaggctgagatgagatcttcctcttttatgcctcgtaacgccaaacacaatggatttctctctggagactctcaaattgatcatgaaatgctaaatatattggaagaaaatgctcgactactcaatcaaatagaagtaaatattttaacatctcaggctcataacaacattaatcttttccatcacataagaaggaatattaatggtcttctacaaagcatgtgccagattcccggaataatgagcaagatgcccccattgcctgtttctgtggatgaaaggctagctagctacatactccctcgtgctcatacgttcttggcagcagtcatttgaaagaagaaccaagagtgtggtaggccactgctagacagacagcagcttaatttgcagcgacagtttgatactgtagaaaaaatatctgaagagccatgtgcttgggaatctgcatggagaagcataggtgaaaagaaggatctggcttttctgatgtctgaaagctatagaagcaatacgatccacttttcaccacatggccttaaaaaacgctgtccagcttatgagtttgagatagggagagtttccgtaatctgcagttttcctcaccttggttgcacatatcgattcttttttcgggttttgtcctggcgatcgatgttaacggaagcgtagcatagaaactaagcttggtatgaataattagcaggaaaagcttagcctttttgccagttactacaaaggtaactaaccttctgtgtgtatctagttttctagtataatgcatatgcaagcctggtcctctaaattgcaacctctctcctcatgtatgtgctgcgtctctttacaaccgcaagaaattagcagaattctaatcaaagggcctgtttggctatcgagggtcccagta

SEQ ID NO: 55347 - DNA, 1606 bp, Zea Mays
gtgtggtactatggtggtggggcacaatcataatgatccatgtctgtcaacattttggatttatttggagagctacgaccaaacatgtctaggtatttatcaatcgaggaacttgttgctgcgttagttgagcttgaagaaaatgagcgctcagccccagtagaaaaggttgaaaatgaaagacactcggacaatgaatctcataaaagacaggcacgagatgctggtccatctgtgaatggtggaagcgctgcaaatggaattgaggaaaatggcaaggatcatgaaatagcagatagtgagagctattcagatagtggcagcattgatggacgggaagatgaggatatattatctgaggataaatcaaatgatggctcagataatgaaggcgacgatgaagatgatggcattcctgttggttctgatgaagatgaaaatgttgaggttagacagaaagttatgaaggttgatcctaaggagcaagaagactttgatcgagagctcaaagcccttcttcaggagagcttggagtcccgcaaatcagaggcccgttcaaggctccctctgaatatgatggtaccgatgaatgtccttgaaggttcatcaaaagactcgagggccacagaatctgagagtggagaagaaacagtagatgaagagggtggcaatgctgggggtagcagcaaggtgcgcgttaaggtgctaatgaagaaagggcacaaacaacagacgaggcaaatgttaattcccgctgatagttcaatcgttcgaagcacgaagcagcaagaagctgccgagcttgaggagaagcagagcattaagcggaggatccttgaatacaatgaaagggaggaggaagaactgaatggagcatcacaaatggggaactggggtcaaggagctaccaacaccagcagtatcagatcaggtggccggggcagctgggatggttcagcacggggaggtggtcgacaacgacaccacatcgccggttctggtggtttctatcacagttatggcaggagaagatgagtttgtcctgatgggaggtggttggcagaggcgccacactgtgggttcttgtggtttctatcagttgttgcaggagaacagttagctgtgtgagctattttgtcctgagcttttttttggcagggccatgcttctctctatttaaccgcctaacgatcagattaacagggaagaaatttcggggaggttaacacagcttgatggacaattgcttccaccaccctaatctgaaagataagataattctaccactgatgggagatagcaatgccttgaaggagctatttttctggtggcccgaatggcttgagttgcttggtagttatgggcttatggctgtacctggagagcatagataccccggttgctcatgtacatataataataacataatttggcaacgagtgtgagtcgtttggagattgtgtgcgcacttgtatctgagtatggatctgatggtggtacttgcatagtttagatgtgcatactgtttcgacgccatgtgtgtgtatggggcacctgataaaaaaattactgtttgattcccatttagttatgcgtgcaggagtta

SEQ ID NO: 55348 - DNA, 3102 bp, Zea Mays
ggcaagactaccccctgcatatgtggggaggctggttcgaacctgcaacctggtgactcaagcatttgtgccggctgtattactgggagaggttgagccaaagtcgaatgagcaacatgctaagggccgtgagcaatctagtgagtccacttcagaacaagagactgaactacatgacgattttcaaacttctgcaactgaacatcaactagaagttaaattagatggtggagtgaaagagagtgatgacaaagataaagagaagggaaaggatggagaaaaggaaaaatctaaggagaaggatctggataagaaaaatgacagagagaaggagaaaggaagagccatggacggtgcaagtctggataacatcttgcagaggctaccgggatgtgtcagtcgtgatctcattgatcagttgacggttgagttttgctacctaaattctaaagcaaatcgaaagaaacttgcgcgtgccttattcaatgttaataggacttcactggaactgttgccttactattctcgtttggttgcgacactatcaacttgtatgaaagatgttccaagtatgcttctgtctatgcttgaagaggagttcaactttttaataaataagaaggatcagatcaacattgaaacaaaaataaaaaatatacggtttattggggagttgtgcaagttcaagatggctcctccagctcttgtttttagctgtttgaagtcctgccttgatgatttcagtcatcataatattgatgtggcttgcaaccttctcgagacttgtggccgatttttgtaccgctcacctgaaactacgattcgcatggctaacatgctggagatactgatgagattgaaaaatgttaagaatttggatccacgtcacagtacacttgtagaaaacgcttactacctttgtaaaccacccgaaagatctgcacggatatcaaaagttcggccacctttgcatcaatacataagaaagttgcttttctcagatcttgacaaatcaagtgttgaacatgttttgcgccaactacgcaaagttaccttgggcagaatgtcaacaataccttctgaagtgctttctaaaggttcacaaaggaaagtacagccaagttcatctgattgctcttctcactgctagtctcagccgctatcatgatgactttgctgtcgcagtggtagatgaggttttagaagagataagggttggattggagttgaatgactatgggatgcaacaaaggcggcttgcccacatgcggttccttggagagctatacagctacaagcatatagattcatcagttgtttttgatacactgtaccttatcattgtgtttggtcatggaacacctgaacaagatgtgttggatccaccagaagattgcttcagaatcaggttgatcattacacttttacagacctgtggtcactatttcagtaagggatcttcaaaaaggaagctggacaaattcttgctacactttcaaagatacattattagtaaagggcccttaccactcgacatagaatttgacattcaggatttatttggagagctacgaccaaacatgtctaggtatttatcaatcgaggaacttgttgctgcgttagttgagcttgaagaaaatgagcgctcagccccagtagaaaaggttgaaaatgaaagacactcggacaatgaatctcataaaagacaggcacgagatgctggtccatctgtgaatggtggaagcgctgcaaatggaattgaggaaaatggcaaggatcatgaaatagcagatagtgagagctattcagatagtggcagcattgatggacgggaagatgaggatatattatctgaggataaatcaaatgatggctcagataatgaaggcgacgatgaagatgatggcattcctgttggttctgatgaagatgaaaatgttgaggttagacagaaagttatgaaggttgatcctaaggagcaagaagactttgatcgagagctcaaagcccttcttcaggagagcttggagtcccgcaaatcagaggcccgttcaaggctccctctgaatatgatggtaccgatgaatgtccttgaaggttcatcaaaagactcgagggccacagaatctgagagtggagaagaaacagtagatgaagagggtggcaatgctgggggtagcagcaaggtgcgcgttaaggtgctaatgaagaaagggcacaaacaacagacgaggcaaatgttaattcccgctgatagttcaatcgttcgaagcacgaagcagcaagaagctgccgagcttgaggagaagcagagcattaagcggaggatccttgaatacaatgaaagggaggaggaagaactgaatggagcatcacaaatggggaactggggtcaaggagctaccaacaccagcagtatcagatcaggtggccggggcagctgggatggttcagcacggggaggtggtcgacaacgacaccacatcgccggttctggtggtttctatcacagttatggcaggagaagatgagtttgtcctgatgggaggtggttggcagaggcgccacactgtgggttcttgtggtttctatcagttgttgcaggagaacagttagctgtgtgagctattttgtcctgagcttttttttggcagggccatgcttctctctatttaaccgcctaacgatcagattaacagggaagaaatttcggggaggttaacacagcttgatggacaattgcttccaccaccctaatctgaaagataagataattctaccactgatgggagatagcaatgccttgaaggagctatttttctggtggcccgaatggcttgagttgcttggtagttatgggcttatggctgtacctggagagcatagataccccggttgctcatgtacatataataataacataatttggcaacgagtgtgagtcgtttggagattgtgtgcgcacttgtatctgagtatggatctgatggtggtacttgcatagtttagatgtgcatactgtttcgacgccatgtgtgtgtatggggcacctgataaaaaaattactgtttgattcccatttagttatgcgtgcaggagtta

SEQ ID NO: 55349 - DNA, 4024 bp, Zea Mays
ggagatagttcactaaagcttcaactgatgcaaactacctgagaaccctggactccagtatcaagcgaaatacaacagttataaagaagttgaagacaataaatgatgagcagaaggatgggctaatggatgagttaaaaagtgtgaatttgagcaaatttgtcagcgaagcagtttcttatatttgtgaggccaaacttcgctctgctgatatacaagctgctgttcaggtttgctcactccttcatcaaagatacaaggacttctctccttgtcttatacaaggtctactgaaggtcttctttccgggaaaatctgtagatgacttggatgcagataaaaattcgagagccatgaagaagagaagcacactgaaacttttgattgaactgtattttgttggaattgtcgaagatgctagcatatttgtaaatattataaaagatcttacatcagcggaacatttgaaggaccgtgaaggaactcaaaccaacttgtctcttctatctacctttgctcgtcaagggaagttttttttagggctacaacctcatggtcaagaagcttatgatgagttctttaaggagctaaatgttaccgctgagcagaagaagttctttaagaaagccttgaactcttattatgatactgtagctgaactactgcaatcagaacatgtgtctcttcgtctaatggaggcagagaatgcaaaagttttaagtgccaaaggtgaactaagtgatgagaacacagcctcatatgagaaactcaggaagtcttttgatcagttactacgtggtgtatcctcgttggctgaatctcttgatatgcagcctccagtgatgccagatgatggaaatacaacaagagttactacaagaactgatgccttgccttcttctggaaaagattcatctgcattggaacctatctgggatgatgaagataccaaagctttttatgaatctttacctgatctcagagcatttgtgccggctgtattactgggagaggttgagccaaagtcgaatgagcaacatgctaagggccgtgagcaatctagtgagtccacttcagaacaagagactgaactacatgacgattttcaaacttctgcaactgaacatcaactagaagttaaattagatggtggagtgaaagagagtgatgacaaagataaagagaagggaaaggatggagaaaaggaaaaatctaaggagaaggatctggataagaaaaatgacagagagaaggagaaaggaagagccatggacggtgcaagtctggataacatcttgcagaggctaccgggatgtgtcagtcgtgatctcattgatcagttgacggttgagttttgctacctaaattctaaagcaaatcgaaagaaacttgcgcgtgccttattcaatgttaataggacttcactggaactgttgccttactattctcgtttggttgcgacactatcaacttgtatgaaagatgttccaagtatgcttctgtctatgcttgaagaggagttcaactttttaataaataagaaggatcagatcaacattgaaacaaaaataaaaaatatacggtttattggggagttgtgcaagttcaagatggctcctccagctcttgtttttagctgtttgaagtcctgccttgatgatttcagtcatcataatattgatgtggcttgcaaccttctcgagacttgtggccgatttttgtaccgctcacctgaaactacgattcgcatggctaacatgctggagatactgatgagattgaaaaatgttaagaatttggatccacgtcacagtacacttgtagaaaacgcttactacctttgtaaaccacccgaaagatctgcacggatatcaaaagttcggccacctttgcatcaatacataagaaagttgcttttctcagatcttgacaaatcaagtgttgaacatgttttgcgccaactacgcaaagttaccttgggcagaatgtcaacaataccttctgaagtgctttctaaaggttcacaaaggaaagtacagccaagttcatctgattgctcttctcactgctagtctcagccgctatcatgatgactttgctgtcgcagtggtagatgaggttttagaagagataagggttggattggagttgaatgactatgggatgcaacaaaggcggcttgcccacatgcggttccttggagagctatacagctacaagcatatagattcatcagttgtttttgatacactgtaccttatcattgtgtttggtcatggaacacctgaacaagatgtgttggatccaccagaagattgcttcagaatcaggttgatcattacacttttacagacctgtggtcactatttcagtaagggatcttcaaaaaggaagctggacaaattcttgctacactttcaaagatacattattagtaaagggcccttaccactcgacatagaatttgacattcaggatttatttggagagctacgaccaaacatgtctaggtatttatcaatcgaggaacttgttgctgcgttagttgagcttgaagaaaatgagcgctcagccccagtagaaaaggttgaaaatgaaagacactcggacaatgaatctcataaaagacaggcacgagatgctggtccatctgtgaatggtggaagcgctgcaaatggaattgaggaaaatggcaaggatcatgaaatagcagatagtgagagctattcagatagtggcagcattgatggacgggaagatgaggatatattatctgaggataaatcaaatgatggctcagataatgaaggcgacgatgaagatgatggcattcctgttggttctgatgaagatgaaaatgttgaggttagacagaaagttatgaaggttgatcctaaggagcaagaagactttgatcgagagctcaaagcccttcttcaggagagcttggagtcccgcaaatcagaggcccgttcaaggctccctctgaatatgatggtaccgatgaatgtccttgaaggttcatcaaaagactcgagggccacagaatctgagagtggagaagaaacagtagatgaagagggtggcaatgctgggggtagcagcaaggtgcgcgttaaggtgctaatgaagaaagggcacaaacaacagacgaggcaaatgttaattcccgctgatagttcaatcgttcgaagcacgaagcagcaagaagctgccgagcttgaggagaagcagagcattaagcggaggatccttgaatacaatgaaagggaggaggaagaactgaatggagcatcacaaatggggaactggggtcaaggagctaccaacaccagcagtatcagatcaggtggccggggcagctgggatggttcagcacggggaggtggtcgacaacgacaccacatcgccggttctggtggtttctatcacagttatggcaggagaagatgagtttgtcctgatgggaggtggttggcagaggcgccacactgtgggttcttgtggtttctatcagttgttgcaggagaacagttagctgtgtgagctattttgtcctgagcttttttttggcagggccatgcttctctctatttaaccgcctaacgatcagattaacagggaagaaatttcggggaggttaacacagcttgatggacaattgcttccaccaccctaatctgaaagataagataattctaccactgatgggagatagcaatgccttgaaggagctatttttctggtggcccgaatggcttgagttgcttggtagttatgggcttatggctgtacctggagagcatagataccccggttgctcatgtacatataataataacataatttggcaacgagtgtgagtcgtttggagattgtgtgcgcacttgtatctgagtatggatctgatggtggtacttgcatagtttagatgtgcatactgtttcgacgccatgtgtgtgtatggggcacctgataaaaaaattactgtttgattcccatttagttatgcgtgcaggagtta

SEQ ID NO: 55350 - DNA, 4270 bp, Zea Mays
caagcatatacatacccattaacttcgttattttcttcttgcaaaagttatataggatacggaggatattttggttgcgcataacaagttggatagttctgggttttcgctctgaacaaaatggacaatgctcagagtgagaaccgaattgataccaagcaagatgatgatgtgcgccagatcaaacatgatgatgaggaggctcgccttgaagaatataaaaagatcattgatcaaaagacttccctccgccggagcaacctaaaccctgaaaggcctgatgcaaactacctgagaaccctggactccagtatcaagcgaaatacaacagttataaagaagttgaagacaataaatgatgagcagaaggatgggctaatggatgagttaaaaagtgtgaatttgagcaaatttgtcagcgaagcagtttcttatatttgtgaggccaaacttcgctctgctgatatacaagctgctgttcaggtttgctcactccttcatcaaagatacaaggacttctctccttgtcttatacaaggtctactgaaggtcttctttccgggaaaatctgtagatgacttggatgcagataaaaattcgagagccatgaagaagagaagcacactgaaacttttgattgaactgtattttgttggaattgtcgaagatgctagcatatttgtaaatattataaaagatcttacatcagcggaacatttgaaggaccgtgaaggaactcaaaccaacttgtctcttctatctacctttgctcgtcaagggaagttttttttagggctacaacctcatggtcaagaagcttatgatgagttctttaaggagctaaatgttaccgctgagcagaagaagttctttaagaaagccttgaactcttattatgatactgtagctgaactactgcaatcagaacatgtgtctcttcgtctaatggaggcagagaatgcaaaagttttaagtgccaaaggtgaactaagtgatgagaacacagcctcatatgagaaactcaggaagtcttttgatcagttactacgtggtgtatcctcgttggctgaatctcttgatatgcagcctccagtgatgccagatgatggaaatacaacaagagttactacaagaactgatgccttgccttcttctggaaaagattcatctgcattggaacctatctgggatgatgaagataccaaagctttttatgaatctttacctgatctcagagcatttgtgccggctgtattactgggagaggttgagccaaagtcgaatgagcaacatgctaagggccgtgagcaatctagtgagtccacttcagaacaagagactgaactacatgacgattttcaaacttctgcaactgaacatcaactagaagttaaattagatggtggagtgaaagagagtgatgacaaagataaagagaagggaaaggatggagaaaaggaaaaatctaaggagaaggatctggataagaaaaatgacagagagaaggagaaaggaagagccatggacggtgcaagtctggataacatcttgcagaggctaccgggatgtgtcagtcgtgatctcattgatcagttgacggttgagttttgctacctaaattctaaagcaaatcgaaagaaacttgcgcgtgccttattcaatgttaataggacttcactggaactgttgccttactattctcgtttggttgcgacactatcaacttgtatgaaagatgttccaagtatgcttctgtctatgcttgaagaggagttcaactttttaataaataagaaggatcagatcaacattgaaacaaaaataaaaaatatacggtttattggggagttgtgcaagttcaagatggctcctccagctcttgtttttagctgtttgaagtcctgccttgatgatttcagtcatcataatattgatgtggcttgcaaccttctcgagacttgtggccgatttttgtaccgctcacctgaaactacgattcgcatggctaacatgctggagatactgatgagattgaaaaatgttaagaatttggatccacgtcacagtacacttgtagaaaacgcttactacctttgtaaaccacccgaaagatctgcacggatatcaaaagttcggccacctttgcatcaatacataagaaagttgcttttctcagatcttgacaaatcaagtgttgaacatgttttgcgccaactacgcaaagttaccttgggcagaatgtcaacaataccttctgaagtgctttctaaaggttcacaaaggaaagtacagccaagttcatctgattgctcttctcactgctagtctcagccgctatcatgatgactttgctgtcgcagtggtagatgagaagagataagggttggattggagttgaatgactatgggatgcaacaaaggcggcttgcccacatgcggttccttggagagctatacagctacaagcatatagattcatcagttgtttttgatacactgtaccttatcattgtgtttggtcatggaacacctgaacaagatgtgttggatccaccagaagattgcttcagaatcaggttgatcattacacttttacagacctgtggtcactatttcagtaagggatcttcaaaaaggaagctggacaaattcttgctacactttcaaagatacattattagtaaagggcccttaccactcgacatagaatttgacattcaggatttatttggagagctacgaccaaacatgtctaggtatttatcaatcgaggaacttgttgctgcgttagttgagcttgaagaaaatgagcgctcagccccagtagaaaaggttgaaaatgaaagacactcggacaatgaatctcataaaagacaggcacgagatgctggtccatctgtgaatggtggaagcgctgcaaatggaattgaggaaaatggcaaggatcatgaaatagcagatagtgagagctattcagatagtggcagcattgatggacgggaagatgaggatatattatctgaggataaatcaaatgatggctcagataatgaaggcgacgatgaagatgatggcattcctgttggttctgatgaagatgaaaatgttgaggttagacagaaagttatgaaggttgatcctaaggagcaagaagactttgatcgagagctcaaagcccttcttcaggagagcttggagtcccgcaaatcagaggcccgttcaaggctccctctgaatatgatggtaccgatgaatgtccttgaaggttcatcaaaagactcgagggccacagaatctgagagtggagaagaaacagtagatgaagagggtggcaatgctgggggtagcagcaaggtgcgcgttaaggtgctaatgaagaaagggcacaaacaacagacgaggcaaatgttaattcccgctgatagttcaatcgttcgaagcacgaagcagcaagaagctgccgagcttgaggagaagcagagcattaagcggaggatccttgaatacaatgaaagggaggaggaagaactgaatggagcatcacaaatggggaactggggtcaaggagctaccaacaccagcagtatcagatcaggtggccggggcagctgggatggttcagcacggggaggtggtcgacaacgacaccacatcgccggttctggtggtttctatcacagttatggcaggagaagatgagtttgtcctgatgggaggtggttggcagaggcgccacactgtgggttcttgtggtttctatcagttgttgcaggagaacagttagctgtgtgagctattttgtcctgagcttttttttggcagggccatgcttctctctatttaaccgcctaacgatcagattaacagggaagaaatttcggggaggttaacacagcttgatggacaattgcttccaccaccctaatctgaaagataagataattctaccactgatgggagatagcaatgccttgaaggagctatttttctggtggcccgaatggcttgagttgcttggtagttatgggcttatggctgtacctggagagcatagataccccggttgctcatgtacatataataataacataatttggcaacgagtgtgagtcgtttggagattgtgtgcgcacttgtatctgagtatggatctgatggtggtacttgcatagtttagatgtgcatactgtttcgacgccatgtgtgtgtatggggcacctgataaaaaaattactgtttgattcccatttagttatgcgtgcaggagtta

SEQ ID NO: 55351 - DNA, 4294 bp, Zea Mays
cggatctggtctaattacaagcatatacatacccattaacttcgttattttcttcttgcaaaagttatataggatacggaggatattttggttgcgcataacaagttggatagttctgggttttcgctctgaacaaaatggacaatgctcagagtgagaaccgaattgataccaagcaagatgatgatgtgcgccagatcaaacatgatgatgaggaggctcgccttgaagaatataaaaagatcattgatcaaaagacttccctccgccggagcaacctaaaccctgaaaggcctgatgcaaactacctgagaaccctggactccagtatcaagcgaaatacaacagttataaagaagttgaagacaataaatgatgagcagaaggatgggctaatggatgagttaaaaagtgtgaatttgagcaaatttgtcagcgaagcagtttcttatatttgtgaggccaaacttcgctctgctgatatacaagctgctgttcaggtttgctcactccttcatcaaagatacaaggacttctctccttgtcttatacaaggtctactgaaggtcttctttccgggaaaatctgtagatgacttggatgcagataaaaattcgagagccatgaagaagagaagcacactgaaacttttgattgaactgtattttgttggaattgtcgaagatgctagcatatttgtaaatattataaaagatcttacatcagcggaacatttgaaggaccgtgaaggaactcaaaccaacttgtctcttctatctacctttgctcgtcaagggaagttttttttagggctacaacctcatggtcaagaagcttatgatgagttctttaaggagctaaatgttaccgctgagcagaagaagttctttaagaaagccttgaactcttattatgatactgtagctgaactactgcaatcagaacatgtgtctcttcgtctaatggaggcagagaatgcaaaagttttaagtgccaaaggtgaactaagtgatgagaacacagcctcatatgagaaactcaggaagtcttttgatcagttactacgtggtgtatcctcgttggctgaatctcttgatatgcagcctccagtgatgccagatgatggaaatacaacaagagttactacaagaactgatgccttgccttcttctggaaaagattcatctgcattggaacctatctgggatgatgaagataccaaagctttttatgaatctttacctgatctcagagcatttgtgccggctgtattactgggagaggttgagccaaagtcgaatgagcaacatgctaagggccgtgagcaatctagtgagtccacttcagaacaagagactgaactacatgacgattttcaaacttctgcaactgaacatcaactagaagttaaattagatggtggagtgaaagagagtgatgacaaagataaagagaagggaaaggatggagaaaaggaaaaatctaaggagaaggatctggataagaaaaatgacagagagaaggagaaaggaagagccatggacggtgcaagtctggataacatcttgcagaggctaccgggatgtgtcagtcgtgatctcattgatcagttgacggttgagttttgctacctaaattctaaagcaaatcgaaagaaacttgcgcgtgccttattcaatgttaataggacttcactggaactgttgccttactattctcgtttggttgcgacactatcaacttgtatgaaagatgttccaagtatgcttctgtctatgcttgaagaggagttcaactttttaataaataagaaggatcagatcaacattgaaacaaaaataaaaaatatacggtttattggggagttgtgcaagttcaagatggctcctccagctcttgtttttagctgtttgaagtcctgccttgatgatttcagtcatcataatattgatgtggcttgcaaccttctcgagacttgtggccgatttttgtaccgctcacctgaaactacgattcgcatggctaacatgctggagatactgatgagattgaaaaatgttaagaatttggatccacgtcacagtacacttgtagaaaacgcttactacctttgtaaaccacccgaaagatctgcacggatatcaaaagttcggccacctttgcatcaatacataagaaagttgcttttctcagatcttgacaaatcaagtgttgaacatgttttgcgccaactacgcaaagttaccttgggcagaatgtcaacaataccttctgaagtgctttctaaaggttcacaaaggaaagtacagccaagttcatctgattgctcttctcactgctagtctcagccgctatcatgatgactttgctgtcgcagtggtagatgaggttttagaagagataagggttggattggagttgaatgactatgggatgcaacaaaggcggcttgcccacatgcggttccttggagagctatacagctacaagcatatagattcatcagttgtttttgatacactgtaccttatcattgtgtttggtcatggaacacctgaacaagatgtgttggatccaccagaagattgcttcagaatcaggttgatcattacacttttacagacctgtggtcactatttcagtaagggatcttcaaaaaggaagctggacaaattcttgctacactttcaaagatacattattagtaaagggcccttaccactcgacatagaatttgacattcaggatttatttggagagctacgaccaaacatgtctaggtatttatcaatcgaggaacttgttgctgcgttagttgagcttgaagaaaatgagcgctcagccccagtagaaaaggttgaaaatgaaagacactcggacaatgaatctcataaaagacaggcacgagatgctggtccatctgtgaatggtggaagcgctgcaaatggaattgaggaaaatggcaaggatcatgaaatagcagatagtgagagctattcagatagtggcagcattgatggacgggaagatgaggatatattatctgaggataaatcaaatgatggctcagataatgaaggcgacgatgaagatgatggcattcctgttggttctgatgaagatgaaaatgttgaggttagacagaaagttatgaaggttgatcctaaggagcaagaagactttgatcgagagctcaaagcccttcttcaggagagcttggagtcccgcaaatcagaggcccgttcaaggctccctctgaatatgatggtaccgatgaatgtccttgaaggttcatcaaaagactcgagggccacagaatctgagagtggagaagaaacagtagatgaagagggtggcaatgctgggggtagcagcaaggtgcgcgttaaggtgctaatgaagaaagggcacaaacaacagacgaggcaaatgttaattcccgctgatagttcaatcgttcgaagcacgaagcagcaagaagctgccgagcttgaggagaagcagagcattaagcggaggatccttgaatacaatgaaagggaggaggaagaactgaatggagcatcacaaatggggaactggggtcaaggagctaccaacaccagcagtatcagatcaggtggccggggcagctgggatggttcagcacggggaggtggtcgacaacgacaccacatcgccggttctggtggtttctatcacagttatggcaggagaagatgagtttgtcctgatgggaggtggttggcagaggcgccacactgtgggttcttgtggtttctatcagttgttgcaggagaacagttagctgtgtgagctattttgtcctgagcttttttttggcagggccatgcttctctctatttaaccgcctaacgatcagattaacagggaagaaatttcggggaggttaacacagcttgatggacaattgcttccaccaccctaatctgaaagataagataattctaccactgatgggagatagcaatgccttgaaggagctatttttctggtggcccgaatggcttgagttgcttggtagttatgggcttatggctgtacctggagagcatagataccccggttgctcatgtacatataataataacataatttggcaacgagtgtgagtcgtttggagattgtgtgcgcacttgtatctgagtatggatctgatggtggtacttgcatagtttagatgtgcatactgtttcgacgccatgtgtgtgtatggggcacctgataaaaaaattactgtttgattcccatttagttatgcgtgcaggagtta

SEQ ID NO: 55352 - DNA, 4392 bp, Zea Mays
gaaccactgaaccagcgtcgtcttctcgagttgaagtgtgctgcctgttcacccctgcgtctttccctcccctgttacgattatttgcctattgggtgaccgccgacgccgccccacgccaggtgctcaggtcttcggcgggccctttgctggcgaggagcaccaaccctatacggaggatattttggttgcgcataacaagttggatagttctgggttttcgctctgaacaaaatggacaatgctcagagtgagaaccgaattgataccaagcaagatgatgatgtgcgccagatcaaacatgatgatgaggaggctcgccttgaagaatataaaaagatcattgatcaaaagacttccctccgccggagcaacctaaaccctgaaaggcctggatgcaaactacctgagaaccctggactccagtatcaagcgaaatacaacagttataaagaagttgaagacaataaatgatgagcagaaggatgggctaatggatgagttaaaaagtgtgaatttgagcaaatttgtcagcgaagcagtttcttatatttgtgaggccaaacttcgctctgctgatatacaagctgctgttcaggtttgctcactccttcatcaaagatacaaggacttctctccttgtcttatacaaggtctactgaaggtcttctttccgggaaaatctgtagatgacttggatgcagataaaaattcgagagccatgaagaagagaagcacactgaaacttttgattgaactgtattttgttggaattgtcgaagatgctagcatatttgtaaatattataaaagatcttacatcagcggaacatttgaaggaccgtgaaggaactcaaaccaacttgtctcttctatctacctttgctcgtcaagggaagttttttttagggctacaacctcatggtcaagaagcttatgatgagttctttaaggagctaaatgttaccgctgagcagaagaagttctttaagaaagccttgaactcttattatgatactgtagctgaactactgcaatcagaacatgtgtctcttcgtctaatggaggcagagaatgcaaaagttttaagtgccaaaggtgaactaagtgatgagaacacagcctcatatgagaaactcaggaagtcttttgatcagttactacgtggtgtatcctcgttggctgaatctcttgatatgcagcctccagtgatgccagatgatggaaatacaacaagagttactacaagaactgatgccttgccttcttctggaaaagattcatctgcattggaacctatctgggatgatgaagataccaaagctttttatgaatctttacctgatctcagagcatttgtgccggctgtattactgggagaggttgagccaaagtcgaatgagcaacatgctaagggccgtgagcaatctagtgagtccacttcagaacaagagactgaactacatgacgattttcaaacttctgcaactgaacatcaactagaagttaaattagatggtggagtgaaagagagtgatgacaaagataaagagaagggaaaggatggagaaaaggaaaaatctaaggagaaggatctggataagaaaaatgacagagagaaggagaaaggaagagccatggacggtgcaagtctggataacatcttgcagaggctaccgggatgtgtcagtcgtgatctcattgatcagttgacggttgagttttgctacctaaattctaaagcaaatcgaaagaaacttgcgcgtgccttattcaatgttaataggacttcactggaactgttgccttactattctcgtttggttgcgacactatcaacttgtatgaaagatgttccaagtatgcttctgtctatgcttgaagaggagttcaactttttaataaataagaaggatcagatcaacattgaaacaaaaataaaaaatatacggtttattggggagttgtgcaagttcaagatggctcctccagctcttgtttttagctgtttgaagtcctgccttgatgatttcagtcatcataatattgatgtggcttgcaaccttctcgagacttgtggccgatttttgtaccgctcacctgaaactacgattcgcatggctaacatgctggagatactgatgagattgaaaaatgttaagaatttggatccacgtcacagtacacttgtagaaaacgcttactacctttgtaaaccacccgaaagatctgcacggatatcaaaagttcggccacctttgcatcaatacataagaaagttgcttttctcagatcttgacaaatcaagtgttgaacatgttttgcgccaactacgcaaagttaccttgggcagaatgtcaacaataccttctgaagtgctttctaaaggttcacaaaggaaagtacagccaagttcatctgattgctcttctcactgctagtctcagccgctatcatgatgactttgctgtcgcagtggtagatgaggttttagaagagataagggttggattggagttgaatgactatgggatgcaacaaaggcggcttgcccacatgcggttccttggagagctatacagctacaagcatatagattcatcagttgtttttgatacactgtaccttatcattgtgtttggtcatggaacacctgaacaagatgtgttggatccaccagaagattgcttcagaatcaggttgatcattacacttttacagacctgtggtcactatttcagtaagggatcttcaaaaaggaagctggacaaattcttgctacactttcaaagatacattattagtaaagggcccttaccactcgacatagaatttgacattcaggatttatttggagagctacgaccaaacatgtctaggtatttatcaatcgaggaacttgttgctgcgttagttgagcttgaagaaaatgagcgctcagccccagtagaaaaggttgaaaatgaaagacactcggacaatgaatctcataaaagacaggcacgagatgctggtccatctgtgaatggtggaagcgctgcaaatggaattgaggaaaatggcaaggatcatgaaatagcagatagtgagagctattcagatagtggcagcattgatggacgggaagatgaggatatattatctgaggataaatcaaatgatggctcagataatgaaggcgacgatgaagatgatggcattcctgttggttctgatgaagatgaaaatgttgaggttagacagaaagttatgaaggttgatcctaaggagcaagaagactttgatcgagagctcaaagcccttcttcaggagagcttggagtcccgcaaatcagaggcccgttcaaggctccctctgaatatgatggtaccgatgaatgtccttgaaggttcatcaaaagactcgagggccacagaatctgagagtggagaagaaacagtagatgaagagggtggcaatgctgggggtagcagcaaggtgcgcgttaaggtgctaatgaagaaagggcacaaacaacagacgaggcaaatgttaattcccgctgatagttcaatcgttcgaagcacgaagcagcaagaagctgccgagcttgaggagaagcagagcattaagcggaggatccttgaatacaatgaaagggaggaggaagaactgaatggagcatcacaaatggggaactggggtcaaggagctaccaacaccagcagtatcagatcaggtggccggggcagctgggatggttcagcacggggaggtggtcgacaacgacaccacatcgccggttctggtggtttctatcacagttatggcaggagaagatgagtttgtcctgatgggaggtggttggcagaggcgccacactgtgggttcttgtggtttctatcagttgttgcaggagaacagttagctgtgtgagctattttgtcctgagcttttttttggcagggccatgcttctctctatttaaccgcctaacgatcagattaacagggaagaaatttcggggaggttaacacagcttgatggacaattgcttccaccaccctaatctgaaagataagataattctaccactgatgggagatagcaatgccttgaaggagctatttttctggtggcccgaatggcttgagttgcttggtagttatgggcttatggctgtacctggagagcatagataccccggttgctcatgtacatataataataacataatttggcaacgagtgtgagtcgtttggagattgtgtgcgcacttgtatctgagtatggatctgatggtggtacttgcatagtttagatgtgcatactgtttcgacgccatgtgtgtgtatggggcacctgataaaaaaattactgtttgattcccatttagttatgcgtgcaggagtta

SEQ ID NO: 55353 - DNA, 4407 bp, Zea Mays
cccaaacagacttgactgtgtagaaccactgaaccagcgtcgtcttctcgagttgaagtgtgctgcctgttcacccctgcgtctttccctcccctgttacgattatttgcctattgggtgaccgccgacgccgccccacgccaggtgctcaggtcttcggcgggccctttgctggcgaggagcaccaaccctatacggaggatattttggttgcgcataacaagttggatagttctgggttttcgctctgaacaaaatggacaatgctcagagtgagaaccgaattgataccaagcaagatgatgatgtgcgccagatcaaacatgatgatgaggaggctcgccttgaagaatataaaaagatcattgatcaaaagacttccctccgccggagcaacctaaaccctgaaaggcctgatgcaaactacctgagaaccctggactccagtatcaagcgaaatacaacagttataaagaagttgaagacaataaatgatgagcagaaggatgggctaatggatgagttaaaaagtgtgaatttgagcaaatttgtcagcgaagcagtttcttatatttgtgaggccaaacttcgctctgctgatatacaagctgctgttcaggtttgctcactccttcatcaaagatacaaggacttctctccttgtcttatacaaggtctactgaaggtcttctttccgggaaaatctgtagatgacttggatgcagataaaaattcgagagccatgaagaagagaagcacactgaaacttttgattgaactgtattttgttggaattgtcgaagatgctagcatatttgtaaatattataaaagatcttacatcagcggaacatttgaaggaccgtgaaggaactcaaaccaacttgtctcttctatctacctttgctcgtcaagggaagttttttttagggctacaacctcatggtcaagaagcttatgatgagttctttaaggagctaaatgttaccgctgagcagaagaagttctttaagaaagccttgaactcttattatgatactgtagctgaactactgcaatcagaacatgtgtctcttcgtctaatggaggcagagaatgcaaaagttttaagtgccaaaggtgaactaagtgatgagaacacagcctcatatgagaaactcaggaagtcttttgatcagttactacgtggtgtatcctcgttggctgaatctcttgatatgcagcctccagtgatgccagatgatggaaatacaacaagagttactacaagaactgatgccttgccttcttctggaaaagattcatctgcattggaacctatctgggatgatgaagataccaaagctttttatgaatctttacctgatctcagagcatttgtgccggctgtattactgggagaggttgagccaaagtcgaatgagcaacatgctaagggccgtgagcaatctagtgagtccacttcagaacaagagactgaactacatgacgattttcaaacttctgcaactgaacatcaactagaagttaaattagatggtggagtgaaagagagtgatgacaaagataaagagaagggaaaggatggagaaaaggaaaaatctaaggagaaggatctggataagaaaaatgacagagagaaggagaaaggaagagccatggacggtgcaagtctggataacatcttgcagaggctaccgggatgtgtcagtcgtgatctcattgatcagttgacggttgagttttgctacctaaattctaaagcaaatcgaaagaaacttgcgcgtgccttattcaatgttaataggacttcactggaactgttgccttactattctcgtttggttgcgacactatcaacttgtatgaaagatgttccaagtatgcttctgtctatgcttgaagaggagttcaactttttaataaataagaagatcaacattgaaacaaaaataaaaaatatacggtttattggggagttgtgcaagttcaagatggctcctccagctcttgtttttagctgtttgaagtcctgccttgatgatttcagtcatcataatattgatgtggcttgcaaccttctcgagacttgtggccgatttttgtaccgctcacctgaaactacgattcgcatggctaacatgctggagatactgatgagattgaaaaatgttaagaatttggatccacgtcacagtacacttgtagaaaacgcttactacctttgtaaaccacccgaaagatctgcacggatatcaaaagttcggccacctttgcatcaatacataagaaagttgcttttctcagatcttgacaaatcaagtgttgaacatgttttgcgccaactacgcaaagttaccttgggcagaatgtcaacaataccttctgaagtgctttctaaaggttcacaaaggaaagtacagccaagttcatctgattgctcttctcactgctagtctcagccgctatcatgatgactttgctgtcgcagtggtagatgaggttttagaagagataagggttggattggagttgaatgactatgggatgcaacaaaggcggcttgcccacatgcggttccttggagagctatacagctacaagcatatagattcatcagttgtttttgatacactgtaccttatcattgtgtttggtcatggaacacctgaacaagatgtgttggatccaccagaagattgcttcagaatcaggttgatcattacacttttacagacctgtggtcactatttcagtaagggatcttcaaaaaggaagctggacaaattcttgctacactttcaaagatacattattagtaaagggcccttaccactcgacatagaatttgacattcaggatttatttggagagctacgaccaaacatgtctaggtatttatcaatcgaggaacttgttgctgcgttagttgagcttgaagaaaatgagcgctcagccccagtagaaaaggttgaaaatgaaagacactcggacaatgaatctcataaaagacaggcacgagatgctggtccatctgtgaatggtggaagcgctgcaaatggaattgaggaaaatggcaaggatcatgaaatagcagatagtgagagctattcagatagtggcagcattgatggacgggaagatgaggatatattatctgaggataaatcaaatgatggctcagataatgaaggcgacgatgaagatgatggcattcctgttggttctgatgaagatgaaaatgttgaggttagacagaaagttatgaaggttgatcctaaggagcaagaagactttgatcgagagctcaaagcccttcttcaggagagcttggagtcccgcaaatcagaggcccgttcaaggctccctctgaatatgatggtaccgatgaatgtccttgaaggttcatcaaaagactcgagggccacagaatctgagagtggagaagaaacagtagatgaagagggtggcaatgctgggggtagcagcaaggtgcgcgttaaggtgctaatgaagaaagggcacaaacaacagacgaggcaaatgttaattcccgctgatagttcaatcgttcgaagcacgaagcagcaagaagctgccgagcttgaggagaagcagagcattaagcggaggatccttgaatacaatgaaagggaggaggaagaactgaatggagcatcacaaatggggaactggggtcaaggagctaccaacaccagcagtatcagatcaggtggccggggcagctgggatggttcagcacggggaggtggtcgacaacgacaccacatcgccggttctggtggtttctatcacagttatggcaggagaagatgagtttgtcctgatgggaggtggttggcagaggcgccacactgtgggttcttgtggtttctatcagttgttgcaggagaacagttagctgtgtgagctattttgtcctgagcttttttttggcagggccatgcttctctctatttaaccgcctaacgatcagattaacagggaagaaatttcggggaggttaacacagcttgatggacaattgcttccaccaccctaatctgaaagataagataattctaccactgatgggagatagcaatgccttgaaggagctatttttctggtggcccgaatggcttgagttgcttggtagttatgggcttatggctgtacctggagagcatagataccccggttgctcatgtacatataataataacataatttggcaacgagtgtgagtcgtttggagattgtgtgcgcacttgtatctgagtatggatctgatggtggtacttgcatagtttagatgtgcatactgtttcgacgccatgtgtgtgtatggggcacctgataaaaaaattactgtttgattcccatttagttatgcgtgcaggagtta

SEQ ID NO: 55354 - DNA, 4315 bp, Zea Mays
cccatccaaatttctagactagaggaccttggcaaacgcccaaacagacttgactgtgtagaaccactgaaccagcgtcgtcttctcgagttgaagtgtgctgcctgttcacccctgcgtctttccctcccctgttacgattatttgcctattgggtgaccgccgacgccgccccacgccaggtgctcaggtcttcggcgggccctttgctggcgaggagcaccaaccctatacggaggatattttggttgcgcataacaagttggatagttctgggttttcgctctgaacaaaatggacaatgctcagagtgagaaccgaattgataccaagcaagatgatgatgtgcgccagatcaaacatgatgatgaggaggctcgccttgaagaatataaaaagatcattgatcaaaagacttccctccgccggagcaacctaaaccctgaaaggcctgatgcaaactacctgagaaccctggactccagtatcaagcgaaatacaacagttataaagaagttgaagacaataaatgatgagcagaaggatgggctaatggatgagttaaaaagtgtgaatttgagcaaatttgtcagcgaagcagtttcttatatttgtgaggccaaacttcgctctgctgatatacaagctgctgttcaggtttgctcactccttcatcaaagatacaaggacttctctccttgtcttatacaaggtctactgaaggtcttctttccgggaaaatctgtagatgacttggatgcagataaaaattcgagagccatgaagaagagaagcacactgaaacttttgattgaactgtattttgttggaattgtcgaagatgctagcatatttgtaaatattataaaagatcttacatcagcggaacatttgaaggaccgtgaaggaactcaaaccaacttgtctcttctatctacctttgctcgtcaagggaagttttttttagggctacaacctcatggtcaagaagcttatgatgagttctttaaggagctaaatgttaccgctgagcagaagaagttctttaagaaagccttgaactcttattatgatactgtagctgaactactgcaatcagaacatgtgtctcttcgtctaatggaggcagagaatgcaaaagttttaagtgccaaaggtgaactaagtgatgagaacacagcctcatatgagaaactcaggaagtcttttgatcagttactacgtggtgtatcctcgttggctgaatctcttgatatgcagcctccagtgatgccagatgatggaaatacaacaagagttactacaagaactgatgccttgccttcttctggaaaagattcatctgcattggaacctatctgggatgatgaagataccaaagctttttatgaatctttacctgatctcagagcatttgtgccggctgtattactgggagaggttgagccaaagtcgaatgagcaacatgctaagggccgtgagcaatctagtgagtccacttcagaacaagagactgaactacatgacgattttcaaacttctgcaactgaacatcaactagaagttaaattagatggtggagtgaaagagagtgatgacaaagataaagagaagggaaaggatggagaaaaggaaaaatctaaggagaaggatctggataagaaaaatgacagagagaaggagaaaggaagagccatggacggtgcaagtctggataacatcttgcagaggctaccgggatgtgtcagtcgtgatctcattgatcagttgacgatgttccaagtatgcttctgtctatgcttgaagaggagttcaactttttaataaataagaaggatcagatcaacattgaaacaaaaataaaaaatatacggtttattggggagttgtgcaagttcaagatggctcctccagctcttgtttttagctgtttgaagtcctgccttgatgatttcagtcatcataatattgatgtggcttgcaaccttctcgagacttgtggccgatttttgtaccgctcacctgaaactacgattcgcatggctaacatgctggagatactgatgagattgaaaaatgttaagaatttggatccacgtcacagtacacttgtagaaaacgcttactacctttgtaaaccacccgaaagatctgcacggatatcaaaagttcggccacctttgcatcaatacataagaaagttgcttttctcagatcttgacaaatcaagtgttgaacatgttttgcgccaactacgcaaagttaccttgggcagaatgtcaacaataccttctgaagtgctttctaaaggttcacaaaggaaagtacagccaagttcatctgattgctcttctcactgctagtctcagccgctatcatgatgactttgctgtcgcagtggtagatgaggttttagaagagataagggttggattggagttgaatgactatgggatgcaacaaaggcggcttgcccacatgcggttccttggagagctatacagctacaagcatatagattcatcagttgtttttgatacactgtaccttatcattgtgtttggtcatggaacacctgaacaagatgtgttggatccaccagaagattgcttcagaatcaggttgatcattacacttttacagacctgtggtcactatttcagtaagggatcttcaaaaaggaagctggacaaattcttgctacactttcaaagatacattattagtaaagggcccttaccactcgacatagaatttgacattcaggatttatttggagagctacgaccaaacatgtctaggtatttatcaatcgaggaacttgttgctgcgttagttgagcttgaagaaaatgagcgctcagccccagtagaaaaggttgaaaatgaaagacactcggacaatgaatctcataaaagacaggcacgagatgctggtccatctgtgaatggtggaagcgctgcaaatggaattgaggaaaatggcaaggatcatgaaatagcagatagtgagagctattcagatagtggcagcattgatggacgggaagatgaggatatattatctgaggataaatcaaatgatggctcagataatgaaggcgacgatgaagatgatggcattcctgttggttctgatgaagatgaaaatgttgaggttagacagaaagttatgaaggttgatcctaaggagcaagaagactttgatcgagagctcaaagcccttcttcaggagagcttggagtcccgcaaatcagaggcccgttcaaggctccctctgaatatgatggtaccgatgaatgtccttgaaggttcatcaaaagactcgagggccacagaatctgagagtggagaagaaacagtagatgaagagggtggcaatgctgggggtagcagcaaggtgcgcgttaaggtgctaatgaagaaagggcacaaacaacagacgaggcaaatgttaattcccgctgatagttcaatcgttcgaagcacgaagcagcaagaagctgccgagcttgaggagaagcagagcattaagcggaggatccttgaatacaatgaaagggaggaggaagaactgaatggagcatcacaaatggggaactggggtcaaggagctaccaacaccagcagtatcagatcaggtggccggggcagctgggatggttcagcacggggaggtggtcgacaacgacaccacatcgccggttctggtggtttctatcacagttatggcaggagaagatgagtttgtcctgatgggaggtggttggcagaggcgccacactgtgggttcttgtggtttctatcagttgttgcaggagaacagttagctgtgtgagctattttgtcctgagcttttttttggcagggccatgcttctctctatttaaccgcctaacgatcagattaacagggaagaaatttcggggaggttaacacagcttgatggacaattgcttccaccaccctaatctgaaagataagataattctaccactgatgggagatagcaatgccttgaaggagctatttttctggtggcccgaatggcttgagttgcttggtagttatgggcttatggctgtacctggagagcatagataccccggttgctcatgtacatataataataacataatttggcaacgagtgtgagtcgtttggagattgtgtgcgcacttgtatctgagtatggatctgatggtggtacttgcatagtttagatgtgcatactgtttcgacgccatgtgtgtgtatggggcacctgataaaaaaattactgtttgattcccatttagttatgcgtgcaggagtta

SEQ ID NO: 55355 - DNA, 4466 bp, Zea Mays
cgatcgttggtgttgcccatccaaatttctagactagaggaccttggcaaacgcccaaacagacttgactgtgtagaaccactgaaccagcgtcgtcttctcgagttgaagtgtgctgcctgttcacccctgcgtctttccctcccctgttacgattatttgcctattgggtgaccgccgacgccgccccacgccaggtgctcaggtcttcggcgggccctttgctggcgaggagcaccaaccctatacggaggatattttggttgcgcataacaagttggatagttctgggttttcgctctgaacaaaatggacaatgctcagagtgagaaccgaattgataccaagcaagatgatgatgtgcgccagatcaaacatgatgatgaggaggctcgccttgaagaatataaaaagatcattgatcaaaagacttccctccgccggagcaacctaaaccctgaaaggcctgatgcaaactacctgagaaccctggactccagtatcaagcgaaatacaacagttataaagaagttgaagacaataaatgatgagcagaaggatgggctaatggatgagttaaaaagtgtgaatttgagcaaatttgtcagcgaagcagtttcttatatttgtgaggccaaacttcgctctgctgatatacaagctgctgttcaggtttgctcactccttcatcaaagatacaaggacttctctccttgtcttatacaaggtctactgaaggtcttctttccgggaaaatctgtagatgacttggatgcagataaaaattcgagagccatgaagaagagaagcacactgaaacttttgattgaactgtattttgttggaattgtcgaagatgctagcatatttgtaaatattataaaagatcttacatcagcggaacatttgaaggaccgtgaaggaactcaaaccaacttgtctcttctatctacctttgctcgtcaagggaagttttttttagggctacaacctcatggtcaagaagcttatgatgagttctttaaggagctaaatgttaccgctgagcagaagaagttctttaagaaagccttgaactcttattatgatactgtagctgaactactgcaatcagaacatgtgtctcttcgtctaatggaggcagagaatgcaaaagttttaagtgccaaaggtgaactaagtgatgagaacacagcctcatatgagaaactcaggaagtcttttgatcagttactacgtggtgtatcctcgttggctgaatctcttgatatgcagcctccagtgatgccagatgatggaaatacaacaagagttactacaagaactgatgccttgccttcttctggaaaagattcatctgcattggaacctatctgggatgatgaagataccaaagctttttatgaatctttacctgatctcagagcatttgtgccggctgtattactgggagaggttgagccaaagtcgaatgagcaacatgctaagggccgtgagcaatctagtgagtccacttcagaacaagagactgaactacatgacgattttcaaacttctgcaactgaacatcaactagaagttaaattagatggtggagtgaaagagagtgatgacaaagataaagagaagggaaaggatggagaaaaggaaaaatctaaggagaaggatctggataagaaaaatgacagagagaaggagaaaggaagagccatggacggtgcaagtctggataacatcttgcagaggctaccgggatgtgtcagtcgtgatctcattgatcagttgacggttgagttttgctacctaaattctaaagcaaatcgaaagaaacttgcgcgtgccttattcaatgttaataggacttcactggaactgttgccttactattctcgtttggttgcgacactatcaacttgtatgaaagatgttccaagtatgcttctgtctatgcttgaagaggagttcaactttttaataaataagaaggatcagatcaacattgaaacaaaaataaaaaatatacggtttattggggagttgtgcaagttcaagatggctcctccagctcttgtttttagctgtttgaagtcctgccttgatgatttcagtcatcataatattgatgtggcttgcaaccttctcgagacttgtggccgatttttgtaccgctcacctgaaactacgattcgcatggctaacatgctggagatactgatgagattgaaaaatgttaagaatttggatccacgtcacagtacacttgtagaaaacgcttactacctttgtaaaccacccgaaagatctgcacggatatcaaaagttcggccacctttgcatcaatacataagaaagttgcttttctcagatcttgacaaatcaagtgttgaacatgttttgcgccaactacgcaaagttaccttgggcagaatgtcaacaataccttctgaagtgctttctaaaggttcacaaaggaaagtacagccaagttcatctgattgctcttctcactgctagtctcagccgctatcatgatgactttgctgtcgcagtggtagatgaggttttagaagagataagggttggattggagttgaatgactatgggatgcaacaaaggcggcttgcccacatgcggttccttggagagctatacagctacaagcatatagattcatcagttgtttttgatacactgtaccttatcattgtgtttggtcatggaacacctgaacaagatgtgttggatccaccagaagattgcttcagaatcaggttgatcattacacttttacagacctgtggtcactatttcagtaagggatcttcaaaaaggaagctggacaaattcttgctacactttcaaagatacattattagtaaagggcccttaccactcgacatagaatttgacattcaggatttatttggagagctacgaccaaacatgtctaggtatttatcaatcgaggaacttgttgctgcgttagttgagcttgaagaaaatgagcgctcagccccagtagaaaaggttgaaaatgaaagacactcggacaatgaatctcataaaagacaggcacgagatgctggtccatctgtgaatggtggaagcgctgcaaatggaattgaggaaaatggcaaggatcatgaaatagcagatagtgagagctattcagatagtggcagcattgatggacgggaagatgaggatatattatctgaggataaatcaaatgatggctcagataatgaaggcgacgatgaagatgatggcattcctgttggttctgatgaagatgaaaatgttgaggttagacagaaagttatgaaggttgatcctaaggagcaagaagactttgatcgagagctcaaagcccttcttcaggagagcttggagtcccgcaaatcagaggcccgttcaaggctccctctgaatatgatggtaccgatgaatgtccttgaaggttcatcaaaagactcgagggccacagaatctgagagtggagaagaaacagtagatgaagagggtggcaatgctgggggtagcagcaaggtgcgcgttaaggtgctaatgaagaaagggcacaaacaacagacgaggcaaatgttaattcccgctgatagttcaatcgttcgaagcacgaagcagcaagaagctgccgagcttgaggagaagcagagcattaagcggaggatccttgaatacaatgaaagggaggaggaagaactgaatggagcatcacaaatggggaactggggtcaaggagctaccaacaccagcagtatcagatcaggtggccggggcagctgggatggttcagcacggggaggtggtcgacaacgacaccacatcgccggttctggtggtttctatcacagttatggcaggagaagatgagtttgtcctgatgggaggtggttggcagaggcgccacactgtgggttcttgtggtttctatcagttgttgcaggagaacagttagctgtgtgagctattttgtcctgagcttttttttggcagggccatgcttctctctatttaaccgcctaacgatcagattaacagggaagaaatttcggggaggttaacacagcttgatggacaattgcttccaccaccctaatctgaaagataagataattctaccactgatgggagatagcaatgccttgaaggagctatttttctggtggcccgaatggcttgagttgcttggtagttatgggcttatggctgtacctggagagcatagataccccggttgctcatgtacatataataataacataatttggcaacgagtgtgagtcgtttggagattgtgtgcgcacttgtatctgagtatggatctgatggtggtacttgcatagtttagatgtgcatactgtttcgacgccatgtgtgtgtatggggcacctgataaaaaaattactgtttgattcccatttagttatgcgtgcaggagtta

SEQ ID NO: 55356 - DNA, 4272 bp, Zea Mays
ctacgttctacaaacagccctgggagtagacgcggctacggatcctaaacgatacggaggatattttggttgcgcataacaagttggatagttctgggttttcgctctgaacaaaatggacaatgctcagagtgagaaccgaattgataccaagcaagatgatgatgtgcgccagatcaaacatgatgatgaggaggctcgccttgaagaatataaaaagatcattgatcaaaagacttccctccgccggagcaacctaaaccctgaaaggcctgatgcaaactacctgagaaccctggactccagtatcaagcgaaatacaacagttataaagaagttgaagacaataaatgatgagcagaaggatgggctaatggatgagttaaaaagtgtgaatttgagcaaatttgtcagcgaagcagtttcttatatttgtgaggccaaacttcgctctgctgatatacaagctgctgttcaggtttgctcactccttcatcaaagatacaaggacttctctccttgtcttatacaaggtctactgaaggtcttctttccgggaaaatctgtagatgacttggatgcagataaaaattcgagagccatgaagaagagaagcacactgaaacttttgattgaactgtattttgttggaattgtcgaagatgctagcatatttgtaaatattataaaagatcttacatcagcggaacatttgaaggaccgtgaaggaactcaaaccaacttgtctcttctatctacctttgctcgtcaagggaagttttttttagggctacaacctcatggtcaagaagcttatgatgagttctttaaggagctaaatgttaccgctgagcagaagaagttctttaagaaagccttgaactcttattatgatactgtagctgaactactgcaatcagaacatgtgtctcttcgtctaatggaggcagagaatgcaaaagttttaagtgccaaaggtgaactaagtgatgagaacacagcctcatatgagaaactcaggaagtcttttgatcagttactacgtggtgtatcctcgttggctgaatctcttgatatgcagcctccagtgatgccagatgatggaaatacaacaagagttactacaagaactgatgccttgccttcttctggaaaagattcatctgcattggaacctatctgggatgatgaagataccaaagctttttatgaatctttacctgatctcagagcatttgtgccggctgtattactgggagaggttgagccaaagtcgaatgagcaacatgctaagggccgtgagcaatctagtgagtccacttcagaacaagagactgaactacatgacgattttcaaacttctgcaactgaacatcaactagaagttaaattagatggtggagtgaaagagagtgatgacaaagataaagagaagggaaaggatggagaaaaggaaaaatctaaggagaaggatctggataagaaaaatgacagagagaaggagaaaggaagagccatggacggtgcaagtctggataacatcttgcagaggctaccgggatgtgtcagtcgtgatctcattgatcagttgacggttgagttttgctacctaaattctaaagcaaatcgaaagaaacttgcgcgtgccttattcaatgttaataggacttcactggaactgttgccttactattctcgtttggttgcgacactatcaacttgtatgaaagatgttccaagtatgcttctgtctatgcttgaagaggagttcaactttttaataaataagaaggatcagatcaacattgaaacaaaaataaaaaatatacggtttattggggagttgtgcaagttcaagatggctcctccagctcttgtttttagctgtttgaagtcctgccttgatgatttcagtcatcataatattgatgtggcttgcaaccttctcgagacttgtggccgatttttgtaccgctcacctgaaactacgattcgcatggctaacatgctggagatactgatgagattgaaaaatgttaagaatttggatccacgtcacagtacacttgtagaaaacgcttactacctttgtaaaccacccgaaagatctgcacggatatcaaaagttcggccacctttgcatcaatacataagaaagttgcttttctcagatcttgacaaatcaagtgttgaacatgttttgcgccaactacgcaaagttaccttgggcagaatgtcaacaataccttctgaagtgctttctaaaggttcacaaaggaaagtacagccaagttcatctgattgctcttctcactgctagtctcagccgctatcatgatgactttgctgtcgcagtggtagatgaggttttagaagagataagggttggattggagttgaatgactatgggatgcaacaaaggcggcttgcccacatgcggttccttggagagctatacagctacaagcatatagattcatcagttgtttttgatacactgtaccttatcattgtgtttggtcatggaacacctgaacaagatgtgttggatccaccagaagattgcttcagaatcaggttgatcattacacttttacagacctgtggtcactatttcagtaagggatcttcaaaaaggaagctggacaaattcttgctacactttcaaagatacattattagtaaagggcccttaccactcgacatagaatttgacattcaggatttatttggagagctacgaccaaacatgtctaggtatttatcaatcgaggaacttgttgctgcgttagttgagcttgaagaaaatgagcgctcagccccagtagaaaaggttgaaaatgaaagacactcggacaatgaatctcataaaagacaggcacgagatgctggtccatctgtgaatggtggaagcgctgcaaatggaattgaggaaaatggcaaggatcatgaaatagcagatagtgagagctattcagatagtggcagcattgatggacgggaagatgaggatatattatctgaggataaatcaaatgatggctcagataatgaaggcgacgatgaagatgatggcattcctgttggttctgatgaagatgaaaatgttgaggttagacagaaagttatgaaggttgatcctaaggagcaagaagactttgatcgagagctcaaagcccttcttcaggagagcttggagtcccgcaaatcagaggcccgttcaaggctccctctgaatatgatggtaccgatgaatgtccttgaaggttcatcaaaagactcgagggccacagaatctgagagtggagaagaaacagtagatgaagagggtggcaatgctgggggtagcagcaaggtgcgcgttaaggtgctaatgaagaaagggcacaaacaacagacgaggcaaatgttaattcccgctgatagttcaatcgttcgaagcacgaagcagcaagaagctgccgagcttgaggagaagcagagcattaagcggaggatccttgaatacaatgaaagggaggaggaagaactgaatggagcatcacaaatggggaactggggtcaaggagctaccaacaccagcagtatcagatcaggtggccggggcagctgggatggttcagcacggggaggtggtcgacaacgacaccacatcgccggttctggtggtttctatcacagttatggcaggagaagatgagtttgtcctgatgggaggtggttggcagaggcgccacactgtgggttcttgtggtttctatcagttgttgcaggagaacagttagctgtgtgagctattttgtcctgagcttttttttggcagggccatgcttctctctatttaaccgcctaacgatcagattaacagggaagaaatttcggggaggttaacacagcttgatggacaattgcttccaccaccctaatctgaaagataagataattctaccactgatgggagatagcaatgccttgaaggagctatttttctggtggcccgaatggcttgagttgcttggtagttatgggcttatggctgtacctggagagcatagataccccggttgctcatgtacatataataataacataatttggcaacgagtgtgagtcgtttggagattgtgtgcgcacttgtatctgagtatggatctgatggtggtacttgcatagtttagatgtgcatactgtttcgacgccatgtgtgtgtatggggcacctgataaaaaaattactgtttgattcccatttagttatgcgtgcaggagtta

SEQ ID NO: 55357 - DNA, 2928 bp, Zea Mays
gttggtgttgcccatccaaatttctagactagaggaccttggcaaacgcccaaacagacttgactgtgtagaaccactgaaccagcgtcgtcttctcgagttgaagtgtgctgcctgttcacccctgcgtctttccctcccctgttacgattatttgcctattgggtgaccgccgacgccgccccacgccaggtgctcaggtcttcggcgggccctttgctggcgaggagcaccaaccctatacggaggatattttggttgcgcataacaagttggatagttctgggttttcgctctgaacaaaatggacaatgctcagagtgagaaccgaattgataccaagcaagatgatgatgtgcgccagatcaaacatgatgatgaggaggctcgccttgaagaatataaaaagatcattgatcaaaagacttccctccgccggagcaacctaaaccctgaaaggcctgatgcaaactacctgagaaccctggactccagtatcaagcgaaatacaacagttataaagaagttgaagacaataaatgatgagcagaaggatgggctaatggatgagttaaaaagtgtgaatttgagcaaatttgtcagcgaagcagtttcttatatttgtgaggccaaacttcgctctgctgatatacaagctgctgttcaggtttgctcactccttcatcaaagatacaaggacttctctccttgtcttatacaaggtctactgaaggtcttctttccgggaaaatctgtagatgacttggatgcagataaaaattcgagagccatgaagaagagaagcacactgaaacttttgattgaactgtattttgttggaattgtcgaagatgctagcatatttgtaaatattataaaagatcttacatcagcggaacatttgaaggaccgtgaaggaactcaaaccaacttgtctcttctatctacctttgctcgtcaagggaagttttttttagggctacaacctcatggtcaagaagcttatgatgagttctttaaggagctaaatgttaccgctgagcagaagaagttctttaagaaagccttgaactcttattatgatactgtagctgaactactgcaatcagaacatgtgtctcttcgtctaatggaggcagagaatgcaaaagttttaagtgccaaaggtgaactaagtgatgagaacacagcctcatatgagaaactcaggaagtcttttgatcagttactacgtggtgtatcctcgttggctgaatctcttgatatgcagcctccagtgatgccagatgatggaaatacaacaagagttactacaagaactgatgccttgccttcttctggaaaagattcatctgcattggaacctatctgggatgatgaagataccaaagctttttatgaatctttacctgatctcagagcatttgtgccggctgtattactgggagaggttgagccaaagtcgaatgagcaacatgctaagggccgtgagcaatctagtgagtccacttcagaacaagagactgaactacatgacgattttcaaacttctgcaactgaacatcaactagaagttaaattagatggtggagtgaaagagagtgatgacaaagataaagagaagggaaaggatggagaaaaggaaaaatctaaggagaaggatctggataagaaaaatgacagagagaaggagaaaggaagagccatggacggtgcaagtctggataacatcttgcagaggctaccgggatgtgtcagtcgtgatctcattgatcagttgacggttgagttttgctacctaaattctaaagcaaatcgaaagaaacttgcgcgtgccttattcaatgttaataggacttcactggaactgttgccttactattctcgtttggttgcgacactatcaacttgtatgaaagatgttccaagtatgcttctgtctatgcttgaagaggagttcaactttttaataaataagaaggatcagatcaacattgaaacaaaaataaaaaatatacggtttattggggagttgtgcaagttcaagatggctcctccagctcttgtttttagctgtttgaagtcctgccttgatgatttcagtcatcataatattgatgtggcttgcaaccttctcgagacttgtggccgatttttgtaccgctcacctgaaactacgattcgcatggctaacatgctggagatactgatgagattgaaaaatgttaagaatttggatccacgtcacagtacacttgtagaaaacgcttactacctttgtaaaccacccgaaagatctgcacggatatcaaaagttcggccacctttgcatcaatacataagaaagttgcttttctcagatcttgacaaatcaagtgttgaacatgttttgcgccaactacgcaaagttaccttgggcagaatgtcaacaataccttctgaagtgctttctaaaggttcacaaaggaaagtacagccaagttcatctgattgctcttctcactgctagtctcagccgctatcatgatgactttgctgtcgcagtggtagatgaggttttagaagagataagggttggattggagttgaatgactatgggatgcaacaaaggcggcttgcccacatgcggttccttggagagctatacagctacaagcatatagattcatcagttgtttttgatacactgtaccttatcattgtgtttggtcatggaacacctgaaatgtgttggatccaccagaagattgcttcagaatcaggttgatcattacacttttacagacctgtggtcactatttcagtaagggatcttcaaaaaggaagctggacaaattcttgctacactttcaaagatacattattagtaaagggcccttaccactcgacatagaatttgacattcagaccgaatcatgaagtcaaac

SEQ ID NO: 55358 - DNA, 2527 bp, Zea Mays
cagggaagttgttgatggcaccatgctggcatgttcatgctagaaacatggtcttcttccagtttttaacattagccaaataagctacttagtaaataatagaaaaatgggaacaaccaagaatggagatgatgctttaattaccgaaaaacagaataatgggacagtgctcttccttcatatcttcacgatgggctgagtccaattttttgtttccatttgtgtactctgtaaaaaaagttaggcttattttataacttaggaccaactcttgtagtaggcttgtcatcctctggttactgaaaaaataaactgtaacatcagagtcagaatctgcaaggaattttaacgaattaacgagctacttgatcgataactcagcattaatggtgatagatactcatttgctccactgtactgtaccactggatgaagatgagccacttcctaatccgcttgagcttctagccggggaatccctctcaatctccactgactggtaattcacatattcttttgcaactacacaatagactacaacatgttcaaagagcaaaggtgtcaccatgaatatacatattatcatcatcatgtgatatatatcagttaagttgtaggcttgtaaccagatcttcaagacccacaacaatgcatagttcaggattgaaacgataacacatgacaaaggagtttagactcttggttgataaccaagattgatgttgagttgttctcctttcagacaaatcctcacaaaaatgatgttattgttactataacattacgagactacgactcagagcattttcagacccaaacaacatgatcatgagaaagacctaccaaagccaatagcgccgcctcactcaggaaagtcagaaaatcgctacacgaggtgtaccttgacaaggagtttgaggttcagtatttcgaactcaatagtggaccgttgcaaacattttaaaaacaccaagtggatgtgagtgtaatcatataaattatacttagctatgcctcaaactgatccatgaaactaaacataaagttcataaaatacaattttcaatttagttccctacttggaaagatctgctttatcgaatacatgctttatcacatatacccaccctactataaaagagaaatatgaataaacgcaatacattgctagcatggataacatgaagatcagctatgagttcaacctacagaaaagaaaagaaaaaactctgaatttagaagaaagcaaaaacaaaagctagcacaaagaaatctaggagtaatcacttccactacttgtccaaaagactggcagagtttttgagatcatcataagagacatcagaggagatgcccccaacataaaccttttttttacaagtgatgatacggaacgttaattgcacatgactggtgcagcaaactcaacaaggtggtaatatgtatacctacaagtcactactaaaacattagtgcatagttaagtttagcaatgtaatattatgcggggaacatggaaagcaacatgacatgtgcttctatatgtaattgacaatgtcttggcttgcaataatcatgttcaaatctgacccatcgtgtcactgatactgaaaagttaatgctggatggaaacatcaaattttaagtagcagtcccttttcagtattctcaaacaggagtcaatagtaccctcttcttacgaccaacatatgcccccctttggtggggattccattacagctcctggagctgtttttagctccttgtaccaagaaggtgctgctgtagcagctccattcatggagctccataaaccataaagtgcgctttcacgagggacaggtgcatggtggagttggaaaaaggagcttccacgcgctacatggacaggcccacggcccaccacacaaagtacattttcacccctaaagttcacaagaaattagaaagaatccgccataaccccaattccttatctgctcgtttcttggcaaagttattggttgttgataatttttattttaaaatttgaaaagtactcaaatataaaagaacatctgcaaccatataatcaaattttacaatacccaagggcatcttggacattgcccctctcagctatttataagagatatcagaagctgttcaaccaaacgttttctcaaaacaacctcagcttcaccagataatctgctccagcattgaagccacagctcaagttgcaaccaagtatccaaaaactaactacttccacttccaacgtggacttacagttacagaatgttttctcttgtgtttagtaatcagcagagaagttaatgattacttatttctggaagaaaaggtaacgactacaagccctatactactacgtctcgcaagagaactgtaaaaatatacagtaacaataaacacactaaaggaaaattacctggagaaggtccagaaaattacactggtagacacgtcagacagagatgatctgcttacagataatatgctcttccttgttgctaaaggaactgag

SEQ ID NO: 55359 - DNA, 2032 bp, Zea Mays
ggcaacggcccagagtcttgccggctttgctcccccgccgcggcgccgcgagcgcgtatgtataacgcgacccccctccccagtccccccagcggcaaggcggcaaccgttctcccgcgtcccgcactcccgccccttttccttttgctccttccttcctcgggaagcctagggcttaggctttaagcgccgcgatgtacggcggcggcggcggcggcgggcactacgacggaggcagcggtggcgccgggaacgctaacgcgctcttcggcggcgggggcttcatgccctcacagtccacggtggtcccggagaacagcggcctctctaagggtcggagcgcgcagacgctgctcccgctcaccgtgaaacagaccatggacgcggcgcaaaccagcggtgacaggtctaatttcgccatcaacggcgttgaggtgtctacggcttgttggacgcatgctaggtaaggttgagcgtgtcacagatgttgtattcactcttgatgatggtactggcaagatagatgtgaatcgctgggaaaatgaggcttccgatgctaaggagatggctgatgctaataacgagaactatgtcatagtcattggcggtttgaaaggttttcaaggaaagcgccatgtagttgcctatgctgtgcggcgtgtgacaaacttcaatgaaataacctgtcactttctgcactgcattcaggtgcatatggagctcacagggttaaaggttgatggaaactacatatccaacttggtcttgagtgtttttcatgacccatctgtcatggaccaggagcatggactgcacatcaaagatgtcatagatcgtctcaaactaccagatgatgtagtcagtgcggccatccaaggtcatgttgatgtgggcaacatttacaacacaattgatgacttccactacaaatctgtccggaatggatgaccacgttgcaagtccagcgttcaggctccgtgtaggtatggagccgtttcaaggaagaagaaatgtaaaccctcttcaggatcgcctatattttgcagataggcttcatggtcaacagcttagcatatcggtttaggtgtgtattgctctcatatgtaatgatacataagatgtgagtagactaggtctacctgcaggacatcagtccgttcctacggaaatttgttatgaacgttttacattctaagacctatataaccgtgaagcacgcaaatcaagaatagaaccgccaaaaaaatggcagagggacattgagtaaaacttctcctgaaacgaactgactatacggacgaagatttgttcacctcacagcaaaacctcttctcttctagtacaattcagtatctcggtgattaaatttttgaaccaataattacaggatgagagcgtgtgcccacttgtcattctatgtaaaatcatgacaagccgaggaagctgtccaccttggcattggtcgatctggacaaaaacttcatgcaaattggaggctgcactttggccagagccagaatggactgcggcagggtccagatgccatctccgcagatcagccccgacgcgaccgcaggtccgaacgcgtccgctttcgccttgttcagccgctcccacacgaagaggatcatgctgcccagaaacatgtcgatggcgaagtaggatccgatgtagaacgggatcgccatcgccattggcagcgggataaacctcgacaccctgtgcggggtcaggtccctcgcaaggttgatggcgatcgctgccgcaaagaaaatgtagcagagggtgaggcagttttctgggagcgagccaaagccatccacgccgaggatggccatgttgcggtacacgatggcatagggcgccggatactcggtgccactctcgccaatgtcaccgaacgccttgtagaagagccagaagacgcagggcccgatgacacaccccatcccggtgccgatcacctggctgacaaacatagacctcggtgatgccagcgtcaggtacccggtcttgaagtcttgcatcaggt

SEQ ID NO: 55360 - DNA, 2140 bp, Zea Mays
ggcacgatacgtgccagcaagccgggggctggcaccaggcccgcggttggcaacggcccagagtcttgccggctttgctcccccgccgcggcgccgcgagcgcgtatgtataacgcgacccccctccccagtccccccagcggcaaggcggcaaccgttctcccgcgtcccgcactcccgccccttttccttttgctccttccttcctcgggaagcctagggcttaggctttaagcgccgcgatgtacggcggcggcggcggcggcgggcactacgacggaggcagcggtggcgccgggaacgctaacgcgctcttcggcggcgggggcttcatgccctcacagtccacggtggtcccggagaacagcggcctctctaagggtcggagcgcgcagacgctgctcccgctcaccgtgaaacagaccatggacgcggcgcaaaccagcggtgacaggtctaatttcgccatcaacggcgttgaggtgtctacggcttgttggacgcatgctaggtaaggttgagcgtgtcacagatgttgtattcactcttgatgatggtactggcaagatagatgtgaatcgctgggaaaatgaggcttccgatgctaaggagatggctgatgctaataacgagaactatgtcatagtcattggcggtttgaaaggttttcaaggaaagcgccatgtagttgcctatgctgtgcggcgtgtgacaaacttcaatgaaataacctgtcactttctgcactgcattcaggtgcatatggagctcacagggttaaagatctattcttcagctgcaacatatggaggagtagcccatgccccatcacagccaaatccggttgatggaaactacatatccaacttggtcttgagtgtttttcatgacccatctgtcatggaccaggagcatggactgcacatcaaagatgtcatagatcgtctcaaactaccagatgatgtagtcagtgcggccatccaaggtcatgttgatgtgggcaacatttacaacacaattgatgacttccactacaaatctgtccggaatggatgaccacgttgcaagtccagcgttcaggctccgtgtaggtatggagccgtttcaaggaagaagaaatgtaaaccctcttcaggatcgcctatattttgcagataggcttcatggtcaacagcttagcatatcggtttaggtgtgtattgctctcatatgtaatgatacataagatgtgagtagactaggtctacctgcaggacatcagtccgttcctacggaaatttgttatgaacgttttacattctaagacctatataaccgtgaagcacgcaaatcaagaatagaaccgccaaaaaaatggcagagggacattgagtaaaacttctcctgaaacgaactgactatacggacgaagatttgttcacctcacagcaaaacctcttctcttctagtacaattcagtatctcggtgattaaatttttgaaccaataattacaggatgagagcgtgtgcccacttgtcattctatgtaaaatcatgacaagccgaggaagctgtccaccttggcattggtcgatctggacaaaaacttcatgcaaattggaggctgcactttggccagagccagaatggactgcggcagggtccagatgccatctccgcagatcagccccgacgcgaccgcaggtccgaacgcgtccgctttcgccttgttcagccgctcccacacgaagaggatcatgctgcccagaaacatgtcgatggcgaagtaggatccgatgtagaacgggatcgccatcgccattggcagcgggataaacctcgacaccctgtgcggggtcaggtccctcgcaaggttgatggcgatcgctgccgcaaagaaaatgtagcagagggtgaggcagttttctgggagcgagccaaagccatccacgccgaggatggccatgttgcggtacacgatggcatagggcgccggatactcggtgccactctcgccaatgtcaccgaacgccttgtagaagagccagaagacgcagggcccgatgacacaccccatcccggtgccgatcacctggctgacaaacatagacctcggtgatgccagcgtcaggtacccggtcttgaagtcttgcatcaggt

SEQ ID NO: 55361 - DNA, 2086 bp, Zea Mays
cggcacgatacgtgccagcaagccgggggctggcaccaggcccgcggttggcaacggcccagagtcttgccggctttgctcccccgccgcggcgccgcgagcgcgtatgtataacgcgacccccctccccagtccccccagcggcaaggcggcaaccgttctcccgcgtcccgcactcccgccccttttccttttgctccttccttcctcgggaagcctagggcttaggctttaagcgccgcgatgtacggcggcggcggcggcggcgggcactacgacggaggcagcggtggcgccgggaacgctaacgcgctcttcggcggcgggggcttcatgccctcacagtccacggtggtcccggagaacagcggcctctctaagggtcggagcgcgcagacgctgctcccgctcaccgtgaaacagaccatggacgcggcgcaaaccagcggtgacaggtctaatttcgccatcaacggcgttgaggtgtctacgattaggcttgttggacgcatgctaggtaaggttgagcgtgtcacagatgttgtattcactcttgatgatggtactggcaagatagatgtgaatcgctgggaaaatgaggcttccgatgctaaggagatggctgatgctaataacgagaactatgtcatagtcattggcggtttgaaaggttttcaaggaaagcgccatgtagttgcctatgctgtgcggcgtgtgacaaacttcaatgaaataacctgtcactttctgcactgcattcaggtgcatatggagctcacagggttaaaggttgatggaaactacatatccaacttggtcttgagtgtttttcatgacccatctgtcatggaccaggagcatggactgcacatcaaagatgtcatagatcgtctcaaactaccagatgatgtagtcagtgcggccatccaaggtcatgttgatgtgggcaacatttacaacacaattgatgacttccactacaaatctgtccggaatggatgaccacgttgcaagtccagcgttcaggctccgtgtaggtatggagccgtttcaaggaagaagaaatgtaaaccctcttcaggatcgcctatattttgcagataggcttcatggtcaacagcttagcatatcggtttaggtgtgtattgctctcatatgtaatgatacataagatgtgagtagactaggtctacctgcaggacatcagtccgttcctacggaaatttgttatgaacgttttacattctaagacctatataaccgtgaagcacgcaaatcaagaatagaaccgccaaaaaaatggcagagggacattgagtaaaacttctcctgaaacgaactgactatacggacgaagatttgttcacctcacagcaaaacctcttctcttctagtacaattcagtatctcggtgattaaatttttgaaccaataattacaggatgagagcgtgtgcccacttgtcattctatgtaaaatcatgacaagccgaggaagctgtccaccttggcattggtcgatctggacaaaaacttcatgcaaattggaggctgcactttggccagagccagaatggactgcggcagggtccagatgccatctccgcagatcagccccgacgcgaccgcaggtccgaacgcgtccgctttcgccttgttcagccgctcccacacgaagaggatcatgctgcccagaaacatgtcgatggcgaagtaggatccgatgtagaacgggatcgccatcgccattggcagcgggataaacctcgacaccctgtgcggggtcaggtccctcgcaaggttgatggcgatcgctgccgcaaagaaaatgtagcagagggtgaggcagttttctgggagcgagccaaagccatccacgccgaggatggccatgttgcggtacacgatggcatagggcgccggatactcggtgccactctcgccaatgtcaccgaacgccttgtagaagagccagaagacgcagggcccgatgacacaccccatcccggtgccgatcacctggctgacaaacatagacctcggtgatgccagcgtcaggtacccggtcttgaagtcttgcatcaggt

SEQ ID NO: 55362 - DNA, 978 bp, Zea Mays
ggcaacggcccagagtcttgccggctttgctcccccgccgcggcgccgcgagcgcgtatgtataacgcgacccccctccccagtccccccagcggcaaggcggcaaccgttctcccgcgtcccgcactcccgccccttttccttttgctccttccttcctcgggaagcctagggcttaggctttaagcgccgcgatgtacggcggcggcggcggcggcgggcactacgacggaggcagcggtggcgccgggaacgctaacgcgctcttcggcggcgggggcttcatgccctcacagtccacggtggtcccggagaacagcggcctctctaagggtcggagcgcgcagacgctgctcccgctcaccgtgaaacagaccatggacgcggcgcaaaccagcggtgacaggtctaatttcgccatcaacggcgttgaggtgtctacgattaggcttgttggacgcatgctaggtaaggttgagcgtgtcacagatgttgtattcactcttgatgatggtactggcaagatagatgtgaatcgctgggaaaatgaggcttccgatgctaaggagatggctgatgctaataacgagaactatgtcatagtcattggcggtttgaaaggttttcaaggaaagcgccatgtagttgcctatgctgtgcggcgtgtgacaaacttcaatgaaataacctgtcactttctgcactgcattcaggtgcatatggagctcacagggttaaagatctattcttcagctgcaacatatggaggagtagcccatgccccatcacagccaaatccggttgatggaaactacatatccaacttggtcttgagtgtttttcatgacccatctgtcatggaccaggagcatggactgcacatcaaagatgtcatagatcgtctcaaactaccagatgatgtagtcagaaccagactggcagcttgttttcctgcacatcgtttcttcaagttcttgg

SEQ ID NO: 55363 - DNA, 1964 bp, Zea Mays
cagctctcggcttcccaaacggccaaacgtggaccgtcatgggcgcaaaggccgagcacgtggccgtctgccccgcggcggccaccgttgtcctcgtgccgttcccggcgcagggccacatctcccccatgctccgcctggcgcgcgccctcgccgagcgaggcgtcgcggccatcgtcgccgtgcccgacttcgtctaccgccgactcgtcagcgcctgcgggcaggtgcgcacccgcgtggaggtggagctcgcatccatgcacagcggagtcccagacgacggcgtgggcgagccccccggcttcgccggcttcgcgcgcgccatggagcaccacatgcccaccagcctggaggcgatgctgacggctcagcgcggccgcggcgtggcgtgcctcgtcgccgacgtcctggcgtcgtgggcgatccctgttgcgacccggtgtggcgtgtcggccgtgggcttctggccggcgatgctggcaacttaccgcgtcgtggcggccatcccggagctcgtcgacaaggggttgatctcagattacggtacgtattatgtgccatgatctacgacgcattgttccgttgcattcttctagcaatctgcctctgctccttgttgatctgaggctctgagcctgcaactgtgcgctagcttcacatacgacagatgcatgtaggcattcccttcatggcttcatgtataccaaacctgcaacttctcttgttatttgttcacatgcatgtaggcattcccatatcgaccaaaaggttagacattggtgaagaaggcaaagtaaacggagaccaccgcaccagcgacagcctccacgtattgcctgcgcaactaggcctgagcaccgcggagttgccgtggctcgtgggcgacgcggcgtcccagaaaacaaggttcaccttctggcttcagaccatggagcgtgcgaagagtttccgctctatcctcgtcaacaccttccccgtcgaagccaccgccgccgacgccggcactgtgtcacagcaacgggttcttcaggtcctccaagtcggaccactactgtcactgccacccaaaggcttcgacgacgacggttgcattaccaaaggcgacgatctgtcgcatgacagtacatccaagaacccaagcatgtggcaggcggatgagacctgcgtggagtggctagacgcgcagcgtgcggggtcggtggtgtacgtctcgttcggcagctgggtctcgtcgatcgggcgggacgccatcaacgagctcgcgctcggcctggcggccaccggccggccgttcctgtgggcgcttaaggacgagccgtcgtggcgagaaggtctccccagccagtacgcggaggccatacagaacggggtgcgtctgctgtgctacccagtgtccggtgaccagttcatcaactgcgcttacatcgtcaaggtgtgggagacggggatcaggcttcctagcaccaacagaaacgtcgtggaggattgcatcgagaggattatggaaggagaagagggaaggcgtatgcaggtgaatgtggatgagatgagagaaagagtcgtgatgggttttgacagacttgcccgttactcggctcctagctactcactccgttctgaaatatactgtaggtttctaaagtttatactgaaatataatacattctatataatgactatttggcaaaaattatggaaaagaaaatcataatttgaggaggaactccttagttgaaagaatccacaaacacgggagtacagtacttttagagttttagaaaaatgtcatgttttttaaaatactactataatgctagtgtgttgcgagggcaacactaatcatatttgatggtataatgcaagtgtgcaacagttgtatgacacacgagggtctaattagtagttacaagtctgtgtgacagatcttcttcaaaagaaataaatttaaaattaaaatggac

SEQ ID NO: 55364 - DNA, 2195 bp, Zea Mays
gcgacgcacggcgccttttcttttaaatcgccaaagtccaacaccggcgttgccacccgcagctctcggcttcccaaacggccaaacgtggaccgtcatgggcgcaaaggccgagcacgtggccgtctgccccgcggcggccaccgttgtcctcgtgccgttcccggcgcagggccacatctcccccatgctccgcctggcgcgcgccctcgccgagcgaggcgtcgcggccatcgtcgccgtgcccgacttcgtctaccgccgactcgtcagcgcctgcgggcaggtgcgcacccgcgtggaggtggagctcgcatccatgcacagcggagtcccagacgacggcgtgggcgagccccccggcttcgccggcttcgcgcgcgccatggagcaccacatgcccaccagcctggaggcgatgctgacggctcagcgcggccgcggcgtggcgtgcctcgtcgccgacgtcctggcgtcgtgggcgatccctgttgcgacccggtgtggcgtgtcggccgtgggcttctggccggcgatgctggcaacttaccgcgtcgtggcggccatcccggagctcgtcgacaaggggttgatctcagattacggcattcccatatcgaccaaaaggttagacattggtgaagaaggcaaagtaaacggagaccaccgcaccagcgacagcctccacgtattgcctgcgcaactaggcctgagcaccgcggagttgccgtggctcgtgggcgacgcggcgtcccagaaaacaaggttcaccttctggcttcagaccatggagcgtgcgaagagtttccgctctatcctcgtcaacaccttccccgtcgaagccaccgccgccgacgccggcactgtgtcacagcaacgggttcttcaggtcctccaagtcggaccactactgtcactgccacccaaaggcttcgacgacgacggttgcattaccaaaggcgacgatctgtcgcatgacagtacatccaagaacccaagcatgtggcaggcggatgagacctgcgtggagtggctagacgcgcagcgtgcggggtcggtggtgtacgtctcgttcggcagctgggtctcgtcgatcgggcgggacgccatcaacgagctcgcgctcggcctggcggccaccggccggccgttcctgtgggcgcttaaggacgagccgtcgtggcgagaaggtctccccagccagtacgcggaggcggtcgccggccgtggcaagatcgtcgcttggtcaccgcaggaagacgtcctccggcacaaggccgtcggctgctacctcacgcactgcggctggaactccacgctggaggccatacagaacggggtgcgtctgctgtgctacccagtgtccggtgaccagttcatcaactgcgcttacatcgtcaaggtgtgggagacggggatcaggcttcctagcaccaacagaaacgtcgtggaggattgcatcgagaggattatggaaggagaagagggaaggcgtatgcaggtgaatgtggatgagatgagagaaagagtcgtgatgggtgaggccagatgtgcagcaaacagaaacctcgactcttttgttgacgaaatcatgaaaaacgaaaatttattagcgcgacgaccctgtccattaacatgagctcatgcatgagctagaagcttgtaagatatatgtatatacggtacaagttcgtggacagatttagtaccaaggactattcagaattgtttatgtttgagtgccctttctctatttgttttctaacacagtaataatctacgtactttgtgatctctatcaggttttgacagacttgcccgttactcggctcctagctactcactccgttctgaaatatactgtaggtttctaaagtttatactgaaatataatacattctatataatgactatttggcaaaaattatggaaaagaaaatcataatttgaggaggaactccttagttgaaagaatccacaaacacgggagtacagtacttttagagttttagaaaaatgtcatgttttttaaaatactactataatgctagtgtgttgcgagggcaacactaatcatatttgatggtataatgcaagtgtgcaacagttgtatgacacacgagggtctaattagtagttacaagtctgtgtgacagatcttcttcaaaagaaataaatttaaaattaaaatggac

SEQ ID NO: 55365 - DNA, 1977 bp, Zea Mays
caaccgcattaccgcaccactcctctataaatacgcacacatccctcctcgctaccctcctgtcttccccagatccaaattgtgcagggtaggcagctcgtctcagcgattaccagccgcagacacaagagcaccttgctgtgaacttgtaacaggtttgaacttcgaaggaaaagataattttggtgctgtgattgatttcactgtgaggagtgaaatgaggctaagtattgggcaagtccatcgaaatgttcttgcgctggcatcttctcggtcatgttttgttctgggagatcgtgtttcgttcaggatgctgtcccaaccacgggtagctggatttcatcagactgcttggcgtggtagtcaaattttggaagataacaggggaggaccattgactcttgctagcctagaagtgcaaagcagggttgaatatggaaaaaaggggaaaatggaacgaactggaggtccaaagccaagttcaagagcttcttccctctatgtgaaaccaaaggtttcttcaaatgtcaaaccagcaaagagtgccttgatgaagccagctgggataaagaagacactgaaggtagatgaggctctgttttcggccaagtcatttgaagaacttggtttgccacctttgcttgttgaccagttgaacaaggaaggtctgactgccccaactgaggtccaatccgcagcaattcctataatagcacaaaagcatgatgttgtgatccagtcatatactggctcagggaaaactcttgcttatcttcttccaattctttctgatataggccctctgaagaggactatggaacaagaccattctgagaaaagatcaggtatagaagcagtcatcgttgctccttcgagagaattaggaatgcagattgtgcgagaagtggagaagattttgggtcctaatgacaaaagactggtccagcaacttgttggcggagctaatcgttccaggcaggaagaagcattgaagaagaacaaaccaatcattgttgtcggaacacctggccgtatttctgaaatttctgcagcagaattttggagcatgttggaaggagacctggaggcacatctagggatattcttggcccacttgcgagacgatctgagcgtcagactatcctggtttctgcaacaataccattttcagttatacgagcagcaaggagttggggtcatgatccagttctcattagagctaaaagtgtagttccacttgattcaatcactgtgccaagacctgcgttatctcaaagtgacgctaaccccagttcgtcatcgcagtcagtgaaccaagctgctgttggcagcttgccgccatctttggaacactactattgtacggccaaggcgcagcacaaggttgacacattacggaggtgcatccatgctctggaagcacagacagtgattgcatttatgaacaacaccaagccactgaaggatgttgtgtttaagttggaggcccgtggtatcaaagccactgagctacatggagaccttggaaagcttgcaaggtcgacagttttgaaaaagttcaaggatggtgaattcagagttctcgttacgaatgagctgtctgccagaggactggacgtgccagaatgtgaccttgtggttaatctggaccttccaactgactccacacattatgctcacagagctggaagaactggacgtcttgggcggaaagggatcgtggtcacaatatgcgaagaaagcgagggatttgttgtaagaaaaatgcgcaagcagttagatgtggccatcaagccatgcgagttcactgaaggcgagcttgttgtccacaaggaggaagatgtggaataaaatcttcataatgcacatgactacttctttttacctgtagcgtttttgcaatagtttcgtatttcaaaatgctggcctctggccctttgcttgtactaccgaattttcatactgtcggggttaaag

SEQ ID NO: 55366 - DNA, 1875 bp, Zea Mays
caaccgcattaccgcaccactcctctataaatacgcacacatccctcctcgctaccctcctgtcttccccagatccaaattgtgcagggtaggcagctcgtctcagcgattaccagccgcagacacaagagcaccttgctgtgaacttgtaacaggtttgaacttcgaaggaaaagataattttggtgctgtgattgatttcactgtgaggagtgaaatgaggctaagtattgggcaagtccatcgaaatgttcttgcgctggcatcttctcggtcatgttttgttctgggagatcgtgtttcgttcaggatgctgtcccaaccacgggtagctggatttcatcagactgcttggcgtggtagtcaaattttggaagataacaggggaggaccattgactcttgctagcctagaagtgcaaagcagggttgaatatggaaaaaaggggaaaatggaacgaactggaggtccaaagccaagttcaagagcttcttccctctatgtgaaaccaaaggtttcttcaaatgtcaaaccagcaaagagtgccttgatgaagccagctgggataaagaagacactgaaggtagatgaggctctgttttcggccaagtcatttgaagaacttggtttgccacctttgcttgttgaccagttgaacaaggaaggtctgactgccccaactgaggccctctgaagaggactatggaacaagaccattctgagaaaagatcaggtatagaagcagtcatcgttgctccttcgagagaattaggaatgcagattgtgcgagaagtggagaagattttgggtcctaatgacaaaagactggtccagcaacttgttggcggagctaatcgttccaggcaggaagaagcattgaagaagaacaaaccaatcattgttgtcggaacacctggccgtatttctgaaatttctgcagcagatatgcatagaattttggagcatgttggaaggagacctggaggcacatctagggatattcttggcccacttgcgagacgatctgagcgtcagactatcctggtttctgcaacaataccattttcagttatacgagcagcaaggagttggggtcatgatccagttctcattagagctaaaagtgtagttccacttgattcaatcactgtgccaagacctgcgttatctcaaagtgacgctaaccccagttcgtcatcgcagtcagtgaaccaagctgctgttggcagcttgccgccatctttggaacactactattgtacggccaaggcgcagcacaaggttgacacattacggaggtgcatccatgctctggaagcacagacagtgattgcatttatgaacaacaccaagccactgaaggatgttgtgtttaagttggaggcccgtggtatcaaagccactgagctacatggagaccttggaaagcttgcaaggtcgacagttttgaaaaagttcaaggatggtgaattcagagttctcgttacgaatgagctgtctgccagaggactggacgtgccagaatgtgaccttgtggttaatctggaccttccaactgactccacacattatgctcacagagctggaagaactggacgtcttgggcggaaagggatcgtggtcacaatatgcgaagaaagcgagggatttgttgtaagaaaaatgcgcaagcagttagatgtggccatcaagccatgcgagttcactgaaggcgagcttgttgtccacaaggaggaagatgtggaataaaatcttcataatgcacatgactacttctttttacctgtagcgtttttgcaatagtttcgtatttcaaaatgctggcctctggccctttgcttgtactaccgaattttcatactgtcggggttaaag

SEQ ID NO: 55367 - DNA, 1914 bp, Zea Mays
caaccgcattaccgcaccactcctctataaatacgcacacatccctcctcgctaccctcctgtcttccccagatccaaattgtgcagggtaggcagctcgtctcagcgattaccagccgcagacacaagagcaccttgctgtgaacttgtaacaggtttgaacttcgaaggaaaagataattttggtgctgtgattgatttcactgtgaggagtgaaatgaggctaagtattgggcaagtccatcgaaatgttcttgcgctggcatcttctcggtcatgttttgttctgggagatcgtgtttcgttcaggatgctgtcccaaccacgggtagctggatttcatcagactgcttggcgtggtagtcaaattttggaagataacaggggaggaccattgactcttgctagcctagaagtgcaaagcagggttgaatatggaaaaaaggggaaaatggaacgaactggaggtccaaagccaagttcaagagcttcttccctctatgtgaaaccaaaggtttcttcaaatgtcaaaccagcaaagagtgccttgatgaagccagctgggataaagaagacactgaaggtagatgaggctctgttttcggccaagtcatttgaagaacttggtttgccacctttgcttgttgaccagttgaacaaggaaggtctgactgccccaactgaggccctctgaagaggactatggaacaagaccattctgagaaaagatcaggtatagaagcagtcatcgttgctccttcgagagaattaggaatgcagattgtgcgagaagtggagaagattttgggtcctaatgacaaaagactggtccagcaacttgttggcggagctaatcgttccaggcaggaagaagcattgaagaagaacaaaccaatcattgttgtcggaacacctggccgtatttctgaaatttctgcagcagatgaagtcgaccagcttctgtcttttaattaccgtgaagatatgcatagaattttggagcatgttggaaggagacctggaggcacatctagggatattcttggcccacttgcgagacgatctgagcgtcagactatcctggtttctgcaacaataccattttcagttatacgagcagcaaggagttggggtcatgatccagttctcattagagctaaaagtgtagttccacttgattcaatcactgtgccaagacctgcgttatctcaaagtgacgctaaccccagttcgtcatcgcagtcagtgaaccaagctgctgttggcagcttgccgccatctttggaacactactattgtacggccaaggcgcagcacaaggttgacacattacggaggtgcatccatgctctggaagcacagacagtgattgcatttatgaacaacaccaagccactgaaggatgttgtgtttaagttggaggcccgtggtatcaaagccactgagctacatggagaccttggaaagcttgcaaggtcgacagttttgaaaaagttcaaggatggtgaattcagagttctcgttacgaatgagctgtctgccagaggactggacgtgccagaatgtgaccttgtggttaatctggaccttccaactgactccacacattatgctcacagagctggaagaactggacgtcttgggcggaaagggatcgtggtcacaatatgcgaagaaagcgagggatttgttgtaagaaaaatgcgcaagcagttagatgtggccatcaagccatgcgagttcactgaaggcgagcttgttgtccacaaggaggaagatgtggaataaaatcttcataatgcacatgactacttctttttacctgtagcgtttttgcaatagtttcgtatttcaaaatgctggcctctggccctttgcttgtactaccgaattttcatactgtcggggttaaag

SEQ ID NO: 55368 - DNA, 763 bp, Zea Mays
ccttgattccttctgcttcagacgtgtccagcgacgacgagatcgactactccgtcgagcctgatttctacgaccccgacctagatgacgtcgatgagcggtgggtgagcagacagaggaaaggccgcacatctgacgccgtgcttagctgccccgcctgtttcactaccctgtgcttggattgccagaggcatgagaagtacgtaaaccagtaccgtgcgatgttcgttcgcaactgcaagatcaagactgaccaggtcctgcgagagggcaagagcaagaggaagaaacgcagaggaggaagggctggtgatccagctgccgcatctgaaggcgaaagcaaggggcagtcctaccaccccgtctgctgcgaggtctgctcaaccgaggttggagtgttggacgaggacgaggtgtaccacttctttaacgtgatccctagcaactcctgaatgccgtgaactgttgctctgtaggagtggtacgttcgtagtcgtagaccccaccaccatatacgcaagcttctgcgctacgccatctgtctcttatcgctgatcagcctgtacatcgggtatgtatctttacggatgttttgtttctgcagcatgatgcggttttgaaagggggtctccgcgagctctagctgtgatggctctttgttggtggccagcctgatctttgtcctgattggacgtgttcatgcttgctctagcagcaatgaatgattgttggatgaggtgtcaggtgtgtatgatgctgctaa

SEQ ID NO: 55369 - DNA, 1171 bp, Zea Mays
gtcaacgcgtcagcagcaactagcaaggccgccaagcggcccaggagtccaggacccaggccagctccaagcgaacagcctacgtacggctctatacctctcgccctctgagtctcgcgcggccatccgggctccggcttccagcatctaccaggcgtccttagaatacggtgcagcgagcagcaagtcgccgagcagccgagccaccgccgaacacagggcgccgccgagcagccgagccgccgccgagcgccgagtcttctctgataaagcggagaaattggtagcagaagcagctgggtatggttcacagttggttttgtttccggaagtctttgttggtggctacccacatggatctacctttggactggttgtcggcaatcgcactgccaagggaaaggaagactttcagaagtatcacgcatctgccatagatgtgcctggtccagaagtgtcccgcttatctgcattagctggaaaatataaggtgtttctggtgataggggtggttgagagggcaggatatacactttacaacacggtgctctccttcgatccactgggaaaatacctagggaagcaccgcaaggtcatgcctactgcactagaacgtgtattctgggggtttggagatggatctacaatacctgtctacgatactccgattggaaaaatgggtgctctcatttgctgggaaaacagaatgccacttctcaggacggccatgtatgccaaaggtattgagatatattgtgctcccacggttgattgcatgccaacttggctgtcttctatgacacatatcgcccttgaagggggatgctttgtgctgtcagcgtgccagttctgtcgtagaaagaactaccctccccctcccgagtacacattttgtggcctagaggaagagccatccccggaatccgttgtttgttctggagggagtgtcatcatctcaccattgggaacagtgttggcgggtcccaactacgaaagtgaggcccttctcactgctgacctggaccttggagagattgttcgagccaagtttgattttgacgtggtgggccactactcgcgacctgaggtgctgagtttagtggtgaagagcgatccaaagcccgccgtctctttcatctcagccgctgagtgcagatacgagagatctggg

SEQ ID NO: 55370 - DNA, 1477 bp, Zea Mays
cgcgtcagcagcaactagcaaggccgccaagcggcccaggagtccaggacccaggccagctccaagcgaacagcctacgtacggctctatacctctcgccctctgagtctcgcgcgggccgcaggccatccgggctccggcttccagcatctaccaggcgtccttagaatacggtgcagcgagcagcaagtcgccgagcagccgagccaccgccgaacacagggcgccgccgagcagccgagccgccgccgagcgccgagtcttctctgataaagcggagaaattggtagcagaagcagctgggtatggttcacagttggttttgtttccggaagtctttgttggtggctacccacatggatctacctttggactggttgtcggcaatcgcactgccaagggaaaggaagactttcagaagtatcacgcatctgccatagatgtgcctggtccagaagtgtcccgcttatctgcattagctggaaaatataaggtgtttctggtgataggggtggttgagagggcaggatatacactttacaacacggtgctctccttcgatccactgggaaaatacctagggaagcaccgcaaggtcatgcctactgcactagaacgtgtattctgggggtttggagatggatctacaatacctgtctacgatactccgattggaaaaatgggtgctctcatttgctgggaaaacagaatgccacttctcaggacggccatgtatgccaaaggtattgagatatattgtgctcccacggttgattgcatgccaacttggctgtcttctatgacacatatcgcccttgaagggggatgctttgtgctgtcagcgtgccagttctgtcgtagaaagaactaccctccccctcccgagtacacattttgtggcctagaggaagagccatccccggaatccgttgtttgttctggagggagtgtcatcatctcaccattgggaacagtgttggcgggtcccaactacgaaagtgaggcccttctcactgctgacctggaccttggagagattgttcgagccaagtttgattttgacgtggtgggccactactcgcgacctgaggtgctgagtttagtggtgaagagcgatccaaagcccgccgtctctttcatctcagccgctggtagggacgatgactatgtgcagacctaatgacaaacatatctttggtctttagcttccttatacggcaatcgcatgcatctgtataattgtgggtttccggaacgttgcacgttccgtcagaataataataaactgttatgtacaataaaatagtaacaataaggctttgttcggttattcccattatacatggattggacgagattggaaaaaatttaaaagaagtttgacttgtttgagatttaaactcacccaatctcactcaatctatatggattgagagctaactaaacaacctaatggatatctatatagattgagagc

SEQ ID NO: 55371 - DNA, 2498 bp, Zea Mays
cgcgtcagcagcaactagcaaggccgccaagcggcccaggagtccaggacccaggccagctccaagcgaacagcctacgtacggctctatacctctcgccctctgagtctcgcgcggtcagtcggtctctctcactctctcttgtctccaagtttgtaaccctagccgccaagcttgaagctccagccgtgctcgtgtagggccgcaggccatccgggctccggcttccagcatctaccaggcgtccttagaatacggtgcagcgagcagcaagtcgccgagcagccgagccaccgccgaacacagggcgccgccgagcagccgagccgccgccgagcgccgagtcttctctggtaaattaaacaggcttggataaattagtgtttcaatttagagttttggacagattgcttgtagggatttgaaaagattacttgcatggataaatggattttgtttgtacagatcgtatgtacagattgtgttaaaaatattatttgatgttgttggaatgttaatttgtgataaatttctgttagaatgatgtaattttagtgttgttgatttcacaatgtcaagtgtctatggcgtctccatgcaagtacacactacactggcaccgcgattgacagtcagaactttgattgcccgtccaataggtaccggtgggtgctattattattattttaatatttacatttaaattgaattatttttaattgttttatctactatataattctattcatttaattaagtaatcagatttatttgtattttaaatgttgtatttttaggttagctaaaagactaattttatattcgtttaaataatgtgactagagtgacttcggtacagacgacaaactttctccacacataccgcgccactccgccactcactgtgctgacggatggggtggtgctccccgtccacttcccggcagcttctctccacgacctcactcttcaccttcggcgcgggtctccttaccttcggcatccacctctcctacgtccacatcgagccccagcgcgctcgcacgctcgctcgggaccaattcgtccgtgactacctccgcaagaagcacgacaagtagcccgccttctgcggtccccaggtgattgcttggtagtcggagacgatggccctggtcccatcgaggtccgacagcgaggccttgatcccggaggtggagatgaatgccggcgccgaccagaccgcaacaacggcgcgggtcaccgtcgttcaggcgtcgtccgtgttctacgacacccctgcgactctcggtgcagcggagaaattggtagcagaagcagctgggtatggttcacagttggttttgtttccggaagtctttgttggtggctacccacatggatctacctttggactggttgtcggcaatcgcactgccaagggaaaggaagactttcagaagtatcacgcatctgccatagatgtgcctggtccagaagtgtcccgcttatctgcattagctggaaaatataaggtgtttctggtgataggggtggttgagagggcaggatatacactttacaacacggtgctctccttcgatccactgggaaaatacctagggaagcaccgcaaggtcatgcctactgcactagaacgtgtattctgggggtttggagatggatctacaatacctgtctacgatactccgattggaaaaatgggtgctctcatttgctgggaaaacagaatgccacttctcaggacggccatgtatgccaaaggtattgagatatattgtgctcccacggttgattgcatgccaacttggctgtcttctatgacacatatcgcccttgaagggggatgctttgtgctgtcagcgtgccagttctgtcgtagaaagaactaccctccccctcccgagtacacattttgtggcctagaggaagagccatccccggaatccgttgtttgttctggagggagtgtcatcatctcaccattgggaacagtgttggcgggtcccaactacgaaagtgaggcccttctcactgctgacctggaccttggagagattgttcgagccaagtttgattttgacgtggtgggccactactcgcgacctgaggtgctgagtttagtggtgaagagcgatccaaagcccgccgtctctttcatctcagccgctggtagggacgatgactatgtgcagacctaatgacaaacatatctttggtctttagcttccttatacggcaatcgcatgcatctgtataattgtgggtttccggaacgttgcacgttccgtcagaataataataaactgttatgtacaataaaatagtaacaataaggctttgttcggttattcccattatacatggattggacgagattggaaaaaatttaaaagaagtttgacttgtttgagatttaaactcacccaatctcactcaatctatatggattgagagctaactaaacaacctaatggatatctatatagattgagagc

SEQ ID NO: 55372 - DNA, 2230 bp, Zea Mays
cgcgtcagcagcaactagcaaggccgccaagcggcccaggagtccaggacccaggccagctccaagcgaacagcctacgtacggctctatacctctcgccctctgagtctcgcgcgggccgcaggccatccgggctccggcttccagcatctaccaggcgtccttagaatacggtgcagcgagcagcaagtcgccgagcagccgagccaccgccgaacacagggcgccgccgagcagccgagccgccgccgagcgccgagtcttctctggtaaattaaacaggcttggataaattagtgtttcaatttagagttttggacagattgcttgtagggatttgaaaagattacttgcatggataaatggattttgtttgtacagatcgtatgtacagattgtgttaaaaatattatttgatgttgttggaatgttaatttgtgataaatttctgttagaatgatgtaattttagtgttgttgatttcacaatgtcaagtgtctatggcgtctccatgcaagtacacactacactggcaccgcgattgacagtcagaactttgattgcccgtccaatagagtgacttcggtacagacgacaaactttctccacacataccgcgccactccgccactcactgtgctgacggatggggtggtgctccccgtccacttcccggcagcttctctccacgacctcactcttcaccttcggcgcgggtctccttaccttcggcatccacctctcctacgtccacatcgagccccagcgcgctcgcacgctcgctcgggaccaattcgtccgtgactacctccgcaagaagcacgacaagtagcccgccttctgcggtccccaggtgattgcttggtagtcggagacgatggccctggtcccatcgaggtccgacagcgaggccttgatcccggaggtggagatgaatgccggcgccgaccagaccgcaacaacggcgcgggtcaccgtcgttcaggcgtcgtccgtgttctacgacacccctgcgactctcgataaagcggagaaattggtagcagaagcagctgggtatggttcacagttggttttgtttccggaagtctttgttggtggctacccacatggatctacctttggactggttgtcggcaatcgcactgccaagggaaaggaagactttcagaagtatcacgcatctgccatagatgtgcctggtccagaagtgtcccgcttatctgcattagctggaaaatataaggtgtttctggtgataggggtggttgagagggcaggatatacactttacaacacggtgctctccttcgatccactgggaaaatacctagggaagcaccgcaaggtcatgcctactgcactagaacgtgtattctgggggtttggagatggatctacaatacctgtctacgatactccgattggaaaaatgggtgctctcatttgctgggaaaacagaatgccacttctcaggacggccatgtatgccaaaggtattgagatatattgtgctcccacggttgattgcatgccaacttggctgtcttctatgacacatatcgcccttgaagggggatgctttgtgctgtcagcgtgccagttctgtcgtagaaagaactaccctccccctcccgagtacacattttgtggcctagaggaagagccatccccggaatccgttgtttgttctggagggagtgtcatcatctcaccattgggaacagtgttggcgggtcccaactacgaaagtgaggcccttctcactgctgacctggaccttggagagattgttcgagccaagtttgattttgacgtggtgggccactactcgcgacctgaggtgctgagtttagtggtgaagagcgatccaaagcccgccgtctctttcatctcagccgctggtagggacgatgactatgtgcagacctaatgacaaacatatctttggtctttagcttccttatacggcaatcgcatgcatctgtataattgtgggtttccggaacgttgcacgttccgtcagaataataataaactgttatgtacaataaaatagtaacaataaggctttgttcggttattcccattatacatggattggacgagattggaaaaaatttaaaagaagtttgacttgtttgagatttaaactcacccaatctcactcaatctatatggattgagagctaactaaacaacctaatggatatctatatagattgagagc

SEQ ID NO: 55373 - DNA, 1474 bp, Zea Mays
gtcaacgcgtcagcagcaactagcaaggccgccaagcggcccaggagtccaggacccaggccagctccaagcgaacagcctacgtacggctctatacctctcgccctctgagtctcgcgcggccatccgggctccggcttccagcatctaccaggcgtccttagaatacggtgcagcgagcagcaagtcgccgagcagccgagccaccgccgaacacagggcgccgccgagcagccgagccgccgccgagcgccgagtcttctctgataaagcggagaaattggtagcagaagcagctgggtatggttcacagttggttttgtttccggaagtctttgttggtggctacccacatggatctacctttggactggttgtcggcaatcgcactgccaagggaaaggaagactttcagaagtatcacgcatctgccatagatgtgcctggtccagaagtgtcccgcttatctgcattagctggaaaatataaggtgtttctggtgataggggtggttgagagggcaggatatacactttacaacacggtgctctccttcgatccactgggaaaatacctagggaagcaccgcaaggtcatgcctactgcactagaacgtgtattctgggggtttggagatggatctacaatacctgtctacgatactccgattggaaaaatgggtgctctcatttgctgggaaaacagaatgccacttctcaggacggccatgtatgccaaaggtattgagatatattgtgctcccacggttgattgcatgccaacttggctgtcttctatgacacatatcgcccttgaagggggatgctttgtgctgtcagcgtgccagttctgtcgtagaaagaactaccctccccctcccgagtacacattttgtggcctagaggaagagccatccccggaatccgttgtttgttctggagggagtgtcatcatctcaccattgggaacagtgttggcgggtcccaactacgaaagtgaggcccttctcactgctgacctggaccttggagagattgttcgagccaagtttgattttgacgtggtgggccactactcgcgacctgaggtgctgagtttagtggtgaagagcgatccaaagcccgccgtctctttcatctcagccgctggtagggacgatgactatgtgcagacctaatgacaaacatatctttggtctttagcttccttatacggcaatcgcatgcatctgtataattgtgggtttccggaacgttgcacgttccgtcagaataataataaactgttatgtacaataaaatagtaacaataaggctttgttcggttattcccattatacatggattggacgagattggaaaaaatttaaaagaagtttgacttgtttgagatttaaactcacccaatctcactcaatctatatggattgagagctaactaaacaacctaatggatatctatatagattgagagc

SEQ ID NO: 55374 - DNA, 1486 bp, Zea Mays
gtccagacagccccgaattggcagcgcagaggctgcgttaatgttactctactcctatatagcagcaccactattttcctcctttccccacttcgctctgtcctcccatgcgccggattaccactgaccacttcacagtcacagtagtacagagcagcagagtggagaagtagactctaggtgagatggcggccgtggtggcggcggtggaggcaggggtggtggcggtggcaagcgggaggggatgcagcagccggctggtgcggggcctctactggcgcctgcgcgcggttctgcggcggctgcggtcggagcgagccaggcgcggcaggaggttcagcttccactacgacgcgctcagctacgcgctcaacttcgacgacggccgcgccgcccccgccccggcccccgccgcggccgacctcgtccttgcccccggcgacaacgacgcgctacggtgaatcggcgtccgacgatccgctgccaagagccagatggggtctctcttccttgctccggacgccgcttgcttttttccactctcctgtggtctcgctttttcgataaataggggttgtgtaatggaaaaaaggaagatggtagggtggtgtcgcctccgcgttctgcgattctttgcattgacgcgcagctagctagctagggggattgcgcgggctcccggtgatcaggaaagcagcgcttcggcgctgcggtgacgccgtgatttgcagggagatcgagagaaacacatgtgttcttcttcgccgtctcggtgcttgcttcctttctcgagtagtattatttcttgcttgtgcttcagaattcctcgtgtggttcgatcctgcaaattttttccccactcatggtaccattacgaaggtttctatcagctgtgtcgcgggttaaagctactgaatcgaaccattattggaggaaggttggggacaacttttgttaggcgactgtctctccgctccaaagtcttaacgctatcgctaatagtagtatgttttgcgcacaaaaagaagaagaagatgaagagtaaagcgtttgtcaggaacaaacaaaaagctaatccctagtcgtctcaggctgagcgggcaaaccaaacccggatggggagccagccattgccgcctgcacatgcgcccacgcgacaaaatgacaatgcagtcacggagggaggtgggagggaagcaagatcggccgcaacgctggtccgaattctgagatgagctcaggtgttccagctttcacatgggatgcagggtgacggccgtcgactgatgagccaatttgtttctttttttattattattttgaactaaaacatgcaggagaaggagaataaaaaagccacagttccttgggccaggccatgaactgagagaggaggaagaagaatggggtagcagtagcactagcaccgttgcaagaacctaggtttactagcagtagcaggataggtcgacagggcagcagtgag

SEQ ID NO: 55375 - DNA, 1487 bp, Zea Mays
gaatccctaaaccttatgcaatgcaacaacattcccagccgccgccgccgccgcccggccgtctcgtcccctctcgtcgccttctcagccaagctaaaacctcgctctccttgtccagtcagattctcctccgcaatccgccattgcgctccgttatgcaggcgttcgcgcgcctctcctccgctgcctccaggaaagtgatcgcgggtgtctctagcgcaaccacacggtcgtgctaccggacctcccgggggttggcgcatgcggcgtcgctgcctgcgcaggagcctccaccgaaggggcagaagaggattacgaagcaggagaggaggactaggataatggaatttattgagaatacagttatagggcttcaaatgatggcaagtttcctactattaaaaatatccgtcagcaagtggggggcagtcactacacagcgcgtgagataattcaagaaatggagtataataatgcaaaattaccactgagcaatgccaaggcagctccacttcaaggaacagttgaagtcattgagcactccatgcctaaggatgaagccatagtggttgaaagtcatggaatactagaagtttctgagcactccatgaccaaggatggtgatgaagcggctcaaattcaaggaacaattgaagtttctgagcactccttccctaaggatgaatgtaagttggctcagtgtcaaggaccatttcgatttcctgagcactcaaggcctaaggacgacagtggaaatgttgctaaacatgatatggacactccagaaacctgtaagactgcagacttccccgctttatctgatcaaacagagagcgagataatggaggacctaacggacaaaccagaccctggaaaccagcaaagggaaatagaagctatcaaatttaatttgaagcattatgaaaaacccttgaatgcaaatgattcaaatgcaaagacgcatgccagagaagacaacccaaagcttgaggaatccgcgaacacaggacttttgggcagcctgaaatcttttgcttatggcatcagaaacttctggaaaaatctgtaaatgtctttctttttggccgtcgcctagcacgcttggtcctcgtggcttcatcaatttctaaagctatggtcactagaccgtgcatatgacggtgcatcacactattttacgctgcaaactatacggtttgcagagtggagtttgaaaatggaggcgagatgagtaaagtatctggagatagcctaatcggactaaaattgagaaggctacagaattgataacttgtccctttgttaagtgtttgcgatacagggccaatttgtaaagttctttttatgcgatacaactaatgtcaacttctcgctgtggcactttgataaagctagatacaaggattattgttactgccctgttgtgctggtggtaactttgtgtttgtcaattgttgtgaacacattgaacgttgggcacaaatttc

SEQ ID NO: 55376 - DNA, 1476 bp, Zea Mays
gaatccctaaaccttatgcaatgcaacaacattcccagccgccgccgccgccgcccggccgtctcgtcccctctcgtcgccttctcagccaagctaaaacctcgctctccttgtccagtcagattctcctccgcaatccgccattgcgctccgttatgcaggcgttcgcgcgcctctcctccgctgcctccaggaaagtgatcgcgggtgtctctagcgcaaccacacggtcgtgctaccggacctcccgggggttggcgcatgcggcgtcgctgcctgcgcaggagcctccaccgaaggggcagaagaggattacgaagcaggagaggaggactaggataatggaatttattgagaaggcttcaaatgatggcaagtttcctactattaaaaatatccgtcagcaagtggggggcagtcactacacagcgcgtgagataattcaagaaatggagtataataatgcaaaattaccactgagcaatgccaaggcagctccacttcaaggaacagttgaagtcattgagcactccatgcctaaggatgaagccatagtggttgaaagtcatggaatactagaagtttctgagcactccatgaccaaggatggtgatgaagcggctcaaattcaaggaacaattgaagtttctgagcactccttccctaaggatgaatgtaagttggctcagtgtcaaggaccatttcgatttcctgagcactcaaggcctaaggacgacagtggaaatgttgctaaacatgatatggacactccagaaacctgtaagactgcagacttccccgctttatctgatcaaacagagagcgagataatggaggacctaacggacaaaccagaccctggaaaccagcaaagggaaatagaagctatcaaatttaatttgaagcattatgaaaaacccttgaatgcaaatgattcaaatgcaaagacgcatgccagagaagacaacccaaagcttgaggaatccgcgaacacaggacttttgggcagcctgaaatcttttgcttatggcatcagaaacttctggaaaaatctgtaaatgtctttctttttggccgtcgcctagcacgcttggtcctcgtggcttcatcaatttctaaagctatggtcactagaccgtgcatatgacggtgcatcacactattttacgctgcaaactatacggtttgcagagtggagtttgaaaatggaggcgagatgagtaaagtatctggagatagcctaatcggactaaaattgagaaggctacagaattgataacttgtccctttgttaagtgtttgcgatacagggccaatttgtaaagttctttttatgcgatacaactaatgtcaacttctcgctgtggcactttgataaagctagatacaaggattattgttactgccctgttgtgctggtggtaactttgtgtttgtcaattgttgtgaacacattgaacgttgggcacaaatttc

SEQ ID NO: 55377 - DNA, 1059 bp, Zea Mays
agggtttcggacaaccgtctctttccctctctagtctctactgcttctcggccgtcggcggctctccgagtccggtatccccgtctccccgtcggcgtcgtcggggcgtggcagagattggtgcacacagaaatggggatctggcggtttgtcacgaacaccgatttgtatctgctcatgaccatgctgggacgtctggagtggttgaagagtcgtttcatcaaggtgaagatgttgaatgtgaagatgacagtgatgatgactataacggaattctgaagcctgcatttgctgtggatggagatccagattttgagtctggtgagccacttgatggctttgagtaccttcggcgtgtcaggtgggaagctaaccaaattcctagagtcaaggtggccaagatatattcaagtgcagctagaaatgagcaaactccttatatgccagaaattccggatataccaaagtgcttacctgatttgcgtgcgtcaaaacaatgggaggacagatttatcgtcgactttgaggaaaccaggatggtgctctctgagcttgacaattctgatgaaccatctgtatctagtgggacaaaaatctcaacaaaacctggcagcgggacggagccacagactgacccgacgctgacaatgattcgcagcatggatgcagtgtcaagagctgcgacacttcggaactacatcgatatgattcagagcttggatgcactatcaaggaacaactgcatgtggctcttcgcactctgtgttgccgttcacactcccctggacgcggagacatgtgcctcactgaggtccttgctgcgcaagtgcgccagcatccttgccaccaagactgagatggacgatgaagtcgtaatgctgaatatactgatgacaatttcgggaaggtattttggacaggacgaaagctgaaaacagcaattgaaattggagatcaggataacaccattgcaatgctgaattctcaccgatagtttgatgtcagaatatattatatttattattatatatgtgaaagttatgtttcattttcttgtaa

SEQ ID NO: 55378 - DNA, 1028 bp, Zea Mays
agggtttcggacaaccgtctctttccctctctagtctctactgcttctcggccgtcggcggctctccgagtccggcgtggcagagattggtgcacacagaaatggggatctggcggtttgtcacgaacaccgatttgtatctgctcatgaccatgctgggacgtctggagtggttgaagagtcgtttcatcaaggtgaagatgttgaatgtgaagatgacagtgatgatgactataacggaattctgaagcctgcatttgctgtggatggagatccagattttgagtctggtgagccacttgatggctttgagtaccttcggcgtgtcaggtgggaagctaaccaaattcctagagtcaaggtggccaagatatattcaagtgcagctagaaatgagcaaactccttatatgccagaaattccggatataccaaagtgcttacctgatttgcgtgcgtcaaaacaatgggaggacagatttatcgtcgactttgaggaaaccaggatggtgctctctgagcttgacaattctgatgaaccatctgtatctagtgggacaaaaatctcaacaaaacctggcagcgggacggagccacagactgacccgacgctgacaatgattcgcagcatggatgcagtgtcaagagctgcgacacttcggaactacatcgatatgattcagagcttggatgcactatcaaggaacaactgcatgtggctcttcgcactctgtgttgccgttcacactcccctggacgcggagacatgtgcctcactgaggtccttgctgcgcaagtgcgccagcatccttgccaccaagactgagatggacgatgaagtcgtaatgctgaatatactgatgacaatttcgggaaggtattttggacaggacgaaagctgaaaacagcaattgaaattggagatcaggataacaccattgcaatgctgaattctcaccgatagtttgatgtcagaatatattatatttattattatatatgtgaaagttatgtttcattttcttgtaa

SEQ ID NO: 55379 - DNA, 3317 bp, Zea Mays
gaggagcctgcgttggccgccaccgccgccgccgccgtgctgcgctagggaacccatcttcttcttccccgcgctgcctgctgcctgctcgagcttggagatggcgttggtgcggcgatgcctctgtggatccgaggaagactgcagagggagttctaagagacggcactgaatttgccgcgaaggttctgtcctcggaatccgagcaggggatcaaggagttcctagctgagatcgagagcatatcccaggtgaagcacgcgaacctcgtcaggcttctgggctgctgcgtacagaggaaaaaaaggatactggtgtacgagtaccttgcgaacaacagcctcgatcatgcgctcaaaggagcagcagcagatctaccctggagcacgaggtcgggcatctgcttgggcaccgccaaggggctgagctacctgcacgaggagcacgagccgaacatcgtgcacagggacatcaaagccagcaatgttcttctcgaccgagactacctgccaaagatcggagatttcgggctcgcgaagctgttcccggacaacatcacccacatcagcaccgcagtggtcggaacgagtggatacttggcgcctgaatacttcgtgcatgggcagctgaccaagaaagccgacgtctacagcttcggggtgcttgtcctggagatcgtcagcgggaggagggtctcgcaaacgatccagtcggacatgttcccggtgcgagaggcatggatgatgtaccagcaaggcaggctgctagagatcgtggacgcgagcatggggagctacccggagaaggaggtgctccggtacatcaaggtggggctggcctgcacgcaggccacgcccagcagccgccccacgatgcgccagagcgagtgggacacaaccagaaaagggacaacagaattagaggcacagattcccaagaaacgggggcatattctattacaagatgactacaacatactataattatatatatagtaaatgaatgctgtcagctactggattcatgttgcctgcctaggctgctaatgaagatgactacataaacaatgtaacggtaacactgtcaagtactcaattctgtgctataacttataacttgcctaaaaacttagcactaataaaactggctacatgctaaggctccaacctactggggtccaactttcaactgaaccagagcacgggaaaaaaaagtgtccaactacagcgctgccctttgatccatggattcctggcatacacccagaaatgaaatggagccgcaagcctgcatcaatccctggttcaaccataaaacttccaggtcaacaattatgccaagttgacagcatggggtaacactggcgactggtcaacggcagtgaaattctgtatgaagtcatggccaccattcatacttcacagtttcttggcccttccataaatatattcgtcggtactctcatggccagtggtggcctgtgagagccttggaagcccacaagaagccaagaatccagggcttgtattcaatttgtggagacctcacagttcaaagcttcgtccactttcaaaatgtagtgcccaggcacatcattcatgcaggcatctaaggagcatggccttcgattctagaatatgttccataaggaactctttgcacggtccttggaaaatctggcttgaaccgcttgttaaaattcggtgccaatgacctagggtaaatggtaactggtcattagaatcatacaaagctcatataacctataatataaacataaatactgtgacgggaatatagttcacacaaatacaaaaacgattgtccgaatgttgactggaacatgaaatgtttattccacatacatgacccaacacagctaaggcactaacttcttcttggtcacctcttaggcgtaagggcttcctagccgtaatccacaatagtaactgagaactagtttagtcaagagtcaaaaagcacacgaacaaatactccaattttccatccctatcaaatttgatcactactctgctacatggcaacactgtagaaatgcactttgaattcatactataaggtagtttttcatattaataataaatgtcgcagttatgcagcaccataagacaacaaataatcaccttggagagccagatcgtctatgaccaagttgacctagcatggatcttaaagttccaagagcctcatcagcagcctacaaagtaaaaacccatgtgaaaattgaagttgggaaaatatcaactgaagcaacccaatcaagaaaaactcattgcatgttttttagaagttccatttatgcatgctttgttcactagtcgcaggctcgcagctcaaaacctcatatctaaaattattatctagagtgagcactgcaacgaatgtaatgcttcagacattggctttctgaaaattcaagatggtttggttgaaaaaacaaattgcatgttagggcacttgaattaacctaagccatttaacttgagtacctgccacagttagtgtcatctgccaacaagatccatgtcatatactcatattgccatcagttttcagtttgtagagctccactccctgattggagtgattctatcggatttgtaggagggagcagggtatagggagctgatgatccccaccaaaatataacaagcagggtgaagcggttttttagctcccagctcctaatgtagatgaagaagtgattctctcctcatccccccacatgaatcagttggtgttttgagtgtttggctggttgggagtaattctcttcggaaaagctgaagctagagctctcccccacttagctttttctcaactcctattcccatgaccatcatcctcaatccttagtgcctccctctactacccccatggtgccacactaccacggcagtggctgtgtcaaattcagtttcttgcttcgtttttaggtggagcaaaattattatctacatgacaaatcatcgtgcagtcaaagagactaacatgagggcttgattagaccttactggatagtttgagtttttatgtcaaaaaagaaacaagagctgattgagcaaaacatgcccgttgaaggaaatagtacataagtccagtttacatatcaaaaatttaaacccacacaagaaaacaaaatgaagcatgaccatccttgatgctgatttaaatgcaaacagagatattctctgggtttactaaatgaatccagattttcttaaggcaaggaaaataaggtaacagtaggaaaacaaagtcagtcagtattagactgctcattacctggagcttgg

SEQ ID NO: 55380 - DNA, 3457 bp, Zea Mays
gtccagtgcaggtgcagtgcacaagaggagcctgcgttggccgccaccgccgccgccgccgtgctgcgctagggaacccatcttcttcttccccgcgctgcctgctgcctgctcgagcttggagatggcgttggtgcggcgatgcctctgtggatccgaggaagactgcagagcgcttttgggcatggaaaatctccggctgttctcctacagagagatcagagcaggcacaaacaacttcgatcagagtaacaagcttggacgaggtggttttggaactgtctacaagggagttctaagagacggcactgaatttgccgcgaaggttctgtcctcggaatccgagcaggggatcaaggagttcctagctgagatcgagagcatatcccaggtgaagcacgcgaacctcgtcaggcttctgggctgctgcgtacagaggaaaaaaaggatactggtgtacgagtaccttgcgaacaacagcctcgatcatgcgctcaaaggagcagcagcagatctaccctggagcacgaggtcgggcatctgcttgggcaccgccaaggggctgagctacctgcacgaggagcacgagccgaacatcgtgcacagggacatcaaagccagcaatgttcttctcgaccgagactacctgccaaagatcggagatttcgggctcgcgaagctgttcccggacaacatcacccacatcagcaccgcagtggtcggaacgagtggatacttggcgcctgaatacttcgtgcatgggcagctgaccaagaaagccgacgtctacagcttcggggtgcttgtcctggagatcgtcagcgggaggagggtctcgcaaacgatccagtcggacatgttcccggtgcgagaggcatggatgatgtaccagcaaggcaggctgctagagatcgtggacgcgagcatggggagctacccggagaaggaggtgctccggtacatcaaggtggggctggcctgcacgcaggccacgcccagcagccgccccacgatgcgccagagcgagtgggacacaaccagaaaagggacaacagaattagaggcacagattcccaagaaacgggggcatattctattacaagatgactacaacatactataattatatatatagtaaatgaatgctgtcagctactggattcatgttgcctgcctaggctgctaatgaagatgactacataaacaatgtaacggtaacactgtcaagtactcaattctgtgctataacttataacttgcctaaaaacttagcactaataaaactggctacatgctaaggctccaacctactggggtccaactttcaactgaaccagagcacgggaaaaaaaagtgtccaactacagcgctgccctttgatccatggattcctggcatacacccagaaatgaaatggagccgcaagcctgcatcaatccctggttcaaccataaaacttccaggtcaacaattatgccaagttgacagcatggggtaacactggcgactggtcaacggcagtgaaattctgtatgaagtcatggccaccattcatacttcacagtttcttggcccttccataaatatattcgtcggtactctcatggccagtggtggcctgtgagagccttggaagcccacaagaagccaagaatccagggcttgtattcaatttgtggagacctcacagttcaaagcttcgtccactttcaaaatgtagtgcccaggcacatcattcatgcaggcatctaaggagcatggccttcgattctagaatatgttccataaggaactctttgcacggtccttggaaaatctggcttgaaccgcttgttaaaattcggtgccaatgacctagggtaaatggtaactggtcattagaatcatacaaagctcatataacctataatataaacataaatactgtgacgggaatatagttcacacaaatacaaaaacgattgtccgaatgttgactggaacatgaaatgtttattccacatacatgacccaacacagctaaggcactaacttcttcttggtcacctcttaggcgtaagggcttcctagccgtaatccacaatagtaactgagaactagtttagtcaagagtcaaaaagcacacgaacaaatactccaattttccatccctatcaaatttgatcactactctgctacatggcaacactgtagaaatgcactttgaattcatactataaggtagtttttcatattaataataaatgtcgcagttatgcagcaccataagacaacaaataatcaccttggagagccagatcgtctatgaccaagttgacctagcatggatcttaaagttccaagagcctcatcagcagcctacaaagtaaaaacccatgtgaaaattgaagttgggaaaatatcaactgaagcaacccaatcaagaaaaactcattgcatgttttttagaagttccatttatgcatgctttgttcactagtcgcaggctcgcagctcaaaacctcatatctaaaattattatctagagtgagcactgcaacgaatgtaatgcttcagacattggctttctgaaaattcaagatggtttggttgaaaaaacaaattgcatgttagggcacttgaattaacctaagccatttaacttgagtacctgccacagttagtgtcatctgccaacaagatccatgtcatatactcatattgccatcagttttcagtttgtagagctccactccctgattggagtgattctatcggatttgtaggagggagcagggtatagggagctgatgatccccaccaaaatataacaagcagggtgaagcggttttttagctcccagctcctaatgtagatgaagaagtgattctctcctcatccccccacatgaatcagttggtgttttgagtgtttggctggttgggagtaattctcttcggaaaagctgaagctagagctctcccccacttagctttttctcaactcctattcccatgaccatcatcctcaatccttagtgcctccctctactacccccatggtgccacactaccacggcagtggctgtgtcaaattcagtttcttgcttcgtttttaggtggagcaaaattattatctacatgacaaatcatcgtgcagtcaaagagactaacatgagggcttgattagaccttactggatagtttgagtttttatgtcaaaaaagaaacaagagctgattgagcaaaacatgcccgttgaaggaaatagtacataagtccagtttacatatcaaaaatttaaacccacacaagaaaacaaaatgaagcatgaccatccttgatgctgatttaaatgcaaacagagatattctctgggtttactaaatgaatccagattttcttaaggcaaggaaaataaggtaacagtaggaaaacaaagtcagtcagtattagactgctcattacctggagcttgg

SEQ ID NO: 55381 - DNA, 3485 bp, Zea Mays
ctttgccgccataaattctggataggctcctgccagtgtccagtgcaggtgcagtgcacaagaggagcctgcgttggccgccaccgccgccgccgccgtgctgcgctagggaacccatcttcttcttccccgcgctgcctgctgcctgctcgagcttggagatggcgttggtgcggcgatgcctctgtggatccgaggaagactgcagagcgcttttgggcatggaaaatctccggctgttctcctacagagagatcagagcaggcacaaacaacttcgatcagagtaacaagcttggacgaggtggttttggaactgtctacaagggagttctaagagacggcactgaatttgccgcgaaggttctgtcctcggaatccgagcaggggatcaaggagttcctagctgagatcgagagcatatcccaggtgaagcacgcgaacctcgtcaggcttctgggctgctgcgtacagaggaaaaaaaggatactggtgtacgagtaccttgcgaacaacagcctcgatcatgcgctcaaaggagcagcagcagatctaccctggagcacgaggtcgggcatctgcttgggcaccgccaaggggctgagctacctgcacgaggagcacgagccgaacatcgtgcacagggacatcaaagccagcaatgttcttctcgaccgagactacctgccaaagatcggagatttcgggctcgcgaagctgttcccggacaacatcacccacatcagcaccgcagtggtcggaacgagtggatacttggcgcctgaatacttcgtgcatgggcagctgaccaagaaagccgacgtctacagcttcggggtgcttgtcctggagatcgtcagcgggaggagggtctcgcaaacgatccagtcggacatgttcccggcatggatgatgtaccagcaaggcaggctgctagagatcgtggacgcgagcatggggagctacccggagaaggaggtgctccggtacatcaaggtggggctggcctgcacgcaggccacgcccagcagccgccccacgatgcgccagagcgagtgggacacaaccagaaaagggacaacagaattagaggcacagattcccaagaaacgggggcatattctattacaagatgactacaacatactataattatatatatagtaaatgaatgctgtcagctactggattcatgttgcctgcctaggctgctaatgaagatgactacataaacaatgtaacggtaacactgtcaagtactcaattctgtgctataacttataacttgcctaaaaacttagcactaataaaactggctacatgctaaggctccaacctactggggtccaactttcaactgaaccagagcacgggaaaaaaaagtgtccaactacagcgctgccctttgatccatggattcctggcatacacccagaaatgaaatggagccgcaagcctgcatcaatccctggttcaaccataaaacttccaggtcaacaattatgccaagttgacagcatggggtaacactggcgactggtcaacggcagtgaaattctgtatgaagtcatggccaccattcatacttcacagtttcttggcccttccataaatatattcgtcggtactctcatggccagtggtggcctgtgagagccttggaagcccacaagaagccaagaatccagggcttgtattcaatttgtggagacctcacagttcaaagcttcgtccactttcaaaatgtagtgcccaggcacatcattcatgcaggcatctaaggagcatggccttcgattctagaatatgttccataaggaactctttgcacggtccttggaaaatctggcttgaaccgcttgttaaaattcggtgccaatgacctagggtaaatggtaactggtcattagaatcatacaaagctcatataacctataatataaacataaatactgtgacgggaatatagttcacacaaatacaaaaacgattgtccgaatgttgactggaacatgaaatgtttattccacatacatgacccaacacagctaaggcactaacttcttcttggtcacctcttaggcgtaagggcttcctagccgtaatccacaatagtaactgagaactagtttagtcaagagtcaaaaagcacacgaacaaatactccaattttccatccctatcaaatttgatcactactctgctacatggcaacactgtagaaatgcactttgaattcatactataaggtagtttttcatattaataataaatgtcgcagttatgcagcaccataagacaacaaataatcaccttggagagccagatcgtctatgaccaagttgacctagcatggatcttaaagttccaagagcctcatcagcagcctacaaagtaaaaacccatgtgaaaattgaagttgggaaaatatcaactgaagcaacccaatcaagaaaaactcattgcatgttttttagaagttccatttatgcatgctttgttcactagtcgcaggctcgcagctcaaaacctcatatctaaaattattatctagagtgagcactgcaacgaatgtaatgcttcagacattggctttctgaaaattcaagatggtttggttgaaaaaacaaattgcatgttagggcacttgaattaacctaagccatttaacttgagtacctgccacagttagtgtcatctgccaacaagatccatgtcatatactcatattgccatcagttttcagtttgtagagctccactccctgattggagtgattctatcggatttgtaggagggagcagggtatagggagctgatgatccccaccaaaatataacaagcagggtgaagcggttttttagctcccagctcctaatgtagatgaagaagtgattctctcctcatccccccacatgaatcagttggtgttttgagtgtttggctggttgggagtaattctcttcggaaaagctgaagctagagctctcccccacttagctttttctcaactcctattcccatgaccatcatcctcaatccttagtgcctccctctactacccccatggtgccacactaccacggcagtggctgtgtcaaattcagtttcttgcttcgtttttaggtggagcaaaattattatctacatgacaaatcatcgtgcagtcaaagagactaacatgagggcttgattagaccttactggatagtttgagtttttatgtcaaaaaagaaacaagagctgattgagcaaaacatgcccgttgaaggaaatagtacataagtccagtttacatatcaaaaatttaaacccacacaagaaaacaaaatgaagcatgaccatccttgatgctgatttaaatgcaaacagagatattctctgggtttactaaatgaatccagattttcttaaggcaaggaaaataaggtaacagtaggaaaacaaagtcagtcagtattagactgctcattacctggagcttgg

SEQ ID NO: 55382 - DNA, 1383 bp, Zea Mays
gaggagcctgcgttggccgccaccgccgccgccgccgtgctgcgctagggaacccatcttcttcttccccgcgctgcctgctgcctgctcgagcttggagatggcgttggtgcggcgatgcctctgtggatccgaggaagactgcagagggagttctaagagacggcactgaatttgccgcgaaggttctgtcctcggaatccgagcaggggatcaaggagttcctagctgagatcgagagcatatcccaggtgaagcacgcgaacctcgtcaggcttctgggctgctgcgtacagaggaaaaaaaggatactggtgtacgagtaccttgcgaacaacagcctcgatcatgcgctcaaaggagcagcagcagatctaccctggagcacgaggtcgggcatctgcttgggcaccgccaaggggctgagctacctgcacgaggagcacgagccgaacatcgtgcacagggacatcaaagccagcaatgttcttctcgaccgagactacctgccaaagatcggagatttcgggctcgcgaagctgttcccggacaacatcacccacatcagcaccgcagtggtcggaacgagtggatacttggcgcctgaatacttcgtgcatgggcagctgaccaagaaagccgacgtctacagcttcggggtgcttgtcctggagatcgtcagcgggaggagggtctcgcaaacgatccagtcggacatgttcccggtgcgagaggcatggatgatgtaccagcaaggcaggctgctagagatcgtggacgcgagcatggggagctacccggagaaggaggtgctccggtacatcaaggtggggctggcctgcacgcaggccacgcccagcagccgccccacgatgcgccaggtgcttgccttgctgtcggaacggagatgctcccgccgagtttcgccgagcaccgcggccaccacacggcccctgccctggggggtttgcccgccggtccgctaatccatgcgtcgccgagggcgaggtggccggcggcggcgccgtcagcagcaacgtcgccgaagcaggtcctgagcctgaacgcgcaaccggcaatccggcatgtaactgaaactgatatagtcacgtgtgaggcggcgttcgttctgtcacgtaatcacttgcgttagaatttgattttctagtcttgttcgtgctcgcagtttggaccgggaaaaaagggtaggaggggctaggcaggtccataaacgagcatattgtttttaatctcaatccatatgagttagagaggattgagaatctgttcattttaatctcaattcatgtggattgaaagaaattgagtagatttaaatctctaacaactcaaatttctttctaattatttccagttacctgc

SEQ ID NO: 55383 - DNA, 1374 bp, Zea Mays
gaggagcctgcgttggccgccaccgccgccgccgccgtgctgcgctagggaacccatcttcttcttccccgcgctgcctgctgcctgctcgagcttggagatggcgttggtgcggcgatgcctctgtggatccgaggaagactgcagagggagttctaagagacggcactgaatttgccgcgaaggttctgtcctcggaatccgagcaggggatcaaggagttcctagctgagatcgagagcatatcccaggtgaagcacgcgaacctcgtcaggcttctgggctgctgcgtacagaggaaaaaaaggatactggtgtacgagtaccttgcgaacaacagcctcgatcatgcgctcaaaggagcagcagcagatctaccctggagcacgaggtcgggcatctgcttgggcaccgccaaggggctgagctacctgcacgaggagcacgagccgaacatcgtgcacagggacatcaaagccagcaatgttcttctcgaccgagactacctgccaaagatcggagatttcgggctcgcgaagctgttcccggacaacatcacccacatcagcaccgcagtggtcggaacgagtggatacttggcgcctgaatacttcgtgcatgggcagctgaccaagaaagccgacgtctacagcttcggggtgcttgtcctggagatcgtcagcgggaggagggtctcgcaaacgatccagtcggacatgttcccggcatggatgatgtaccagcaaggcaggctgctagagatcgtggacgcgagcatggggagctacccggagaaggaggtgctccggtacatcaaggtggggctggcctgcacgcaggccacgcccagcagccgccccacgatgcgccaggtgcttgccttgctgtcggaacggagatgctcccgccgagtttcgccgagcaccgcggccaccacacggcccctgccctggggggtttgcccgccggtccgctaatccatgcgtcgccgagggcgaggtggccggcggcggcgccgtcagcagcaacgtcgccgaagcaggtcctgagcctgaacgcgcaaccggcaatccggcatgtaactgaaactgatatagtcacgtgtgaggcggcgttcgttctgtcacgtaatcacttgcgttagaatttgattttctagtcttgttcgtgctcgcagtttggaccgggaaaaaagggtaggaggggctaggcaggtccataaacgagcatattgtttttaatctcaatccatatgagttagagaggattgagaatctgttcattttaatctcaattcatgtggattgaaagaaattgagtagatttaaatctctaacaactcaaatttctttctaattatttccagttacctgc

SEQ ID NO: 55384 - DNA, 4228 bp, Zea Mays
ccagtccaaaggaaaaaacggtggcccgctagcttctctgtgggcgcttgggcggagatctggatagcgctgcacgccactgcttctctttccccgcgagtgtccgctccgtacaccggcgactacgatcctgtttctggtgaaagggagtgtcgcattccccatcagcactattactgacggccgtcgcgtggtgttcccgacgtgtgctaccatctccagtacacccaatcctcaacgtgtcgacgatccacgcaggtgatttggatagcgtgcatattttgtcaccaacaggaccaatacatctgggactaatacatctgctattatcgatggactacacacttctaccagatttaacaacgtataaaaaacatgcgataatccaggtccatgtctcaagaaaatggtctttccatggcgccactgaaaatggtcccttgcagcacatcgacatggtcctatcagattgcaagggtaatagtatggatgctgaaataccagcaaatcttgccgaagaaaagggagcactcatcgaaacaaatcagatctacaacatcagacgttttagagttactgcagcaaaaacagcctacaaacccattgatggtgacaagatgatacaatttacgatttacacaattatcaagcctgcaagtaacccaccacctacatttcctttatatatctatcaattaactccatttgaagagattgaatctcaaattcagcacaagaccaaattcctagatgttcttggaactataaccgaggtaactgctttgaagacagtacacatagaaggacaactcagccccactattattagagacgtaatgatagaagatctaaggacacgtgatatgaatgcacagtgacaatcatcgaaatagatacatcaaacacatggcggtatccatcatgcacaaaatgcggtcgaaaaacaactccacataatacaacatattattgtgatttgtgtaaatgggatggctacaaattcaagtaagtaatcaacatcttcaatattcatatggtgaataaattagacatactgacaacacttttttacataaacaattccattgctttataaacaaacctaaccatgacatattactattatccattgttatttacatcacccaattttataacaacattctaagcatagatttttaattgctatcacaatgcctcttaatgacagatacaagctcaaatttcgagcatcagatgcaacagccatagcacaaatgttttgctttgataatgaaagggaattaggcttacacctttttcctaatttattttggtggttgaattgcccaacccaaataattggactaactagttttctctagtctataagttctacaggtgccaaaggttcacaataagccaataaaaagaccaagaaaagggttcaaacaagagagcaaaaggcaacccgaaaggcaccctagtctgtcgcaccggacagtgtccggtgcaccaggggactccaagctgaactcctcaccttcgggaattctcagaggcgctccgctataattcaccggactgtccggtgcaccaccggacagtgtctggtgccccaagggagagcgactctgaactcgccagcttcgggaatccgctccgctaaaattcaccggactgtccggtgcacaccagactgaccggtgtgacagcggagcaacggctacttcgcgcgcaacggtcgactgcggcgcattaaatgcgcgcctgcgcgcgcagaggaggagagcacgcgtgggtggcacaccggacaacctgtagggcctgtccggtgcaccaccggacagccaggcgggcccacaagtcagaactctaatggtgagaacccaacggccaggtgacgtggctggcgcaccagacagtgtccggtgcgcccgtcgacagcagcctccaccaacagtcaagtttggtggttggggctataaataccccaaccactcccacattcaagtcatccaagtttttcaccttccaactactataagagctagcattcaatacaagacacaccaaagagatcaaatcctctcccaactccacacaaagctttagaagagagatttgttgtgttcatttgagctcttgcgcttggattgcttctttttctcattctttcttgcgatcatctcaattgtaatcaaggcaagagacaccaattgtgtggtggtccttgcgggaagtttggttcccatttgattgagaagagaagctcactcggtccgagggaccgtttgagagagggaaatggttgaaagagacccggtctttgtgaccacctcaacggggagtaggtttgcaagaacctaacctcggtaaaacaaatcatcgtgtctcgctctttattcgctcatgatttgttttgcgccctctctctcggactcgtttatatttctaacgctaacccgacttgtagttgtgattaagtttgtaaatttcagattcgccctattcaccccctctctaggcgactttcaattggtatcagagcccggtgcttcattagagactaaccgctcgaagtgatgtcgggagatcacaccaagaaggaaatggtcaccggcgagaagcccgctacaagccacgggaaagctccatcgggagagtcccgcaacaaggggaaggaaaaggaatccccttcacacaagtcgcgtcggagcggtgacaagaagaagaagatgaggaaagtggtctactacgagaccgacacctcgtcgccatccacctccggctccgacacgccgtccgtaacttctaagcgccatgagcgtaagaagtttagtaagatcccccaacgctatcctcgcatttctaaacatacaccattactttccgtcccattaggcaaaccaccaacgtttgatggtgaagattatgctaggtggagtgattttatgcgatttcacctaacctcactccacaaaagtatatgggatgttgttgagtttggtgtacaggtaccatccgtaggggatgaagattatgatgaggacgaagtggcccaaatccaacacttcaactccctagccacaactatattccttgcctatctaagtcgagaggagtataataaggtgcaagggttgaaaagtgctaaggagatttgggacacgctaaagaccgcgcacgaaggagacgaggtgaccaaaatcaccaagcgggaaacgatcgagggggagctcggtcgcttccgacttcgtcaaggggaggagccacaagacatgtacaaccggctcaaaaccttggtgaaccaagtgcgcaacctcgggagtaagaaatgggatgaccatgagatggttaaggttattcttagatcacttgttttccttaaccctactcaagttcaattaattcgtggtaatcctagatatacactaatgactcccgaggaagtgataggaaactttgtgagctttgagttgatgatcaaaggctcaaagaaaatcaacgagctagatggcccctccacgtccaaagcacaaccagtcgcattcaaggcgacggaggagaagaaggaggagtctacttcaagtagacaacccatcgatgcctctaagatcgacaacgaggaaatggcgctcatcatcaagagcttccgccaaatcctcaaacaaaggagggggaaggactacaaaccccgctccaagaaagtatgctacaagtgtggtaagcccggtcatttcattgctaaatgtccattatctagtgatagtgacaggggcgacgacaagaaggggagaagaagggagaagaagagatactacaagaagaagggcggcgatgcccatgtttgccgggaataggactccgacgagagctccaccgactcctcctccgacgaggacgccacaaacatcgccatcaccaagggtcttctcttccccaacgtcggccacaagtgcctcatggcaaaggacggcaaaaggaagaaggtaaaatcaaaatcctccactaaatatgaaacctctagtgatgaggataatgctagtgatgaggaggataacttgcgcactctttttgccaacctaaacatgcaacaaaaaaatttaaatgaattgattagtgctattcatgaaaaggatgatcttttggactcccaagaggacttccttattaaagaaaacaagattcatgttaaggttaaaaatgcttacgctctagaagcagaaaaatgtgaaaaactatctag

SEQ ID NO: 55385 - DNA, 4443 bp, Zea Mays
caggttccagtccaaaggaaaaaacggtggcccgctagcttctctgtgggcgcttgggcggagatctggatagcgctgcacgccactgcttctctttccccgcgagtgtccgctccgtacaccggcgactacgatcctgtttctggtgaaagggagtgtcgcattccccatcagcactattactgacggccgtcgcgtggtgttcccgacgtgtgctaccatctccagtacacccaatcctcaacgtgtcgacgatccacgcaggtgatttggatagcgtgcatattttgtcaccaacaggaccaatacatctgggactaatacatctgctattatcgatggactacacacttctaccagatttaacaacgtataaaaaacatgcgataatccaggtccatgtctcaagaaaatggtctttccatggcgccactgaaaatggtcccttgcagcacatcgacatggtcctatcagattgcaagggtaatagtatggatgctgaaataccagcaaatcttgccgaagaaaagggagcactcatcgaaacaaatcagatctacaacatcagacgttttagagttactgcagcaaaaacagcctacaaacccattgatggtgacaagatgatacaatttacgatttacacaattatcaagcctgcaagtaacccaccacctacatttcctttatatatctatcaattaactccatttgaagagattgaatctcaaattcagcacaagaccaaattcctagatgttcttggaactataaccgaggtaactgctttgaagacagtacacatagaaggacaactcagccccactattattagagacgtaatgatagaagatctaaggtgtttacttaagtggtggtgcggcttgccattggtatttcaatcctgcaatacctgaagctgaagcgtaccaaaatagacatggtggtgaaacaattcagctgcaccttcctacacaaccggaacatgcactacaaaccttccaacctccaacaatagaacataaaactctggagcaactcctgacaatgaacccatatgattacccagacacgtgatatgaatgcacagtgacaatcatcgaaatagatacatcaaacacatggcggtatccatcatgcacaaaatgcggtcgaaaaacaactccacataatacaacatattattgtgatttgtgtaaatgggatggctacaaattcaagtaagtaatcaacatcttcaatattcatatggtgaataaattagacatactgacaacacttttttacataaacaattccattgctttataaacaaacctaaccatgacatattactattatccattgttatttacatcacccaattttataacaacattctaagcatagatttttaattgctatcacaatgcctcttaatgacagatacaagctcaaatttcgagcatcagatgcaacagccatagcacaaatgttttgctttgataatgaaagggaattaggcttacacctttttcctaatttattttggtggttgaattgcccaacccaaataattggactaactagttttctctagtctataagttctacaggtgccaaaggttcacaataagccaataaaaagaccaagaaaagggttcaaacaagagagcaaaaggcaacccgaaaggcaccctagtctgtcgcaccggacagtgtccggtgcaccaggggactccaagctgaactcctcaccttcgggaattctcagaggcgctccgctataattcaccggactgtccggtgcaccaccggacagtgtctggtgccccaagggagagcgactctgaactcgccagcttcgggaatccgctccgctaaaattcaccggactgtccggtgcacaccagactgaccggtgtgacagcggagcaacggctacttcgcgcgcaacggtcgactgcggcgcattaaatgcgcgcctgcgcgcgcagaggaggagagcacgcgtgggtggcacaccggacaacctgtagggcctgtccggtgcaccaccggacagccaggcgggcccacaagtcagaactctaatggtgagaacccaacggccaggtgacgtggctggcgcaccagacagtgtccggtgcgcccgtcgacagcagcctccaccaacagtcaagtttggtggttggggctataaataccccaaccactcccacattcaagtcatccaagtttttcaccttccaactactataagagctagcattcaatacaagacacaccaaagagatcaaatcctctcccaactccacacaaagctttagaagagagatttgttgtgttcatttgagctcttgcgcttggattgcttctttttctcattctttcttgcgatcatctcaattgtaatcaaggcaagagacaccaattgtgtggtggtccttgcgggaagtttggttcccatttgattgagaagagaagctcactcggtccgagggaccgtttgagagagggaaatggttgaaagagacccggtctttgtgaccacctcaacggggagtaggtttgcaagaacctaacctcggtaaaacaaatcatcgtgtctcgctctttattcgctcatgatttgttttgcgccctctctctcggactcgtttatatttctaacgctaacccgacttgtagttgtgattaagtttgtaaatttcagattcgccctattcaccccctctctaggcgactttcaattggtatcagagcccggtgcttcattagagactaaccgctcgaagtgatgtcgggagatcacaccaagaaggaaatggtcaccggcgagaagcccgctacaagccacgggaaagctccatcgggagagtcccgcaacaaggggaaggaaaaggaatccccttcacacaagtcgcgtcggagcggtgacaagaagaagaagatgaggaaagtggtctactacgagaccgacacctcgtcgccatccacctccggctccgacacgccgtccgtaacttctaagcgccatgagcgtaagaagtttagtaagatcccccaacgctatcctcgcatttctaaacatacaccattactttccgtcccattaggcaaaccaccaacgtttgatggtgaagattatgctaggtggagtgattttatgcgatttcacctaacctcactccacaaaagtatatgggatgttgttgagtttggtgtacaggtaccatccgtaggggatgaagattatgatgaggacgaagtggcccaaatccaacacttcaactccctagccacaactatattccttgcctatctaagtcgagaggagtataataaggtgcaagggttgaaaagtgctaaggagatttgggacacgctaaagaccgcgcacgaaggagacgaggtgaccaaaatcaccaagcgggaaacgatcgagggggagctcggtcgcttccgacttcgtcaaggggaggagccacaagacatgtacaaccggctcaaaaccttggtgaaccaagtgcgcaacctcgggagtaagaaatgggatgaccatgagatggttaaggttattcttagatcacttgttttccttaaccctactcaagttcaattaattcgtggtaatcctagatatacactaatgactcccgaggaagtgataggaaactttgtgagctttgagttgatgatcaaaggctcaaagaaaatcaacgagctagatggcccctccacgtccaaagcacaaccagtcgcattcaaggcgacggaggagaagaaggaggagtctacttcaagtagacaacccatcgatgcctctaagatcgacaacgaggaaatggcgctcatcatcaagagcttccgccaaatcctcaaacaaaggagggggaaggactacaaaccccgctccaagaaagtatgctacaagtgtggtaagcccggtcatttcattgctaaatgtccattatctagtgatagtgacaggggcgacgacaagaaggggagaagaagggagaagaagagatactacaagaagaagggcggcgatgcccatgtttgccgggaataggactccgacgagagctccaccgactcctcctccgacgaggacgccacaaacatcgccatcaccaagggtcttctcttccccaacgtcggccacaagtgcctcatggcaaaggacggcaaaaggaagaaggtaaaatcaaaatcctccactaaatatgaaacctctagtgatgaggataatgctagtgatgaggaggataacttgcgcactctttttgccaacctaaacatgcaacaaaaaaatttaaatgaattgattagtgctattcatgaaaaggatgatcttttggactcccaagaggacttccttattaaagaaaacaagattcatgttaaggttaaaaatgcttacgctctagaagcagaaaaatgtgaaaaactatctag

SEQ ID NO: 55386 - DNA, 4026 bp, Zea Mays
gtcaaaaggaaaaatggtggtccgctggccacaccacgggacacttccagataaagctgccaggttccagtccaaaggaaaaaacggtggcccgctagcttctctgtgggcgcttgggcggagatctggatagcgctgcacgccactgcttctctttccccgcgagtgtccgctccgtacaccggcgactacgatcctgtttctggtgaaagggagtgtcgcattccccatcagcactattactgacggccgtcgcgtggtgttcccgacgtgtgctaccatctccagtacacccaatcctcaacgtgtcgacgatccacgcaggtgatttggatagcgtgcatattttgtcaccaacaggaccaatacatctgggactaatacatctgctattatgttcttggaactataaccgaggtaactgctttgaagacagtacacatagaaggacaactcagccccactattattagagacgtaatgatagaagatctaagtataacaaagtattatgctgacagacatggtggtgaaacaattcagctgcaccttcctacacaaccggaacatgcactacaaaccttccaacctccaacaatagaacataaaactctggagcaactcctgacaatgaacccatatgattacccagacacgtgatatgaatgcacagtgacaatcatcgaaatagatacatcaaacacatggcggtatccatcatgcacaaaatgcggtcgaaaaacaactccacataatacaacatattattgtgatttgtgtaaatgggatggctacaaattcaagtaagtaatcaacatcttcaatattcatatggtgaataaattagacatactgacaacacttttttacataaacaattccattgctttataaacaaacctaaccatgacatattactattatccattgttatttacatcacccaattttataacaacattctaagcatagatttttaattgctatcacaatgcctcttaatgacagatacaagctcaaatttcgagcatcagatgcaacagccatagcacaaatgttttgctttgataatgaaagggaattaggcttacacctttttcctaatttattttggtggttgaattgcccaacccaaataattggactaactagttttctctagtctataagttctacaggtgccaaaggttcacaataagccaataaaaagaccaagaaaagggttcaaacaagagagcaaaaggcaacccgaaaggcaccctagtctgtcgcaccggacagtgtccggtgcaccaggggactccaagctgaactcctcaccttcgggaattctcagaggcgctccgctataattcaccggactgtccggtgcaccaccggacagtgtctggtgccccaagggagagcgactctgaactcgccagcttcgggaatccgctccgctaaaattcaccggactgtccggtgcacaccagactgaccggtgtgacagcggagcaacggctacttcgcgcgcaacggtcgactgcggcgcattaaatgcgcgcctgcgcgcgcagaggaggagagcacgcgtgggtggcacaccggacaacctgtagggcctgtccggtgcaccaccggacagccaggcgggcccacaagtcagaactctaatggtgagaacccaacggccaggtgacgtggctggcgcaccagacagtgtccggtgcgcccgtcgacagcagcctccaccaacagtcaagtttggtggttggggctataaataccccaaccactcccacattcaagtcatccaagtttttcaccttccaactactataagagctagcattcaatacaagacacaccaaagagatcaaatcctctcccaactccacacaaagctttagaagagagatttgttgtgttcatttgagctcttgcgcttggattgcttctttttctcattctttcttgcgatcatctcaattgtaatcaaggcaagagacaccaattgtgtggtggtccttgcgggaagtttggttcccatttgattgagaagagaagctcactcggtccgagggaccgtttgagagagggaaatggttgaaagagacccggtctttgtgaccacctcaacggggagtaggtttgcaagaacctaacctcggtaaaacaaatcatcgtgtctcgctctttattcgctcatgatttgttttgcgccctctctctcggactcgtttatatttctaacgctaacccgacttgtagttgtgattaagtttgtaaatttcagattcgccctattcaccccctctctaggcgactttcaattggtatcagagcccggtgcttcattagagactaaccgctcgaagtgatgtcgggagatcacaccaagaaggaaatggtcaccggcgagaagcccgctacaagccacgggaaagctccatcgggagagtcccgcaacaaggggaaggaaaaggaatccccttcacacaagtcgcgtcggagcggtgacaagaagaagaagatgaggaaagtggtctactacgagaccgacacctcgtcgccatccacctccggctccgacacgccgtccgtaacttctaagcgccatgagcgtaagaagtttagtaagatcccccaacgctatcctcgcatttctaaacatacaccattactttccgtcccattaggcaaaccaccaacgtttgatggtgaagattatgctaggtggagtgattttatgcgatttcacctaacctcactccacaaaagtatatgggatgttgttgagtttggtgtacaggtaccatccgtaggggatgaagattatgatgaggacgaagtggcccaaatccaacacttcaactccctagccacaactatattccttgcctatctaagtcgagaggagtataataaggtgcaagggttgaaaagtgctaaggagatttgggacacgctaaagaccgcgcacgaaggagacgaggtgaccaaaatcaccaagcgggaaacgatcgagggggagctcggtcgcttccgacttcgtcaaggggaggagccacaagacatgtacaaccggctcaaaaccttggtgaaccaagtgcgcaacctcgggagtaagaaatgggatgaccatgagatggttaaggttattcttagatcacttgttttccttaaccctactcaagttcaattaattcgtggtaatcctagatatacactaatgactcccgaggaagtgataggaaactttgtgagctttgagttgatgatcaaaggctcaaagaaaatcaacgagctagatggcccctccacgtccaaagcacaaccagtcgcattcaaggcgacggaggagaagaaggaggagtctacttcaagtagacaacccatcgatgcctctaagatcgacaacgaggaaatggcgctcatcatcaagagcttccgccaaatcctcaaacaaaggagggggaaggactacaaaccccgctccaagaaagtatgctacaagtgtggtaagcccggtcatttcattgctaaatgtccattatctagtgatagtgacaggggcgacgacaagaaggggagaagaagggagaagaagagatactacaagaagaagggcggcgatgcccatgtttgccgggaataggactccgacgagagctccaccgactcctcctccgacgaggacgccacaaacatcgccatcaccaagggtcttctcttccccaacgtcggccacaagtgcctcatggcaaaggacggcaaaaggaagaaggtaaaatcaaaatcctccactaaatatgaaacctctagtgatgaggataatgctagtgatgaggaggataacttgcgcactctttttgccaacctaaacatgcaacaaaaaaatttaaatgaattgattagtgctattcatgaaaaggatgatcttttggactcccaagaggacttccttattaaagaaaacaagattcatgttaaggttaaaaatgcttacgctctagaagcagaaaaatgtgaaaaactatctag

SEQ ID NO: 55387 - DNA, 596 bp, Zea Mays
atgacttctctcagatcgatggactacacacttctaccagatttaacaacgtataaaaaacatgcgataatccaggtccatgtctcaagaaaatggtctttccatggcgccactgaaaatggtcccttgcagcacatcgacatggtcctatcagattgcaagggtaatagtatggatgctgaaataccagcaaatcttgccgaagaaaagggagcactcatcgaaacaaatcagatctacaacatcagacgttttagagttactgcagcaaaaacagcctacaaacccattgatggtgacaagatgatacaatttacgatttacacaattatcaagcctgcaagtaacccaccacctacatttcctttatatatctatcaattaactccatttgaagagattgaatctcaaattcagcacaagaccaaattcctagatgttcttggaactataaccgaggtaactgctttgaagacagtacacatagaaggacaactcagccccactattattagagacgtaatgatagaagatctaaggtgtttacttaagtggtggtgcggcttgccattggtatttcaatcctgcaatacctg

SEQ ID NO: 55388 - DNA, 3924 bp, Zea Mays
gtcaaaaggaaaaatggtggtccgctggccacaccacgggacacttccagataaagctgccaggttccagtccaaaggaaaaaacggtggcccgctagcttctctgtgggcgcttgggcggagatctggatagcgctgcacgccactgcttctctttccccgcgagtgtccgctccgtacaccggcgactacgatcctgtttctggtgaaagggagtgtcgcattccccatcagcactattactgacggccgtcgcgtggtgttcccgacgtgtgctaccatctccagtacacccaatcctcaacgtgtcgacgatccacgcaggtgatttggatagcgtgcatattttgtcaccaacaggaccaatacatctgggactaatacatctgctattactaaaaaataaaggcaaaaaacatgtaaaaaaaacaacacaacatgccatcttcatcatccggtccacctagcagtgatgtaaggccgattccatatcttgatgaatgcgatgccccaagaagaaaaagaaggcacagcgcttctgccatctatactcctcctaatataactgccactcaagcaagggcaacaagacgacatcttctaaatcagagtcgaattactagaaaagggttgacagctaaaacattgacgaatttccatactggacagttcacaaccgaatatgtggaagcattaaaagcctcatacccaaataggtcatactacggaacaccagattacgaatgctcttattgtcatgctgtgttctggtatgctgaaagggtcaggagtaatcaacaggattcatctatcagatacaacaactgctgcaaaggtggaaaaatcagcattcctcccttcaagcctcggcctaagcctttagcatctcttgcaagatttgatggtgatgccacatcaagaaaattcattcgcaatattagacagtacaattgtctgtttgcttttacatcaatgggagcacaaatagataactctgtcaatgatggtcgtggtccacctctctttaaaatttgcggccaagttcaccatcgtattggaactttgttgccagacgatggatgtcctccaagattcattcaattgtatatttacgacaccacaaacgaagtccaaaacagaataaatgctttagacagtggtgacagaacccaagacaatttcgattctgtaataataagaaatttaattaaaatgcttgatgatcataacacattcgtcaagaaattcagaatggcaagagatcgtttgacggataatccgaatgaagaattcactatcagacttatcagagcaaaggaaggtgatcctatccaatataacttaccaacaacagatgaattagctatgctggttgtcggagatttcacattagacacattcaaacgtgatattattattgagactcagaacaaagagctaaagcgaatatcttcactacacccagcatatatggctctacaatacccactgctttttccctttggcgagagaggtttccaggttggagttttgtacaatggtgccacatccagcggacaaaatgcacgaaaacatttaactatgcaattatattattgctaccagttccattatagaaaaaatcaaccaaatccttatttgtgttatgcaatgttatcaagtcaagccaaagtagatgctagagcatgtattgatgaaaatagactcaactacataatcaataatcaaaagaatctacgaatggaaagcattcaaggtatcacagatgcagttagtcgtggatgcatcagcggtgaacagatgggaaaaactataacattaccagcatcacacacaggaggcagacgctacatgatccaaaattatcatgacgacattgctatttgtcgagttcatggaccaccagattttttcctcacgttcacatgcaatccaaatcggcaagagatacttgaaagtctatctcagcctggtcaaaccccttcggaaagatctgacatcattgttcgtgtttaccatatgaaactcaatgacttattacatcatataagaaatggatcaatttttggtccatgtaccgcagttttatacacaactgaatttcaaaaacgaggtcttcctcattcacatattatattttgggtctccactgacactacgcaaccaacacctgctctaatagactcattcatcaatgctgaaataccagacccgctggttgatcctctagcttattgcttagttgcagagcacatgatacatggtccttgcgattcattgaatccacactctccttgcatgaagaacgacaaatgctcaaagaactatccaaagcaattatgtgaaataaccactttggacaatcaagggttcgtcacatataaacgaccaaacaatggtcgatatatcattaagtcaggtaataagcttgacaatagatgggttgttccatacggaaaagctttattgaaaatctaccaagctcatattaatattgaatggtgcaacaaaaccatcttcataaaatatctcttcaaatatgtcacaaaagggccagattgcagcaaagcatatttacagaaattaagaaatgacgaagaagctccatatgacgaagcaacggatgcaaagaatgaagtaaaagaatatctggatagtcgttatctttgtgacaaagattctgcatggcgtatattagggtatgaaattcacagacactaccctgcagttgaaagaatgcatgttcatctaccaaatgagaactacatcacctacaatgcaacagctaacatgtttgaaatattatcagaaaaattccttagaaaaaccatgttgacagagtggtttacaactaatgtacaaaatgaaaatgcacgtaatctaacatacattgacttcccatcaaaatggcgatgggacgacaaaacaaggagctggaaatctagagaacaaaaagaaggcaaaataggccgtatatactacgtccatccatccgcaggcgaaaaatactacctatgaatgtcgttggtcactgttaagggtgctacaagttatgaggacctcagatcatacaacaacacactgcatccaacttttaaagaagcatgtcgagcacgtggtctactaaatgatgataacgaatgatatgaagcttttgacgaggctgctaaatgggctacttcagatcaactacgtcaactctttgttaccatgttgctctattgtgaagtgggtgatgaacacatattttttgagaaggtctggaagcttctagctgatgatatacacaatacaatatgcgtaggacattacatcttcccacttatcaaatgcccgaagatgaagtaaaggaccaactgctagacaatcttaccattctatttaataggtgtggagcaaacatacatgactacaatttgcccagaaaaactatcttcatagatccttgctgtggaaatcgactacttgaagaagaattgtcgtacaactttgatgaactatcacatctatcccatgttctatattatagactcaacaaaaatcagctccatgcttttaacactattatagacactgtcattgccaataaacctggattcttctttgtgtctggatatggaggcaccgtaaaaactttcttatggaatgctatcatcacacatctacgagccaataaaaaaatagtactagcagttgcttccttaggtgtagcatccttgcttcttccaggtggccacacagcacattcacgattcaagataccatgcgatctagatgaatctactacttgcaacataaaaaggggaacaatgctagctgaattaattgaatcaacttctctaataatatgggatgaagctttcatgacacacagatgtgcatttgaagctttagatcgctccctccgagatttgctctacttaa

SEQ ID NO: 55389 - DNA, 3145 bp, Zea Mays
aaaaattatgttttggtttattatcaaatatgctttttatatatttactttttcatgattttttgaatgagatgatcggtcaaagttggagttgaaaacatcaaacgaattatattttaaaacagatgaagtattatttaatgaaccctcctccaagttgctggccaaatcattgatgggttcccgaccccattgcttttgtttttgtcagcgtgtgtaaactgcgacgccgagagtatggaggttgtacgggttcaagaaaaaagaaaaccgtcatggttgctgggcaaattattcctgcttcgggatcttatctccgtctggaaaccattatctttgcttttttgttgtcgtcttttctgatccatagatatgcttaaaaaggaaccttttgttgcgcttatctccgttgagtatctagtgtgctccaaagtccaaactcataattgctttggaacctaaaagtggttcattatcctaccttgtcgttgtctttcaattatttctagagaaataagtacttgactaatgactaggatcagattaaagattaggacagtcttagcagagtttttcattatcaaggctatcacgtcaaaaaaaacctgtctatcttcgtaaataaggcgttaagtctgttgaagtgtcacccatttttttcaagagatttccattttttccaaggaaagcagttcatttatctttaagaaaacgagaatcacttagtaaatatagttgacaaactagtttgtgagccagaaaaccagagggaattagagggcaaaatgataatcccttagtaaatatagttgccaaactagttaggagctagaaaatcagagggtcttaaaaaatttatttaaaattgaataagaaaagattttagtctctctaatcctctccggatttatgtcacccaaactagtcttaaatgagaataaaaactcttttgaaaccctcaccgagaatgttctattttttctctccctacatgttgtttgtgtggtcaaccctactccattggccctctcttcctctccgacgaaaacaaggagttaatcctttcgctgtccagttgcccaacgtcgttgtccgaattccgaaatcaaatcacggggacatgtatagctagctgattggatcaaggattcgagtgcccatacctttcatctgctttcatctcgaggtaaatatttgtagctagtgtgttcaccctgtggatcctaatcgtttcgatcaaggacgcaccctaaccttgccaccttggttccgtctaaggaacggtaacaccaaacgacaacaagacgcggttaaaaaaaattaccattggccttaacgcccgtctccccatttagcctggagcagtagttgtcaattgtcatgtgcgttgctgtctgctcgtctggagcaacagcaatgtactatcttggatgcttgatcagggccctctgaactgtggataggctgctgaacaacatctgactgacaccccacacgcacacgcacacgcgcactcactcgctctgtgcccatacgtctttgcacatgatcctttgttttgctgctgctttgttttgcttgcctcggacagtttcgatcgtatgtcttgattggtgagattctatttagttgctccgattcgtcacggtgatcgaatgacctttctgctttgttttgcagtgccgcgaacaagctgtcgagacggagtgccagagaccagctcccctggaagtgcatgaactagtcagctacaagtttagtacatggagcagacgcgcacgggtggtgccggggagcagcccaggggggctcccggcgaggaagcggcgaagaggatcatcgttggcggagacgcgccggcgtcggggacgtctggctctggctgcttcgactgcaacatctgcctcgagtgcgccacggagccggtggtcacgctctgcggccacctctactgctggccctgcatctacgagtggctacgccacgacgtcgccgaagccggcgccaggagctcggcgaggcggcagtgccccgtgtgcaaggccgcggtgtccccggacgctctcgtgccgctctacggccgcggcgggagctccagcgccaagaagccgctggccagcatcccgcgcccgcgccggccggccctgcgacagagcacgcatgacagcggcagcggaggccaccaccaccaccatcggcacgcagagaccagcacgccagcccggtcgctgcggcacccagcccacgcccacgccgcgcagttcgacgccctcctctccgcgccgtttggggaccgcgggatgctgcactcgacgacgtcgacgaccggcgggatgctcggagggatggcggtggccgtcctcccgttggtgctccgcgggcaggcgcgggtgccgggcatgtactacccgagcccgtatcatctgatgagccccaggcagagacggtggcatgtggaggtagagagatccctgcatcagatatggttcttcctctgcgtgttcgtggtgctttgcttgctcttgttctgatttccgaagcaggacaccatcctgcgcctgcgggccacgagacgtgctctgtacatagcaaagggtgagatatggatatggtgctggtgcggcagtgacctatatttggtgattgcatgacggggcgttcaagatgttaaattgagaagcagctgagttgtggttctagaaaggagaaatcggtttcgaaactgcaaaggacccttgagaagattatcagaagccatcgtccacatgttcatgcgcagacagtaacacataagctactgctgattaatccggctgaggaatgaggatgttgccggagcgcgtctcaaaatcacgaatctggatgagagcacttcacgacaggacctgctaccaccgacgtgagtgtgatttgccattgatatacagcctgatcagttgcaactccacttagtactatgatgacgagtaacagagcgtctgtgaaagggagcacggccggctacaacagcagctgaagtagcgcataagtcacaagttacactccactgcaactgatcattcgagctttgcttctttttttttttgtaacggcaacagtcgttgatgactaacataacgaacaatacatgattattatagtttac

SEQ ID NO: 55390 - DNA, 3249 bp, Zea Mays
cgcactgcactacactgcaccccgcctccgctgacgtcgacgcgcacgccgcatccgccgccttcctccctcctcatccgatctcttccttgcaagccccaagggcagtctcatctcatctcataaaagctgagctgttagcgccatcgccaccatcacatctttttcctccgcctatttgtactacgccactgttgtgatcctgcgccctggacctgggggacagagagacggagggacgtcggctgcatcctgccgccgcagcgtgtgtaaactgcgacgccgagagtatggaggttgtacgggttcaagaaaaaagaaaaccgtcatggttgctgggcaaattattcctgcttcgggatcttatctccgtctggaaaccattatctttgcttttttgttgtcgtcttttctgatccatagatatgcttaaaaaggaaccttttgttgcgcttatctccgttgagtatctagtgtgctccaaagtccaaactcataattgctttggaacctaaaagtggttcattatcctaccttgtcgttgtctttcaattatttctagagaaataagtacttgactaatgactaggatcagattaaagattaggacagtcttagcagagtttttcattatcaaggctatcacgtcaaaaaaaacctgtctatcttcgtaaataaggcgttaagtctgttgaagtgtcacccatttttttcaagagatttccattttttccaaggaaagcagttcatttatctttaagaaaacgagaatcacttagtaaatatagttgacaaactagtttgtgagccagaaaaccagagggaattagagggcaaaatgataatcccttagtaaatatagttgccaaactagttaggagctagaaaatcagagggtcttaaaaaatttatttaaaattgaataagaaaagattttagtctctctaatcctctccggatttatgtcacccaaactagtcttaaatgagaataaaaactcttttgaaaccctcaccgagaatgttctattttttctctccctacatgttgtttgtgtggtcaaccctactccattggccctctcttcctctccgacgaaaacaaggagttaatcctttcgctgtccagttgcccaacgtcgttgtccgaattccgaaatcaaatcacggggacatgtatagctagctgattggatcaaggattcgagtgcccatacctttcatctgctttcatctcgaggtaaatatttgtagctagtgtgttcaccctgtggatcctaatcgtttcgatcaaggacgcaccctaaccttgccaccttggttccgtctaaggaacggtaacaccaaacgacaacaagacgcggttaaaaaaaattaccattggccttaacgcccgtctccccatttagcctggagcagtagttgtcaattgtcatgtgcgttgctgtctgctcgtctggagcaacagcaatgtactatcttggatgcttgatcagggccctctgaactgtggataggctgctgaacaacatctgactgacaccccacacgcacacgcacacgcgcactcactcgctctgtgcccatacgtctttgcacatgatcctttgttttgctgctgctttgttttgcttgcctcggacagtttcgatcgtatgtcttgattgtgccgcgaacaagctgtcgagacggagtgccagagaccagctcccctggaagtgcatgaactagtcagctacaagtttagtacatggagcagacgcgcacgggtggtgccggggagcagcccaggggggctcccggcgaggaagcggcgaagaggatcatcgttggcggagacgcgccggcgtcggggacgtctggctctggctgcttcgactgcaacatctgcctcgagtgcgccacggagccggtggtcacgctctgcggccacctctactgctggccctgcatctacgagtggctacgccacgacgtcgccgaagccggcgccaggagctcggcgaggcggcagtgccccgtgtgcaaggccgcggtgtccccggacgctctcgtgccgctctacggccgcggcgggagctccagcgccaagaagccgctggccagcatcccgcgcccgcgccggccggccctgcgacagagcacgcatgacagcggcagcggaggccaccaccaccaccatcggcacgcagagaccagcacgccagcccggtcgctgcggcacccagcccacgcccacgccgcgcagttcgacgccctcctctccgcgccgtttggggaccgcgggatgctgcactcgacgacgtcgacgaccggcgggatgctcggagggatggcggtggccgtcctcccgttggtgctccgcgggcaggcgcgggtgccgggcatgtactacccgagcccgtatcatctgatgagccccaggcagagacggtggcatgtggaggacaccatcctgcgcctgcgggccacgagacgtgctctgtacatagcaaagggtgagatatggatatggtgctggtgcggcagtgacctatatttggtgattgcatgacggggcgttcaagatgttaaattgagaagcagctgagttgtggttctagaaaggagaaatcggtttcgaaactgcaaaggacccttgagaagattatcagaagccatcgtccacatgttcatgcgcagacagtaacacataagctactgctgtgctccctccatctcggtggtcaccagcaatgcagcatttaactctaaaagtctgcaatgtgtgcgaaaaaggaatgccactcgtggcagcttacatagctccctttgccaaaagaacaacagcaccttgattcaaaacgtcacttaagattgtgttaagatctatgatcatcttctgtcaactccgctgattttgcagctgattaatccggctgaggaatgaggatgttgccggagcgcgtctcaaaatcacgaatctggatgagagcacttcacgacaggacctgctaccaccgacgtgagtgtgatttgccattgatatacagcctgatcagttgcaactccacttagtactatgatgacgagtaacagagcgtctgtgaaagggagcacggccggctacaacagcagctgaagtagcgcataagtcacaagttacactccactgcaactgatcattcgagctttgcttctttttttttttgtaacggcaacagtcgttgatgactaacataacgaacaatacatgattattatagtttac

SEQ ID NO: 55391 - DNA, 3198 bp, Zea Mays
cgcactgcactacactgcaccccgcctccgctgacgtcgacgcgcacgccgcatccgccgccttcctccctcctcatccgatctcttccttgcaagccccaagggcagtctcatctcatctcataaaagctgagctgttagcgccatcgccaccatcacatctttttcctccgcctatttgtactacgccactgttgtgatcctgcgccctggacctgggggacagagagacggagggacgtcggctgcatcctgccgccgcagcgtgtgtaaactgcgacgccgagagtatggaggttgtacgggttcaagaaaaaagaaaaccgtcatggttgctgggcaaattattcctgcttcgggatcttatctccgtctggaaaccattatctttgcttttttgttgtcgtcttttctgatccatagatatgcttaaaaaggaaccttttgttgcgcttatctccgttgagtatctagtgtgctccaaagtccaaactcataattgctttggaacctaaaagtggttcattatcctaccttgtcgttgtctttcaattatttctagagaaataagtacttgactaatgactaggatcagattaaagattaggacagtcttagcagagtttttcattatcaaggctatcacgtcaaaaaaaacctgtctatcttcgtaaataaggcgttaagtctgttgaagtgtcacccatttttttcaagagatttccattttttccaaggaaagcagttcatttatctttaagaaaacgagaatcacttagtaaatatagttgacaaactagtttgtgagccagaaaaccagagggaattagagggcaaaatgataatcccttagtaaatatagttgccaaactagttaggagctagaaaatcagagggtcttaaaaaatttatttaaaattgaataagaaaagattttagtctctctaatcctctccggatttatgtcacccaaactagtcttaaatgagaataaaaactcttttgaaaccctcaccgagaatgttctattttttctctccctacatgttgtttgtgtggtcaaccctactccattggccctctcttcctctccgacgaaaacaaggagttaatcctttcgctgtccagttgcccaacgtcgttgtccgaattccgaaatcaaatcacggggacatgtatagctagctgattggatcaaggattcgagtgcccatacctttcatctgctttcatctcgaggtaaatatttgtagctagtgtgttcaccctgtggatcctaatcgtttcgatcaaggacgcaccctaaccttgccaccttggttccgtctaaggaacggtaacaccaaacgacaacaagacgcggttaaaaaaaattaccattggccttaacgcccgtctccccatttagcctggagcagtagttgtcaattgtcatgtgcgttgctgtctgctcgtctggagcaacagcaatgtactatcttggatgcttgatcagggccctctgaactgtggataggctgctgaacaacatctgactgacaccccacacgcacacgcacacgcgcactcactcgctctgtgcccatacgtctttgcacatgatcctttgttttgctgctgctttgttttgcttgcctcggacagtttcgatcgtatgtcttgattggtgagattctatttagttgctccgattcgtcacggtgatcgaatgacctttctgctttgttttgcagtgccgcgaacaagctgtcgagacggagtgccagagaccagctcccctggaagtgcatgaactagtcagctacaagtttagtacatggagcagacgcgcacgggtggtgccggggagcagcccaggggggctcccggcgaggaagcggcgaagaggatcatcgttggcggagacgcgccggcgtcggggacgtctggctctggctgcttcgactgcaacatctgcctcgagtgcgccacggagccggtggtcacgctctgcggccacctctactgctggccctgcatctacgagtggctacgccacgacgtcgccgaagccggcgccaggagctcggcgaggcggcagtgccccgtgtgcaaggccgcggtgtccccggacgctctcgtgccgctctacggccgcggcgggagctccagcgccaagaagccgctggccagcatcccgcgcccgcgccggccggccctgcgacagagcacgcatgacagcggcagcggaggccaccaccaccaccatcggcacgcagagaccagcacgccagcccggtcgctgcggcacccagcccacgcccacgccgcgcagttcgacgccctcctctccgcgccgtttggggaccgcgggatgctgcactcgacgacgtcgacgaccggcgggatgctcggagggatggcggtggccgtcctcccgttggtgctccgcgggcaggcgcgggtgccgggcatgtactacccgagcccgtatcatctgatgagccccaggcagagacggtggcatgtggaggtagagagatccctgcatcagatatggttcttcctctgcgtgttcgtggtgctttgcttgctcttgttctgatttccgaagcaggacaccatcctgcgcctgcgggccacgagacgtgctctgtacatagcaaagggtgagatatggatatggtgctggtgcggcagtgacctatatttggtgattgcatgacggggcgttcaagatgttaaattgagaagcagctgagttgtggttctagaaaggagaaatcggtttcgaaactgcaaaggacccttgagaagattatcagaagccatcgtccacatgttcatgcgcagacagtaacacataagctactgctgattaatccggctgaggaatgaggatgttgccggagcgcgtctcaaaatcacgaatctggatgagagcacttcacgacaggacctgctaccaccgacgtgagtgtgatttgccattgatatacagcctgatcagttgcaactccacttagtactatgatgacgagtaacagagcgtctgtgaaagggagcacggccggctacaacagcagctgaagtagcgcataagtcacaagttacactccactgcaactgatcattcgagctttgcttctttttttttttgtaacggcaacagtcgttgatgactaacataacgaacaatacatgattattatagtttac

SEQ ID NO: 55392 - DNA, 1777 bp, Zea Mays
gtcccgcactgcactacactgcaccccgcctccgctgacgtcgacgcgcacgccgcatccgccgccttcctccctcctcatccgatctcttccttgcaagccccaagggcagtctcatctcatctcataaaagctgagctgttagcgccatcgccaccatcacatctttttcctccgcctatttgtactacgccactgttgtgatcctgcgccctggacctgggggacagagagacggagggacgtcggctgcatcctgccgccgcagtgccgcgaacaagctgtcgagacggagtgccagagaccagctcccctggaagtgcatgaactagtcagctacaagtttagtacatggagcagacgcgcacgggtggtgccggggagcagcccaggggggctcccggcgaggaagcggcgaagaggatcatcgttggcggagacgcgccggcgtcggggacgtctggctctggctgcttcgactgcaacatctgcctcgagtgcgccacggagccggtggtcacgctctgcggccacctctactgctggccctgcatctacgagtggctacgccacgacgtcgccgaagccggcgccaggagctcggcgaggcggcagtgccccgtgtgcaaggccgcggtgtccccggacgctctcgtgccgctctacggccgcggcgggagctccagcgccaagaagccgctggccagcatcccgcgcccgcgccggccggccctgcgacagagcacgcatgacagcggcagcggaggccaccaccaccaccatcggcacgcagagaccagcacgccagcccggtcgctgcggcacccagcccacgcccacgccgcgcagttcgacgccctcctctccgcgccgtttggggaccgcgggatgctgcactcgacgacgtcgacgaccggcgggatgctcggagggatggcggtggccgtcctcccgttggtgctccgcgggcaggcgcgggtgccgggcatgtactacccgagcccgtatcatctgatgagccccaggcagagacggtggcatgtggaggacaccatcctgcgcctgcgggccacgagacgtgctctgtacatagcaaagggtgagatatggatatggtgctggtgcggcagtgacctatatttggtgattgcatgacggggcgttcaagatgttaaattgagaagcagctgagttgtggttctagaaaggagaaatcggtttcgaaactgcaaaggacccttgagaagattatcagaagccatcgtccacatgttcatgcgcagacagtaacacataagctactgctgtgctccctccatctcggtggtcaccagcaatgcagcatttaactctaaaagtctgcaatgtgtgcgaaaaaggaatgccactcgtggcagcttacatagctccctttgccaaaagaacaacagcaccttgattcaaaacgtcacttaagattgtgttaagatctatgatcatcttctgtcaactccgctgattttgcagctgattaatccggctgaggaatgaggatgttgccggagcgcgtctcaaaatcacgaatctggatgagagcacttcacgacaggacctgctaccaccgacagcgtctgtgaaagggagcacggccggctacaacagcagctgaagtagcgcataagtcacaagttacactccactgcaactgatcattcgagctttgcttctttttttttttgtaacggcaacagtcgttgatgactaacataacgaacaatacatgattattatagtttac

SEQ ID NO: 55393 - DNA, 1783 bp, Zea Mays
ctccatctcttgtttgttccgcaacctctccgcctttttatccccccgcagtcccgcactgcactacactgcaccccgcctccgctgacgtcgacgcgcacgccgcatccgccgccttcctccctcctcatccgatctcttccttgcaagccccaagggcagtctcatctcatctcataaaagctgagctgttagcgccatcgccaccatcacatctttttcctccgcctatttgtactacgccactgttgtgatcctgcgccctggacctgggggacagagagacggagggacgtcggctgcatcctgccgccgcagtgccgcgaacaagctgtcgagacggagtgccagagaccagctcccctggaagtgcatgaactagtcagctacaagtttagtacatggagcagacgcgcacgggtggtgccggggagcagcccaggggggctcccggcgaggaagcggcgaagaggatcatcgttggcggagacgcgccggcgtcggggacgtctggctctggctgcttcgactgcaacatctgcctcgagtgcgccacggagccggtggtcacgctctgcggccacctctactgctggccctgcatctacgagtggctacgccacgacgtcgccgaagccggcgccaggagctcggcgaggcggcagtgccccgtgtgcaaggccgcggtgtccccggacgctctcgtgccgctctacggccgcggcgggagctccagcgccaagaagccgctggccagcatcccgcgcccgcgccggccggccctgcgacagagcacgcatgacagcggcagcggaggccaccaccaccaccatcggcacgcagagaccagcacgccagcccggtcgctgcggcacccagcccacgcccacgccgcgcagttcgacgccctcctctccgcgccgtttggggaccgcgggatgctgcactcgacgacgtcgacgaccggcgggatgctcggagggatggcggtggccgtcctcccgttggtgctccgcgggcaggcgcgggtgccgggcatgtactacccgagcccgtatcatctgatgagccccaggcagagacggtggcatgtggaggtagagagatccctgcatcagatatggttcttcctctgcgtgttcgtggtgctttgcttgctcttgttctgatttccgaagcaggacaccatcctgcgcctgcgggccacgagacgtgctctgtacatagcaaagggtgagatatggatatggtgctggtgcggcagtgacctatatttggtgattgcatgacggggcgttcaagatgttaaattgagaagcagctgagttgtggttctagaaaggagaaatcggtttcgaaactgcaaaggacccttgagaagattatcagaagccatcgtccacatgttcatgcgcagacagtaacacataagctactgctgattaatccggctgaggaatgaggatgttgccggagcgcgtctcaaaatcacgaatctggatgagagcacttcacgacaggacctgctaccaccgacgtgagtgtgatttgccattgatatacagcctgatcagttgcaactccacttagtactatgatgacgagtaacagagcgtctgtgaaagggagcacggccggctacaacagcagctgaagtagcgcataagtcacaagttacactccactgcaactgatcattcgagctttgcttctttttttttttgtaacggcaacagtcgttgatgactaacataacgaacaatacatgattattatagtttac

SEQ ID NO: 55394 - DNA, 862 bp, Zea Mays
cacttaatacgtgtttatttggctgaggttgtggcctatgttagttagaaagcattttgctgtctgcctgccctcctgaggttcaccctgttcttatgcttatcggttatattatcatcggcggcgaagctataatggtatacagggtacttccaacatcgaaccacgagacaaataagctgatccatctagttctccacgggattgcacttgtccttggtgcggttggaatatatttcgccttcaaaaatcataatgagagtgggattgccaatctttacagtttgcactcttggattgggatagggacgattactttgtatggtattcagtggatagttggattcgttacattcttcttccctggtgctgcgccaaacgtgaagaagggtgttcttccttggcacatactctttgggctctttgtctacatcttagcactggctaatgcggaactcggctttcttgagaagctcactttcctcgagagctcgggtctcgacaaatacggcacagaggcattcttggtgaacttcacagcgttggttgtcgtgttgtttggtgcctctgttgtggtggctgctatagctccagttcgccttgaagaaccacagggttatgttccaattccagaaaactagtacaaatgaaatgtacatcatatgcagttgccaggattggctgttaccatatggagctaagatattcatctctctttattaaggagaagaagatcatggagttatcacgataagaagatagtgcatcttcattgtgtttagatacattctgtgatacttcaaaatttcagtatatgcaaaattgaatatcctgcttcataaatgtctgtatttgctttcat

SEQ ID NO: 55395 - DNA, 1380 bp, Zea Mays
cttgagctctcggtagcacgagaatctacagatatgaaccaagttatataaggtactcgtacaccgaacatgttcgatagaatgctctagtgacagcgaaaaaaccaaacaacaaaaaccaacgaaatccctgccatttttataggagacgacggtgcggggacaccacgctcccgcattcagtccctccagtcgttgcgtcggacgccgttgagcgttggtggcactgtgccagcagcagcgcgccgcgggtggcaaggcaaagggggcgacgaagaggaaagcgaagaaaacgtcatggggcttggccttggcgtgcgggcggcgcccttcacgtacgcggcgcacgcgctggccgtcgcggcggcggccatggtgttggtctgggccatctacttccgcggtgggctcgccatcgaggccaccaacaagaacctcatcttcaacgtgggtactactgcctctcccctccccgcgctggttgcttcaacgccgacaacttgttttggggacgcgtgttttcccttttgtttgctttctttcccctttgacgtcgcgtcgacgtgagcgcgtgtaggctgcttcacgagctagaaaagttcaccctgttcttatgcttatcggttatattatcatcggcggcgaagctataatggtatacagggtacttccaacatcgaaccacgagacaaataagctgatccatctagttctccacgggattgcacttgtccttggtgcggttggaatatatttcgccttcaaaaatcataatgagagtgggattgccaatctttacagtttgcactcttggattgggatagggacgattactttgtatggtattcagtggatagttggattcgttacattcttcttccctggtgctgcgccaaacgtgaagaagggtgttcttccttggcacatactctttgggctctttgtctacatcttagcactggctaatgcggaactcggctttcttgagaagctcactttcctcgagagctcgggtctcgacaaatacggcacagaggcattcttggtgaacttcacagcgttggttgtcgtgttgtttggtgcctctgttgtggtggctgctatagctccagttcgccttgaagaaccacagggttatgttccaattccagaaaactagtacaaatgaaatgtacatcatatgcagttgccaggattggctgttaccatatggagctaagatattcatctctctttattaaggagaagaagatcatggagttatcacgataagaagatagtgcatcttcattgtgtttagatacattctgtgatacttcaaaatttcagtatatgcaaaattgaatatcctgcttcataaatgtctgtatttgctttcat

SEQ ID NO: 55396 - DNA, 840 bp, Zea Mays
gttttttccgcgctagcgatttgctgttgctttctcgcgctgggtcccgcggacgcaggttcaccctgttcttatgcttatcggttatattatcatcggcggcgaagctataatggtatacagggtacttccaacatcgaaccacgagacaaataagctgatccatctagttctccacgggattgcacttgtccttggtgcggttggaatatatttcgccttcaaaaatcataatgagagtgggattgccaatctttacagtttgcactcttggattgggatagggacgattactttgtatggtattcagtggatagttggattcgttacattcttcttccctggtgctgcgccaaacgtgaagaagggtgttcttccttggcacatactctttgggctctttgtctacatcttagcactggctaatgcggaactcggctttcttgagaagctcactttcctcgagagctcgggtctcgacaaatacggcacagaggcattcttggtgaacttcacagcgttggttgtcgtgttgtttggtgcctctgttgtggtggctgctatagctccagttcgccttgaagaaccacagggttatgttccaattccagaaaactagtacaaatgaaatgtacatcatatgcagttgccaggattggctgttaccatatggagctaagatattcatctctctttattaaggagaagaagatcatggagttatcacgataagaagatagtgcatcttcattgtgtttagatacattctgtgatacttcaaaatttcagtatatgcaaaattgaatatcctgcttcataaatgtctgtatttgctttcat

SEQ ID NO: 55397 - DNA, 6137 bp, Zea Mays
caccgcggcgcttcacgcttcacagttcacagtcaccatgcggactcgcttcctcaccgccgactacttcgcgccgtcgccctcggctgccgcctcctccgacctagccatagcgctagcatcccttcccttcccttccctccccgtcccgactcttcctcccgaaccccacctcaccccattcccgttctccgccgatttcctccccgccgttagtgtagccggcgatgatctcgactcgctccccttcgactccgcggtgaccgagctcctcaccgctgtcatcccgcagcccctgcctgtgccggatatccctgtcgctgacgagggcttggatgattatctctacggtaggggtgtttacggcaacgcttttagctctactgatcccgttgctttcagagtcttcaagggactggaagacagccacacaaacggcgataaggaagagggcctcaatttggagggctcagcagttactaagcgaggggacctgttggaggccttgtttgaggttccagagctcgatttcctgtcggttttgcagaagaaaattgcatcgtttgatgacgaagagccagatgcttgtgccggcacctattcatttggtgtccgagacatgaaaatcattccagatttcattgatattgatactgagacaagaataccatatgcagctgaatttgcggagtcaatttatcaagtagaagtccctgtaaaacatgatgatgatgataactgtccttatgctaaagatagctactgcatggaaatcataggactagagaatggtcaaataataccccagttggaggttagtatgaattcttgggagcttgatgagtgcccagcaaaaacaatgatatccaatttttttcatagtattattgaacacttatttgatggagcacaagtctgtcttccatcatttggctcaaatgagttcttgagaccatgtgatattgacatttttgccttggtttgcaaagatgccccacttgtggagtatcaagcagataaaccaattacagcaaatgatgtagcagtaatggattttgtaaggatcaatgatggtattttactggataaaaagtcagcattataccctctcaaacctgatgggacctgttcacattttccttgcttcattctctttgaggaagtaaagatcatcgactttccttccaaggatgcctttaagtcacttgttcttattcagtcagagaaagctgagatgaatacatctgaggaaatattcaaagacgactttgatcaagcaaaacatttctatgaatcagtggttagctctgaattggctctagttgatgatacattcaaatcactacctacacctattttacatgatgataaagcaatgcgatctatgcttccccctatagaagaagtactttgctccctaaaaccacttcctctatctgcagcagatgggatttatttggattggcatcttttatcagaagggccatgcaaccgggagagttgctctacttatgagagcatggttgaggaggtaaagccttgcagtttaaattctgaactacaaataagtggccagcagatgccagcgcttgacattggttttctggaggattttccgagaagtgcaaagcctcaacatgaggacaagcagaatgaggtttatgttcctgggcctatatctcatgatccatcagctaatttggaagcaactcaaaagaacatgctagaaaatgttgttagaggtcatacccacatggataaattgagttcagaaaaggaatcatccttgtttgagtcaacgtcacagtccaatgggctaagcttctacttgaatgtgagaaatggcactaataaagtgagaaaagctgaggatatttctaccttagacatcccctcttcaaaacaagcagcttcaatttcaaccagacctaaagttaacaaactcatagaaattcatcctgtcaacctctcagatattatccaaggccttatcaatgacatccatgtaagttatacatctgctttgcaagaaagtgcatacttaaggcattctttctccgatgggcaaggtttaagcatttcaaagcaaaagcttcttgaactgataacaggggaaggttcagaaggcctgtatagctgctgtaaatatgaagataagatggagcttattgtactgtatgcattaaaacaggttgcatattacctatgtttctttggtctgcatgccgcctatctgtatgtaggcaatttgactggaacctttgaaattattcctgagaggttaagacatcttcaacgctgcattggtgaagctcgactgaaagctgagaagcaattacaggagtctcatccgtcattatctgtcatcgagacaatccttagatctaatacccaaatcgaccaaaagatccttatagtgtctgatagagctttctggttgccattgggccaaaagcttactgcaatgaagataacatctgttgagtttggaacataccattcaaccacttattcagatgcggtgattgagacaaattctaaaagatgtatgctgcaagaattatggaaatcagactgcattctgctagataacaagaacatcccagcttcattccccttcagtgaattttgcatgatagtggaatatggaggcccaaataaatcatctatcttgttatctctggctcccaaattagatgggttgccaccactgcatttcctgtatgtcacagttgatggtgaaggccttccaaatgctcttgtcgaggacaatcacacagacccggatttgaaatccacattggatgctgctttgcatacacttcagaaggacttgcaagagaagatgaacaaaatgcgcattgttgattcattaaactttataccggcaacaaatcaacagcaacatttgcagaccaatcatctcactgtggattcatcaaaaaaaattcctgcagatgttcaactgcacaatgcgggaaatctgaacgaaaagaatattgttgattcacacaacttagtgactgcaactgaacagcccaatggcttgaaccaaataaccattgccaatttacaaaattttgtgcctgtagttgagaagagcagttcgactgttgtatctgcgaatgtgataaaagccccccaagtcaaccaatctgccggtgtccttcctctcagtgagaaaatggacagcaccaaagcaggaagattgcctggcccagaggtggcgattgttgtcaatactggaaatcatggaaaaaatatgcttttctctcgaagatcatcttatcagcagatactagctttggagagaggaggtatgcaggttgtagagcgagatgttgatctgcctgtggatctaatacttactgcggcagtttgtttactatggtatgatacaagaacctctggttccagtgagttaacaatatcagcaggcacatctggtataacaaattttctagaggatattgctaccaacgttctgatggcacttagcttctgtttctgtggctgcataatggtcttcgagggtgaaaatcacttgctttctgctgtaatggaggcatctgattctctatatgcttcagctgttaacctggacatgaatttgcagctattcttctcagaaatgcccaaatcaacagatcaaatcattctcaattgcatcaggaatgctgttaggataaatcaggctctttgtccacaaataactgaatcggaaagtctggttgagtcatttctcacagcattcccttcagttagtcctctgtctgcacacatgatactttcttctggcagtcttatggatttcctcagatggtcacatgagcaacgtactcaggctgttgaaaagtatcatttgccaccgcagagcatttctctcttcagtgctttgtgcaaattcggtgaactaggtgaatcaaagtctgtaatgactgaatgctcttctgttgattcagatatcagtagtactttgctgcagtctccgaggaaaaagaaaaggcgtgccgcacaagacttttccgttgcagttagtaatcctgctttccctaatccatgtactcaattgcatggtgactgtgtagaaaatgacaagatattctcaccacctaagttaaggaaattctttcacatagaggatacaatgtctgacctccccgaagtctttatgattgatcaacggttgaatatgggtagtgaaggtgtctcttgtcagccaagaaagtatgatgtggatgctgtaactgggatcaatataatagatgatgacttcattaatgagttgactccaaatttcagaacatacaatgaaaggactagcagtatggtggacacatgcaatttctctaagcaatccgaattgggagctaaacagccaatcagaagttcctttcccgccagcttaccatcagtctgtacaacttccagtcatccaacattcccatccgcattggagatcaataatgaccctggtagctgggacgttccatgtagtataaatcagacatgggcaggtcatgtgcatggggatttcgccacaagctctggcagaaatgatcagggtgtcagatatcatgaaccaagacaggaaataatgcagactccagtaccttcactttcttttctgaaacaggattttggctgtcatggagcatcacaaggctcaggctgggaaattgactatctaaggcgaatgaatgaaaacagaaaagcatgccgagagcaatctagatgcagtgtttcaacgcagccaaattcaagaacaagggatggctcctcaagaattctgagtgctcctccaattgaatctttcagatatgaaagaaataaagatgcccctttcagggaccagaaccgttcagatattgaatctttcagatatcgaagagatataaacacgcttttgagggaccagagcccttcaaatgaggttcgtaggtatgggaaaggcaggggaggaactaaagcacagagccatagggtaagaaaggatttcaaggcacaacctagcataaatcatgaaaagagcataatgccatccatcgagccaacatggactcctcttgacaagagagcgagacaaaaacttacatttgcaacatatgggaacgaaaaacaaagcaagctggtttggagacatcaaagcagccccggtgttggatgtggcttccctaaaaagtaccatgaagaaggttcaggtttcactgcagtaatcttgttgacatgtgtttgcatttatgatgctcgcatggcggcatggatagctattcattttctgaaactgtgagggtatggcattattggcatatccccaaaggttcaccctgttcttatgcttatcggttatattatcatcggcggcgaagctataatggtatacagggtacttccaacatcgaaccacgagacaaataagctgatccatctagttctccacgggattgcacttgtccttggtgcggttggaatatatttcgccttcaaaaatcataatgagagtgggattgccaatctttacagtttgcactcttggattgggatagggacgattactttgtatggtattcagtggatagttggattcgttacattcttcttccctggtgctgcgccaaacgtgaagaagggtgttcttccttggcacatactctttgggctctttgtctacatcttagcactggctaatgcggaactcggctttcttgagaagctcactttcctcgagagctcgggtctcgacaaatacggcacagaggcattcttggtgaacttcacagcgttggttgtcgtgttgtttggtgcctctgttgtggtggctgctatagctccagttcgccttgaagaaccacagggttatgttccaattccagaaaactagtacaaatgaaatgtacatcatatgcagttgccaggattggctgttaccatatggagctaagatattcatctctctttattaaggagaagaagatcatggagttatcacgataagaagatagtgcatcttcattgtgtttgtatatgtctacactattgtcttaaggattagtagagatacattctgtgatacttcaaaatttcagtatatgcaaaattgaatatcctgcttcataaatgtctgtatttgctttcat

SEQ ID NO: 55398 - DNA, 6424 bp, Zea Mays
cccaccgctccctcccctccaccgcggcgcttcacgcttcacagttcacagtcaccatgcggactcgcttcctcaccgccgactacttcgcgccgtcgccctcggctgccgcctcctccgacctagccatagcgctagcatcccttcccttcccttccctccccgtcccgactcttcctcccgaaccccacctcaccccattcccgttctccgccgatttcctccccgccgttagtgtagccggcgatgatctcgactcgctccccttcgactccgcggtgaccgagctcctcaccgctgtcatcccgcagcccctgcctgtgccggatatccctgtcgctgacgagggcttggatgattatctctacggtaggggtgtttacggcaacgcttttagctctactgatcccgttgctttcagagtcttcaagggactggaagacagccacacaaacggcgataaggaagagggcctcaatttggagggctcagcagttactaagcgaggggacctgttggaggccttgtttgaggttccagagctcgatttcctgtcgaagaaaattgcatcgtttgatgacgaagagccagatgcttgtgccggcacctattcatttggtgtccgagacatgaaaatcattccagatttcattgatattgatactgagacaagaataccatatgcagctgaatttgcggagtcaatttatcaagtagaagtccctgtaaaacatgatgatgatgataactgtccttatgctaaagatagctactgcatggaaatcataggactagagaatggtcaaataataccccagttggaggttagtatgaattcttgggagcttgatgagtgcccagcaaaaacaatgatatccaatttttttcatagtattattgaacacttatttgatggagcacaagtctgtcttccatcatttggctcaaatgagttcttgagaccatgtgatattgacatttttgccttggtttgcaaagatgccccacttgtggagtatcaagcagataaaccaattacagcaaatgatgtagcagtaatggattttgtaaggatcaatgatggtattttactggataaaaagtcagcattataccctctcaaacctgatgggacctgttcacattttccttgcttcattctctttgaggaagtaaagatcatcgactttccttccaaggatgcctttaagtcacttgttcttattcagtcagagaaagctgagatgaatacatctgaggaaatattcaaagacgactttgatcaagcaaaacatttctatgaatcagtggttagctctgaattggctctagttgatgatacattcaaatcactacctacacctattttacatgatgataaagcaatgcgatctatgcttccccctatagaagaagtactttgctccctaaaaccacttcctctatctgcagcagatgggatttatttggattggcatcttttatcagaagggccatgcaaccgggagagttgctctacttatgagagcatggttgaggaggtaaagccttgcagtttaaattctgaactacaaataagtggccagcagatgccagcgcttgacattggttttctggaggattttccgagaagtgcaaagcctcaacatgaggacaagcagaatgaggtttatgttcctgggcctatatctcatgatccatcagctaatttggaagcaactcaaaagaacatgctagaaaatgttgttagaggtcatacccacatggataaattgagttcagaaaaggaatcatccttgtttgagtcaacgtcacagtccaatgggctaagcttctacttgaatgtgagaaatggcactaataaagtgagaaaagctgaggatatttctaccttagacatcccctcttcaaaacaagcagcttcaatttcaaccagacctaaagttaacaaactcatagaaattcatcctgtcaacctctcagatattatccaaggccttatcaatgacatccatgtaagttatacatctgctttgcaagaaagtgcatacttaaggcattctttctccgatgggcaaggtttaagcatttcaaagcaaaagcttcttgaactgataacaggggaaggttcagaaggcctgtatagctgctgtaaatatgaagataagatggagcttattgtactgtatgcattaaaacaggttgcatattacctatgtttctttggtctgcatgccgcctatctgtatgtaggcaatttgactggaacctttgaaattattcctgagaggttaagacatcttcaacgctgcattggtgaagctcgactgaaagctgagaagcaattacaggagtctcatccgtcattatctgtcatcgagacaatccttagatctaatacccaaatcgaccaaaagatccttatagtgtctgatagagctttctggttgccattgggccaaaagcttactgcaatgaagataacatctgttgagtttggaacataccattcaaccacttattcagatgcggtgattgagacaaattctaaaagatgtatgctgcaagaattatggaaatcagactgcattctgctagataacaagaacatcccagcttcattccccttcagtgaattttgcatgatagtggaatatggaggcccaaataaatcatctatcttgttatctctggctcccaaattagatgggttgccaccactgcatttcctgtatgtcacagttgatggtgaaggccttccaaatgctcttgtcgaggacaatcacacagacccggatttgaaatccacattggatgctgctttgcatacacttcagaaggacttgcaagagaagatgaacaaaatgcgcattgttgattcattaaactttataccggcaacaaatcaacagcaacatttgcagaccaatcatctcactgtggattcatcaaaaaaaattcctgcagatgttcaactgcacaatgcgggaaatctgaacgaaaagaatattgttgattcacacaacttagtgactgcaactgaacagcccaatggcttgaaccaaataaccattgccaatttacaaaattttgtgcctgtagttgagaagagcagttcgactgttgtatctgcgaatgtgataaaagccccccaagtcaaccaatctgccggtgtccttcctctcagtgagaaaatggacagcaccaaagcaggaagattgcctggcccagaggtggcgattgttgtcaatactggaaatcatggaaaaaatatgcttttctctcgaagatcatcttatcagcagatactagctttggagagaggaggtatgcaggttgtagagcgagatgttgatctgcctgtggatctaatacttactgcggcagtttgtttactatggtatgatacaagaacctctggttccagtgagttaacaatatcagcaggcacatctggtataacaaattttctagaggatattgctaccaacgttctgatggcacttagcttctgtttctgtggctgcataatggtcttcgagggtgaaaatcacttgctttctgctgtaatggaggcatctgattctctatatgcttcagctgttaacctggacatgaatttgcagctattcttctcagaaatgcccaaatcaacagatcaaatcattctcaattgcatcaggaatgctgttaggataaatcaggctctttgtccacaaataactgaatcggaaagtctggttgagtcatttctcacagcattcccttcagttagtcctctgtctgcacacatgatactttcttctggcagtcttatggatttcctcagatggtcacatgagcaacgtactcaggctgttgaaaagtatcatttgccaccgcagagcatttctctcttcagtgctttgtgcaaattcggtgaactaggtgaatcaaagtctgtaatgactgaatgctcttctgttgattcagatatcagtagtactttgctgcagtctccgaggaaaaagaaaaggcgtgccgcacaagacttttccgttgcagttagtaatcctgctttccctaatccatgtactcaattgcatggtgactgtgtagaaaatgacaagatattctcaccacctaagttaaggaaattctttcacatagaggatacaatgtctgacctccccgaagtctttatgattgatcaacggttgaatatgggtagtgaaggtgtctcttgtcagccaagaaagtatgatgtggatgctgtaactgggatcaatataatagatgatgacttcattaatgagttgactccaaatttcagaacatacaatgaaaggactagcagtatggtggacacatgcaatttctctaagcaatccgaattgggagctaaacagccaatcagaagttcctttcccgccagcttaccatcagtctgtacaacttccagtcatccaacattcccatccgcattggagatcaataatgaccctggtagctgggacgttccatgtagtataaatcagacatgggcaggtcatgtgcatggggatttcgccacaagctctggcagaaatgatcagggtgtcagatatcatgaaccaagacaggaaataatgcagactccagtaccttcactttcttttctgaaacaggattttggctgtcatggagcatcacaaggctcaggctgggaaattgactatctaaggcgaatgaatgaaaacagaaaagcatgccgagagcaatctagatgcagtgtttcaacgcagccaaattcaagaacaagggatggctcctcaagaattctgagtgctcctccaattgaatctttcagatatgaaagaaataaagatgcccctttcagggaccagaaccgttcagatattgaatctttcagatatcgaagagatataaacacgcttttgagggaccagagcccttcaaatgaggttcgtaggtatgggaaaggcaggggaggaactaaagcacagagccatagggtaagaaaggatttcaaggcacaacctagcataaatcatgaaaagagcataatgccatccatcgagccaacatggactcctcttgacaagagagcgagacaaaaacttacatttgcaacatatgggaacgaaaaacaaagcaagctggtttggagacatcaaagcagccccggtgttggatgtggcttccctaaaaagtaccatgaagaaggtacgtagattatcaggtccagtaatgtcctggacacccagagcgtgttattttaggagaaggtgcccacatgtaagtttttttttaatgttttggttaagacaatccatgaaatatttcttcatgagaactcgccaccatcattaacctcgcaggagctgtcaatgtacatattgtttttagcactcctgggaatgattgaatgtatccttgttagacttatatcctgtctgtttcaacttatatgaaatttatgtgccactatcatcttctataggttcaggtttcactgcagtaatcttgttgacatgtgtttgcatttatgatgctcgcatggcggcatggatagctattcattttctgaaactgtgagggtatggcattattggcatatccccaaaggttcaccctgttcttatgcttatcggttatattatcatcggcggcgaagctataatggtatacagggtacttccaacatcgaaccacgagacaaataagctgatccatctagttctccacgggattgcacttgtccttggtgcggttggaatatatttcgccttcaaaaatcataatgagagtgggattgccaatctttacagtttgcactcttggattgggatagggacgattactttgtatggtattcagtggatagttggattcgttacattcttcttccctggtgctgcgccaaacgtgaagaagggtgttcttccttggcacatactctttgggctctttgtctacatcttagcactggctaatgcggaactcggctttcttgagaagctcactttcctcgagagctcgggtctcgacaaatacggcacagaggcattcttggtgaacttcacagcgttggttgtcgtgttgtttggtgcctctgttgtggtggctgctatagctccagttcgccttgaagaaccacagggttatgttccaattccagaaaactagtacaaatgaaatgtacatcatatgcagttgccaggattggctgttaccatatggagctaagatattcatctctctttattaaggagaagaagatcatggagttatcacgataagaagatagtgcatcttcattgtgtttgtatatgtctacactattgtcttaaggattagtagagatacattctgtgatacttcaaaatttcagtatatgcaaaattgaatatcctgcttcataaatgtctgtatttgctttcat

SEQ ID NO: 55399 - DNA, 6132 bp, Zea Mays
cccaccgctccctcccctccaccgcggcgcttcacgcttcacagttcacagtcaccatgcggactcgcttcctcaccgccgactacttcgcgccgtcgccctcggctgccgcctcctccgacctagccatagcgctagcatcccttcccttcccttccctccccgtcccgactcttcctcccgaaccccacctcaccccattcccgttctccgccgatttcctccccgccgttagtgtagccggcgatgatctcgactcgctccccttcgactccgcggtgaccgagctcctcaccgctgtcatcccgcagcccctgcctgtgccggatatccctgtcgctgacgagggcttggatgattatctctacggtaggggtgtttacggcaacgcttttagctctactgatcccgttgctttcagagtcttcaaggttttgcagaagaaaattgcatcgtttgatgacgaagagccagatgcttgtgccggcacctattcatttggtgtccgagacatgaaaatcattccagatttcattgatattgatactgagacaagaataccatatgcagctgaatttgcggagtcaatttatcaagtagaagtccctgtaaaacatgatgatgatgataactgtccttatgctaaagatagctactgcatggaaatcataggactagagaatggtcaaataataccccagttggagatgccccacttgtggagtatcaagcagataaaccaattacagcaaatgatgtagcagtaatggattttgtaaggatcaatgatggtattttactggataaaaagtcagcattataccctctcaaacctgatgggacctgttcacattttccttgcttcattctctttgaggaagtaaagatcatcgactttccttccaaggatgcctttaagtcacttgttcttattcagtcagagaaagctgagatgaatacatctgaggaaatattcaaagacgactttgatcaagcaaaacatttctatgaatcagtggttagctctgaattggctctagttgatgatacattcaaatcactacctacacctattttacatgatgataaagcaatgcgatctatgcttccccctatagaagaagtactttgctccctaaaaccacttcctctatctgcagcagatgggatttatttggattggcatcttttatcagaagggccatgcaaccgggagagttgctctacttatgagagcatggttgaggaggtaaagccttgcagtttaaattctgaactacaaataagtggccagcagatgccagcgcttgacattggttttctggaggattttccgagaagtgcaaagcctcaacatgaggacaagcagaatgaggtttatgttcctgggcctatatctcatgatccatcagctaatttggaagcaactcaaaagaacatgctagaaaatgttgttagaggtcatacccacatggataaattgagttcagaaaaggaatcatccttgtttgagtcaacgtcacagtccaatgggctaagcttctacttgaatgtgagaaatggcactaataaagtgagaaaagctgaggatatttctaccttagacatcccctcttcaaaacaagcagcttcaatttcaaccagacctaaagttaacaaactcatagaaattcatcctgtcaacctctcagatattatccaaggccttatcaatgacatccatgtaagttatacatctgctttgcaagaaagtgcatacttaaggcattctttctccgatgggcaaggtttaagcatttcaaagcaaaagcttcttgaactgataacaggggaaggttcagaaggcctgtatagctgctgtaaatatgaagataagatggagcttattgtactgtatgcattaaaacaggttgcatattacctatgtttctttggtctgcatgccgcctatctgtatgtaggcaatttgactggaacctttgaaattattcctgagaggttaagacatcttcaacgctgcattggtgaagctcgactgaaagctgagaagcaattacaggagtctcatccgtcattatctgtcatcgagacaatccttagatctaatacccaaatcgaccaaaagatccttatagtgtctgatagagctttctggttgccattgggccaaaagcttactgcaatgaagataacatctgttgagtttggaacataccattcaaccacttattcagatgcggtgattgagacaaattctaaaagatgtatgctgcaagaattatggaaatcagactgcattctgctagataacaagaacatcccagcttcattccccttcagtgaattttgcatgatagtggaatatggaggcccaaataaatcatctatcttgttatctctggctcccaaattagatgggttgccaccactgcatttcctgtatgtcacagttgatggtgaaggccttccaaatgctcttgtcgaggacaatcacacagacccggatttgaaatccacattggatgctgctttgcatacacttcagaaggacttgcaagagaagatgaacaaaatgcgcattgttgattcattaaactttataccggcaacaaatcaacagcaacatttgcagaccaatcatctcactgtggattcatcaaaaaaaattcctgcagatgttcaactgcacaatgcgggaaatctgaacgaaaagaatattgttgattcacacaacttagtgactgcaactgaacagcccaatggcttgaaccaaataaccattgccaatttacaaaattttgtgcctgtagttgagaagagcagttcgactgttgtatctgcgaatgtgataaaagccccccaagtcaaccaatctgccggtgtccttcctctcagtgagaaaatggacagcaccaaagcaggaagattgcctggcccagaggtggcgattgttgtcaatactggaaatcatggaaaaaatatgcttttctctcgaagatcatcttatcagcagatactagctttggagagaggaggtatgcaggttgtagagcgagatgttgatctgcctgtggatctaatacttactgcggcagtttgtttactatggtatgatacaagaacctctggttccagtgagttaacaatatcagcaggcacatctggtataacaaattttctagaggatattgctaccaacgttctgatggcacttagcttctgtttctgtggctgcataatggtcttcgagggtgaaaatcacttgctttctgctgtaatggaggcatctgattctctatatgcttcagctgttaacctggacatgaatttgcagctattcttctcagaaatgcccaaatcaacagatcaaatcattctcaattgcatcaggaatgctgttaggataaatcaggctctttgtccacaaataactgaatcggaaagtctggttgagtcatttctcacagcattcccttcagttagtcctctgtctgcacacatgatactttcttctggcagtcttatggatttcctcagatggtcacatgagcaacgtactcaggctgttgaaaagtatcatttgccaccgcagagcatttctctcttcagtgctttgtgcaaattcggtgaactaggtgaatcaaagtctgtaatgactgaatgctcttctgttgattcagatatcagtagtactttgctgcagtctccgaggaaaaagaaaaggcgtgccgcacaagacttttccgttgcagttagtaatcctgctttccctaatccatgtactcaattgcatggtgactgtgtagaaaatgacaagatattctcaccacctaagttaaggaaattctttcacatagaggatacaatgtctgacctccccgaagtctttatgattgatcaacggttgaatatgggtagtgaaggtgtctcttgtcagccaagaaagtatgatgtggatgctgtaactgggatcaatataatagatgatgacttcattaatgagttgactccaaatttcagaacatacaatgaaaggactagcagtatggtggacacatgcaatttctctaagcaatccgaattgggagctaaacagccaatcagaagttcctttcccgccagcttaccatcagtctgtacaacttccagtcatccaacattcccatccgcattggagatcaataatgaccctggtagctgggacgttccatgtagtataaatcagacatgggcaggtcatgtgcatggggatttcgccacaagctctggcagaaatgatcagggtgtcagatatcatgaaccaagacaggaaataatgcagactccagtaccttcactttcttttctgaaacaggattttggctgtcatggagcatcacaaggctcaggctgggaaattgactatctaaggcgaatgaatgaaaacagaaaagcatgccgagagcaatctagatgcagtgtttcaacgcagccaaattcaagaacaagggatggctcctcaagaattctgagtgctcctccaattgaatctttcagatatgaaagaaataaagatgcccctttcagggaccagaaccgttcagatattgaatctttcagatatcgaagagatataaacacgcttttgagggaccagagcccttcaaatgaggttcgtaggtatgggaaaggcaggggaggaactaaagcacagagccatagggtaagaaaggatttcaaggcacaacctagcataaatcatgaaaagagcataatgccatccatcgagccaacatggactcctcttgacaagagagcgagacaaaaacttacatttgcaacatatgggaacgaaaaacaaagcaagctggtttggagacatcaaagcagccccggtgttggatgtggcttccctaaaaagtaccatgaagaaggtacgtagattatcaggtccagtaatgtcctggacacccagagcgtgttattttaggagaaggtgcccacatgtaagtttttttttaatgttttggttaagacaatccatgaaatatttcttcatgagaactcgccaccatcattaacctcgcaggagctgtcaatgtacatattgtttttagcactcctgggaatgattgaatgtatccttgttagacttatatcctgtctgtttcaacttatatgaaatttatgtgccactatcatcttctataggttcaggtttcactgcagtaatcttgttgacatgtgtttgcatttatgatgctcgcatggcggcatggatagctattcattttctgaaactgtgagggtatggcattattggcatatccccaaaggttcaccctgttcttatgcttatcggttatattatcatcggcggcgaagctataatggtatacagggtacttccaacatcgaaccacgagacaaataagctgatccatctagttctccacgggattgcacttgtccttggtgcggttggaatatatttcgccttcaaaaatcataatgagagtgggattgccaatctttacagtttgcactcttggattgggatagggacgattactttgtatggtattcagtggatagttggattcgttacattcttcttccctggtgctgcgccaaacgtgaagaagggtgttcttccttggcacatactctttgggctctttgtctacatcttagcactggctaatgcggaactcggctttcttgagaagctcactttcctcgagagctcgggtctcgacaaatacggcacagaggcattcttggtgaacttcacagcgttggttgtcgtgttgtttggtgcctctgttgtggtggctgctatagctccagttcgccttgaagaaccacagggttatgttccaattccagaaaactagtacaaatgaaatgtacatcatatgcagttgccaggattggctgttaccatatggagctaagatattcatctctctttattaaggagaagaagatcatggagttatcacgataagaagatagtgcatcttcattgtgtttgtatatgtctacactattgtcttaaggattagtagagatacattctgtgatacttcaaaatttcagtatatgcaaaattgaatatcctgcttcataaatgtctgtatttgctttcat

SEQ ID NO: 55400 - DNA, 6147 bp, Zea Mays
cccaccgctccctcccctccaccgcggcgcttcacgcttcacagttcacagtcaccatgcggactcgcttcctcaccgccgactacttcgcgccgtcgccctcggctgccgcctcctccgacctagccatagcgctagcatcccttcccttcccttccctccccgtcccgactcttcctcccgaaccccacctcaccccattcccgttctccgccgatttcctccccgccgttagtgtagccggcgatgatctcgactcgctccccttcgactccgcggtgaccgagctcctcaccgctgtcatcccgcagcccctgcctgtgccggatatccctgtcgctgacgagggcttggatgattatctctacggtaggggtgtttacggcaacgcttttagctctactgatcccgttgctttcagagtcttcaagggactggaagacagccacacaaacggcgataaggaagagggcctcaatttggagggctcagcagttactaagcgaggggacctgttggaggccttgtttgaggttccagagctcgatttcctgtcgaagaaaattgcatcgtttgatgacgaagagccagatgcttgtgccggcacctattcatttggtgtccgagacatgaaaatcattccagatttcattgatattgatactgagacaagaataccatatgcagctgaatttgcggagtcaatttatcaagtagaagtccctgtaaaacatgatgatgatgataactgtccttatgctaaagatagctactgcatggaaatcataggactagagaatggtcaaataataccccagttggaggttagtatgaattcttgggagcttgatgagtgcccagcaaaaacaatgatatccaatttttttcatagtattattgaacacttatttgatggagcacaagtctgtcttccatcatttggctcaaatgagttcttgagaccatgtgatattgacatttttgccttggtttgcaaagatgccccacttgtggagtatcaagcagataaaccaattacagcaaatgatgtagcagtaatggattttgtaaggatcaatgatggtattttactggataaaaagtcagcattataccctctcaaacctgatgggacctgttcacattttccttgcttcattctctttgaggaagtaaagatcatcgactttccttccaaggatgcctttaagtcacttgttcttattcagtcagagaaagctgagatgaatacatctgaggaaatattcaaagacgactttgatcaagcaaaacatttctatgaatcagtggttagctctgaattggctctagttgatgatacattcaaatcactacctacacctattttacatgatgataaagcaatgcgatctatgcttccccctatagaagaagtactttgctccctaaaaccacttcctctatctgcagcagatgggatttatttggattggcatcttttatcagaagggccatgcaaccgggagagttgctctacttatgagagcatggttgaggaggtaaagccttgcagtttaaattctgaactacaaataagtggccagcagatgccagcgcttgacattggttttctggaggattttccgagaagtgcaaagcctcaacatgaggacaagcagaatgaggtttatgttcctgggcctatatctcatgatccatcagctaatttggaagcaactcaaaagaacatgctagaaaatgttgttagaggtcatacccacatggataaattgagttcagaaaaggaatcatccttgtttgagtcaacgtcacagtccaatgggctaagcttctacttgaatgtgagaaatggcactaataaagtgagaaaagctgaggatatttctaccttagacatcccctcttcaaaacaagcagcttcaatttcaaccagacctaaagttaacaaactcatagaaattcatcctgtcaacctctcagatattatccaaggccttatcaatgacatccatgtaagttatacatctgctttgcaagaaagtgcatacttaaggcattctttctccgatgggcaaggtttaagcatttcaaagcaaaagcttcttgaactgataacaggggaaggttcagaaggcctgtatagctgctgtaaatatgaagataagatggagcttattgtactgtatgcattaaaacaggttgcatattacctatgtttctttggtctgcatgccgcctatctgtatgtaggcaatttgactggaacctttgaaattattcctgagaggttaagacatcttcaacgctgcattggtgaagctcgactgaaagctgagaagcaattacaggagtctcatccgtcattatctgtcatcgagacaatccttagatctaatacccaaatcgaccaaaagatccttatagtgtctgatagagctttctggttgccattgggccaaaagcttactgcaatgaagataacatctgttgagtttggaacataccattcaaccacttattcagatgcggtgattgagacaaattctaaaagatgtatgctgcaagaattatggaaatcagactgcattctgctagataacaagaacatcccagcttcattccccttcagtgaattttgcatgatagtggaatatggaggcccaaataaatcatctatcttgttatctctggctcccaaattagatgggttgccaccactgcatttcctgtatgtcacagttgatggtgaaggccttccaaatgctcttgtcgaggacaatcacacagacccggatttgaaatccacattggatgctgctttgcatacacttcagaaggacttgcaagagaagatgaacaaaatgcgcattgttgattcattaaactttataccggcaacaaatcaacagcaacatttgcagaccaatcatctcactgtggattcatcaaaaaaaattcctgcagatgttcaactgcacaatgcgggaaatctgaacgaaaagaatattgttgattcacacaacttagtgactgcaactgaacagcccaatggcttgaaccaaataaccattgccaatttacaaaattttgtgcctgtagttgagaagagcagttcgactgttgtatctgcgaatgtgataaaagccccccaagtcaaccaatctgccggtgtccttcctctcagtgagaaaatggacagcaccaaagcaggaagattgcctggcccagaggtggcgattgttgtcaatactggaaatcatggaaaaaatatgcttttctctcgaagatcatcttatcagcagatactagctttggagagaggaggtatgcaggttgtagagcgagatgttgatctgcctgtggatctaatacttactgcggcagtttgtttactatggtatgatacaagaacctctggttccagtgagttaacaatatcagcaggcacatctggtataacaaattttctagaggatattgctaccaacgttctgatggcacttagcttctgtttctgtggctgcataatggtcttcgagggtgaaaatcacttgctttctgctgtaatggaggcatctgattctctatatgcttcagctgttaacctggacatgaatttgcagctattcttctcagaaatgcccaaatcaacagatcaaatcattctcaattgcatcaggaatgctgttaggataaatcaggctctttgtccacaaataactgaatcggaaagtctggttgagtcatttctcacagcattcccttcagttagtcctctgtctgcacacatgatactttcttctggcagtcttatggatttcctcagatggtcacatgagcaacgtactcaggctgttgaaaagtatcatttgccaccgcagagcatttctctcttcagtgctttgtgcaaattcggtgaactaggtgaatcaaagtctgtaatgactgaatgctcttctgttgattcagatatcagtagtactttgctgcagtctccgaggaaaaagaaaaggcgtgccgcacaagacttttccgttgcagttagtaatcctgctttccctaatccatgtactcaattgcatggtgactgtgtagaaaatgacaagatattctcaccacctaagttaaggaaattctttcacatagaggatacaatgtctgacctccccgaagtctttatgattgatcaacggttgaatatgggtagtgaaggtgtctcttgtcagccaagaaagtatgatgtggatgctgtaactgggatcaatataatagatgatgacttcattaatgagttgactccaaatttcagaacatacaatgaaaggactagcagtatggtggacacatgcaatttctctaagcaatccgaattgggagctaaacagccaatcagaagttcctttcccgccagcttaccatcagtctgtacaacttccagtcatccaacattcccatccgcattggagatcaataatgaccctggtagctgggacgttccatgtagtataaatcagacatgggcaggtcatgtgcatggggatttcgccacaagctctggcagaaatgatcagggtgtcagatatcatgaaccaagacaggaaataatgcagactccagtaccttcactttcttttctgaaacaggattttggctgtcatggagcatcacaaggctcaggctgggaaattgactatctaaggcgaatgaatgaaaacagaaaagcatgccgagagcaatctagatgcagtgtttcaacgcagccaaattcaagaacaagggatggctcctcaagaattctgagtgctcctccaattgaatctttcagatatgaaagaaataaagatgcccctttcagggaccagaaccgttcagatattgaatctttcagatatcgaagagatataaacacgcttttgagggaccagagcccttcaaatgaggttcgtaggtatgggaaaggcaggggaggaactaaagcacagagccatagggtaagaaaggatttcaaggcacaacctagcataaatcatgaaaagagcataatgccatccatcgagccaacatggactcctcttgacaagagagcgagacaaaaacttacatttgcaacatatgggaacgaaaaacaaagcaagctggtttggagacatcaaagcagccccggtgttggatgtggcttccctaaaaagtaccatgaagaaggttcaggtttcactgcagtaatcttgttgacatgtgtttgcatttatgatgctcgcatggcggcatggatagctattcattttctgaaactgtgagggtatggcattattggcatatccccaaaggttcaccctgttcttatgcttatcggttatattatcatcggcggcgaagctataatggtatacagggtacttccaacatcgaaccacgagacaaataagctgatccatctagttctccacgggattgcacttgtccttggtgcggttggaatatatttcgccttcaaaaatcataatgagagtgggattgccaatctttacagtttgcactcttggattgggatagggacgattactttgtatggtattcagtggatagttggattcgttacattcttcttccctggtgctgcgccaaacgtgaagaagggtgttcttccttggcacatactctttgggctctttgtctacatcttagcactggctaatgcggaactcggctttcttgagaagctcactttcctcgagagctcgggtctcgacaaatacggcacagaggcattcttggtgaacttcacagcgttggttgtcgtgttgtttggtgcctctgttgtggtggctgctatagctccagttcgccttgaagaaccacagggttatgttccaattccagaaaactagtacaaatgaaatgtacatcatatgcagttgccaggattggctgttaccatatggagctaagatattcatctctctttattaaggagaagaagatcatggagttatcacgataagaagatagtgcatcttcattgtgtttgtatatgtctacactattgtcttaaggattagtagagatacattctgtgatacttcaaaatttcagtatatgcaaaattgaatatcctgcttcataaatgtctgtatttgctttcat

SEQ ID NO: 55401 - DNA, 5396 bp, Zea Mays
cactcctccagtctccctagtggcctagtccccaccgctccctcccctccaccgcggcgcttcacgcttcacagttcacagtcaccatgcggactcgcttcctcaccgccgactacttcgcgccgtcgccctcggctgccgcctcctccgacctagccatagcgctagcatcccttcccttcccttccctccccgtcccgactcttcctcccgaaccccacctcaccccattcccgttctccgccgatttcctccccgccgttagtgtagccggcgatgatctcgactcgctccccttcgactccgcggtgaccgagctcctcaccgctgtcatcccgcagcccctgcctgtgccggatatccctgtcgctgacgagggcttggatgattatctctacggtaggggtgtttacggcaacgcttttagctctactgatcccgttgctttcagagtcttcaagggactggaagacagccacacaaacggcgataaggaagagggcctcaatttggagggctcagcagttactaagcgaggggacctgttggaggccttgtttgaggttccagagctcgatttcctgtcggttttgcagaagaaaattgcatcgtttgatgacgaagagccagatgcttgtgccggcacctattcatttggtgtccgagacatgaaaatcattccagatttcattgatattgatactgagacaagaataccatatgcagctgaatttgcggagtcaatttatcaagtagaagtccctgtaaaacatgatgatgatgataactgtccttatgctaaagatagctactgcatggaaatcataggactagagaatggtcaaataataccccagttggaggttagtatgaattcttgggagcttgatgagtgcccagcaaaaacaatgatatccaatttttttcatagtattattgaacacttatttgatggagcacaagtctgtcttccatcatttggctcaaatgagttcttgagaccatgtgatattgacatttttgccttggtttgcaaagatgccccacttgtggagtatcaagcagataaaccaattacagcaaatgatgtagcagtaatggattttgtaaggatcaatgatggtattttactggataaaaagtcagcattataccctctcaaacctgatgggacctgttcacattttccttgcttcattctctttgaggaagtaaagatcatcgactttccttccaaggatgcctttaagtcacttgttcttattcagtcagagaaagctgagatgaatacatctgaggaaatattcaaagacgactttgatcaagcaaaacatttctatgaatcagtggttagctctgaattggctctagttgatgatacattcaaatcactacctacacctattttacatgatgataaagcaatgcgatctatgcttccccctatagaagaagtactttgctccctaaaaccacttcctctatctgcagcagatgggatttatttggattggcatcttttatcagaagggccatgcaaccgggagagttgctctacttatgagagcatggttgaggaggtaaagccttgcagtttaaattctgaactacaaataagtggccagcagatgccagcgcttgacattggttttctggaggattttccgagaagtgcaaagcctcaacatgaggacaagcagaatgaggtttatgttcctgggcctatatctcatgatccatcagctaatttggaagcaactcaaaagaacatgctagaaaatgttgttagaggtcatacccacatggataaattgagttcagaaaaggaatcatccttgtttgagtcaacgtcacagtccaatgggctaagcttctacttgaatgtgagaaatggcactaataaagtgagaaaagctgaggatatttctaccttagacatcccctcttcaaaacaagcagcttcaatttcaaccagacctaaagttaacaaactcatagaaattcatcctgtcaacctctcagatattatccaaggccttatcaatgacatccatgtaagttatacatctgctttgcaagaaagtgcatacttaaggcattctttctccgatgggcaaggtttaagcatttcaaagcaaaagcttcttgaactgataacaggggaaggttcagaaggcctgtatagctgctgtaaatatgaagataagatggagcttattgtactgtatgcattaaaacaggttgcatattacctatgtttctttggtctgcatgccgcctatctgtatgtaggcaatttgactggaacctttgaaattattcctgagaggttaagacatcttcaacgctgcattggtgaagctcgactgaaagctgagaagcaattacaggagtctcatccgtcattatctgtcatcgagacaatccttagatctaatacccaaatcgaccaaaagatccttatagtgtctgatagagctttctggttgccattgggccaaaagcttactgcaatgaagataacatctgttgagtttggaacataccattcaaccacttattcagatgcggtgattgagacaaattctaaaagatgtatgctgcaagaattatggaaatcagactgcattctgctagataacaagaacatcccagcttcattccccttcagtgaattttgcatgatagtggaatatggaggcccaaataaatcatctatcttgttatctctggctcccaaattagatgggttgccaccactgcatttcctgtatgtcacagttgatggtgaaggccttccaaatgctcttgtcgaggacaatcacacagacccggatttgaaatccacattggatgctgctttgcatacacttcagaaggacttgcaagagaagatgaacaaaatgcgcattgttgattcattaaactttataccggcaacaaatcaacagcaacatttgcagaccaatcatctcactgtggattcatcaaaaaaaattcctgcagatgttcaactgcacaatgcgggaaatctgaacgaaaagaatattgttgattcacacaacttagtgactgcaactgaacagcccaatggcttgaaccaaataaccattgccaatttacaaaattttgtgcctgtagttgagaagagcagttcgactgttgtatctgcgaatgtgataaaagccccccaagtcaaccaatctgccggtgtccttcctctcagtgagaaaatggacagcaccaaagcaggaagattgcctggcccagaggtggcgattgttgtcaatactggaaatcatggaaaaaatatgcttttctctcgaagatcatcttatcagcagatactagctttggagagaggaggtatgcaggttgtagagcgagatgttgatctgcctgtggatctaatacttactgcggcagtttgtttactatggtatgatacaagaacctctggttccagtgagttaacaatatcagcaggcacatctggtataacaaattttctagaggatattgctaccaacgttctgatggcacttagcttctgtttctgtggctgcataatggtcttcgagggtgaaaatcacttgctttctgctgtaatggaggcatctgattctctatatgcttcagctgttaacctggacatgaatttgcagctattcttctcagaaatgcccaaatcaacagatcaaatcattctcaattgcatcaggaatgctgttaggataaatcaggctctttgtccacaaataactgaatcggaaagtctggttgagtcatttctcacagcattcccttcagttagtcctctgtctgcacacatgatactttcttctggcagtcttatggatttcctcagatggtcacatgagcaacgtactcaggctgttgaaaagtatcatttgccaccgcagagcatttctctcttcagtgctttgtgcaaattcggtgaactaggtgaatcaaagtctgtaatgactgaatgctcttctgttgattcagatatcagtagtactttgctgcagtctccgaggaaaaagaaaaggcgtgccgcacaagacttttccgttgcagttagtaatcctgctttccctaatccatgtactcaattgcatggtgactgtgtagaaaatgacaagatattctcaccacctaagttaaggaaattctttcacatagaggatacaatgtctgacctccccgaagtctttatgattgatcaacggttgaatatgggtagtgaaggtgtctcttgtcagccaagaaagtatgatgtggatgctgtaactgggatcaatataatagatgatgacttcattaatgagttgactccaaatttcagaacatacaatgaaaggactagcagtatggtggacacatgcaatttctctaagcaatccgaattgggagctaaacagccaatcagaagttcctttcccgccagcttaccatcagtctgtacaacttccagtcatccaacattcccatccgcattggagatcaataatgaccctggtagctgggacgttccatgtagtataaatcagacatgggcaggtcatgtgcatggggatttcgccacaagctctggcagaaatgatcagggtgtcagatatcatgaaccaagacaggaaataatgcagactccagtaccttcactttcttttctgaaacaggattttggctgtcatggagcatcacaaggctcaggctgggaaattgactatctaaggcgaatgaatgaaaacagaaaagcatgccgagagcaatctagatgcagtgtttcaacgcagccaaattcaagaacaagggatggctcctcaagaattctgagtgctcctccaattgaatctttcagatatgaaagaaataaagatgcccctttcagggaccagaaccgttcagatattgaatctttcagatatcgaagagatataaacacgcttttgagggaccagagcccttcaaatgaggttcgtaggtatgggaaaggcaggggaggaactaaagcacagagccatagggtaagaaaggatttcaaggcacaacctagcataaatcatgaaaagagcataatgccatccatcgagccaacatggactcctcttgacaagagagcgagacaaaaacttacatttgcaacatatgggaacgaaaaacaaagcaagctggtttggagacatcaaagcagccccggtgttggatgtggcttccctaaaaagtaccatgaagaaggttcaggtttcactgcagtaatcttgttgacatgtgtttgcatttatgatgctcgcatggcggcatggatagctattcattttctgaaactgtgagggtatggcattattggcatatccccaaagccaggacgagggtactatatggcagcg

SEQ ID NO: 55402 - DNA, 3175 bp, Zea Mays
ggatatttggtcatttgattctaaaggaggttgctgagagcccatccagcagggtgtctcagacatactaatggacggggcgcccaagatccttgaaaaatcatcacatgaatgcatgtactcttggtacttcacccgggaagaactcgagaaattttcaccatcaaggaaagatggtattactgaaaacaaggagtcagaaatacggcatttatattgttcatttatccgggacgttgggatcaggctgaagctacctcagatgacactagcaacggcaatcatgctttgccatcgcttctatttacaccagtcccttgccaaaaatggatggcagatcacttcgtgattgggcatttcaaaggaatctaaaaaactcagtcagggagggaaataccgtcctccaggtattatataagagaccgaaacatggtcctggccgagaaaatcaccgaacactggccctccatcactagcgggtcgtcaccacccactctgcaacggcccaatcggaggatggcgcgcaggacgtaacccggaagcgtgcggggcacaacgaggggattttttttaaacgaagtccgaaatttgcccccgagagggatcgaatcgggaacctggaggtgctactcggaagccttaaccattacgctagaggccctttcgccatttcaaaggaaactacgtagctacaaatctacaatgttataggaatgcttattttttagaatctactgtgttgcatcttactgttacaacttaatcaagtttgactgtttgacatactttgatggatcatcttgcaaattacatattcaccagtaagttctaagttctatagaaatggcttactttactgcatttcttttcttagttttgtaagatatgtttagttcatatttactagatcacttgtccagaagttatctctctgttatcttgcagcccctagttatgtcaaacactagtaggaattcctgtgttattctgtgttcataatatttattactctgtttgaagtacatgatctgtttgtggtttgctcttgtggaccagtagttcttctggaacatacttttatttccttttactagttttaattgttccttttatcattactttatttcagacaattgcaacagtatgtgtatttctagcgtcaaaagttgaagatactccttgtcccctggactatgtagttagagtatcctatgaaacaatgtataggcgggacactgctgcggctcaaaggatccgccagaaggatgtttttgagaaacagaaagcgctcattttgattggagagagattgcttctgacaacaattcgatttgatttcaacattcagcatccttatagaccacttcttgatgctatgcaaaatcttggcatcaataaaaaagaagtgaagcaagtagcatggaactttgtgaatgactggcttaaaacaacattgtgcctacagtataaaccccagtacatagctgctggttccctttacctggctgcaaggcttcacgatatcaagcttcctttgcatggagcacatgtttggtggcaccaatttggtgttgcaccaaagcctctggaagctgtcattcatcaaatgatggagcttgcggctgtgaacaaatcgaatcctgttcgtcccaatctggttaagccaaaggaaactttatgtgaagctaaactgagcttatctaatagcccagactctgtgttgaatcaatcaagcttgttaataagcagctctagtcctgatattggcgagaccagtgaccaagtgcaggtggattcttgtcaatacttgataagcagccatacgggtgattgtagggtctcatgtcctgacaacagttcgttggatacttctggtaaagctcatgatgaagagagattggatcaggccttaataaccaagcatgacagtgggatgatgccttctactagtaaccagacatcattagatgctactgtaggcactgagagcagtgctgaatatatgaagcaggatgtaagccattgcgatgacttcaatatcagagtcaatgaccaaagcttgaaccaggcgttaagaaatcagcatggtgatgctgtcccattacctgacatggtatcactagatgctaaggtggacaaggaaagtagttggtgtctggaaccattgattgcaaacttcgactgctgcattgacagcgttaatgtggatagcttgtgcactgatcagagattggctgatgttgcttcaggccccacagctgatgtgccatccgtgctgctggccaaggagaattctgatcctttgagtgcaaagctcgaaaatattgatgttgccaggataaaaggtttactgatgaagaggaagagccggagagagatccaaaaccaagccattgcttcagatggcctcagtgaagaagcctggattgagagagagctggagtctgggattgtcacaaaacaagaagccaattgtgccgccatctcagatgagctaagtgatgaagcctggattgagagagagctcgagtcagggattgtgaccggaccaacaaacgagcaggcgatcacttttgatggtttgagtgaaaatgattggatcgagagagagcttgagtctgggatcatcattgagccagcacctgctatcaagaagcggaagctggagtcaagctgttagctctttagctgctgcattcagaggccagattccaagcaggtgaataattacagatggaggtaccctgcgactagggcacatcgaagccaagagatgtcgcatagatgggaggatcaatattttccttttttttatttctttaaccaaacacctcggaatactttggcacgagggttgtgtgtacagtgggatcttcccagtttcttgaattcagaatcacacgaggtttgtgtgtacagtgggatcttcccagtttcttgaattcagaatcatatccactgtatctgttccttgtttgtgtaaatctagcatgcccgaagttcggctttaattagattgtaggtgtaactgtagcagggattgtctcgtgttaagcccgacgaaaaaatgattcagtgtaactgttactggtaaccaaagaaaattagttattcactatagacttattgttaacaaaagaaaagacagttactggtgtacgatgtttataaattg

SEQ ID NO: 55403 - DNA, 3418 bp, Zea Mays
aatcaatggatatttggtcatttgattctaaaggaggttgctgagagcccatccagcagggtgtctcagacatactaatggacggggcgcccaagatccttgaaaaatcatcacatgaatgcatgtactcttggtacttcacccgggaagaactcgagaaattttcaccatcaaggaaagatggtattactgaaaacaaggagtcagaaatacggcatttatattgttcatttatccgggacgttgggatcaggctgaagctacctcagatgacactagcaacggcaatcatgctttgccatcgcttctatttacaccagtcccttgccaaaaatggatggcaggtgagacttgagagactattttgttgtggcagtgatggttacttgctgatgtctatgaaaagcgacaagggtgcagagtttccttgccaagcatttgttgataatatgttatccatgtccaacttaacattacagattattcttcaaatcatttgaattatctaatcttctaatactattactattttaattttctaattacatgataattcatcttgatgctactctacctcaagatcacttcgtgattgggcatttcaaaggaatctaaaaaactcagtcagggagggaaataccgtcctccaggtattatataagagaccgaaacatggtcctggccgagaaaatcaccgaacactggccctccatcactagcgggtcgtcaccacccactctgcaacggcccaatcggaggatggcgcgcaggacgtaacccggaagcgtgcggggcacaacgaggggattttttttaaacgaagtccgaaatttgcccccgagagggatcgaatcgggaacctggaggtgctactcggaagccttaaccattacgctagaggccctttcgccatttcaaaggaaactacgtagctacaaatctacaatgttataggaatgcttattttttagaatctactgtgttgcatcttactgttacaacttaatcaagtttgactgtttgacatactttgatggatcatcttgcaaattacatattcaccagtaagttctaagttctatagaaatggcttactttactgcatttcttttcttagttttgtaagatatgtttagttcatatttactagatcacttgtccagaagttatctctctgttatcttgcagcccctagttatgtcaaacactagtaggaattcctgtgttattctgtgttcataatatttattactctgtttgaagtacatgatctgtttgtggtttgctcttgtggaccagtagttcttctggaacatacttttatttccttttactagttttaattgttccttttatcattactttatttcagacaattgcaacagtatgtgtatttctagcgtcaaaagttgaagatactccttgtcccctggactatgtagttagagtatcctatgaaacaatgtataggcgggacactgctgcggctcaaaggatccgccagaaggatgtttttgagaaacagaaagcgctcattttgattggagagagattgcttctgacaacaattcgatttgatttcaacattcagcatccttatagaccacttcttgatgctatgcaaaatcttggcatcaataaaaaagaagtgaagcaagtagcatggaactttgtgaatgactggcttaaaacaacattgtgcctacagtataaaccccagtacatagctgctggttccctttacctggctgcaaggcttcacgatatcaagcttcctttgcatggagcacatgtttggtggcaccaatttggtgttgcaccaaagcctctggaagctgtcattcatcaaatgatggagcttgcggctgtgaacaaatcgaatcctgttcgtcccaatctggttaagccaaaggaaactttatgtgaagctaaactgagcttatctaatagcccagactctgtgttgaatcaatcaagcttgttaataagcagctctagtcctgatattggcgagaccagtgaccaagtgcaggtggattcttgtcaatacttgataagcagccatacgggtgattgtagggtctcatgtcctgacaacagttcgttggatacttctggtaaagctcatgatgaagagagattggatcaggccttaataaccaagcatgacagtgggatgatgccttctactagtaaccagacatcattagatgctactgtaggcactgagagcagtgctgaatatatgaagcaggatgtaagccattgcgatgacttcaatatcagagtcaatgaccaaagcttgaaccaggcgttaagaaatcagcatggtgatgctgtcccattacctgacatggtatcactagatgctaaggtggacaaggaaagtagttggtgtctggaaccattgattgcaaacttcgactgctgcattgacagcgttaatgtggatagcttgtgcactgatcagagattggctgatgttgcttcaggccccacagctgatgtgccatccgtgctgctggccaaggagaattctgatcctttgagtgcaaagctcgaaaatattgatgttgccaggataaaaggtttactgatgaagaggaagagccggagagagatccaaaaccaagccattgcttcagatggcctcagtgaagaagcctggattgagagagagctggagtctgggattgtcacaaaacaagaagccaattgtgccgccatctcagatgagctaagtgatgaagcctggattgagagagagctcgagtcagggattgtgaccggaccaacaaacgagcaggcgatcacttttgatggtttgagtgaaaatgattggatcgagagagagcttgagtctgggatcatcattgagccagcacctgctatcaagaagcggaagctggagtcaagctgttagctctttagctgctgcattcagaggccagattccaagcaggtgaataattacagatggaggtaccctgcgactagggcacatcgaagccaagagatgtcgcatagatgggaggatcaatattttccttttttttatttctttaaccaaacacctcggaatactttggcacgagggttgtgtgtacagtgggatcttcccagtttcttgaattcagaatcacacgaggtttgtgtgtacagtgggatcttcccagtttcttgaattcagaatcatatccactgtatctgttccttgtttgtgtaaatctagcatgcccgaagttcggctttaattagattgtaggtgtaactgtagcagggattgtctcgtgttaagcccgacgaaaaaatgattcagtgtaactgttactggtaaccaaagaaaattagttattcactatagacttattgttaacaaaagaaaagacagttactggtgtacgatgtttataaattg

SEQ ID NO: 55404 - DNA, 3314 bp, Zea Mays
tctaccctgcggccttgcttctgttctctcgcgtcgttctcccgtgctccccgcgtgcgctctatctgtttctggtggcgacgacttggcggtcgccggctcgccgccgccgccgtgcacagtcctttattttggggaccttcaccggcgacgagcacccaccaggttgcttcacaaaacttacaacatccaggatacaactaataaggattccttcatctttatctggattttgaggaggttgctgagagcccatccagcagggtgtctcagacatactaatggacggggcgcccaagatccttgaaaaatcatcacatgaatgcatgtactcttggtacttcacccgggaagaactcgagaaattttcaccatcaaggaaagatggtattactgaaaacaaggagtcagaaatacggcatttatattgttcatttatccgggacgttgggatcaggctgaagctacctcagatgacactagcaacggcaatcatgctttgccatcgcttctatttacaccagtcccttgccaaaaatggatggcaggtgagacttgagagactattttgttgtggcagtgatggttacttgctgatgtctatgaaaagcgacaagggtgcagagtttccttgccaagcatttgttgataatatgttatccatgtccaacttaacattacagattattcttcaaatcatttgaattatctaatcttctaatactattactattttaattttctaattacatgataattcatcttgatgctactctacctcaagatcacttcgtgattgggcatttcaaaggaatctaaaaaactcagtcagggagggaaataccgtcctccaggtattatataagagaccgaaacatggtcctggccgagaaaatcaccgaacactggccctccatcactagcgggtcgtcaccacccactctgcaacggcccaatcggaggatggcgcgcaggacgtaacccggaagcgtgcggggcacaacgaggggattttttttaaacgaagtccgaaatttgcccccgagagggatcgaatcgggaacctggaggtgctactcggaagccttaaccattacgctagaggccctttcgccatttcaaaggaaactacgtagctacaaatctacaatgttataggaatgcttattttttagaatctactgtgttgcatcttactgttacaacttaatcaagtttgactgtttgacatactttgatggatcatcttgcaaattacatattcaccaacaattgcaacagtatgtgtatttctagcgtcaaaagttgaagatactccttgtcccctggactatgtagttagagtatcctatgaaacaatgtataggcgggacactgctgcggctcaaaggatccgccagaaggatgtttttgagaaacagaaagcgctcattttgattggagagagattgcttctgacaacaattcgatttgatttcaacattcagcatccttatagaccacttcttgatgctatgcaaaatcttggcatcaataaaaaagaagtgaagcaagtagcatggaactttgtgaatgactggcttaaaacaacattgtgcctacagtataaaccccagtacatagctgctggttccctttacctggctgcaaggcttcacgatatcaagcttcctttgcatggagcacatgtttggtggcaccaatttggtgttgcaccaaagcctctggaagctgtcattcatcaaatgatggagcttgcggctgtgaacaaatcgaatcctgttcgtcccaatctggttaagccaaaggaaactttatgtgaagctaaactgagcttatctaatagcccagactctgtgttgaatcaatcaagcttgttaataagcagctctagtcctgatattggcgagaccagtgaccaagtgcaggtggattcttgtcaatacttgataagcagccatacgggtgattgtagggtctcatgtcctgacaacagttcgttggatacttctggtaaagctcatgatgaagagagattggatcaggccttaataaccaagcatgacagtgggatgatgccttctactagtaaccagacatcattagatgctactgtaggcactgagagcagtgctgaatatatgaagcaggatgtaagccattgcgatgacttcaatatcagagtcaatgaccaaagcttgaaccaggcgttaagaaatcagcatggtgatgctgtcccattacctgacatggtatcactagatgctaaggtggacaaggaaagtagttggtgtctggaaccattgattgcaaacttcgactgctgcattgacagcgttaatgtggatagcttgtgcactgatcagagattggctgatgttgcttcaggccccacagctgatgtgccatccgtgctgctggccaaggagaattctgatcctttgagtgcaaagctcgaaaatattgatgttgccaggataaaaggtttactgatgaagaggaagagccggagagagatccaaaaccaagccattgcttcagatggcctcagtgaagaagcctggattgagagagagctggagtctgggattgtcacaaaacaagaagccaattgtgccgccatctcagatgagctaagtgatgaagcctggattgagagagagctcgagtcagggattgtgaccggaccaacaaacgagcaggcgatcacttttgatggtttgagtgaaaatgattggatcgagagagagcttgagtctgggatcatcattgagccagcacctgctatcaagaagcggaagctggagtcaagctgttagctctttagctgctgcattcagaggccagattccaagcaggtgaataattacagatggaggtaccctgcgactagggcacatcgaagccaagagatgtcgcatagatgggaggatcaatattttccttttttttatttctttaaccaaacacctcggaatactttggcacgagggttgtgtgtacagtgggatcttcccagtttcttgaattcagaatcacacgaggtttgtgtgtacagtgggatcttcccagtttcttgaattcagaatcatatccactgtatctgttccttgtttgtgtaaatctagcatgcccgaagttcggctttaattagattgtaggtgtaactgtagcagggattgtctcgtgttaagcccgacgaaaaaatgattcagtgtaactgttactggtaaccaaagaaaattagttattcactatagacttattgttaacaaaagaaaagacagttactggtgtacgatgtttataaattg

SEQ ID NO: 55405 - DNA, 2880 bp, Zea Mays
tctaccctgcggccttgcttctgttctctcgcgtcgttctcccgtgctccccgcgtgcgctctatctgtttctggtggcgacgacttggcggtcgccggctcgccgccgccgccgtgcacagtcctttattttggggaccttcaccggcgacgagcacccaccaggttgcttcacaaaacttacaacatccaggatacaactaataaggattccttcatctttatctggattttgaggaggttgctgagagcccatccagcagggtgtctcagacatactaatggacggggcgcccaagatccttgaaaaatcatcacatgaatgcatgtactcttggtacttcacccgggaagaactcgagaaattttcaccatcaaggaaagatggtattactgaaaacaaggagtcagaaatacggcatttatattgttcatttatccgggacgttgggatcaggctgaagctacctcagatgacactagcaacggcaatcatgctttgccatcgcttctatttacaccagtcccttgccaaaaatggatggcagatcacttcgtgattgggcatttcaaaggaatctaaaaaactcagtcagggagggaaataccgtcctccaggtattatataagagaccgaaacatggtcctggccgagaaaatcaccgaacactggccctccatcactagcgggtcgtcaccacccactctgcaacggcccaatcggaggatggcgcgcaggacgtaacccggaagcgtgcggggcacaacgaggggattttttttaaacgaagtccgaaatttgcccccgagagggatcgaatcgggaacctggagacaattgcaacagtatgtgtatttctagcgtcaaaagttgaagatactccttgtcccctggactatgtagttagagtatcctatgaaacaatgtataggcgggacactgctgcggctcaaaggatccgccagaaggatgtttttgagaaacagaaagcgctcattttgattggagagagattgcttctgacaacaattcgatttgatttcaacattcagcatccttatagaccacttcttgatgctatgcaaaatcttggcatcaataaaaaagaagtgaagcaagtagcatggaactttgtgaatgactggcttaaaacaacattgtgcctacagtataaaccccagtacatagctgctggttccctttacctggctgcaaggcttcacgatatcaagcttcctttgcatggagcacatgtttggtggcaccaatttggtgttgcaccaaagcctctggaagctgtcattcatcaaatgatggagcttgcggctgtgaacaaatcgaatcctgttcgtcccaatctggttaagccaaaggaaactttatgtgaagctaaactgagcttatctaatagcccagactctgtgttgaatcaatcaagcttgttaataagcagctctagtcctgatattggcgagaccagtgaccaagtgcaggtggattcttgtcaatacttgataagcagccatacgggtgattgtagggtctcatgtcctgacaacagttcgttggatacttctggtaaagctcatgatgaagagagattggatcaggccttaataaccaagcatgacagtgggatgatgccttctactagtaaccagacatcattagatgctactgtaggcactgagagcagtgctgaatatatgaagcaggatgtaagccattgcgatgacttcaatatcagagtcaatgaccaaagcttgaaccaggcgttaagaaatcagcatggtgatgctgtcccattacctgacatggtatcactagatgctaaggtggacaaggaaagtagttggtgtctggaaccattgattgcaaacttcgactgctgcattgacagcgttaatgtggatagcttgtgcactgatcagagattggctgatgttgcttcaggccccacagctgatgtgccatccgtgctgctggccaaggagaattctgatcctttgagtgcaaagctcgaaaatattgatgttgccaggataaaaggtttactgatgaagaggaagagccggagagagatccaaaaccaagccattgcttcagatggcctcagtgaagaagcctggattgagagagagctggagtctgggattgtcacaaaacaagaagccaattgtgccgccatctcagatgagctaagtgatgaagcctggattgagagagagctcgagtcagggattgtgaccggaccaacaaacgagcaggcgatcacttttgatggtttgagtgaaaatgattggatcgagagagagcttgagtctgggatcatcattgagccagcacctgctatcaagaagcggaagctggagtcaagctgttagctctttagctgctgcattcagaggccagattccaagcaggtgaataattacagatggaggtaccctgcgactagggcacatcgaagccaagagatgtcgcatagatgggaggatcaatattttccttttttttatttctttaaccaaacacctcggaatactttggcacgagggttgtgtgtacagtgggatcttcccagtttcttgaattcagaatcacacgaggtttgtgtgtacagtgggatcttcccagtttcttgaattcagaatcatatccactgtatctgttccttgtttgtgtaaatctagcatgcccgaagttcggctttaattagattgtaggtgtaactgtagcagggattgtctcgtgttaagcccgacgaaaaaatgattcagtgtaactgttactggtaaccaaagaaaattagttattcactatagacttattgttaacaaaagaaaagacagttactggtgtacgatgtttataaattg

SEQ ID NO: 55406 - DNA, 2515 bp, Zea Mays
tctaccctgcggccttgcttctgttctctcgcgtcgttctcccgtgctccccgcgtgcgctctatctgtttctggtggcgacgacttggcggtcgccggctcgccgccgccgccgtgcacagtcctttattttggggaccttcaccggcgacgagcacccaccaggttgcttcacaaaacttacaacatccaggatacaactaataaggattccttcatctttatctggattttgaggaggttgctgagagcccatccagcagggtgtctcagacatactaatggacggggcgcccaagatccttgaaaaatcatcacatgaatgcatgtactcttggtacttcacccgggaagaactcgagaaattttcaccatcaaggaaagatgacctcagatgacactagcaacggcaatcatgctttgccatcgcttctatttacaccagtcccttgccaaaaatggatggcagacaattgcaacagtatgtgtatttctagcgtcaaaagttgaagatactccttgtcccctggactatgtagttagagtatcctatgaaacaatgtataggcgggacactgctgcggctcaaaggatccgccagaaggatgtttttgagaaacagaaagcgctcattttgattggagagagattgcttctgacaacaattcgatttgatttcaacattcagcatccttatagaccacttcttgatgctatgcaaaatcttggcatcaataaaaaagaagtgaagcaagtagcatggaactttgtgaatgactggcttaaaacaacattgtgcctacagtataaaccccagtacatagctgctggttccctttacctggctgcaaggcttcacgatatcaagcttcctttgcatggagcacatgtttggtggcaccaatttggtgttgcaccaaagcctctggaagctgtcattcatcaaatgatggagcttgcggctgtgaacaaatcgaatcctgttcgtcccaatctggttaagccaaaggaaactttatgtgaagctaaactgagcttatctaatagcccagactctgtgttgaatcaatcaagcttgttaataagcagctctagtcctgatattggcgagaccagtgaccaagtgcaggtggattcttgtcaatacttgataagcagccatacgggtgattgtagggtctcatgtcctgacaacagttcgttggatacttctggtaaagctcatgatgaagagagattggatcaggccttaataaccaagcatgacagtgggatgatgccttctactagtaaccagacatcattagatgctactgtaggcactgagagcagtgctgaatatatgaagcaggatgtaagccattgcgatgacttcaatatcagagtcaatgaccaaagcttgaaccaggcgttaagaaatcagcatggtgatgctgtcccattacctgacatggtatcactagatgctaaggtggacaaggaaagtagttggtgtctggaaccattgattgcaaacttcgactgctgcattgacagcgttaatgtggatagcttgtgcactgatcagagattggctgatgttgcttcaggccccacagctgatgtgccatccgtgctgctggccaaggagaattctgatcctttgagtgcaaagctcgaaaatattgatgttgccaggataaaaggtttactgatgaagaggaagagccggagagagatccaaaaccaagccattgcttcagatggcctcagtgaagaagcctggattgagagagagctggagtctgggattgtcacaaaacaagaagccaattgtgccgccatctcagatgagctaagtgatgaagcctggattgagagagagctcgagtcagggattgtgaccggaccaacaaacgagcaggcgatcacttttgatggtttgagtgaaaatgattggatcgagagagagcttgagtctgggatcatcattgagccagcacctgctatcaagaagcggaagctggagtcaagctgttagctctttagctgctgcattcagaggccagattccaagcaggtgaataattacagatggaggtaccctgcgactagggcacatcgaagccaagagatgtcgcatagatgggaggatcaatattttccttttttttatttctttaaccaaacacctcggaatactttggcacgagggttgtgtgtacagtgggatcttcccagtttcttgaattcagaatcacacgaggtttgtgtgtacagtgggatcttcccagtttcttgaattcagaatcatatccactgtatctgttccttgtttgtgtaaatctagcatgcccgaagttcggctttaattagattgtaggtgtaactgtagcagggattgtctcgtgttaagcccgacgaaaaaatgattcagtgtaactgttactggtaaccaaagaaaattagttattcactatagacttattgttaacaaaagaaaagacagttactggtgtacgatgtttataaattg

SEQ ID NO: 55407 - DNA, 3118 bp, Zea Mays
catctaccctgcggccttgcttctgttctctcgcgtcgttctcccgtgctccccgcgtgcgctctatctgtttctggtggcgacgacttggcggtcgccggctcgccgccgccgccgtgcacagtcctttattttggggaccttcaccggcgacgagcacccaccaggttgcttcacaaaacttacaacatccaggatacaactaataaggattccttcatctttatctggattttgaggaggttgctgagagcccatccagcagggtgtctcagacatactaatggacggggcgcccaagatccttgaaaaatcatcacatgaatgcatgtactcttggtacttcacccgggaagaactcgagaaattttcaccatcaaggaaagatggtattactgaaaacaaggagtcagaaatacggcatttatattgttcatttatccgggacgttgggatcaggctgaagctacctcagatgacactagcaacggcaatcatgctttgccatcgcttctatttacaccagtcccttgccaaaaatggatggcaggtgagacttgagagactattttgttgtggcagtgatggttacttgctgatgtctatgaaaagcgacaagggtgcagagtttccttgccaagcatttgttgataatatgttatccatgtccaacttaacattacagattattcttcaaatcatttgaattatctaatcttctaatactattactattttaattttctaattacatgataattcatcttgatgctactctacctcaagatcacttcgtgattgggcatttcaaaggaatctaaaaaactcagtcagggagggaaataccgtcctccaggtattatataagagaccgaaacatggtcctggccgagaaaatcaccgaacactggccctccatcactagcgggtcgtcaccacccactctgcaacggcccaatcggaggatggcgcgcaggacgtaacccggaagcgtgcggggcacaacgaggggattttttttaaacgaagtccgaaatttgcccccgagagggatcgaatcgggaacctggagacaattgcaacagtatgtgtatttctagcgtcaaaagttgaagatactccttgtcccctggactatgtagttagagtatcctatgaaacaatgtataggcgggacactgctgcggctcaaaggatccgccagaaggatgtttttgagaaacagaaagcgctcattttgattggagagagattgcttctgacaacaattcgatttgatttcaacattcagcatccttatagaccacttcttgatgctatgcaaaatcttggcatcaataaaaaagaagtgaagcaagtagcatggaactttgtgaatgactggcttaaaacaacattgtgcctacagtataaaccccagtacatagctgctggttccctttacctggctgcaaggcttcacgatatcaagcttcctttgcatggagcacatgtttggtggcaccaatttggtgttgcaccaaagcctctggaagctgtcattcatcaaatgatggagcttgcggctgtgaacaaatcgaatcctgttcgtcccaatctggttaagccaaaggaaactttatgtgaagctaaactgagcttatctaatagcccagactctgtgttgaatcaatcaagcttgttaataagcagctctagtcctgatattggcgagaccagtgaccaagtgcaggtggattcttgtcaatacttgataagcagccatacgggtgattgtagggtctcatgtcctgacaacagttcgttggatacttctggtaaagctcatgatgaagagagattggatcaggccttaataaccaagcatgacagtgggatgatgccttctactagtaaccagacatcattagatgctactgtaggcactgagagcagtgctgaatatatgaagcaggatgtaagccattgcgatgacttcaatatcagagtcaatgaccaaagcttgaaccaggcgttaagaaatcagcatggtgatgctgtcccattacctgacatggtatcactagatgctaaggtggacaaggaaagtagttggtgtctggaaccattgattgcaaacttcgactgctgcattgacagcgttaatgtggatagcttgtgcactgatcagagattggctgatgttgcttcaggccccacagctgatgtgccatccgtgctgctggccaaggagaattctgatcctttgagtgcaaagctcgaaaatattgatgttgccaggataaaaggtttactgatgaagaggaagagccggagagagatccaaaaccaagccattgcttcagatggcctcagtgaagaagcctggattgagagagagctggagtctgggattgtcacaaaacaagaagccaattgtgccgccatctcagatgagctaagtgatgaagcctggattgagagagagctcgagtcagggattgtgaccggaccaacaaacgagcaggcgatcacttttgatggtttgagtgaaaatgattggatcgagagagagcttgagtctgggatcatcattgagccagcacctgctatcaagaagcggaagctggagtcaagctgttagctctttagctgctgcattcagaggccagattccaagcaggtgaataattacagatggaggtaccctgcgactagggcacatcgaagccaagagatgtcgcatagatgggaggatcaatattttccttttttttatttctttaaccaaacacctcggaatactttggcacgagggttgtgtgtacagtgggatcttcccagtttcttgaattcagaatcacacgaggtttgtgtgtacagtgggatcttcccagtttcttgaattcagaatcatatccactgtatctgttccttgtttgtgtaaatctagcatgcccgaagttcggctttaattagattgtaggtgtaactgtagcagggattgtctcgtgttaagcccgacgaaaaaatgattcagtgtaactgttactggtaaccaaagaaaattagttattcactatagacttattgttaacaaaagaaaagacagttactggtgtacgatgtttataaattg

SEQ ID NO: 55408 - DNA, 3323 bp, Zea Mays
ctaaaccatctaccctgcggccttgcttctgttctctcgcgtcgttctcccgtgctccccgcgtgcgctctatctgtttctggtggcgacgacttggcggtcgccggctcgccgccgccgccgtgcacagtcctttattttggggaccttcaccggcgacgagcacccaccaggaggttgctgagagcccatccagcagggtgtctcagacatactaatggacggggcgcccaagatccttgaaaaatcatcacatgaatgcatgtactcttggtacttcacccgggaagaactcgagaaattttcaccatcaaggaaagatggtattactgaaaacaaggagtcagaaatacggcatttatattgttcatttatccgggacgttgggatcaggctgaagctgtacgaaattacttttgaccctcttaagtgaattgactttgttcaaccttattttagggtgttcttagtttatactactttatattgtggctcataacatgattgtttacattgacctaatctctcatgaacataaattattttcttttttcctctaagacaaaagcttcttttattatacggccaatatgtttgattctgctaccagattgtattattttagcaactttgataagattttctatatgtgctaacatattttttttcacagacctcagatgacactagcaacggcaatcatgctttgccatcgcttctatttacaccagtcccttgccaaaaatggatggcaggtgagacttgagagactattttgttgtggcagtgatggttacttgctgatgtctatgaaaagcgacaagggtgcagagtttccttgccaagcatttgttgataatatgttatccatgtccaacttaacattacagattattcttcaaatcatttgaattatctaatcttctaatactattactattttaattttctaattacatgataattcatcttgatgctactctacctcaagatcacttcgtgattgggcatttcaaaggaatctaaaaaactcagtcagggagggaaataccgtcctccaggtattatataagagaccgaaacatggtcctggccgagaaaatcaccgaacactggccctccatcactagcgggtcgtcaccacccactctgcaacggcccaatcggaggatggcgcgcaggacgtaacccggaagcgtgcggggcacaacgaggggattttttttaaacgaagtccgaaatttgcccccgagagggatcgaatcgggaacctggagacaattgcaacagtatgtgtatttctagcgtcaaaagttgaagatactccttgtcccctggactatgtagttagagtatcctatgaaacaatgtataggcgggacactgctgcggctcaaaggatccgccagaaggatgtttttgagaaacagaaagcgctcattttgattggagagagattgcttctgacaacaattcgatttgatttcaacattcagcatccttatagaccacttcttgatgctatgcaaaatcttggcatcaataaaaaagaagtgaagcaagtagcatggaactttgtgaatgactggcttaaaacaacattgtgcctacagtataaaccccagtacatagctgctggttccctttacctggctgcaaggcttcacgatatcaagcttcctttgcatggagcacatgtttggtggcaccaatttggtgttgcaccaaagcctctggaagctgtcattcatcaaatgatggagcttgcggctgtgaacaaatcgaatcctgttcgtcccaatctggttaagccaaaggaaactttatgtgaagctaaactgagcttatctaatagcccagactctgtgttgaatcaatcaagcttgttaataagcagctctagtcctgatattggcgagaccagtgaccaagtgcaggtggattcttgtcaatacttgataagcagccatacgggtgattgtagggtctcatgtcctgacaacagttcgttggatacttctggtaaagctcatgatgaagagagattggatcaggccttaataaccaagcatgacagtgggatgatgccttctactagtaaccagacatcattagatgctactgtaggcactgagagcagtgctgaatatatgaagcaggatgtaagccattgcgatgacttcaatatcagagtcaatgaccaaagcttgaaccaggcgttaagaaatcagcatggtgatgctgtcccattacctgacatggtatcactagatgctaaggtggacaaggaaagtagttggtgtctggaaccattgattgcaaacttcgactgctgcattgacagcgttaatgtggatagcttgtgcactgatcagagattggctgatgttgcttcaggccccacagctgatgtgccatccgtgctgctggccaaggagaattctgatcctttgagtgcaaagctcgaaaatattgatgttgccaggataaaaggtttactgatgaagaggaagagccggagagagatccaaaaccaagccattgcttcagatggcctcagtgaagaagcctggattgagagagagctggagtctgggattgtcacaaaacaagaagccaattgtgccgccatctcagatgagctaagtgatgaagcctggattgagagagagctcgagtcagggattgtgaccggaccaacaaacgagcaggcgatcacttttgatggtttgagtgaaaatgattggatcgagagagagcttgagtctgggatcatcattgagccagcacctgctatcaagaagcggaagctggagtcaagctgttagctctttagctgctgcattcagaggccagattccaagcaggtgaataattacagatggaggtaccctgcgactagggcacatcgaagccaagagatgtcgcatagatgggaggatcaatattttccttttttttatttctttaaccaaacacctcggaatactttggcacgagggttgtgtgtacagtgggatcttcccagtttcttgaattcagaatcacacgaggtttgtgtgtacagtgggatcttcccagtttcttgaattcagaatcatatccactgtatctgttccttgtttgtgtaaatctagcatgcccgaagttcggctttaattagattgtaggtgtaactgtagcagggattgtctcgtgttaagcccgacgaaaaaatgattcagtgtaactgttactggtaaccaaagaaaattagttattcactatagacttattgttaacaaaagaaaagacagttactggtgtacgatgtttataaattg

SEQ ID NO: 55409 - DNA, 3396 bp, Zea Mays
tctaaaccatctaccctgcggccttgcttctgttctctcgcgtcgttctcccgtgctccccgcgtgcgctctatctgtttctggtggcgacgacttggcggtcgccggctcgccgccgccgccgtgcacagtcctttattttggggaccttcaccggcgacgagcacccaccaggttgcttcacaaaacttacaacatccaggatacaactaataaggattccttcatctttatctggattttgaggaggttgctgagagcccatccagcagggtgtctcagacatactaatggacggggcgcccaagatccttgaaaaatcatcacatgaatgcatgtactcttggtacttcacccgggaagaactcgagaaattttcaccatcaaggaaagatggtattactgaaaacaaggagtcagaaatacggcatttatattgttcatttatccgggacgttgggatcaggctgaagctgtacgaaattacttttgaccctcttaagtgaattgactttgttcaaccttattttagggtgttcttagtttatactactttatattgtggctcataacatgattgtttacattgacctaatctctcatgaacataaattattttcttttttcctctaagacaaaagcttcttttattatacggccaatatgtttgattctgctaccagattgtattattttagcaactttgataagattttctatatgtgctaacatattttttttcacagacctcagatgacactagcaacggcaatcatgctttgccatcgcttctatttacaccagtcccttgccaaaaatggatggcaggtgagacttgagagactattttgttgtggcagtgatggttacttgctgatgtctatgaaaagcgacaagggtgcagagtttccttgccaagcatttgttgataatatgttatccatgtccaacttaacattacagattattcttcaaatcatttgaattatctaatcttctaatactattactattttaattttctaattacatgataattcatcttgatgctactctacctcaagatcacttcgtgattgggcatttcaaaggaatctaaaaaactcagtcagggagggaaataccgtcctccaggtattatataagagaccgaaacatggtcctggccgagaaaatcaccgaacactggccctccatcactagcgggtcgtcaccacccactctgcaacggcccaatcggaggatggcgcgcaggacgtaacccggaagcgtgcggggcacaacgaggggattttttttaaacgaagtccgaaatttgcccccgagagggatcgaatcgggaacctggagacaattgcaacagtatgtgtatttctagcgtcaaaagttgaagatactccttgtcccctggactatgtagttagagtatcctatgaaacaatgtataggcgggacactgctgcggctcaaaggatccgccagaaggatgtttttgagaaacagaaagcgctcattttgattggagagagattgcttctgacaacaattcgatttgatttcaacattcagcatccttatagaccacttcttgatgctatgcaaaatcttggcatcaataaaaaagaagtgaagcaagtagcatggaactttgtgaatgactggcttaaaacaacattgtgcctacagtataaaccccagtacatagctgctggttccctttacctggctgcaaggcttcacgatatcaagcttcctttgcatggagcacatgtttggtggcaccaatttggtgttgcaccaaagcctctggaagctgtcattcatcaaatgatggagcttgcggctgtgaacaaatcgaatcctgttcgtcccaatctggttaagccaaaggaaactttatgtgaagctaaactgagcttatctaatagcccagactctgtgttgaatcaatcaagcttgttaataagcagctctagtcctgatattggcgagaccagtgaccaagtgcaggtggattcttgtcaatacttgataagcagccatacgggtgattgtagggtctcatgtcctgacaacagttcgttggatacttctggtaaagctcatgatgaagagagattggatcaggccttaataaccaagcatgacagtgggatgatgccttctactagtaaccagacatcattagatgctactgtaggcactgagagcagtgctgaatatatgaagcaggatgtaagccattgcgatgacttcaatatcagagtcaatgaccaaagcttgaaccaggcgttaagaaatcagcatggtgatgctgtcccattacctgacatggtatcactagatgctaaggtggacaaggaaagtagttggtgtctggaaccattgattgcaaacttcgactgctgcattgacagcgttaatgtggatagcttgtgcactgatcagagattggctgatgttgcttcaggccccacagctgatgtgccatccgtgctgctggccaaggagaattctgatcctttgagtgcaaagctcgaaaatattgatgttgccaggataaaaggtttactgatgaagaggaagagccggagagagatccaaaaccaagccattgcttcagatggcctcagtgaagaagcctggattgagagagagctggagtctgggattgtcacaaaacaagaagccaattgtgccgccatctcagatgagctaagtgatgaagcctggattgagagagagctcgagtcagggattgtgaccggaccaacaaacgagcaggcgatcacttttgatggtttgagtgaaaatgattggatcgagagagagcttgagtctgggatcatcattgagccagcacctgctatcaagaagcggaagctggagtcaagctgttagctctttagctgctgcattcagaggccagattccaagcaggtgaataattacagatggaggtaccctgcgactagggcacatcgaagccaagagatgtcgcatagatgggaggatcaatattttccttttttttatttctttaaccaaacacctcggaatactttggcacgagggttgtgtgtacagtgggatcttcccagtttcttgaattcagaatcacacgaggtttgtgtgtacagtgggatcttcccagtttcttgaattcagaatcatatccactgtatctgttccttgtttgtgtaaatctagcatgcccgaagttcggctttaattagattgtaggtgtaactgtagcagggattgtctcgtgttaagcccgacgaaaaaatgattcagtgtaactgttactggtaaccaaagaaaattagttattcactatagacttattgttaacaaaagaaaagacagttactggtgtacgatgtttataaattg

SEQ ID NO: 55410 - DNA, 3908 bp, Zea Mays
ctaaagtctaaaccatctaccctgcggccttgcttctgttctctcgcgtcgttctcccgtgctccccgcgtgcgctctatctgtttctggtggcgacgacttggcggtcgccggctcgccgccgccgccgtgcacagtcctttattttggggaccttcaccggcgacgagcacccaccaggttgcttcacaaaacttacaacatccaggatacaactaataaggattccttcatctttatctggattttgaggaggttgctgagagcccatccagcagggtgtctcagacatactaatggacggggcgcccaagatccttgaaaaatcatcacatgaatgcatgtactcttggtacttcacccgggaagaactcgagaaattttcaccatcaaggaaagatggtattactgaaaacaaggagtcagaaatacggcatttatattgttcatttatccgggacgttgggatcaggctgaagctgtacgaaattacttttgaccctcttaagtgaattgactttgttcaaccttattttagggtgttcttagtttatactactttatattgtggctcataacatgattgtttacattgacctaatctctcatgaacataaattattttcttttttcctctaagacaaaagcttcttttattatacggccaatatgtttgattctgctaccagattgtattattttagcaactttgataagattttctatatgtgctaacatattttttttcacagacctcagatgacactagcaacggcaatcatgctttgccatcgcttctatttacaccagtcccttgccaaaaatggatggcaggtgagacttgagagactattttgttgtggcagtgatggttacttgctgatgtctatgaaaagcgacaagggtgcagagtttccttgccaagcatttgttgataatatgttatccatgtccaacttaacattacagattattcttcaaatcatttgaattatctaatcttctaatactattactattttaattttctaattacatgataattcatcttgatgctactctacctcaagatcacttcgtgattgggcatttcaaaggaatctaaaaaactcagtcagggagggaaataccgtcctccaggtattatataagagaccgaaacatggtcctggccgagaaaatcaccgaacactggccctccatcactagcgggtcgtcaccacccactctgcaacggcccaatcggaggatggcgcgcaggacgtaacccggaagcgtgcggggcacaacgaggggattttttttaaacgaagtccgaaatttgcccccgagagggatcgaatcgggaacctggaggtgctactcggaagccttaaccattacgctagaggccctttcgccatttcaaaggaaactacgtagctacaaatctacaatgttataggaatgcttattttttagaatctactgtgttgcatcttactgttacaacttaatcaagtttgactgtttgacatactttgatggatcatcttgcaaattacatattcaccagtaagttctaagttctatagaaatggcttactttactgcatttcttttcttagttttgtaagatatgtttagttcatatttactagatcacttgtccagaagttatctctctgttatcttgcagcccctagttatgtcaaacactagtaggaattcctgtgttattctgtgttcataatatttattactctgtttgaagtacatgatctgtttgtggtttgctcttgtggaccagtagttcttctggaacatacttttatttccttttactagttttaattgttccttttatcattactttatttcagacaattgcaacagtatgtgtatttctagcgtcaaaagttgaagatactccttgtcccctggactatgtagttagagtatcctatgaaacaatgtataggcgggacactgctgcggctcaaaggatccgccagaaggatgtttttgagaaacagaaagcgctcattttgattggagagagattgcttctgacaacaattcgatttgatttcaacattcagcatccttatagaccacttcttgatgctatgcaaaatcttggcatcaataaaaaagaagtgaagcaagtagcatggaactttgtgaatgactggcttaaaacaacattgtgcctacagtataaaccccagtacatagctgctggttccctttacctggctgcaaggcttcacgatatcaagcttcctttgcatggagcacatgtttggtggcaccaatttggtgttgcaccaaagcctctggaagctgtcattcatcaaatgatggagcttgcggctgtgaacaaatcgaatcctgttcgtcccaatctggttaagccaaaggaaactttatgtgaagctaaactgagcttatctaatagcccagactctgtgttgaatcaatcaagcttgttaataagcagctctagtcctgatattggcgagaccagtgaccaagtgcaggtggattcttgtcaatacttgataagcagccatacgggtgattgtagggtctcatgtcctgacaacagttcgttggatacttctggtaaagctcatgatgaagagagattggatcaggccttaataaccaagcatgacagtgggatgatgccttctactagtaaccagacatcattagatgctactgtaggcactgagagcagtgctgaatatatgaagcaggatgtaagccattgcgatgacttcaatatcagagtcaatgaccaaagcttgaaccaggcgttaagaaatcagcatggtgatgctgtcccattacctgacatggtatcactagatgctaaggtggacaaggaaagtagttggtgtctggaaccattgattgcaaacttcgactgctgcattgacagcgttaatgtggatagcttgtgcactgatcagagattggctgatgttgcttcaggccccacagctgatgtgccatccgtgctgctggccaaggagaattctgatcctttgagtgcaaagctcgaaaatattgatgttgccaggataaaaggtttactgatgaagaggaagagccggagagagatccaaaaccaagccattgcttcagatggcctcagtgaagaagcctggattgagagagagctggagtctgggattgtcacaaaacaagaagccaattgtgccgccatctcagatgagctaagtgatgaagcctggattgagagagagctcgagtcagggattgtgaccggaccaacaaacgagcaggcgatcacttttgatggtttgagtgaaaatgattggatcgagagagagcttgagtctgggatcatcattgagccagcacctgctatcaagaagcggaagctggagtcaagctgttagctctttagctgctgcattcagaggccagattccaagcaggtgaataattacagatggaggtaccctgcgactagggcacatcgaagccaagagatgtcgcatagatgggaggatcaatattttccttttttttatttctttaaccaaacacctcggaatactttggcacgagggttgtgtgtacagtgggatcttcccagtttcttgaattcagaatcacacgaggtttgtgtgtacagtgggatcttcccagtttcttgaattcagaatcatatccactgtatctgttccttgtttgtgtaaatctagcatgcccgaagttcggctttaattagattgtaggtgtaactgtagcagggattgtctcgtgttaagcccgacgaaaaaatgattcagtgtaactgttactggtaaccaaagaaaattagttattcactatagacttattgttaacaaaagaaaagacagttactggtgtacgatgtttataaattg

SEQ ID NO: 55411 - DNA, 2887 bp, Zea Mays
ccgtagtctaaagtctaaaccatctaccctgcggccttgcttctgttctctcgcgtcgttctcccgtgctccccgcgtgcgctctatctgtttctggtggcgacgacttggcggtcgccggctcgccgccgccgccgtgcacagtcctttattttggggaccttcaccggcgacgagcacccaccaggttgcttcacaaaacttacaacatccaggatacaactaataaggattccttcatctttatctggattttgaggaggttgctgagagcccatccagcagggtgtctcagacatactaatggacggggcgcccaagatccttgaaaaatcatcacatgaatgcatgtactcttggtacttcacccgggaagaactcgagaaattttcaccatcaaggaaagatggtattactgaaaacaaggagtcagaaatacggcatttatattgttcatttatccgggacgttgggatcaggctgaagctgtacgaaattacttttgaccctcttaagtgaattgactttgttcaaccttattttagggtgttcttagtttatactactttatattgtggctcataacatgattgtttacattgacctaatctctcatgaacataaattattttcttttttcctctaagacaaaagcttcttttattatacggccaatatgtttgattctgctaccagattgtattattttagcaactttgataagattttctatatgtgctaacatattttttttcacagacctcagatgacactagcaacggcaatcatgctttgccatcgcttctatttacaccagtcccttgccaaaaatggatggcagacaattgcaacagtatgtgtatttctagcgtcaaaagttgaagatactccttgtcccctggactatgtagttagagtatcctatgaaacaatgtataggcgggacactgctgcggctcaaaggatccgccagaaggatgtttttgagaaacagaaagcgctcattttgattggagagagattgcttctgacaacaattcgatttgatttcaacattcagcatccttatagaccacttcttgatgctatgcaaaatcttggcatcaataaaaaagaagtgaagcaagtagcatggaactttgtgaatgactggcttaaaacaacattgtgcctacagtataaaccccagtacatagctgctggttccctttacctggctgcaaggcttcacgatatcaagcttcctttgcatggagcacatgtttggtggcaccaatttggtgttgcaccaaagcctctggaagctgtcattcatcaaatgatggagcttgcggctgtgaacaaatcgaatcctgttcgtcccaatctggttaagccaaaggaaactttatgtgaagctaaactgagcttatctaatagcccagactctgtgttgaatcaatcaagcttgttaataagcagctctagtcctgatattggcgagaccagtgaccaagtgcaggtggattcttgtcaatacttgataagcagccatacgggtgattgtagggtctcatgtcctgacaacagttcgttggatacttctggtaaagctcatgatgaagagagattggatcaggccttaataaccaagcatgacagtgggatgatgccttctactagtaaccagacatcattagatgctactgtaggcactgagagcagtgctgaatatatgaagcaggatgtaagccattgcgatgacttcaatatcagagtcaatgaccaaagcttgaaccaggcgttaagaaatcagcatggtgatgctgtcccattacctgacatggtatcactagatgctaaggtggacaaggaaagtagttggtgtctggaaccattgattgcaaacttcgactgctgcattgacagcgttaatgtggatagcttgtgcactgatcagagattggctgatgttgcttcaggccccacagctgatgtgccatccgtgctgctggccaaggagaattctgatcctttgagtgcaaagctcgaaaatattgatgttgccaggataaaaggtttactgatgaagaggaagagccggagagagatccaaaaccaagccattgcttcagatggcctcagtgaagaagcctggattgagagagagctggagtctgggattgtcacaaaacaagaagccaattgtgccgccatctcagatgagctaagtgatgaagcctggattgagagagagctcgagtcagggattgtgaccggaccaacaaacgagcaggcgatcacttttgatggtttgagtgaaaatgattggatcgagagagagcttgagtctgggatcatcattgagccagcacctgctatcaagaagcggaagctggagtcaagctgttagctctttagctgctgcattcagaggccagattccaagcaggtgaataattacagatggaggtaccctgcgactagggcacatcgaagccaagagatgtcgcatagatgggaggatcaatattttccttttttttatttctttaaccaaacacctcggaatactttggcacgagggttgtgtgtacagtgggatcttcccagtttcttgaattcagaatcacacgaggtttgtgtgtacagtgggatcttcccagtttcttgaattcagaatcatatccactgtatctgttccttgtttgtgtaaatctagcatgcccgaagttcggctttaattagattgtaggtgtaactgtagcagggattgtctcgtgttaagcccgacgaaaaaatgattcagtgtaactgttactggtaaccaaagaaaattagttattcactatagacttattgttaacaaaagaaaagacagttactggtgtacgatgtttataaattg

SEQ ID NO: 55412 - DNA, 3644 bp, Zea Mays
ccgtagtctaaagtctaaaccatctaccctgcggccttgcttctgttctctcgcgtcgttctcccgtgctccccgcgtgcgctctatctgtttctggtggcgacgacttggcggtcgccggctcgccgccgccgccgtgcacagtcctttattttggggaccttcaccggcgacgagcacccaccaggttgcttcacaaaacttacaacatccaggatacaactaataaggattccttcatctttatctggattttgaggaggttgctgagagcccatccagcagggtgtctcagacatactaatggacggggcgcccaagatccttgaaaaatcatcacatgaatgcatgtactcttggtacttcacccgggaagaactcgagaaattttcaccatcaaggaaagatggtattactgaaaacaaggagtcagaaatacggcatttatattgttcatttatccgggacgttgggatcaggctgaagctacctcagatgacactagcaacggcaatcatgctttgccatcgcttctatttacaccagtcccttgccaaaaatggatggcaggtgagacttgagagactattttgttgtggcagtgatggttacttgctgatgtctatgaaaagcgacaagggtgcagagtttccttgccaagcatttgttgataatatgttatccatgtccaacttaacattacagattattcttcaaatcatttgaattatctaatcttctaatactattactattttaattttctaattacatgataattcatcttgatgctactctacctcaagatcacttcgtgattgggcatttcaaaggaatctaaaaaactcagtcagggagggaaataccgtcctccaggtattatataagagaccgaaacatggtcctggccgagaaaatcaccgaacactggccctccatcactagcgggtcgtcaccacccactctgcaacggcccaatcggaggatggcgcgcaggacgtaacccggaagcgtgcggggcacaacgaggggattttttttaaacgaagtccgaaatttgcccccgagagggatcgaatcgggaacctggaggtgctactcggaagccttaaccattacgctagaggccctttcgccatttcaaaggaaactacgtagctacaaatctacaatgttataggaatgcttattttttagaatctactgtgttgcatcttactgttacaacttaatcaagtttgactgtttgacatactttgatggatcatcttgcaaattacatattcaccagtaagttctaagttctatagaaatggcttactttactgcatttcttttcttagttttgtaagatatgtttagttcatatttactagatcacttgtccagaagttatctctctgttatcttgcagcccctagttatgtcaaacactagtaggaattcctgtgttattctgtgttcataatatttattactctgtttgaagtacatgatctgtttgtggtttgctcttgtggaccagtagttcttctggaacatacttttatttccttttactagttttaattgttccttttatcattactttatttcagacaattgcaacagtatgtgtatttctagcgtcaaaagttgaagatactccttgtcccctggactatgtagttagagtatcctatgaaacaatgtataggcgggacactgctgcggctcaaaggatccgccagaaggatgtttttgagaaacagaaagcgctcattttgattggagagagattgcttctgacaacaattcgatttgatttcaacattcagcatccttatagaccacttcttgatgctatgcaaaatcttggcatcaataaaaaagaagtgaagcaagtagcatggaactttgtgaatgactggcttaaaacaacattgtgcctacagtataaaccccagtacatagctgctggttccctttacctggctgcaaggcttcacgatatcaagcttcctttgcatggagcacatgtttggtggcaccaatttggtgttgcaccaaagcctctggaagctgtcattcatcaaatgatggagcttgcggctgtgaacaaatcgaatcctgttcgtcccaatctggttaagccaaaggaaactttatgtgaagctaaactgagcttatctaatagcccagactctgtgttgaatcaatcaagcttgttaataagcagctctagtcctgatattggcgagaccagtgaccaagtgcaggtggattcttgtcaatacttgataagcagccatacgggtgattgtagggtctcatgtcctgacaacagttcgttggatacttctggtaaagctcatgatgaagagagattggatcaggccttaataaccaagcatgacagtgggatgatgccttctactagtaaccagacatcattagatgctactgtaggcactgagagcagtgctgaatatatgaagcaggatgtaagccattgcgatgacttcaatatcagagtcaatgaccaaagcttgaaccaggcgttaagaaatcagcatggtgatgctgtcccattacctgacatggtatcactagatgctaaggtggacaaggaaagtagttggtgtctggaaccattgattgcaaacttcgactgctgcattgacagcgttaatgtggatagcttgtgcactgatcagagattggctgatgttgcttcaggccccacagctgatgtgccatccgtgctgctggccaaggagaattctgatcctttgagtgcaaagctcgaaaatattgatgttgccaggataaaaggtttactgatgaagaggaagagccggagagagatccaaaaccaagccattgcttcagatggcctcagtgaagaagcctggattgagagagagctggagtctgggattgtcacaaaacaagaagccaattgtgccgccatctcagatgagctaagtgatgaagcctggattgagagagagctcgagtcagggattgtgaccggaccaacaaacgagcaggcgatcacttttgatggtttgagtgaaaatgattggatcgagagagagcttgagtctgggatcatcattgagccagcacctgctatcaagaagcggaagctggagtcaagctgttagctctttagctgctgcattcagaggccagattccaagcaggtgaataattacagatggaggtaccctgcgactagggcacatcgaagccaagagatgtcgcatagatgggaggatcaatattttccttttttttatttctttaaccaaacacctcggaatactttggcacgagggttgtgtgtacagtgggatcttcccagtttcttgaattcagaatcacacgaggtttgtgtgtacagtgggatcttcccagtttcttgaattcagaatcatatccactgtatctgttccttgtttgtgtaaatctagcatgcccgaagttcggctttaattagattgtaggtgtaactgtagcagggattgtctcgtgttaagcccgacgaaaaaatgattcagtgtaactgttactggtaaccaaagaaaattagttattcactatagacttattgttaacaaaagaaaagacagttactggtgtacgatgtttataaattg

SEQ ID NO: 55413 - DNA, 2909 bp, Zea Mays
gacaacccgcgctgtcgcgctcccttgccaccagccactagctaggacgtcgctgcttgcttccacgcctccttacggtttatccaagcacagcgagagacctttgcgcgtgtgcgctctcgttcggcggcatgctgacgaggcgccacggagggttccggctcggccggaagctgctcagcgtctggcgctgggcgctctgccgccgccggcgccgccgcggccgcgggtacctccgcctgcagccgtgccaacgaggaggaggcaccaacaaatccccgtcccccatggcggcgcatgcagtggtgagcatcaagatgatgcagcagcagcagcagaagcacgacgtctctgctggctccccgcggatgctcacgtgggggcggtcgctggcgcagcgggtgaggctcctgcgccggcgcggggaaggaggacggaaggaccggctgctggaggacgccgccgcggaggccaccacgcccaaggggcaggtggccgtgtacgtgggcggcgggggcgagtcgatgcgctacgtggtccccgtggtgtacttcaaccacccgctcttcggggagctgctgcgcgaggccgaggaggagttcggcttccagcaccccggcgggatcaccatcccgtgcgcggcctcgcggttcgagcgcgccgccgccgtggccgccgcaggcggaggcggcggcgccgggaagaaggtgccttctgtctggtggtagcagcacgtggccacccggtggccggtgtacatacatacacacgtgcatgcccatcaggatcaggcgggcctcagccggtcagccggccctcaggactcaggaggatcccgatcgattcccatgggccatggggactgacgatccttctatatttttttttctctctccttctcgttagtttgacttttcctttttgccctcttgcgccgtttgcttgtgtggattgagcatgtgcatgggatgcgaggaggatggatagttgtagtttgtttgagagatgaacaaggcttttttttttaatttagggtcagcataaacatgttcccattcccccccaacttgcaaagtccatcatcatatatatccatttattagagagcatctaatatgtacgtcaggtgtgttctgattctctttgcaactaacccatcgatccagctctgacatagtacttaattaggttgaagtataatatattttagggtgtgtttggttgggtgtacaatgagggatagaatgagacggtaacagtttatatagtgttttgatgagagtcacgtggggaagaggtaaccaagtaatttttatatacactatgctaacagaacacatgcatgcacgcgcacatcgggatcaaacggctttggtaatgcttctgtcagctaaaacacaaacgagatgtttggtttgatgaatcactctatccaaaatgaagtggtgcatcatggtccattcctcaaatttggtcggatgaccctattccatatattagtattaaacacttaactatgaggaatgagatggtgatggattaacttactccattccacaaaccaaacaaaaaaaagtgagaagtgagaagatgatggactacatcattcctcaaaccaaacactccaaaagtttccttccaacttctattgatggacggacttagcatcagaaatatcttaaggagatgatatataagtatgctgggagccgttaggacatggggaatgaaatggcccccggccgcgacgatattctacacagcagttgtcagcttgcgtatcatgcattgaacaactccaagagggcatgcaatgcaatgcaatgcaatcaagcacgccggctggctggtgtccatttcgcaagttttcatcgacgccgacttctccacgcactccttgcgcgcgcactgtttccccggtggccacgcacgttacgcaaccagtgaaggctggtttacggaaatacgcggctagggtagtactgtgggagatgaaagcactggatgtgggtttcttccttgtcaaaatctcagtgctgcttggaccgcctgcagcaaaaagatgccgaatgaacggagcagagtggtctagcattgccatccacaaagggttccaaatgtctgttttctgttgagattttttttactgtaaactgcactattacgagtaaagtttttgaaacagagagtacgatagaaggtgggatatagaaaacagcctcatgacagggactacaaagttgtgcatggatacttctctttcttctttcttccgattggcttagcgattccagtgccgtcaaccgacgccactagcctcctccggctatatcagtcttcggggcaagtagatggtcgcgcttaagctttcagatggctaaggggtacatgtggcatatgaagaagtagcaaaaaaacatggctatcataaaggtttatatctcgacacttcttacaaggatgcacttgtttatcctaagctatcggtggctaaccgtggctatggtaagccagcccacgtatcagtcgaagcatccagacacagttacacgatgcttctacatatgtgacaattgttgtgatgaaaagaggtgctacttcttttagtggatcgatggttctgataagtttgaacaaagataccttttttcaaggaccggtggagatgttggccacatgagcacttctagcattgggttccgcctccctccaaggttttgccaatgacaaacaaagagaacatcaaagctaccaataaacaatttgagaactctcctttgtgtatttgtggtgatttcaactgttcttgcacttcagtgtttgcttgagtttggatgtgaacaagaatgtataggtgcatctttgttcctcttaaaccttgtatttacttgtccgaaattaataatcta

SEQ ID NO: 55414 - DNA, 6710 bp, Zea Mays
  misc_feature (6709)..(6710): n is a, c, g, or t
cctcctgaaccagtcacaaaaatcttctttcagtactccctgctcccgtgacacttatatctcgacgcctaaaacacaaatcagtaccggaataagcttacaggcaaacagcaacaaggcttctaacacaacaaacaaatcaatcgagccgtgtggcctcgctaggcatgtacaactccatttaatacggggtctcttgaggggtctccaagtggtaattgaaaaaaaaatacaagaggcaggctcttcgcgaacagactgtctctacacgactctttatatatattgtatcttaattgtatttatgatctaaaagcttagggatgtagcacgtattatacttggaaaacccgttccaaagtctctgggttgtacatgccctaagtcctagaggaagctcaggccctcacaacaatagttttcatcacttatttcaaagacgtagtaattgaactactgaaggcataagactaaacaaggactgataaccgactcctagataatcttctcccttttatctagctaaaccgactcctagatctactatgtgtcgtctcacccccagtcccccaccctccactccctctccggcctctcagccccacgccggtgtctgctccaagcccggcggccacccaccttccttccctggcgccggggaccactccatccccttctctggctactagtcgatccaaagcccagcgatggagggacgactaccctgcttcctccattgatggttgtcctgtccagcgggatttcttcaaagacgctttgttatctaccaagtctcctgtcttttgccccaacaaaaaagaggatggcgacggttgggtgaaggtggaaagcgaaaaagctcggcggcgacgctctcgtccctcgaagccacctcccagggttgttcctggtgatcttcacggaaggtgtttcaactgcttttctaccaccgtgcggcagcgtgtcgacgacaggtgcgctgcttcatctggtggctgctggggcaccgtgctcacgtgtgcccacgccagcggatggtgtcgccccacccgcggcgtgttttggtgtggcgccttgtcaatccatcactctctgctcccgttcctgcccctgccgtgatgaaggagggtgacaatggagacagtgcactggatatggaggtggcaggagaaggcgcactcgtcgtggtcagaggaggtgaggagctcacgtcgcgacctcaacaacaatgatgatgacaatggtgtgcctcccatggggccaccggctgaaactcccgccatctctatggagcctgatcgaccaaggcgggtcatcagtcgctcgacaaagatcgtgcaagttgaggaggatcttcgacgtgctctgatcatgtctgtcattggacgtgaagcagctggtagcgctgcagaggtttctgatgcgctcgcattgaggtttgccctcgacgctgatgcgctcgacctcaaacgtgctgcgccaaataccttcatcgccttgctcccatctgaagcgctggctggctgtgtttacaatgaacgcagaccgtttgtcgtgccccctctccggttgcacattcaacgttggtctagacaagccatggccaccggcagaagtgatctaccgttccttgtcactgtcaaactctgtggtgtcctggcacacctctggggattgagacggctgcacgcagacacggaagggggcgttaatttgggcgaattcaagctggatgcatggtgcgcaaggccggagcttcttccttcttccatggacctccacgttgtcgagctagcagttgaggggatgttgattcctcgtaccctggtttatccaatccttgtggtggtttcagattcgaagcaatcaacgccgaatcctccatcttgtcctccactgccggccaattccgacgatgacagcgctcgcaagcggaggcgatgacaacgctcccctccctcgacgtccacgcgtgggctggtacacgcgcgcttgggtccacgtgacaacatcaattcgacgtctgatggaccaattgaggtgtgggattcctcatctgcggcacgaactatgcaaaatctagcggctgccccttcgtgcgcctctcggccgccatcggcccgcgcgcccgctccttcgggtcgcgcctccccactggttttcaatgcacagaccccttcattctctgtggtgttggcattaaagagcattactccctcgagctctgccccgctggccgcggttatggcgcctatcccagaagatgtcgcgcggttggagtttctttcggaaaaggttgtctcggcaaatgtttcaatcagcccgcaggcaatggacttcaaccctgggaacgagatctcccttcggatcattgaatctgcacagctggaggggacaacttttgaacttgttaattgtgttcctgcacctgttacattgactaccgctcttccttccattgaagatgatgcctgcattgatcatgttttaaggatttggtcctacactgtaaggattgagggactcatctcaaccgtggttgatggcagtttggtttctttaccacctcctgcgctgataacagatatacagaggaattctaatgtgggatcttctgcatggagaatgatgtttcaagggtgatgactatcatgtctgtaagggctaccagaagcatttcagaggccagtgaaggacaattgaaggtttattctagacggtgtcatggggaaaatcaggatgagtctttgtctaaacacaacgcccctgtatgctcccctttcttcgaagaaggaagtgctctgataaataaaatcatcaggcctgttgatggattgctccagcctccatgtgtaccaaagcaaaaaaaatgagtaaaccccttgtttcttaccaaggcgtagtaggagagtggcgggggcggacccatgtcctcctgggcttgttgcttctgaggcccaaaggagagtgatcaaaagtttgggtttcatgttcccgaggaaagggttgagccatctgtccaagatgcatatagcaaattgttccttgaccccatatcagattctcagcttgcagccttatcggtgttgtttggatggacagtgggtgaggggatggagtacatctccctagaaggcatcttagcagcccccggtttggtggttcttatgcagtttctcttatgaatccatcaactattttgatctggaatgcccgcgggctcaatatgaagggtcggcgggatgttgttcgggaggtaattttctcatctagagcggatattgtgtcttcaagaaaccaagttggctaccatggaccattttttgttttgctcagcttttgggtctgttttcgataagtttgtcttactgccggctgatggcactagaggagggctgatcattgcttggaagacttccatcattcaagctttaggttctcgagtagacattttttcagcctcagttcactttgttgaagaacaaggtcgtaattggaggttcactggtgtatatggcccccaaaatgatggtgataaaatttctttccttcaagaactccgggatgtcagaactatgtgccctggaccttgggtcattgcgggagattttaaccgtatctatcaagctgctgataagagcaatagcaatctgaaccgcgcaatgatgggtcgcttcaggcgtgttctagatgatctggaacttaaagagattcctaaattcacgtggtctaatgagagggaaaatcccactcttgtccggttggaccgtgccttttgcacaacggattgggaagaagttttccctgatgctgttcttcagagtgctactgctggagtgtctgaccactgcccattaattttgggactcaaggttagaaatactggcaaacaaagattacattttgagagtttctggtcgaagttggatggttttcatgaatcagttcagcaaaactgggaagacccagtgtcttcttcttgcctggttgagatcctgtttctcaaactgaagaggcttagtaggggactgcagaaatggagccatcgcaaggttgggaatgtcaagctacaactttctatggcaaaagaagtgctacaccgattggagattgttagggattctcgttctctatcacagggggaggattggttgcgaagaaaactcaagatgcattgtttgggcttgacttctttggaacacaccattgcccgtttgcattctagggtgctgtttttacaggaaggagatgcaaatacaaattttttccatcagcacactcggtttagaaagaagaaaaattttattgctaagctacaggtggaagacagaatctatgttactcaagaggagaaacaagaagtagtggatgatttttatgaacatctgcgaagttctggtgatctgagaaattactccttcaacttggcagacttccacccattattccagcaggacttatctcatttagatgctcctttcactgctgaagaggtatgggcatcagtaaaagatctacctatggacaaggctcccggccctgatggcttcaccgggaggttctacaaaacttgttggggcattattggcagtgacattcttgcagccttgaatgcaatttataaaggacatgtcttcaaacttcagctgctgaattctgcttatgtttccttgctgcttaagaagacagatgctagttcggtgaaagactttcgacctataagtctcatcatagctttgaaaagttggtaaccataatccttgccaaccggctagcacctttaatacccagcctagtttccaacaatcagagtgctttttgtgaggggcagatgcatacatgataatttcttactttgtgcaacatcttgtcagaacacttcacacaagcaaggaaccacacatccttctgaagctggatatctcgaaggcttttttatacaatttcttggccttttctgatagaagtaatgcgttacttggggtttggccagcagtggtgcaaccttatttgtcagatcttgtccactgcaagctctcaagtcctattgaatggaattcctgggagatctatctctcatcttcgtgggcttcggcagggagaccctctctcccccttactgttcatattgattatggatgtccttaattccctaattcaaatggcttccaggaataatttgttgcagcctatgtctgggcagcaacaatggtctcggatttctttatatgctgacaatgtggttatatttttgagacccaacagaaggatctttgtgtggtacgagacctgttaaggtgttttggagaagtttctggtctgaagactaatttgattaaaagttcagccataccaatccaatgctccgatgaagatattgggagaacatcggcaattctttcttgttccattggaagcttaccttgttcatatttgggtattcccctttctattcataaaccttcaaaggctgttctaacacctctgattgacaagattgccaataaattgccaggatggaaagcccccctcctaagcaaggttggcaggttggttgttgtcaaatctgtaatgtcagcaacacccattcaccaaatgctcgtcttgaatctgcccaaatggttctttaaggctgttcataaaaggagaaggggattcctttggaaagggcaagaacaggccaagggaggaaattgtttagtctcatgggccaaggtgcaaagaccttacatgtttggcagtcttggagtacattatctggaaaggatgagttgggcattgtgtatccgctggttatggtttatgaaaactgatccctcaaaactatggtttggtcttcttgttaataatcctaagcaagcccaagcattcttccaaatggccgtaactgtaaatattgggaatgttatttcttccaaattctggacagacaattggttgcaaggaaagagtgtggctgaccttgctccaaatctgatcctagcaatcccaaagagagtaattaagaagcgtacagtgagccaggcattatccaacagaggctgggtggttgatgtcaagggcgctctaacagttcaggttttcatagaattcctcaaagtttgggagcttgttgagggtatagttctacatcctaatgtcccagatcatttttcttggaagttttcatcttcaggtcagtatagcagaaaatctgcatacaatatgatgttcattggctccatcaaattcctagcttggaggaggatctggaaaacttgggaccctgcaaactgcaagttcttcatttggttggccattaataatcaatgttggactcactggtcaaacgtggactaccgcatcaggccgcttgtgccctttgtgatcaagatgtggaaaccatcaaccacattctagtatcctgtgtgtttgctagggaggtatggagcttagttcttaacaggatcatccctggtagtgccgagcctctgcttctttgcctaaggaagagaggaaggggttcaattccttagtggtcctagttgcctcggagctttggaaacataggaatgcctgcgtttttcagggttctaggcctgctgtccaaagtgttgcacaagctgttatggatgaaggtcgtctttggtgtttagctggggctgctgtccttcggggtttggtccttaggactgaaccttctttggtcgtgaatggggccgttaccgtnn

SEQ ID NO: 55415 - DNA, 6414 bp, Zea Mays
  misc_feature (6413)..(6414): n is a, c, g, or t
ggaaacctccacacaagatctaagctacacaacaattaggaacaaatttcctcctgaaccagtcacaaaaatcttctttcagtactccctgctcccgtgacacttatatctcgacgcctaaaacacaaatcagtaccggaataagcttacaggcaaacagcaacaaggcttctaacacaacaaacaaatcaatcgagccgtgtggcctcgctaggcatgtacaactccatttaatacggggtctcttgaggggtctccaagtggtaattgaaaaaaaaatacaagaggcaggctcttcgcgaacagactgtctctacacgactctttatatatattgtatcttaattgtatttatgatctaaaagcttagggatgtagcacgtattatacttggaaaacccgttccaaagtctctgggttgtacatgccctaagtcctagaggaagctcaggccctcacaacaatagttttcatcacttatttcaaagacgtagtaattgaactactgaaggcataagactaaacaaggactgataaccgactcctagataatcttctcccttttatctagctaaaccgactcctagatctactatgtgtcgtctcacccccagtcccccaccctccactccctctccggcctctcagccccacgccggtgtctgctccaagcccggcggccacccaccttccttccctggcgccggggaccactccatccccttctctggctactagtcgatccaaagcccagcgatggagggacgactaccctgcttcctccattgatggttgtcctgtccagcgggatttcttcaaagacgctttgttatctaccaagtctcctgtcttttgccccaacaaaaaagaggatggcgacggttgggtgaaggtggaaagcgaaaaagctcggcggcgacgctctcgtccctcgaagccacctcccagggttgttcctggtgatcttcacggaaggtgtttcaactgcttttctaccaccgtgcggcagcgtgtcgacgacaggtgcgctgcttcatctggtggctgctggggcaccgtgctcacgtgtgcccacgccagcggatggtgtcgccccacccgcggcgtgttttggtgtggcgccttgtcaatccatcactctctgctcccgttcctgcccctgccgtgatgaaggagggtgacaatggagacagtgcactggatatggaggtggcaggagaaggcgcactcgtcgtggtcagaggaggtgaggagctcacgtcgcgacctcaacaacaatgatgatgacaatggtgtgcctcccatggggccaccggctgaaactcccgccatctctatggagcctgatcgaccaaggcgggtcatcagtcgctcgacaaagatcgtgcaagttgaggaggatcttcgacgtgctctgatcatgtctgtcattggacgtgaagcagctggtagcgctgcagaggtttctgatgcgctcgcattgaggtttgccctcgacgctgatgcgctcgacctcaaacgtgctgcgccaaataccttcatcgccttgctcccatctgaagcgctggctggctgtgtttacaatgaacgcagaccgtttgtcgtgccccctctccggttgcacattcaacgttggtctagacaagccatggccaccggcagaagtgatctaccgttccttgtcactgtcaaactctgtggtgtcctggcacacctctggggattgagacggctgcacgcagacacggaagggggcgttaatttgggcgaattcaagctggatgcatggtgcgcaaggccggagcttcttccttcttccatggacctccacgttgtcgagctagcagttgaggggatgttgattcctcgtaccctgaccccttcattctctgtggtgttggcattaaagagcattactccctcgagctctgccccgctggccgcggttatggcgcctatcccagaagatgtcgcgcggttggagtttctttcggaaaaggttgtctcggcaaatgtttcaatcagcccgcaggcaatggacttcaaccctgggaacgagatctcccttcggatcattgaatctgcacagctggaggggacaacttttgaacttgttaattgtgttcctgcacctgttacattgactaccgctcttccttccattgaagatgatgcctgcattgatcatgttttaaggatttggtcctacactgtaaggattgagggactcatctcaaccgtggttgatggcagtttggtttctttaccacctcctgcgctgataacagatatacagaggaattctaatgtgggatcttctgcatggagaatgatgtttcaagggtgatgactatcatgtctgtaagggctaccagaagcatttcagaggccagtgaaggacaattgaaggtttattctagacggtgtcatggggaaaatcaggatgagtctttgtctaaacacaacgcccctgtatgctcccctttcttcgaagaaggaagtgctctgataaataaaatcatcaggcctgttgatggattgctccagcctccatgtgtaccaaagcaaaaaaaatgagtaaaccccttgtttcttaccaaggcgtagtaggagagtggcgggggcggacccatgtcctcctgggcttgttgcttctgaggcccaaaggagagtgatcaaaagtttgggtttcatgttcccgaggaaagggttgagccatctgtccaagatgcatatagcaaattgttccttgaccccatatcagattctcagcttgcagccttatcggtgttgtttggatggacagtgggtgaggggatggagtacatctccctagaaggcatcttagcagcccccggtttggtggttcttatgcagtttctcttatgaatccatcaactattttgatctggaatgcccgcgggctcaatatgaagggtcggcgggatgttgttcgggaggtaattttctcatctagagcggatattgtgtcttcaagaaaccaagttggctaccatggaccattttttgttttgctcagcttttgggtctgttttcgataagtttgtcttactgccggctgatggcactagaggagggctgatcattgcttggaagacttccatcattcaagctttaggttctcgagtagacattttttcagcctcagttcactttgttgaagaacaaggtcgtaattggaggttcactggtgtatatggcccccaaaatgatggtgataaaatttctttccttcaagaactccgggatgtcagaactatgtgccctggaccttgggtcattgcgggagattttaaccgtatctatcaagctgctgataagagcaatagcaatctgaaccgcgcaatgatgggtcgcttcaggcgtgttctagatgatctggaacttaaagagattcctaaattcacgtggtctaatgagagggaaaatcccactcttgtccggttggaccgtgccttttgcacaacggattgggaagaagttttccctgatgctgttcttcagagtgctactgctggagtgtctgaccactgcccattaattttgggactcaaggttagaaatactggcaaacaaagattacattttgagagtttctggtcgaagttggatggttttcatgaatcagttcagcaaaactgggaagacccagtgtcttcttcttgcctggttgagatcctgtttctcaaactgaagaggcttagtaggggactgcagaaatggagccatcgcaaggttgggaatgtcaagctacaactttctatggcaaaagaagtgctacaccgattggagattgttagggattctcgttctctatcacagggggaggattggttgcgaagaaaactcaagatgcattgtttgggcttgacttctttggaacacaccattgcccgtttgcattctagggtgctgtttttacaggaaggagatgcaaatacaaattttttccatcagcacactcggtttagaaagaagaaaaattttattgctaagctacaggtggaagacagaatctatgttactcaagaggagaaacaagaagtagtggatgatttttatgaacatctgcgaagttctggtgatctgagaaattactccttcaacttggcagacttccacccattattccagcaggacttatctcatttagatgctcctttcactgctgaagaggtatgggcatcagtaaaagatctacctatggacaaggctcccggccctgatggcttcaccgggaggttctacaaaacttgttggggcattattggcagtgacattcttgcagccttgaatgcaatttataaaggacatgtcttcaaacttcagctgctgaattctgcttatgtttccttgctgcttaagaagacagatgctagttcggtgaaagactttcgacctataagtctcatcatagctttgaaaagttggtaaccataatccttgccaaccggctagcacctttaatacccagcctagtttccaacaatcagagtgctttttgtgaggggcagatgcatacatgataatttcttactttgtgcaacatcttgtcagaacacttcacacaagcaaggaaccacacatccttctgaagctggatatctcgaaggcttttttatacaatttcttggccttttctgatagaagtaatgcgttacttggggtttggccagcagtggtgcaaccttatttgtcagatcttgtccactgcaagctctcaagtcctattgaatggaattcctgggagatctatctctcatcttcgtgggcttcggcagggagaccctctctcccccttactgttcatattgattatggatgtccttaattccctaattcaaatggcttccaggaataatttgttgcagcctatgtctgggcagcaacaatggtctcggatttctttatatgctgacaatgtggttatatttttgagacccaacagaaggatctttgtgtggtacgagacctgttaaggtgttttggagaagtttctggtctgaagactaatttgattaaaagttcagccataccaatccaatgctccgatgaagatattgggagaacatcggcaattctttcttgttccattggaagcttaccttgttcatatttgggtattcccctttctattcataaaccttcaaaggctgttctaacacctctgattgacaagattgccaataaattgccaggatggaaagcccccctcctaagcaaggttggcaggttggttgttgtcaaatctgtaatgtcagcaacacccattcaccaaatgctcgtcttgaatctgcccaaatggttctttaaggctgttcataaaaggagaaggggattcctttggaaagggcaagaacaggccaagggaggaaattgtttagtctcatgggccaaggtgcaaagaccttacatgtttggcagtcttggagtacattatctggaaaggatgagttgggcattgtgtatccgctggttatggtttatgaaaactgatccctcaaaactatggtttggtcttcttgttaataatcctaagcaagcccaagcattcttccaaatggccgtaactgtaaatattgggaatgttatttcttccaaattctggacagacaattggttgcaaggaaagagtgtggctgaccttgctccaaatctgatcctagcaatcccaaagagagtaattaagaagcgtacagtgagccaggcattatccaacagaggctgggtggttgatgtcaagggcgctctaacagttcaggttttcatagaattcctcaaagtttgggagcttgttgagggtatagttctacatcctaatgtcccagatcatttttcttggaagttttcatcttcaggtcagtatagcagaaaatctgcatacaatatgatgttcattggctccatcaaattcctagcttggaggaggatctggaaaacttgggaccctgcaaactgcaagttcttcatttggttggccattaataatcaatgttggactcactggtcaaacgtggactaccgcatcaggccgcttgtgccctttgtgatcaagatgtggaaaccatcaaccacattctagtatcctgtgtgtttgctagggaggtatggagcttagttcttaacaggatcatccctggtagtgccgagcctctgcttctttgcctaaggaagagaggaaggggttcaattccttagtggtcctagttgcctcggagctttggaaacataggaatgcctgcgtttttcagggttctaggcctgctgtccaaagtgttgcacaagctgttatggatgaaggtcgtctttggtgtttagctggggctgctgtccttcggggtttggtccttaggactgaaccttctttggtcgtgaatggggccgttaccgtnn

SEQ ID NO: 55416 - DNA, 2279 bp, Zea Mays
ctcacacgcccacgcgtccgcgatccagggcgcgtgccatgcatggcggcatgcgcgcggcgcctacttctctgagttctctccaccccgagtcccgaccctgcgctgctctgacgctacattcctaccctcgcgtcgctggactctaatagcgcgacacgcgagaggcaatggctgtgcggtggtgcctcctgctgctcgtgttagtgttggctgcggccgcggcttgcgcggagaagggggagtgggacccggtgattcggatgcctggggagaaggagcctgcagggtcgcactcgcacagcggcgagggattcgatggggaggtggatgacgccgtcgggacgaggtgggcagtgctcgttgccgggtcctcaggctacggcaactacaggcaccaggctgatatatgtcatgcgtaccagatactgcaaaaaggaggcataaaagaggagaacatcgtggtgtttatgtatgatgacattgccaatagtgcactcaacccaaggcagggggttatcatcaaccacccagagggcgaagatgtttatgctggtgttccaaagttctcttgggcaacaaaactgcagtcactggaggcagcaggaaggtcatcaatagtaaagcagatgaccatatttttatctattactcagatcacgggggccctggtgttcttggtatgcccaatctaccatatctttatgctggtgacttcatgaaggtgttaagagaaaaacatgcttcaaatagctatgccaaaatggttatatatattgaagcatgtgaaagtggcagtatatttgagggattaatgccagaagaccttaatatttatgtcacgactgcatccaatgcagaagaaagtagctggggtacatactgtccaggaatggaaccaccgcctccttctgagtacattacctgcctaggtgatctatatagtgtctcttggatggaagacagtgagactaacaatctgaaggaggaaacaataaaggaacaatatgaagtggtgaagaagcgtacttcagacttcaatagctatggtgcaggctctcacgtcatggaatatggtgacaagaccttcaagggcgagaagctttacctttatcaaggttttgatcctgcaaatgccaatgtcacaaataagctgctttggtcaggccaagaggctgtggtcaaccaaagggatgcagatattctcttcctatggaagaggtatgagctcttacatgagaagtctgaagagaagcaggaagttctgagggagatcaccggaacagtaaggcataggaagcatctggacaacagcatcaacttcatcggaaagcttctcttcggggctgagaaagggccttccacacttgaggccgtcagacctcccggccagccactcgtcgatgattgggactgcttgaagcaaatggtacggatcttcgaatcccattgcggatcgctcactcagtacggtatgaggcatatgagggcgttcgcaaatatatgcaacagtggcacgcctggcgcttcgatgaagcgagcgagcatgggtgcttgtggcggctacaactcggcgagatggagcccgttggctcagggctacagcgcttgatcttctgaaaggttccggggatatggatgtgtatagtcttatctgtgaagtactgtatactgtaaaagttggcctttgtgcctctgtaatgtacgtagcagttgtcttgtatatgtctcggtggtgtgtttctgacttggtatgtttcgccaggtcataataatagacgaaagtggcctgcagcttgcaagccaatccggtgtagtagactagtagtagtagttcacaatcaggcctatgggccatttctaggagaacagagacatgacactagttcggacagcttaaagagcagaagtgcagatgcaggtacgagacgacatgagctgggagttgcgacacgacatacggtcggagtagaacaggttgaatcagagaagacgctggctgcgcagatgagtgttgcgacataggctctgtttggccatgctcctatgcctcctactactcgctacagaccgtggctcccagcttcacgttcatttcacgaacagagggctcccagcttcacattcaccatttcacaaagagagaaaaacaactcacgtaacttacgtgaacggtgctgctacagttactgttgttagaggagccgaagcaagcaaacaacgtggaaagataaaaatgcatgcgtgtagacctgaaacttgggtcggcacgacacgag

SEQ ID NO: 55417 - DNA, 2228 bp, Zea Mays
ctcacacgcccacgcgtccgcgatccagggcgcgtgccatgcatggcggcatgcgcgcggcgcctacttctctgagttctctccaccccgagtcccgaccctgcgctgctctgacgctacattcctaccctcgcgtcgctggactctaatagcgcgacacgcgagaggcaatggctgtgcggtggtgcctcctgctgctcgtgttagtgttggctgcggccgcggcttgcgcggagaagggggagtgggacccggtgattcggatgcctggggagaaggagcctgcagggtcgcactcgcacagcggcgagggattcgatggggaggtggatgacgccgtcgggacgaggtgggcagtgctcgttgccgggtcctcaggctacggcaactacaggcaccaggctgatatatgtcatgcgtaccagatactgcaaaaaggaggcataaaagaggagaacatcgtggtgtttatgtatgatgacattgccaatagtgcactcaacccaaggcagggggttatcatcaaccacccagagggcgaagatgtttatgctggtgttccaaaggactacactggggaccaagtcactactaagaacttctatgcagttctcttgggcaacaaaactgcagtcactggaggcagcaggaaggtcatcaatagtaaagcagatgaccatatttttatctattactcagatcacgggggccctggtgttcttggtatgcccaatctaccatatctttatgctggtgacttcatgaaggtgttaagagaaaaacatgcttcaaatagctatgccaaaatgaagaaagtagctggggtacatactgtccaggaatggaaccaccgcctccttctgagtacattacctgcctaggtgatctatatagtgtctcttggatggaagacagtgagactaacaatctgaaggaggaaacaataaaggaacaatatgaagtggtgaagaagcgtacttcagacttcaatagctatggtgcaggctctcacgtcatggaatatggtgacaagaccttcaagggcgagaagctttacctttatcaaggttttgatcctgcaaatgccaatgtcacaaataagctgctttggtcaggccaagaggctgtggtcaaccaaagggatgcagatattctcttcctatggaagaggtatgagctcttacatgagaagtctgaagagaagcaggaagttctgagggagatcaccggaacagtaaggcataggaagcatctggacaacagcatcaacttcatcggaaagcttctcttcggggctgagaaagggccttccacacttgaggccgtcagacctcccggccagccactcgtcgatgattgggactgcttgaagcaaatggtacggatcttcgaatcccattgcggatcgctcactcagtacggtatgaggcatatgagggcgttcgcaaatatatgcaacagtggcacgcctggcgcttcgatgaagcgagcgagcatgggtgcttgtggcggctacaactcggcgagatggagcccgttggctcagggctacagcgcttgatcttctgaaaggttccggggatatggatgtgtatagtcttatctgtgaagtactgtatactgtaaaagttggcctttgtgcctctgtaatgtacgtagcagttgtcttgtatatgtctcggtggtgtgtttctgacttggtatgtttcgccaggtcataataatagacgaaagtggcctgcagcttgcaagccaatccggtgtagtagactagtagtagtagttcacaatcaggcctatgggccatttctaggagaacagagacatgacactagttcggacagcttaaagagcagaagtgcagatgcaggtacgagacgacatgagctgggagttgcgacacgacatacggtcggagtagaacaggttgaatcagagaagacgctggctgcgcagatgagtgttgcgacataggctctgtttggccatgctcctatgcctcctactactcgctacagaccgtggctcccagcttcacgttcatttcacgaacagagggctcccagcttcacattcaccatttcacaaagagagaaaaacaactcacgtaacttacgtgaacggtgctgctacagttactgttgttagaggagccgaagcaagcaaacaacgtggaaagataaaaatgcatgcgtgtagacctgaaacttgggtcggcacgacacgag

SEQ ID NO: 55418 - DNA, 2444 bp, Zea Mays
aacaacaccaatccactactcggctgacgtcatcaaagcattgaagtgactctccggtctccactctccagcacctgcacggctgcacccggccgcacaagccgacggagccgccgcaccagctcacacgcccacgcgtccgcgatccagggcgcgtgccatgcatggcggcatgcgcgcggcgcctacttctctgagttctctccaccccgagtcccgaccctgcgctgctctgacgctacattcctaccctcgcgtcgctggactctaatagcgcgacacgcgagaggcaatggctgtgcggtggtgcctcctgctgctcgtgttagtgttggctgcggccgcggcttgcgcggagaagggggagtgggacccggtgattcggatgcctggggagaaggagcctgcagggtcgcactcgcacagcggcgagggattcgatggggaggtggatgacgccgtcgggacgaggtgggcagtgctcgttgccgggtcctcaggctacggcaactacaggcaccaggctgatatatgtcatgcgtaccagatactgcaaaaaggaggcataaaagaggagaacatcgtggtgtttatgtatgatgacattgccaatagtgcactcaacccaaggcagggggttatcatcaaccacccagagggcgaagatgtttatgctggtgttccaaaggactacactggggaccaagtcactactaagaacttctatgcagttctcttgggcaacaaaactgcagtcactggaggcagcaggaaggtcatcaatagtaaagcagatgaccatatttttatctattactcagatcacgggggccctggtgttcttggtatgcccaatctaccatatctttatgctggtgacttcatgaaggtgttaagagaaaaacatgcttcaaatagctatgccaaaatggttatatatattgaagcatgtgaaagtggcagtatatttgagggattaatgccagaagaccttaatatttatgtcacgactgcatccaatgcagaagaaagtagctggggtacatactgtccaggaatggaaccaccgcctccttctgagtacattacctgcctaggtgatctatatagtgtctcttggatggaagacagtgagactaacaatctgaaggaggaaacaataaaggaacaatatgaagtggtgaagaagcgtacttcagacttcaatagctatggtgcaggctctcacgtcatggaatatggtgacaagaccttcaagggcgagaagctttacctttatcaaggttttgatcctgcaaatgccaatgtcacaaataagctgctttggtcaggccaagaggctgtggtcaaccaaagggatgcagatattctcttcctatggaagaggtatgagctcttacatgagaagtctgaagagaagcaggaagttctgagggagatcaccggaacagtaaggcataggaagcatctggacaacagcatcaacttcatcggaaagcttctcttcggggctgagaaagggccttccacacttgaggccgtcagacctcccggccagccactcgtcgatgattgggactgcttgaagcaaatggtacggatcttcgaatcccattgcggatcgctcactcagtacggtatgaggcatatgagggcgttcgcaaatatatgcaacagtggcacgcctggcgcttcgatgaagcgagcgagcatgggtgcttgtggcggctacaactcggcgagatggagcccgttggctcagggctacagcgcttgatcttctgaaaggttccggggatatggatgtgtatagtcttatctgtgaagtactgtatactgtaaaagttggcctttgtgcctctgtaatgtacgtagcagttgtcttgtatatgtctcggtggtgtgtttctgacttggtatgtttcgccaggtcataataatagacgaaagtggcctgcagcttgcaagccaatccggtgtagtagactagtagtagtagttcacaatcaggcctatgggccatttctaggagaacagagacatgacactagttcggacagcttaaagagcagaagtgcagatgcaggtacgagacgacatgagctgggagttgcgacacgacatacggtcggagtagaacaggttgaatcagagaagacgctggctgcgcagatgagtgttgcgacataggctctgtttggccatgctcctatgcctcctactactcgctacagaccgtggctcccagcttcacgttcatttcacgaacagagggctcccagcttcacattcaccatttcacaaagagagaaaaacaactcacgtaacttacgtgaacggtgctgctacagttactgttgttagaggagccgaagcaagcaaacaacgtggaaagataaaaatgcatgcgtgtagacctgaaacttgggtcggcacgacacgag

SEQ ID NO: 55419 - DNA, 991 bp, Zea Mays
cagacgacacttggattttggagggcagggcagctgaagaaagataaaaacacccaaaggatcaactctccaagccgagacaacggcagccgctcgcgatcgctgtcgcgggcgtcatttgccctctgcctccacacaaccagagcgctccaggcagccatggcgcgccggaccaaccacacctccacggcagcggcggcgacaacaacaatggtcgcctcctcgccgtctcccccgcggccgccgcctcccgccagcgcgggagcgtgggggccctacgccagctcccgcgccttcttctccaacgtagccaccatcctcatcatcctggcatgcgtctccctgctcgccttcaccctccacgccgccgcgcgcttcctcctccgctgcctcgcgcgccgccgcgccgcgcgggaggaggcgcaggcgccggggcagcagcccaagctcccctccggcgccgccgccgccagcgccgccgccggctcggagcgcgccggcgccaccggtgcgggcgtgtgggcggaggcggagtgcgccatctgcctgtccgagctgctggaaggcggcgagcgcgtccgcgtgctcccggcgtgcggccacgggttccacggcgcctgcgtggagggctggctcgcggcgcgagcgtcctgccccacctgccgcgcgccgtcgcgggcgggagagccgtagccacgccgagccatggctgctgccgactgccgtgccgtgccacaggctctggagcaagctctgctccgatccgtcctccatgattcccagttggaggggcttgtttcagttattattatgggcgtagtatgtataaaaaatgcaaattggatggtggcggcctggcgggcgggctagtagtagttcgcatggattacaacatgttcggctcgatcgtttctcttccactatcatgattcatgcaaaagtctgcatttcatcatctagtgaaatccttggtcacgtaggaattgactgc

SEQ ID NO: 55420 - DNA, 3629 bp, Zea Mays
tacctagatgaaatcggtgagggaggcctttggattgcgtaaccacatggccgatgggtccttggagtggttgagcctgagatccttgacgaccgcgaacaccatatccccccgaaaaacagatccttgggtcacaggtcccctctcggcgccggtggggagaggagcggctgctggccagcagcaacaccaacctgctgtggtgctccagcccgtctttctcattcgactgctccacatctgcgcgctacccatggcggctactgctgctctgacctcgtcgatggcgtgggtgaccatccacgtggcgtcggcgccggccgcggcgccgttgagaccgcgtgacactaggctgctgcgccgcatcgacggaggcaacgttggcactgtgtacctatgccgccatggtcttcggcttctaaatgttcatacctcaaaagtgatcaaatttgtaacgttagaaatgcatttgcttaaatattgcaaagaagtagatggaattaatcattgctctaaatgtatcacttgagctcattccggtatctatttgccattggatgcaaacttttgaagattcagaaattacagatagcctatcttctacttgaagcaatcagtattgaatatgttgtttccaaatgacatatcctatggatagtctctcaaatagcattcaattataagccatagcattgcttcacttcaaactattaatttgacttattctcttatcggttatagcagatttaactgaaatcgttcaatcttcttgtagtccacatttgcagacttttgattattgttgtgtgcctacagtgttcttaactgcaattttctagcattagttcatcaattatttgtcctcttatatctgtataaaattagatgtaaacagacattaattagttgtgttgtgctctcatgtattagcattctacctgtatcgaattcttcagcttgtcagcaaatctttaaaagcaaagcaaatttttaaaagcggcatgcctagccccagtgtggcagaacctcccaagttattgggcccacatgcacctgtccttgtctcaaagacctcagacgactatgcatgtgcaccaaataacttaacaggatccgtccgagtgtcccaaggacatcggataaaccacttacaaccagaaccgcgggattaagtaacacaaatcacacacaccaatattgttgcagcgtaaatcttactaccaaattttacaggttacaaaaattttacattagtttatcggagtgattacaaaagtataagtttgaaatatatgctagctcaagggaccatcctcattaagaagtatagaagggttacttagacttataagaaggtcgagcccaccgacacttaacaccatcatcagcagcacaaaactatgacctgaaaaacaatagggaataaaaccctgagtatggaattactcagcaagacttacccgactaaagaaaagactctcaaggatatgctggatttgggaatcaaggagaggctttagcaaaaatcaacttagatacttttgcagaaatagcttactaaagtgagtccttactttcaatattttaacgtcagattaaatattaatagactctatttgcatctggtctaatttcaccatctcatcaatacaacatcatttttattcatgaggttcacatcctgacttaggttgcagggcagcgatcaagtctccactctccggggatataacggcgatccgaatcgatttactcagctgaggatttctaaccacacgacatatgtagcacttaacccttgcatatgtcaaccattcccacggatcctccactgcatgaacaggtccgcgccacccgagagcacaccaccctttttaggcggtcctttgccaggagggtacgtgccactctcgccatctctccactcccagtgcgcgattgtcttttcatgtatggaatagccgggttcaagcttatcctgtcccatatccagggcatgtggctagttaagatagtccttgatcatacaggcctacatacgcatccaatccttaactaacttgggcggagcatcacctgttcctagcccaagtcccgatttaagtacttccatccttaggattgttttgtgttccttaggatgaaaagagcattatagggaactttgcagtaagatcccaccatgctcccaagaaaaatattgttgcaggtagaagccatccttcctcaggataaacctgagctgggcataagtgcaaaggacaaactccatctgcttataagcagggctaagcatttttgtaaatcatgttttgatacttcaccagaagtatctataaaggtatggatatcaaggtaggcaatgcatcaaagggtttccaagcaactcctataaacttaatgcacatttcgctagacttaaagtgtataaaaatctttttaaaaacacaaggaaggggtaaatgcaccggggcttgcctggaataaacactacgttagtgtttgttagacgacgaccacttggcgatcatccttttgttctgatacttgcttcgtctgtccatcttcagtttcgtccgtcagcatcatcttgtggagaaactcacgcgcggcgacatcttgtggtcgactcagttctgatcctccgtatcacgtagtcaataaacgtacctaaatgatttgcataatgcacatgaatgcatataaacatgaatattacaaacctaaataatgctacacgatatagaattaaacacttaaaggcgagatgcattacaacattcatgatactaatatcaacatattactaaatacaacaatcaccctctctatcttaaccagacctaactcaaatatcaagaaatattaaaccatgcataggttctatatttttttaaagctagcgcatacatcaaaagatcaccaaaaatctaggttcattaatatagaacagaagtaatttaatgagtatttctaaattattcacttagactaacttgtatatcacatattttagtggaagcaaattcatcaatgtggctcggttctaaatattcggaagcacaagtaacatctaaccatgacatttaatcgactactacatataggataaaaagacgattaagacaggctatcgattttactatataaatacaattagtacaatcaacaatatcaggacttaacagctaatcgtttcgaatactaaaactatattttacgatattaattaaactacacaccgtatatacgaagcagttgaaccaatatctaacaccgccactatgggtataggcaaataagataatcaaatcaacatacttagctaatccatctaataactctgctaacggaggtagcgaatatagttcactaatactcaacttgaccatttcatcgaacaatcgagaagcatcgcgctggcttcggcttcagcatcaaatctttctccacggtcgcacacaaaaacacacaaaggaaacaaacatagcgctaaataacacaaatcaccatcaaaattaattaccacgaagctgcgtgaacttgcgaagatctcccgctatacacagatcatcggcagcgcgtcacgacgaactccaaaaaccacgacggtgatgacgcagagtgcg

SEQ ID NO: 55421 - DNA, 269 bp, Zea Mays
aggccactcataaattcaatggcaaaatattgatcaagctcgacatctccaagatataacaaaaataaaatgacaaaacagaacgacattgcatcagtacactcatgttaaaaaatataaaaagatgccttgtggatgcatgtacaatgaaatctcgatctcattatgagttgtggcaaaatattgatcttgtttgaaggatgatgctactctcaagcccactgatctcaccctagtgctgtttgaatttgtagcgaagaattggcggg

SEQ ID NO: 55422 - DNA, 1352 bp, Zea Mays
cgtccgtcgtcccctttgtgaatcgtgcatgacaggtagatatcgcctagctctggaaccgctctcgggagccctggcggccggcaacgccgtggtggtgaagccgtcggagctcgcgccggccacctcggcgttcctcgcggccaacatacccaagtacctggactccaaggccgtgaaggtggtggagggcgggccggaggtgggggagaagctcatggagcaccgatgggacaaggttctcttcactggcagcagccgcgttgggcgccttatcatggcccaggccgccaagcacctcaccccggtggcgctggagctcggctccaagtgcccctgcatcgtcgactggcttgacagcgacagggacagccaggtagctgtgaatcgcatcatcggagcgaaatggtccacctgttccggccaagcctgcatcgccatcgactacctgctggtggaggaggagtttgctccgattctgatcgagatgctcaagtcgacgctggagaggttcttcaccaagccagagtacatggcgcgcatcctgaacgagaagcagttccagaggctgagcggcttcctggccgaccgcagggtggcgtcttccgtggtccacggcggccacttcaaccccaagacgctgagcatggagcccacgcttctgctcaaccctccgctcgactccgacatcatgacggaggagatattcggcccgctgctcccgatcatcacggtgaagaagatcgaagacagcatcaagttcctcaggtccaagcccaagccgctggcgatctacgccttcaccaggaacgagaagctgaagcaacgcatcatagacgagacgtcgtcggggagcatcacgttcaacgacgccatcgtgcagcatcccgttcggtggcgtggggcacagcgggttcggccagtaccacggcaagtactcgtttgacatgttcagccacaagaaggcggtgctcaagaggagcttcctcgtcgagttcatgttccgctacccgccgtgggacgagaccaagatcggaatgctcaggcgcgtctaccgcttcgactacgtctcgctcttcctcgcgctcatcggcctcaggagatgaagcagacggcggagagtgcgtgaacaatcgagccaacagaatttgcacccacacccaacacacagttgctagtggtcaattgtcgttcatactgatcgatgaatatgtaattgtcccttctgtacaccaaaacgtctgtagtgtcgtttactcgttttatacgtgtctgtctatttatcgcaccaaaagatatttaataataatggattattatctttctagtttgtgctcttcttgaacaatcgc

SEQ ID NO: 55423 - DNA, 1642 bp, Zea Mays
cgccgagcactatatagcacgtgttcgcgtgcaccggcggcaaccacagcccaggctcgagactacaacgttacagcacaacacactgctgcacgtacatacgcagatagagaccagcagcaagctcgatcgagactcgagaggcatggggagtgtaccggaggagaaggccaagctgggcttcggcggcctggtgggcgacctgagggaggtgtacgagagcggcaggacgcagggcctggagtggcggcagtcgcagctcaggggcctcgtcaggctcctggaggagaaggaggaggagatcttcgacgtgctccacgaggacctggggaagcaccgcggcgaggccttcagagacgaggttggggttctgaagaagtccgtcgtcgacaagctgcaaaacctcaagaactgggcggctccggagaaggctcacacgccgctcgttgccttcccggcgaccgcgctggtggtgccagagccgctcggggtcgtgctcgtcttctcatgctggaacctcccaataggcagcagccgcgttgggcgccttatcatggcccaggccgccaagcacctcaccccggtggcgctggagctcggctccaagtgcccctgcatcgtcgactggcttgacagcgacagggacagccaggtagctgtgaatcgcatcatcggagcgaaatggtccacctgttccggccaagcctgcatcgccatcgactacctgctggtggaggaggagtttgctccgattctgatcgagatgctcaagtcgacgctggagaggttcttcaccaagccagagtacatggcgcgcatcctgaacgagaagcagttccagaggctgagcggcttcctggccgaccgcagggtggcgtcttccgtggtccacggcggccacttcaaccccaagacgctgagcatggagcccacgcttctgctcaaccctccgctcgactccgacatcatgacggaggagatattcggcccgctgctcccgatcatcacggtgaagaagatcgaagacagcatcaagttcctcaggtccaagcccaagccgctggcgatctacgccttcaccaggaacgagaagctgaagcaacgcatcatagacgagacgtcgtcggggagcatcacgttcaacgacgccatcgtgcagtatggcctggacagcatcccgttcggtggcgtggggcacagcgggttcggccagtaccacggcaagtactcgtttgacatgttcagccacaagaaggcggtgctcaagaggagcttcctcgtcgagttcatgttccgctacccgccgtgggacgagaccaagatcggaatgctcaggcgcgtctaccgcttcgactacgtctcgctcttcctcgcgctcatcggcctcaggagatgaagcagacggcggagagtgcgtgaacaatcgagccaacagaatttgcacccacacccaacacacagttgctagtggtcaattgtcgttcatactgatcgatgaatatgtaattgtcccttctgtacaccaaaacgtctgtagtgtcgtttactcgttttatacgtgtctgtctatttatcgcaccaaaagatatttaataataatggattattatctttctagtttgtgctcttcttgaacaatcgc

SEQ ID NO: 55424 - DNA, 2318 bp, Zea Mays
aatgaaaagcatctcgctgcgccgggctgccgctgtcatcaccacttcaattaccttatatatttgtttgttcctcggacacgacgatgccatcaacttgacatcatcaccacatgtctgtgctgattgattcctaacactactgatggctgatgcttccaccgtcgtcgctttacatgaagcttgccgggctgggctaccaccggagcgccaagaagtgcaaggagaagttcgagaacgtgcacaagtactacaagcgcaccaaggacgcccacgccgggcgccaggacggcaagagctaccgcttcttctcgcagctggaggccctgcacgccgcggcgccgcagccgcagcccccctcgggcatgaccacggtgcaagctggccctcatcatccgatggcattggcatggacggcgggccctacggcgctgggccctgccgctggcgccggcctgccggacctcagcttctcgtcgatgtcagggtcggagtccgagtacgactcggacgacgacgacgacgatgatgccggggaggagggcctcggcaggggcgagtaccacagggagatgatggcgatcttcgaggggatgatgaagcaggtcacggataagcaggacgccatgcagcgcgtgttcctggagacgctcgagcggtgggaggcggaacgcacagcgcgcgaggaagcgtggcggcgccaggaggtcgcccgcatgaaccgcgagcgcgagcggctcgccagggagcgcgccgccgcggcctcccgcgacgccgcgctgatcgcgttcctccagtgcgtcggcggtggtcaggggcagcccgtgcggctccctccacacagcgccggcgccagtgtcgtgcccgcgccgccaaagccggactgcgcccctccgtcgccccggctcgacgcggctgccacctcgcttcagcagctggtgcccgcgcagctcaaggcggtggaggccttggcgtgggcgggaggcgagggcggcgggtccacgtcgtcgcggtggcccaaggaggaagtggaggcgctgatccaggtgcggaacgagaaggacgagcagtaccatgatgcggggggcaaggggccgctttgggaggacatcgccgccgggatgcgcaggatcgggtacaaccgcagcgccaagcggtgcaaggagaagtgggagaacatcaacaagtactacaagaaggtgaaggagagcaacaagaggcgccccgaggactccaagacctgcccttacttccaccagctcgacgccatgtaccgcaagaaacaccgtggcgacagaggcagaataaccgcagctggaccgaacatgcaggacagcccgagccagcgcgagctcgagggaaagagcagcaacgatgttgacattgacaaccggaagagtgatgaacagggaaacgtgcatacttctcccgtcagcggcaaccgtgatacagcaccaacgaccacccggccgccaggtgacggcgccaaaaacaagacggcggaggacaacttgaaacgaacgaatgtgcagctcaagcaacaacagcatgagtttggaacggacgagacggacagcgacgacgacatggcaagaaaccacacagcctacactgaagaagacgacgacgaagccaaaataaaatacaagatggatttccagaatcctaatatgatagggagcagcagcaatatgtctgcaccaccaccacccgcagcagcagcagcgacgacggctgcggcaccgacgacttcagctgccccaacgagcaacaccttccttgccgttcagtagagggcaatgctgcaggaccggtgccagctgatcagcagttcagcaccacctttttccggcccataatcaccaagtatacctgccctgcctttgaaccatccgaataccatttattgatttgttctgtgataagtaccagatcatgaaaggttaaaaaaaaactagtagtagtaagactgaagaacagaagaggtaccagaggcgcccaaacagaaagttcttttcttttttcttaccataggtcatgttatactgtagcccattgctcacaattgtacattcttgtgtcagtctgaacttccagtaatcttatccgatagaaatcgatcgtgggatttggagcggtgaatcgaccgtttgtttcaggcataaatgacctttcatttcaatcgctcagataacatattgctgattcatggtgtccaggctagaacttgtttgtataggctctatcagcacctctgagtaggacatattcccggatactgctaaatatcctgatcaaaatgcctcacacactttacg

SEQ ID NO: 55425 - DNA, 3894 bp, Zea Mays
gtttgtagaggctcttcgctttctctgtctggcctcagcgctccacactcttttgcccctttccagttgtgcatgaccccatcccatccctttcaccaccgcccctcttcctcctcccctagctgcacagcccctcgcagccagtttccctcataacccgtcgtccagagggggccgtaagtatctaatctttctttttcctagagagagacgggagggagtcggggactgagagagatgggtgtagaagcaagaattctccccaattctgtgcctgaattgctttcttagacaaatgacagctgctagtactagtagtacgtatctgtagaccggagacaggagagggactgtgcgctagtcgcggtactggttaagtgatgctgcgattttctattccctcggtcctgtgatgtggtagatcaacggaatttcgtgtttttttgggcagggaattaagcaaaggtggtggggtggtggccatgctgcaccaccacggtggcgccgggtccccttacatggccccgacgacggctgacacgggcatggacccgttctcgccgacgccggcgacgcggcccgctgtgtctgtcaccgccataccacccccaccgacgatgcagttgcggccggcgggagcgggaccgagtgctgatttcgaggaattgccagcgggcggcgccggcgccggtgccgcggccagcctccaggacgacgacatgcagatgcaggccgactacggcgccagcgccgcgggagcgtccggctcgggcggcaaccggtggccgcgcgaggagacgctggcgctcatcaggatccggacggagatggacgccgacttccggaacgcccccctcaaagcgccgctctgggaggacgtcgccaggtgagaaaaggcactagcaaagccgtaataatccttttcctcccccctctgcccgctgctgcggaatgcggctaacgcgtcggttccacggaattccacctcttctccgtccggcgtcgccggtgaaatgatagcgagctatcctgtcatctatctttttacccgctgctttttggcgtaatgctccccggtttctgtgggattggagcgtagtgaagtggtaggtgcagccagcgcaggcgcaggccggacatctctcggcgcccgggcagggcagccgtctgccgcggcgtgattgtgcgtgcaggcgcaggccgcacaggcatgggcagggtctgcagcctgctgcagtgcactctttttctattcctctcttcctttttaaaaacgcacttgatttggataattggatggatgcaccaagttttcgtgggaggaagctagaggaatgaaaagcatctcgctgcgccgggctgccgctgtcatcaccacttcaattaccttatatatttgtttgttcctcggacacgacgatgccatcaacttgacatcatcaccacatgtctgtgctgattgattcctaacactactgatggctgatgcttccaccgtcgtcgctttacatgtctgtctccgatccgcttccaaattccaattccttccgcgtccgtccagtccctttcaaagaaagaggaagaagaatgatgccaagctttgaccactcacttccacgaaagatactcctccgcacacacacacaacgaagtcatcacctcttgatgactcgtgagtcgtgatggttgagacgtgaacgcgagaaagagctaacaggtgcggccgtgttggggcgcattttttttccatgcaggaagcttgccgggctgggctaccaccggagcgccaagaagtgcaaggagaagttcgagaacgtgcacaagtactacaagcgcaccaaggacgcccacgccgggcgccaggacggcaagagctaccgcttcttctcgcagctggaggccctgcacgccgcggcgccgcagccgcagcccccctcgggcatgaccacggtgcaagctggccctcatcatccgatggcattggcatggacggcgggccctacggcgctgggccctgccgctggcgccggcctgccggacctcagcttctcgtcgatgtcagggtcggagtccgagtacgactcggacgacgacgacgacgatgatgccggggaggagggcctcggcaggggcgagtaccacagggagatgatggcgatcttcgaggggatgatgaagcaggtcacggataagcaggacgccatgcagcgcgtgttcctggagacgctcgagcggtgggaggcggaacgcacagcgcgcgaggaagcgtggcggcgccaggaggtcgcccgcatgaaccgcgagcgcgagcggctcgccagggagcgcgccgccgcggcctcccgcgacgccgcgctgatcgcgttcctccagtgcgtcggcggtggtcaggggcagcccgtgcggctccctccacacagcgccggcgccagtgtcgtgcccgcgccgccaaagccggactgcgcccctccgtcgccccggctcgacgcggctgccacctcgcttcagcagctggtgcccgcgcagctcaaggcggtggaggccttggcgtgggcgggaggcgagggcggcgggtccacgtcgtcgcggtggcccaaggaggaagtggaggcgctgatccaggtgcggaacgagaaggacgagcagtaccatgatgcggggggcaaggggccgctttgggaggacatcgccgccgggatgcgcaggatcgggtacaaccgcagcgccaagcggtgcaaggagaagtgggagaacatcaacaagtactacaagaaggtgaaggagagcaacaagaggcgccccgaggactccaagacctgcccttacttccaccagctcgacgccatgtaccgcaagaaacaccgtggcgacagaggcagaataaccgcagctggaccgaacatgcaggacagcccgagccagcgcgagctcgagggaaagagcagcaacgatgttgacattgacaaccggaagagtgatgaacagggaaacgtgcatacttctcccgtcagcggcaaccgtgatacagcaccaacgaccacccggccgccaggtgacggcgccaaaaacaagacggcggaggacaacttgaaacgaacgaatgtgcagctcaagcaacaacagcatgagtttggaacggacgagacggacagcgacgacgacatggcaagaaaccacacagcctacactgaagaagacgacgacgaagccaaaataaaatacaagatggatttccagaatcctaatatgatagggagcagcagcaatatgtctgcaccaccaccacccgcagcagcagcagcgacgacggctgcggcaccgacgacttcagctgccccaacgagcaacaccttccttgccgttcagtagagggcaatgctgcaggaccggtgccagctgatcagcagttcagcaccacctttttccggcccataatcaccaagtatacctgccctgcctttgaaccatccgaataccatttattgatttgttctgtgataagtaccagatcatgaaaggttaaaaaaaaactagtagtagtaagactgaagaacagaagaggtaccagaggcgcccaaacagaaagttcttttcttttttcttaccataggtcatgttatactgtagcccattgctcacaattgtacattcttgtgtcagtctgaacttccagtaatcttatccgatagaaatcgatcgtgggatttggagcggtgaatcgaccgtttgtttcaggcataaatgacctttcatttcaatcgctcagataacatattgctgattcatggtgtccaggctagaacttgtttgtataggctctatcagcacctctgagtaggacatattcccggatactgctaaatatcctgatcaaaatgcctcacacactttacg

SEQ ID NO: 55426 - DNA, 2752 bp, Zea Mays
cgtttgtagaggctcttcgctttctctgtctggcctcagcgctccacactcttttgcccctttccagttgtgcatgaccccatcccatccctttcaccaccgcccctcttcctcctcccctagctgcacagcccctcgcagccagtttccctcataacccgtcgtccagagggggccggaattaagcaaaggtggtggggtggtggccatgctgcaccaccacggtggcgccgggtccccttacatggccccgacgacggctgacacgggcatggacccgttctcgccgacgccggcgacgcggcccgctgtgtctgtcaccgccataccacccccaccgacgatgcagttgcggccggcgggagcgggaccgagtgctgatttcgaggaattgccagcgggcggcgccggcgccggtgccgcggccagcctccaggacgacgacatgcagatgcaggccgactacggcgccagcgccgcgggagcgtccggctcgggcggcaaccggtggccgcgcgaggagacgctggcgctcatcaggatccggacggagatggacgccgacttccggaacgcccccctcaaagcgccgctctgggaggacgtcgccaggaagcttgccgggctgggctaccaccggagcgccaagaagtgcaaggagaagttcgagaacgtgcacaagtactacaagcgcaccaaggacgcccacgccgggcgccaggacggcaagagctaccgcttcttctcgcagctggaggccctgcacgccgcggcgccgcagccgcagcccccctcgggcatgaccacggtgcaagctggccctcatcatccgatggcattggcatggacggcgggccctacggcgctgggccctgccgctggcgccggcctgccggacctcagcttctcgtcgatgtcagggtcggagtccgagtacgactcggacgacgacgacgacgatgatgccggggaggagggcctcggcaggggcgagtaccacagggagatgatggcgatcttcgaggggatgatgaagcaggtcacggataagcaggacgccatgcagcgcgtgttcctggagacgctcgagcggtgggaggcggaacgcacagcgcgcgaggaagcgtggcggcgccaggaggtcgcccgcatgaaccgcgagcgcgagcggctcgccagggagcgcgccgccgcggcctcccgcgacgccgcgctgatcgcgttcctccagtgcgtcggcggtggtcaggggcagcccgtgcggctccctccacacagcgccggcgccagtgtcgtgcccgcgccgccaaagccggactgcgcccctccgtcgccccggctcgacgcggctgccacctcgcttcagcagctggtgcccgcgcagctcaaggcggtggaggccttggcgtgggcgggaggcgagggcggcgggtccacgtcgtcgcggtggcccaaggaggaagtggaggcgctgatccaggtgcggaacgagaaggacgagcagtaccatgatgcggggggcaaggggccgctttgggaggacatcgccgccgggatgcgcaggatcgggtacaaccgcagcgccaagcggtgcaaggagaagtgggagaacatcaacaagtactacaagaaggtgaaggagagcaacaagaggcgccccgaggactccaagacctgcccttacttccaccagctcgacgccatgtaccgcaagaaacaccgtggcgacagaggcagaataaccgcagctggaccgaacatgcaggacagcccgagccagcgcgagctcgagggaaagagcagcaacgatgttgacattgacaaccggaagagtgatgaacagggaaacgtgcatacttctcccgtcagcggcaaccgtgatacagcaccaacgaccacccggccgccaggtgacggcgccaaaaacaagacggcggaggacaacttgaaacgaacgaatgtgcagctcaagcaacaacagcatgagtttggaacggacgagacggacagcgacgacgacatggcaagaaaccacacagcctacactgaagaagacgacgacgaagccaaaataaaatacaagatggatttccagaatcctaatatgatagggagcagcagcaatatgtctgcaccaccaccacccgcagcagcagcagcgacgacggctgcggcaccgacgacttcagctgccccaacgagcaacaccttccttgccgttcagtagagggcaatgctgcaggaccggtgccagctgatcagcagttcagcaccacctttttccggcccataatcaccaagtatacctgccctgcctttgaaccatccgaataccatttattgatttgttctgtgataagtaccagatcatgaaaggttaaaaaaaaactagtagtagtaagactgaagaacagaagaggtaccagaggcgcccaaacagaaagttcttttcttttttcttaccataggtcatgttatactgtagcccattgctcacaattgtacattcttgtgtcagtctgaacttccagtaatcttatccgatagaaatcgatcgtgggatttggagcggtgaatcgaccgtttgtttcaggcataaatgacctttcatttcaatcgctcagataacatattgctgattcatggtgtccaggctagaacttgtttgtataggctctatcagcacctctgagtaggacatattcccggatactgctaaatatcctgatcaaaatgcctcacacactttacg

SEQ ID NO: 55427 - DNA, 1465 bp, Zea Mays
ataacaaccgcgagggaaacaacagatcccgctcccgcctctccgttctactactactcctttccggcggaccggcggcggaaccgcctaagcaaaacggatggccccgagaggcggccgcgaggaggctagttctggctccgaggatgaggaagaggaggccggtttctccaggagctacttcctggccaaggagaaggagccgtcatccgtgaagaagcgcgcccgcgccgccgcaggtgttgcgtgcatcccttgcacagatccccccgaagcacaaggaagaggtggagtccctgacgagaagctacaaggaccagtaccgcaactggctgttcgaactaagatgcggttttggtctcctgatgtatgggtttggatctaagaagcagttgctcgaggattttgcctccaccaccttgactaatttcactgtcgttgtaatcaatggctaccttccggccgtcaatttgaaacaggtcatagcaacaatagctgaaatgttctgggatcaaacaaaagctaaacgcaggaaacgtgcaggaacaaggtcccagttgtcacagcagtttccgtcacaatcaacagagggtatcatctcattcctaatgagacagacatctgacgatgtggatgatcacgtgtgccttcttattcataatattgacgggcctgctttgcgtgatactgaatcacaacaatgtctagcacaaatttcttgctgcccacaaatccgtgtcgttgcatcaatagaccatgttaatgcccctttattgtgggacaagaagatggtgcacaaacagttcaagtggagctggtaccatgtcccgacattcgcaccttacaaagtcgaaggcgtgttctacccattgatccttgctagtggtggtcacgcccaaaccacaaaaactgctcttgttgttctgcagagtctgacaccgaatgcacaaagcgttttcagagtccttgctgagtatcagttggcaaatgagaaggaggaaggtatgccggtcagcagtttgtatacaaaatgccgtgagcgctttctggtaagcagccaagtgacattgaatgcacacctgacggagtttaaagatcacgatctggttaagaccaggaagcactctgatgggcaagattgcctccgcattcctcttgtttctgacgcgctggagaagttgctgcaagaattggcttgacattttgcattagcgcatttatttttcatggatgatggatgggttcactgaagtatttgtagttttctctgcccacgtggaactgaaggatcttgtccttattgaaggaaaatgtattaccatggaaagaactcagatgagcatgccattgcatggattatttataactcggattccggaactgaaagcatgttgcatgaaccgctctgctttgttggcttaaactcatgagcaagaaccgtgatgggtatggagcgtgcttgaag

SEQ ID NO: 55428 - DNA, 2680 bp, Zea Mays
caaaaacacagcacagttgggtgatttctgcttgatcccatcgaggaaatgaacgatttccgtaagctcttttcattcaattctacggtaagttttggattttctacatttttgggcgacttttgcttctacgtcatgtcgacttgtcgacatcctgaacacagaggttgcagatgccgaggaccacaactccacaaggcttgctcatttataatggccttgtggagtccgaggcactgattgatagtagttcttgctctagccgcaccgccatggagatcaaccccgcggacgagatcgacaagtgcgaggccggcggcggcgcggagccgcaacctgcagatccggagcccgatgccgccgcggcggtcgagcagcagcagccgtggcgcgagcagctgacggcgcggggcttggtggccgcggcgctgatcgggtccatgtacaccgtcgtcgtcatgaagctgaacctgacgacggggttcgtgcccacgatgaacgtgtccgccgcgctgctggcgttcctggcgctccgcggctggacgggcgcgctgtcccgcctgggcgtcgccggcgccaggcccttcacgcggcaggagaacaccgtcgtccagacctgcgccgtcgcgtgctactcgctagcgctctgcgggttcgggtcgttcatgctgggcctgaacaggaggacgtacgaggcggccggagtgaacacgccgggaaacgtgccgggtagcgtcaaggagccaggattcgggtggatagccggcttcctcgtcgccagtagcttcggcggcctgctcaccttgatccccctcagaaaggctttggtcatcgactacaagctgacgtacccaagcgggactgcaactgctgttctaataaacgggttccacaccccccaaggagacaagaatgcagagtgcgaagcaagtacgtgcatttctgaagtactttgggatcagcttcctatggagcttcttccagtggttctacaccggtggcaacgcctgcggcttcgctcaattccctacgtttggcctcaaggcctggaaacactcgttcttcttcgatttcagcatgacgtacgtcggcgccgggatgatctgcccgcaccttgtcaacctctccgccctcctcggggcggtcctctcctggggaatcctgtggccactcatcagcagacgcaagggctactggtaccctgcagacgtaccggagagcagcatgaccagcttgtatggttacaagtccttcgtgtgcatagctctgatcatgggtgatggcatctaccacctcgtcaaggtcctcggcgtcaccgccaagagcctgcatgagcgctcaaagctcagacgcagcaacaaccgaggtagcagtagcagagtggccgacgaggacaacgcggccgcgatcgacagcctgcgccgcgacgaggtcttcaaccgagactccatcccggcgtggctggcgtacgctgggtacgccgtcacgagcgccgtcgcggcggtcgccatcccggcgatgttccggcaggtgcggtggtactacgtggtcgccgcgtacgcgctggcgcccgtgctgggcttctccaactcctacggcgccgggctcacggacatcaacatgggctacagctacggccagctcgcgctcttcgtcctcgcggcgtgggccggccgcgacgacggcgtcgtggccggcctcgtcggctgcggcctggtgaagcagctggtgctcatctccgccgacctcatgcacgacttcaagacggcgcacctcaccctgacgtcgccgcgctccatgctcgccgcgcaggccgtcggcgccgccatgggctgcgtcgtcacgccgctcacgtttctcctcttctacagggcgttcgacgtcggcaaccccgacgggtactggaaagcgccgttcgcgctcatctaccgcaacatggccctcctgggagcccagggcttctcggcgctgcccacgcactgcctgccgctgtccgcggggttcttcgcgctcgccgtgctcgccaacgtgatgaaggacgtcctgccgccgcgctacgcgaggtacgtgcccctgccgacggcgatggccgtgccgttcctcgtcggcgccagcttcgccatcgacatggtggtggggaccgtggtggtcttcgcctggcactggattgacggcaacgagaccacgttgctcgtgccggcggtggcgtcaggcctcatctgcggtgacggcgtatggactttcccttcgtcgttgctttctctggccaagatcaagccacccatctgcctgaaatttacacctggaagctagataaatggatacattctcatgtgctaatcttcggatagtgatctgacacaatctgaactctgattctctgcacaaatcatgagacgtatccacatctatattcaattgaaaggaacaaaaatgttcatgctgcttcgaccgacaggcgatgagagccgaatccattttttctttcgattttgccttctgttttatattcaaccctaaatatgcaatctccatgaactgcttgggatgcttaaacaagtcaaatagacagcaaaagtacatcaaagaaggcacggaaacaaatagagcaaagtccaacaaaaatacaaattcacagtcccaaccaggcccggtccacactggtccgtgtgcatatgag

SEQ ID NO: 55429 - DNA, 2588 bp, Zea Mays
ccaaaaacacagcacagttgggtgatttctgcttgatcccatcgaggaaatgaacgatttccgtaagctcttttcattcaattctacgaggttgcagatgccgaggaccacaactccacaaggcttgctcatttataatggccttgtggagtccgaggcactgattgatagtagttcttgctctagccgcaccgccatggagatcaaccccgcggacgagatcgacaagtgcgaggccggcggcggcgcggagccgcaacctgcagatccggagcccgatgccgccgcggcggtcgagcagcagcagccgtggcgcgagcagctgacggcgcggggcttggtggccgcggcgctgatcgggtccatgtacaccgtcgtcgtcatgaagctgaacctgacgacggggttcgtgcccacgatgaacgtgtccgccgcgctgctggcgttcctggcgctccgcggctggacgggcgcgctgtcccgcctgggcgtcgccggcgccaggcccttcacgcggcaggagaacaccgtcgtccagacctgcgccgtcgcgtgctactcgctagcgctctgcgggttcgggtcgttcatgctgggcctgaacaggaggacgtacgaggcggccggagtgaacacgccgggaaacgtgccgggtagcgtcaaggagccaggattcgggtggatagccggcttcctcgtcgccagtagcttcggcggcctgctcaccttgatccccctcagaaaggctttggtcatcgactacaagctgacgtacccaagcgggactgcaactgctgttctaataaacgggttccacaccccccaaggagacaagaatgcagagaagcaagtacgtgcatttctgaagtactttgggatcagcttcctatggagcttcttccagtggttctacaccggtggcaacgcctgcggcttcgctcaattccctacgtttggcctcaaggcctggaaacactcgttcttcttcgatttcagcatgacgtacgtcggcgccgggatgatctgcccgcaccttgtcaacctctccgccctcctcggggcggtcctctcctggggaatcctgtggccactcatcagcagacgcaagggctactggtaccctgcagacgtaccggagagcagcatgaccagcttgtatggttacaagtccttcgtgtgcatagctctgatcatgggtgatggcatctaccacctcgtcaaggtcctcggcgtcaccgccaagagcctgcatgagcgctcaaagctcagacgcagcaacaaccgaggtatggccgacgaggacaacgcggccgcgatcgacagcctgcgccgcgacgaggtcttcaaccgagactccatcccggcgtggctggcgtacgctgggtacgccgtcacgagcgccgtcgcggcggtcgccatcccggcgatgttccggcaggtgcggtggtactacgtggtcgccgcgtacgcgctggcgcccgtgctgggcttctccaactcctacggcgccgggctcacggacatcaacatgggctacagctacggccagctcgcgctcttcgtcctcgcggcgtgggccggccgcgacgacggcgtcgtggccggcctcgtcggctgcggcctggtgaagcagctggtgctcatctccgccgacctcatgcacgacttcaagacggcgcacctcaccctgacgtcgccgcgctccatgctcgccgcgcaggccgtcggcgccgccatgggctgcgtcgtcacgccgctcacgtttctcctcttctacagggcgttcgacgtcggcaaccccgacgggtactggaaagcgccgttcgcgctcatctaccgcaacatggccctcctgggagcccagggcttctcggcgctgcccacgcactgcctgccgctgtccgcggggttcttcgcgctcgccgtgctcgccaacgtgatgaaggacgtcctgccgccgcgctacgcgaggtacgtgcccctgccgacggcgatggccgtgccgttcctcgtcggcgccagcttcgccatcgacatggtggtggggaccgtggtggtcttcgcctggcactggattgacggcaacgagaccacgttgctcgtgccggcggtggcgtcaggcctcatctgcggtgacggcgtatggactttcccttcgtcgttgctttctctggccaagatcaagccacccatctgcctgaaatttacacctggaagctagataaatggatacattctcatgtgctaatcttcggatagtgatctgacacaatctgaactctgattctctgcacaaatcatgagacgtatccacatctatattcaattgaaaggaacaaaaatgttcatgctgcttcgaccgacaggcgatgagagccgaatccattttttctttcgattttgccttctgttttatattcaaccctaaatatgcaatctccatgaactgcttgggatgcttaaacaagtcaaatagacagcaaaagtacatcaaagaaggcacggaaacaaatagagcaaagtccaacaaaaatacaaattcacagtcccaaccaggcccggtccacactggtccgtgtgcatatgag

SEQ ID NO: 55430 - DNA, 2539 bp, Zea Mays
atcttattggtataagtattctatcaatgttattaagccatgagtcaacatgctcgacgcctcgacagtaataagccacaaaccaaaaacacagcacagttgggtgatttctgcttgatcccatcgaggaaatgaacgatttccgtaagctcttttcattcaattctacgaggttgcagatgccgaggaccacaactccacaaggcttgctcatttataatggccttgtggagtccgaggcactgattgatagtagttcttgctctagccgcaccgccatggagatcaaccccgcggacgagatcgacaagtgcgaggccggcggcggcgcggagccgcaacctgcagatccggagcccgatgccgccgcggcggtcgagcagcagcagccgtggcgcgagcagctgacggcgcggggcttggtggccgcggcgctgatcgggtccatgtacaccgtcgtcgtcatgaagctgaacctgacgacggggttcgtgcccacgatgaacgtgtccgccgcgctgctggcgttcctggcgctccgcggctggacgggcgcgctgtcccgcctgggcgtcgccggcgccaggcccttcacgcggcaggagaacaccgtcgtccagacctgcgccgtcgcgtgctactcgctagcgctctgcgggttcgggtcgttcatgctgggcctgaacaggaggacgtacgaggcggccggagtgaacacgccgggaaacgtgccgggtagcgtcaaggagccaggattcgggtggatagccggcttcctcgtcgccagtagcttcggcggcctgctcaccttgatccccctcagaaaggctttggtcatcgactacaagctgacgtacccaagcgggactgcaactgctgttctaataaacgggttccacaccccccaaggagacaagaatgcagagaagcaagtacgtgcatttctgaagtactttgggatcagcttcctatggagcttcttccagtggttctacaccggtggcaacgcctgcggcttcgctcaattccctacgtttggcctcaaggcctggaaacactcgttcttcttcgatttcagcatgacgtacgtcggcgccgggatgatctgcccgcaccttgtcaacctctccgccctcctcggggcggtcctctcctggggaatcctgtggccactcatcagcagacgcaagggctactggtaccctgcagacgtaccggagagcagcatgaccagcttgtatggttacaagtccttcgtgtgcatagctctgatcatgggtgatggcatctaccacctcgtcaaggtcctcggcgtcaccgccaagagcctgcatgagcgctcaaagctcagacgcagcaacaaccgaggtagcagtagcagagtggccgacgaggacaacgcggccgcgatcgacagcctgcgccgcgacgaggtcttcaaccgagactccatcccggcgtggctggcgtacgctgggtacgccgtcacgagcgccgtcgcggcggtcgccatcccggcgatgttccggcaggtgcggtggtactacgtggtcgccgcgtacgcgctggcgcccgtgctgggcttctccaactcctacggcgccgggctcacggacatcaacatgggctacagctacggccagctcgcgctcttcgtcctcgcggcgtgggccggccgcgacgacggcgtcgtggccggcctcgtcggctgcggcctggtgaagcagctgggcgttcgacgtcggcaaccccgacgggtactggaaagcgccgttcgcgctcatctaccgcaacatggccctcctgggagcccagggcttctcggcgctgcccacgcactgcctgccgctgtccgcggggttcttcgcgctcgccgtgctcgccaacgtgatgaaggacgtcctgccgccgcgctacgcgaggtacgtgcccctgccgacggcgatggccgtgccgttcctcgtcggcgccagcttcgccatcgacatggtggtggggaccgtggtggtcttcgcctggcactggattgacggcaacgagaccacgttgctcgtgccggcggtggcgtcaggcctcatctgcggtgacggcgtatggactttcccttcgtcgttgctttctctggccaagatcaagccacccatctgcctgaaatttacacctggaagctagataaatggatacattctcatgtgctaatcttcggatagtgatctgacacaatctgaactctgattctctgcacaaatcatgagacgtatccacatctatattcaattgaaaggaacaaaaatgttcatgctgcttcgaccgacaggcgatgagagccgaatccattttttctttcgattttgccttctgttttatattcaaccctaaatatgcaatctccatgaactgcttgggatgcttaaacaagtcaaatagacagcaaaagtacatcaaagaaggcacggaaacaaatagagcaaagtccaacaaaaatacaaattcacagtcccaaccaggcccggtccacactggtccgtgtgcatatgag

SEQ ID NO: 55431 - DNA, 2667 bp, Zea Mays
atcttattggtataagtattctatcaatgttattaagccatgagtcaacatgctcgacgcctcgacagtaataagccacaaaccaaaaacacagcacagttgggtgatttctgcttgatcccatcgaggaaatgaacgatttccgtaagctcttttcattcaattctacgaggttgcagatgccgaggaccacaactccacaaggcttgctcatttataatggccttgtggagtccgaggcactgattgatagtagttcttgctctagccgcaccgccatggagatcaaccccgcggacgagatcgacaagtgcgaggccggcggcggcgcggagccgcaacctgcagatccggagcccgatgccgccgcggcggtcgagcagcagcagccgtggcgcgagcagctgacggcgcggggcttggtggccgcggcgctgatcgggtccatgtacaccgtcgtcgtcatgaagctgaacctgacgacggggttcgtgcccacgatgaacgtgtccgccgcgctgctggcgttcctggcgctccgcggctggacgggcgcgctgtcccgcctgggcgtcgccggcgccaggcccttcacgcggcaggagaacaccgtcgtccagacctgcgccgtcgcgtgctactcgctagcgctctgcgggttcgggtcgttcatgctgggcctgaacaggaggacgtacgaggcggccggagtgaacacgccgggaaacgtgccgggtagcgtcaaggagccaggattcgggtggatagccggcttcctcgtcgccagtagcttcggcggcctgctcaccttgatccccctcagaaaggctttggtcatcgactacaagctgacgtacccaagcgggactgcaactgctgttctaataaacgggttccacaccccccaaggagacaagaatgcagagaagcaagtacgtgcatttctgaagtactttgggatcagcttcctatggagcttcttccagtggttctacaccggtggcaacgcctgcggcttcgctcaattccctacgtttggcctcaaggcctggaaacactcgttcttcttcgatttcagcatgacgtacgtcggcgccgggatgatctgcccgcaccttgtcaacctctccgccctcctcggggcggtcctctcctggggaatcctgtggccactcatcagcagacgcaagggctactggtaccctgcagacgtaccggagagcagcatgaccagcttgtatggttacaagtccttcgtgtgcatagctctgatcatgggtgatggcatctaccacctcgtcaaggtcctcggcgtcaccgccaagagcctgcatgagcgctcaaagctcagacgcagcaacaaccgagtggccgacgaggacaacgcggccgcgatcgacagcctgcgccgcgacgaggtcttcaaccgagactccatcccggcgtggctggcgtacgctgggtacgccgtcacgagcgccgtcgcggcggtcgccatcccggcgatgttccggcaggtgcggtggtactacgtggtcgccgcgtacgcgctggcgcccgtgctgggcttctccaactcctacggcgccgggctcacggacatcaacatgggctacagctacggccagctcgcgctcttcgtcctcgcggcgtgggccggccgcgacgacggcgtcgtggccggcctcgtcggctgcggcctggtgaagcagctggtgctcatctccgccgacctcatgcacgacttcaagacggcgcacctcaccctgacgtcgccgcgctccatgctcgccgcgcaggccgtcggcgccgccatgggctgcgtcgtcacgccgctcacgtttctcctcttctacagggcgttcgacgtcggcaaccccgacgggtactggaaagcgccgttcgcgctcatctaccgcaacatggccctcctgggagcccagggcttctcggcgctgcccacgcactgcctgccgctgtccgcggggttcttcgcgctcgccgtgctcgccaacgtgatgaaggacgtcctgccgccgcgctacgcgaggtacgtgcccctgccgacggcgatggccgtgccgttcctcgtcggcgccagcttcgccatcgacatggtggtggggaccgtggtggtcttcgcctggcactggattgacggcaacgagaccacgttgctcgtgccggcggtggcgtcaggcctcatctgcggtgacggcgtatggactttcccttcgtcgttgctttctctggccaagatcaagccacccatctgcctgaaatttacacctggaagctagataaatggatacattctcatgtgctaatcttcggatagtgatctgacacaatctgaactctgattctctgcacaaatcatgagacgtatccacatctatattcaattgaaaggaacaaaaatgttcatgctgcttcgaccgacaggcgatgagagccgaatccattttttctttcgattttgccttctgttttatattcaaccctaaatatgcaatctccatgaactgcttgggatgcttaaacaagtcaaatagacagcaaaagtacatcaaagaaggcacggaaacaaatagagcaaagtccaacaaaaatacaaattcacagtcccaaccaggcccggtccacactggtccgtgtgcatatgag

SEQ ID NO: 55432 - DNA, 2606 bp, Zea Mays
ttaagggtttggactaatgattgtaagtgagatttttagataacgagttgttctaagtgagatggcatgtgtggttgacatttgaaggatttctctatataaatcccggctactattaacatctcaacctcaccatcttctcttgatcgaggcagggatcaagcgaccgagacccgccatggaccttgcacggagcggcggtgccgctgccgcggacgacgggggggagatcgagaggcacgagccggcgcccgaggacatggagtccgaccccgcggcggcgcgcgagaaggagctggagctggagcgggtgcagccgtggcgggagcaggtgaccctgcgcggcgtggtggcggcgctgctgatcggcttcatgtacagcgtgatcgtgatgaagatcgcgctgaccacggggctggtgcccacgctgaacgtctccgcggcgctgatggcgttcctggcgctccgcgggtggacgcgcgtgctggagcgcctcggcgtggcgcaccgccccttcacgcgccaggagaactgcgtcatcgagacctgcgccgtcgcgtgctacaccatcgcgttcggtggtgggttcggctccacgctgctgggcctggacaagaagacgtacgagctggccggggcctcgccggccaacgtcccgggcagctacaaggaccctgggttcggctggatggccgggttcgtcgcggcgatcagcttcgccggcctcctaagcctgatccccctcagaaaggttctggtcattgactacaagctaacttacccaagcgggactgcgaccgctgttcttataaacgggttccacaccaagcaaggagacaagaacgcaaggatgcaagtccgagggttcctcaagtactttgggctcagcttcgtgtggagctttttccagtggttctacacaggcggtgaagtttgcggctttgttcagtttcctacgttcggtctgaaggcctggaagcaggttcttctttgattttagcctcacgtacgttggtgcggggatgatctgttcgcacctcgtgaacatctccaccctccttggtgccatcctgtcgtgggggatactgtggccactcatcagcaagcagaaaggggagtggtaccctgcgaacatacctgagagtagcatgaaaagcttatacggttacaaggcattcctctgcatagctctgatcatgggagacggtacataccacttctttaaagtcttcggtgtcactgttaagagtctgcatcaacggctgagccgcaaacgtgctaccaacagagtggcaaacggtggagacgaaatggccgcgcttgacgacctacagcgtgacgagatcttcagcgacgggtctttccccgcctgggcagcttacgccgggtacgccgcgctgaccgtcgtctcagcggtcatcatcccgcacatgttccggcaggtcaagtggtactacgtgatcgtggcctacgtcctcgcccctctcctcggcttcgccaactcctacggcacggggctcaccgacatcaacatggcctacaactacggcaagatcgcgctcttcatcttcgcggcctgggccggcagggacaacggcgtcatcgcgggcctcgccggcggcaccctggtgaagcagctggtgatggcgtccgcggacctgatgcacgacttcaagacgggccacctgaccatgacgtcgcccaggtccctgctcgtggcgcagttcatcgggacggccatgggctgcgtcgtcgcgcccctcacgttcctgctcttctacaacgcgttcgacatcgggaaccccaccgggtactggaaggcgccgtacggcctcatctaccgcaacatggcgatcctcggcgtggagggcttctccgtgctgcccaggcactgcctcgcgctctccgctgggttcttcgcgttcgccttcgtcttcagcgtcgcccgggacgtcctgccgcggaagtacgccaggttcgtgcccctgcccatggccatggccgtgccgttcctcgtgggcgggagcttcgcgatcgatatgtgcgtcgggagcctggccgtctttgtctgggagaaggtgaacaggaaggaggccgtgttcatggtgcctgcggttgcgtccggtttgatctgtggagacggcatatggaccttcccgtcttccattctcgctctggccaagatcaagccaccgatttgcatgaagttcactcctggaagctagaaacagtattgacagttcacagaaatggagaatgcgagatacactgaaggcatcaactgtggttggttgaagtgttgaagagcaagtcctctggtcgtcgacatgaagcggagccatatgtcccctgtattatccttgttgtgcatgtgtgggttctccaagggctacagcactcgagattttctatagagttgatcatatgttttgttgtcatgttgggttcaacctatgtttatgttttgggtggaaaaaagatacaactgtacatttttaacagaaattaatgctcattttggttgtgtatttacattctttcaagtttgtggttactgccttgtatagtttgttgtcaacaatggagctgattggttactcgtgtaa

SEQ ID NO: 55433 - DNA, 740 bp, Zea Mays
catctctaagaacttcactgcttggtactggatggagttcaataaatgggagcactttgtcaatgatgattgtacacggtcatttgtttcactagaagttacaagaactggtttgccagagataacgaggcagatacttatggtagatgaagtgtatcgattgcatggtcttcctgaattttacacgaatccacggccacatatatcgttggtgtgggcattgggtgatgtcagcggcaaactaaagcaggcactaaaggacattgaaaaatatcagagcagtatgagctcattgcaaaaatgtaatgttcgatgcaagttcagtcgtgtagtttgtaaagtaggcaagaaggtgcatgatatctgtaaagttgcagattgaaacacacatgaattacgctcgataagcttcgaggtactgacctcgtatggtctggaccaattcttgtgattggaacagtgaaacacaaattcattctcttcttcagtacatggcagttactgctaacttttcccatgcaaattacgaaatgataaagaggtcattgaaacctggcaagagctatggtacaaaaaaaatatcaaactgtgtgattctgctacccttgttttagctctccccaactattccttctacagcacccgcttcttctgggtttaggcttcagctgtacaaacacatggttgtaatagctgatcatcccacggttgctatgaattaggttatagttttgattaag

SEQ ID NO: 55434 - DNA, 1726 bp, Zea Mays
gaatctcgcattgcttctgcaccacctgcgtcaaaattgctctgactctctgttaattcacttcagtgcctttttaactggagaagaatgcctacagaggttacaaaaccgtatagaagttcagtatgatagtgcaaacagagagcatcaggaagcactacagtccctttggtgtgcttcttttcctggcaccgagcttcgggggctaatatcagaacaatggaaagagatgggttggcaagggaaagacccatctacagattttagaggtggaggcttcatctccttggagaatctattgtacttcgctaggaactatccaaaatctttccaggaactccttcgcaagcagaatggtgaccgtgcaatctgggagtatccatttgctgtcgctggtgtaaatataaccttcatgctcattcaaatgcttgatctccaatcagttaaaccgaggtcattgttcggagcagttttcctaaagcttctttcagaaaacgatcaagcttttgacattctctactgcataaccttcaagctgatggatcagcaatggcttgacatgcatgctacttacatggacttcaacacggtcatgaagtctacacggcgtcagctagaaagggagctgttaattgaagatattcagaggattgaggacatgccatcatacaggcttctggcccggtagctagaagaaactgaaaccttaacatggctacatattgcaaggcggcttgagatgctaatggatcgcaacttatgtggacggcgacaatcttgaaatgtagatgacatgtatccttgtgtgttaggtacttgtggtctctggtaacctgatctctgaagattacaagggtgtgttattacaatctggtcgttgtccatcataccacgaaaggaagtattcctagggttgttgttgtaaacaggaggatttgggaaagatgatctgtgttgtctcccatttgcttgaagataagaggctagttctttttaagtgggcagctactctgctgtgccgctccccaagatctgtttgcgctgttcgtgccaagcctgcctacaccattttattcccgctggtgtgttccttttacgaatcgtgcttgcagttttctgtatttacctgatggttcatggcaaagagaatgctgcgtcatcataatatagctacagtacttttgtgagcgtcgtgaccaaggaccggcagaatggcaggtgcgcagtgcgctccatgtatgagcagcaacagcatcaataagggatgcgactggtatgtgggcacaggagggcgcaccatgagacatgagctggttccgtgttctttgttcctggtggatgacttcccgagtggtgaggttgcctgggccctgggccaagggcaaatattaatgctgctgggcttccattttagaggagatgcccaggattccaagaaggccaataggattcgccccgtgcatcaaagcgaaacaatctcatgcaatggcaatggcatttggttattcatcagtccctctgatggacaatcgacgatcatgtatgcatatcgctgcatatgcctgcatctgcatgaggggctttgctcagctgatacgctctggtggcagtgagaaagtgatgaacaacaactgttgatatgcttccattcttgtttccttggccaaggatcggaccaatggtatatatattattgcttggaagtaataaccaatgaacactcccg

SEQ ID NO: 55435 - DNA, 2286 bp, Zea Mays
gagcactgcaccgtccagcacacaccagcattgtcctgaggcctgagcagcgctgcgccgcccaaccagaacgacgaagcggagccagcgccaacgaaccaactaaccaacggacggaagtggcgaggcaaggccgccgcgaagccgagcaatagcccccctcctctacccgttcctctcctgccttctcgggatctgcccgcccgccttgtgcccccgcggttggagctccggctgcacgacaccatgagcccccgcgcgtagaggctgggagagagggagcggggaacaaagttaggcaccaacaaagttaagtggggaggccagagctggccagctgggtcgctgttctaccagagggatggacgggagcgccggctccttcgtcgccgtccgccggctctctggctccgaccgcgccgccgccttccaccactcctcttcggcggaggtcgtgacggggtcgacggcgtggatcgggagggggctctcctgcgtctgcgcgcagaggagggacagcgatgcgcgcctttccttcgatttgacgcctgtgcaggaagaatgcctacagaggttacaaaaccgtatagaagttcagtatgatagtgcaaacagagagcatcaggaagcactacagtccctttggtgtgcttcttttcctggcaccgagcttcgggggctaatatcagaacaatggaaagagatgggttggcaagggaaagacccatctacagattttagaggtggaggcttcatctccttggagaatctattgtacttcgctaggaactatccaaaatctttccaggaactccttcgcaagcagaatggtgaccgtgcaatctgggagtatccatttgctgtcgctggtgtaaatataaccttcatgctcattcaaatgcttgatctccaatcagttaaaccgaggtcattgttcggagcagttttcctaaagcttctttcagaaaacgatcaagcttttgacattctctactgcataaccttcaagctgatggatcagcaatggcttgacatgcatgctacttacatggacttcaacacggtcatgaagtctacacggcgtcagctagaaagggagctgttaattgaagatattcagaggattgaggacatgccatcatacaggcttctggcccggtagctagaagaaactgaaaccttaacatggctacatattgcaaggcggcttgagatgctaatggatcgcaacttatgtggacggcgacaatcttgaaatgtagatgacatgtatccttgtgtgttaggtacttgtggtctctggtaacctgatctctgaagattacaaggtagggtttttttcctggtgatagaatgccacgtagggtaactgaagtgtctgatcagctcccatggccaaaaaaaaaatttgtagggtgtgttattacaatctggtcgttgtccatcataccacgaaaggaagtattcctagggttgttgttgtaaacaggaggatttgggaaagatgatctgtgttgtctcccatttgcttgaagataagaggctagttctttttaagtgggcagctactctgctgtgccgctccccaagatctgtttgcgctgttcgtgccaagcctgcctacaccattttattcccgctggtgtgttccttttacgaatcgtgcttgcagttttctgtatttacctgatggttcatggcaaagagaatgctgcgtcatcataatatagctacagtacttttgtgagcgtcgtgaccaaggaccggcagaatggcaggtgcgcagtgcgctccatgtatgagcagcaacagcatcaataagggatgcgactggtatgtgggcacaggagggcgcaccatgagacatgagctggttccgtgttctttgttcctggtggatgacttcccgagtggtgaggttgcctgggccctgggccaagggcaaatattaatgctgctgggcttccattttagaggagatgcccaggattccaagaaggccaataggattcgccccgtgcatcaaagcgaaacaatctcatgcaatggcaatggcatttggttattcatcagtccctctgatggacaatcgacgatcatgtatgcatatcgctgcatatgcctgcatctgcatgaggggctttgctcagctgatacgctctggtggcagtgagaaagtgatgaacaacaactgttgatatgcttccattcttgtttccttggccaaggatcggaccaatggtatatatattattgcttggaagtaataaccaatgaacactcccg

SEQ ID NO: 55436 - DNA, 1029 bp, Zea Mays
cttcagtgcctttttaactggagaagaatgcctacagaggttacaaaaccgtatagaagttcagtatgatagtgcaaacagagagcatcaggaagcactacagtccctttggtgtgcttcttttcctggcaccgagcttcgggggctaatatcagaacaatggaaagagatgggttggcaagggaaagacccatctacagattttagaaatctttccaggaactccttcgcaagcagaatggtgaccgtgcaatctgggagtatccatttgctgtcgctggtgtaaatataaccttcatgctcattcaaatgcttgatctccaatcagttaaaccgaggtcattgttcggagcagttttcctaaagcttctttcagaaaacgatcaagcttttgacattctctactgcataaccttcaagctgatggatcagcaatggcttgacatgcatgctacttacatggacttcaacacggtcatgaagtctacacggcgtcagctagaaagggagctgttaattgaagatattcagaggattgaggacatgccatcatacaggcttctggcccggtagctagaagaaactgaaaccttaacatggctacatattgcaaggcggcttgagatgctaatggatcgcaacttatgtggacggcgacaatcttgaaatgtagatgacatgtatccttgtgtgttaggtacttgtggtctctggtaacctgatctctgaagattacaaggtagggtttttttcctggtgatagaatgccacgtagggtaactgaagtgtctgatcagctcccatggccaaaaaaaaaatttgtagggtgtgttattacaatctggtcgttgtccatcataccacgaaaggaagtattcctagggttgttgttgtaaacaggaggatttgggaaagatgatctgtgttgtctcccatttgcttgaagataagaggctagttctttttaagtgggcagctactctgctgtgccgctccccaagatctgtttgcgctgttcgtgccaagcct

SEQ ID NO: 55437 - DNA, 1309 bp, Zea Mays
gagcactgcaccgtccagcacacaccagcattgtcctgaggcctgagcagcgctgcgccgcccaaccagaacgacgaagcggagccagcgccaacgaaccaactaaccaacggacggaagtggcgagcggaggtcgtgacggggtcgacggcgtggatcgggagggggctctcctgcgtctgcgcgcagaggagggacagcgatgcgcgcctttccttcgatttgacgcctgtgcagcgtgtttcaggaagaatgcctacagaggttacaaaaccgtatagaagttcagtatgatagtgcaaacagagagcatcaggaagcactacagtccctttggtgtgcttcttttcctggcaccgagcttcgggggctaatatcagaacaatggaaagagatgggttggcaagggaaagacccatctacagattttagaggtggaggcttcatctccttggagaatctattgtacttcgctaggaactatccaaaatctttccaggaactccttcgcaagcagaatggtgaccgtgcaatctgggagtatccatttgctgtcgctggtgtaaatataaccttcatgctcattcaaatgcttgatctccaatcagttaaaccgaggtcattgttcggagcagttttcctaaagcttctttcagaaaacgatcaagcttttgacattctctactgcataaccttcaagctgatggatcagcaatggcttgacatgcatgctacttacatggacttcaacacggtcatgaagtctacacggcgtcagctagaaagggagctgttaattgaagatattcagaggattgaggacatgccatcatacaggcttctggcccggtagctagaagaaactgaaaccttaacatggctacatattgcaaggcggcttgagatgctaatggatcgcaacttatgtggacggcgacaatcttgaaatgtagatgacatgtatccttgtgtgttaggtacttgtggtctctggtaacctgatctctgaagattacaaggtagggtttttttcctggtgatagaatgccacgtagggtaactgaagtgtctgatcagctcccatggccaaaaaaaaaatttgtagggtgtgttattacaatctggtcgttgtccatcataccacgaaaggaagtattcctagggttgttgttgtaaacaggaggatttgggaaagatgatctgtgttgtctcccatttgcttgaagataagaggctagttctttttaagtgggcagctactctgctgtgccgctccccaagatctgtttgcgctgttcgtgccaagcct

SEQ ID NO: 55438 - DNA, 1285 bp, Zea Mays
caaccctgttcacaaaaataaatggaaccccagagagaagaactgccacagtgccacgggcccaagaagtgagtgctgccccgtcaatgccgctgggagccaagaaaagcaaggtgggtgcaatgggaggtagcggaacgctgatctcggtttaccccgaggagctcaccttcttgtttgagctggagaagccgtgctattgcaatctcaaggtggtgaacaacagcgagcatcatgtcgcattcaaggtcaaaacaacatcgccgaggaagtatttcgtccggccgaacgcgagcatcgtccagccatgggattcttgcacaataacgattacgctgcaggcacagaaagattacccaccagacatgcaatgcaaggataaattcttgattcagagcacgaaggtggccgccagtaccgacatggatgagatcccccctgatacgttcaacaaggaagctgataaggtaatcgaggaaatgaagctcaaggttgtctacacattacctagctgcggaggttcagatgactctagcgtatcatctttaggaagccggagcttcaaagcagcgtctgacgatctgatgatgctgaagaatgcaagccttgaagagatccagacaattcagcggttgaaagaagaaagagacaacatgcttcagcaaaatcagcaaatgcaacgtgaattggatgtgcttcggaggcgcaggagccgcaaaggcgatgcaggtttctccctgacgttcgccgcgtttgctgggctaataggtctcatggtggggctcctgatgagcctcatcttctcgtccgcgccggctgatgcgtagtaagatgcaagaaaaggttgcagccaacggaagcgttgttgagttgagaccgacgtgggggaaaaggctcgctcgggggaagaagatgaaatttctgctctagtctccatttttctttcttttgctgtttgcatcctagttattattatacgaaatggcaacggggtgcagatctttccttccactcgtgcttggttcatcctccagtttgtattttgccccttggtttctcattctttctgtatttagtatgtcaagacggaacctgtattcattcaacgattgggtagtgaagaactgagctaggagtaccaagaaagggtgatgatgggtgttagggttatacggaacctgtattcattcaacgattgggttttagggttctagttctacacgtacgcacgcatgtatgcttccacatccagtacgcagcaggtaaaaaatagacgttcgatgtg

SEQ ID NO: 55439 - DNA, 1429 bp, Zea Mays
caaccctgttcacaaaaataaatggaaccccagagagaagaactgccacagtgccacgggcccaagaagtgagtgctgccccgtcaatgccgctgggagccaagaaaagcaaggcaaagcaaactgcagacccattggtttctctctttcctcctcccctcccgacttctccaaatcgccgccttttgttgatttatctattttgcttgcaattagtttttggaaagcaaggtgggtgcaatgggaggtagcggaacgctgatctcggtttaccccgaggagctcaccttcttgtttgagctggagaagccgtgctattgcaatctcaaggtggtgaacaacagcgagcatcatgtcgcattcaaggtcaaaacaacatcgccgaggaagtatttcgtccggccgaacgcgagcatcgtccagccatgggattcttgcacaataacgattacgctgcaggcacagaaagattacccaccagacatgcaatgcaaggataaattcttgattcagagcacgaaggtggccgccagtaccgacatggatgagatcccccctgatacggtgagcaagaagtgcagaacaaatttttcaacaaggaagctgataaggtaatcgaggaaatgaagctcaaggttgtctacacattacctagctgcggaggttcagatgactctagcgtatcatctttaggaagccggagcttcaaagcagcgtctgacgatctgatgatgctgaagaatgcaagccttgaagagatccagacaattcagcggttgaaagaagaaagagacaacatgcttcagcaaaatcagcaaatgcaacgtgaattggatgtgcttcggaggcgcaggagccgcaaaggcgatgcaggtttctccctgacgttcgccgcgtttgctgggctaataggtctcatggtggggctcctgatgagcctcatcttctcgtccgcgccggctgatgcgtagtaagatgcaagaaaaggttgcagccaacggaagcgttgttgagttgagaccgacgtgggggaaaaggctcgctcgggggaagaagatgaaatttctgctctagtctccatttttctttcttttgctgtttgcatcctagttattattatacgaaatggcaacggggtgcagatctttccttccactcgtgcttggttcatcctccagtttgtattttgccccttggtttctcattctttctgtatttagtatgtcaagacggaacctgtattcattcaacgattgggtagtgaagaactgagctaggagtaccaagaaagggtgatgatgggtgttagggttatacggaacctgtattcattcaacgattgggttttagggttctagttctacacgtacgcacgcatgtatgcttccacatccagtacgcagcaggtaaaaaatagacgttcgatgtg

SEQ ID NO: 55440 - DNA, 1186 bp, Zea Mays
tcacttctggatagaagtttgggggcccgcgtgcagcgtcacagcctcccacccacaaagagataggaggatagcgtctatccccaatcctcccgccgcggcgacgccttcccctccctccttcctccgtcccatgctccgccgctgacacgttggcccgacttaaccttacgatggccgccgcctccgccatcaccgccgtctccggcgttgtgcttccccaaaccttcctatcccaccggtcgccgccgccgcagtgccgaagctggagaaccggagcctgtcactacttcagctgaatccgaagaggaggtggccgaggggtctgtcgctgtggcggaggcggaggaaccgacgccgccgagcaagccgaaggttaagttcggcgaaataattgggattctgaataagcagttcattgaggaggctgagaaggtgaagactgtaccggatctgaggcctggcgatatcattgagcttaggatgcaacggcccaacaaaaggagattgtcgctctttaagggcataatcatcgcaaagcacaaagctggtgttcacaccacaatccgtgtcagaaggatcattgctggtgtaggagttgagattaccttcccagtgtactcacccaggatcaaggaaatcacggttatcaggcacaagaaagtgaggagagcaaagttgtactacctgaaagacaagcttccccgcttttcaacattcaagtgaaatcagatatgctgacagaacaacttttccaccaccatctcgatttctcttaaacctttttttcacttccctatcgatatcatcatatttcactgtaatctctgggtatcagatatgtaatatctacagctttatagcatacttggcttagcgcaatgttttgtttgttgtcagtgtacaaaattcatactagcaccttgttattatgaatttgcaaatacaaggttatgtactcttgtgcgtcgagtttgtgatgaatgattgttaggtcattcttaattggagtttcatactcattaaatatggtgatacatcatcatgcttggtgatatgacaatgtaattaagagtagagatatagagagagtttggtgtgagatgatagagtttcatggggatgaaaccctgcatacatgattatttagtttaaatctaatgtgacagcattgaaaatagtgcat

SEQ ID NO: 55441 - DNA, 318 bp, Zea Mays
atgggcggagacggtggcggggtggcgggagcgggcggcgggcttgccgggggagacggtggcggagtggtgggagcgggcggtggcgacgccggtggggacggaggcggcgtggtgggggccggaggtggagtggcggtgggcgcgggtggcgggttgccggctggaggcgcctggggcggcgagttggccggtggcgcgttcggcgttggcgggggctgcgccggcggtgactgctgcgctgcgcaggaggcgatcaggagcacgaggacgagagggcggagaagtgacgccattttctgtggttccttgagctga

SEQ ID NO: 55442 - DNA, 968 bp, Zea Mays
gcacctgcatcgcaaccctatatataaccactgatcactccgagtcaccgcactcagcggtccgtgttcttgatcgattaagctgtcctcaaccatcatggctgccattatggcggcaggtctggtagtactggcactcctcgctgccgtcgccgctccggcgcacgccacggactacgtggtgggcgactcggccgggtgggccagcggcgtggactacgccacctgggcgagcggcaaaaccttcgctgctggggacaacctagtgttccagtacagcgcgatgcacacggtggcggaggtgagctccgcggactacagcgcctgctcggccagcaactccatccagtcctacagcgaccagaacaccaaggtcgcgcttacggcgcccggcacgcgctacttcatctgcggcgccccgggtcactgcggcaacggcatgaagctcgccgtcacggtcgccgccgcggccgccaccaccaccccggagacgtccacgtctacgcccgccgcaacgacgacgcccaccacgaccaacgctgacacgcccaacgctgacacgcctccggagacgtccacgtctacgcccgccgcaacgacgccgcccaccacgaccaagtccacgtccacctcgagcactagcagcactggtgctgcctgcggtggggaggcccggctcggtatgggcattttggccgcggccgcgggcctcgccgggctcgccctgatgggctaggctaggcaagaggcagtgctgtttcggttttccttatgtcccctgcttttcctgttggttgcagccctgtagcccattgtgtttactgtctacgcaccctcctccattcacgtttatgctcacgatggcttgttcgaggctcctgctgaatacatcatttggcgatggcattcgacgacccatttgtggttgttggggcttcctttgatgcatgcgatggaggagattgagg

SEQ ID NO: 55443 - DNA, 471 bp, Zea Mays
ctcgcccaatcgccctggcttgcagtagccctcgctaaccgccgacctgtcgcctgcgcctgctcggtgctcgctcttggtagtcgcggtcctccttgtcgtgggcctgacacggacatgcgcacgcccacggtgtcggtgcactgctcgctgcgacgccaccgcaaggcgcacggagccacaacccaaccgtctgtcggcccgccgctcgatcaagacgcaagatcctggaattacagcggttgctgagctgctgtcggttcgattcaagctgtgcgaggaaggccccgggcttctgtcggaagagatcaagtccatcctcccgcaatctgctcggttctatggcattgatgtcgtgacgtaggacaacaagaatgctcaaccaaatgccaaaaaagaaaaagaacaatgacataattatcttgatctgagcacatgctccttggactgctttgtgacggtgaaggtgtg

SEQ ID NO: 55444 - DNA, 1656 bp, Zea Mays
gataagagtgacgatgatagataatacgatcgttaaagtagtcggaaacggaaaagtgattaccctcaccaatcgttaagcaacagctcatcaatcaaaaaggaaataaaaaacaatagcgtgaagatagcgacacatccggggtgaaacagtgattattactccttaattaaccagatcgaaacgaaaaggcagagagggagggatctccgtctccacgccgcgtcctcccgcacgaatccgcgctccggccaacgggccaagccctagccacccccgcccattcatggtgggcgggccgtgagatctctagggaggcttgtcggcttcgtcgggcgggaggggaggagatgggcgcccggaacagcgctgccgccacgccggtgctgctcaacgtgtacgaccttacggccgcgaacgattacctctactggctcggcttcggcgtcttccactccggaatcgaagtccatggcacggaatatgggtttggagcccacgactacccatccagtggtgtgtttgaggtggaatcaaagagttgccctggctttatctacagaagaacagtgtggctaggcacaacagacatgtctcaggaagaattccgctcgtttattgaaaaacttgcaggtgattatcatggcgacacatatcatttaattaacaagaactgcaatcacttcacagatgatgtctgccagaacttaactgggaaacccatcccttcctgggtgaataggcttgcaagaggtcagttttcgattgccttcttccagaaagcgtacaagtttctcctgtaggtcgtgtcccaacgagtcggcgaatatctgatgatgatttgtattcaatacattcaccaatggccgacaaagatgacaatgatgaggacgaggccaaacacctgctgccagctccatccaacgaccagctttctgtagatgtaccgccaaagctagcgaaagatcttctctgaaccactccatgttcataggcgcctaccatacttcaactcatatagccattggtgctaaagtgatcctcaagatggcttgacacagatagggattgggcatatttgattaaagatgaagctctaatttcttgtggtttaccagtttgcagtttcaccttgctgtctcatctcagcaaacaattgtcatctatggtagtagtggcatgattgttaccctgtcatttagcacatctggaaattgcaaatttggaatgtggggttccggtacctgttaggaatcaggactgtcgatgcttgttgagccccagtgttgaaggcacatactgtatcatgttactatcaaaaacagtgtacatgtacatggctaccgagtatttgccacgaatccaaatgagcgatctctgttgggctgcttaagcgcctgtagtgacatggaacatctttttgttccgggctattgaacatcgaacattcgaacccaaccatgtggttctgtcgctgatgcctgttatgctgtaataatgtgagattactttttgctgtcgctgacgcctgttatgctgtaataatgtgagattactttttgctatcgctgatgcttgttatgaaatgatgtatcttgttcatctctgtatccaaagccatgtgcttatattatagaactagccagttactcgtgc

SEQ ID NO: 55445 - DNA, 1589 bp, Zea Mays
gataagagtgacgatgatagataatacgatcgttaaagtagtcggaaacggaaaagtgattaccctcaccaatcgttaagcaacagctcatcaatcaaaaaggaaataaaaaacaatagcgtgaagatagcgacacatccggggtgaaacagtgattattactccttaattaaccagatcgaaacgaaaaggcagagagggagggatctccgtctccacgccgcgtcctcccgcacgaatccgcgctccggccaacgggccaagccctagccacccccgcccattcatggtgggcgggccgtgagatctctagggaggcttgtcggcttcgtcgggcgggaggggaggagatgggcgcccggaacagcgctgccgccacgccggtgctgctcaacgtgtacgaccttacggccgcgaacgattacctctactggctcggcttcggcgtcttccactccggaatcgaagtccatggcacggaatatgggtttggagcccacgactacccatccagtggtgtgtttgaggtggaatcaaagagttgccctggctttatctacagaagaacagtgtggctaggcacaacagacatgtctcaggaagaattccgctcgtttattgaaaaacttgcagaacttaactgggaaacccatcccttcctgggtgaataggcttgcaagagtagggtcagttttcgattgccttcttccagaaagcgtacaagtttctcctgtaggtcgtgtcccaacgagtcggcgaatatctgatgatgatttgtattcaatacattcaccaatggccgacaaagatgacaatgatgaggacgaggccaaacacctgctgccagctccatccaacgaccagctttctgtagatgtaccgccaaagctagcgaaagatcttctctgaaccactccatgttcataggcgcctaccatacttcaactcatatagccattggtgctaaagtgatcctcaagatggcttgacacagatagggattgggcatatttgattaaagatgaagctctaatttcttgtggtttaccagtttgcagtttcaccttgctgtctcatctcagcaaacaattgtcatctatggtagtagtggcatgattgttaccctgtcatttagcacatctggaaattgcaaatttggaatgtggggttccggtacctgttaggaatcaggactgtcgatgcttgttgagccccagtgttgaaggcacatactgtatcatgttactatcaaaaacagtgtacatgtacatggctaccgagtatttgccacgaatccaaatgagcgatctctgttgggctgcttaagcgcctgtagtgacatggaacatctttttgttccgggctattgaacatcgaacattcgaacccaaccatgtggttctgtcgctgatgcctgttatgctgtaataatgtgagattactttttgctgtcgctgacgcctgttatgctgtaataatgtgagattactttttgctatcgctgatgcttgttatgaaatgatgtatcttgttcatctctgtatccaaagccatgtgcttatattatagaactagccagttactcgtgc

SEQ ID NO: 55446 - DNA, 1625 bp, Zea Mays
ggccgtttcctcctcccgttgtcagcttcgtttcgcctccggagtctggcatccgcgtcgcgagtcgccaaaccaaacccaccgcccttataaagacaccttcccctttcccgtcgccctcctctgccctgctcgagctccccttccgcgctccctacccacaagcctttccgcaggtgcgccgcctctgcgaggtggggtgactccgtgaatgggtgacctgggaggaggagactggcgggaggcggtggccgagaaggggttggcggaagccgacggcgggcccgaccatctggtgatcatggtccacgggatcgtcgggagcagattggaagtttggagctgagcagtttggtaaactgctctcagacaaagttatagttcattgtagcaaccgcaacatgcacaagctcactttagatggtgttgatgtgatgggtgaacgattggcacaagaggttattgaagaaatcaacagaagaccgtatatcaaaaagatatcttttgttgcacactctgttggaggattggttgctagatatgctattggaagactttataaaccacctaaacgaacatcagaaaatactccacaaactctggatgacaacaatataggtaccatacatggacttgaggcagtgaactttataacagttgcgtcaccgcatcttggttccagaggaaataagcaggttcctttcctttttggagttactgcaattgaaaattttgcatgctacatcattcatttgatatttggaagaactggcaaacacctctttcttactgacaatgatgatggaaagcctccattgctacaacggatggtggacaattggggtgacctgcaattcatgtctgctttgcaagcatttaggcggcgtgttgcatactccaatgttggtcatgatcatattgttgggtggagaacatcatctatcagaaaagattctgaactacccaagtgggttgattcaaccaacaagatttacccgcatattgtatatgaggaactatccaaagcagaagctcctgatcaatgtgctgacacagataactgcacactagaagaacaccttttacaaggacttaagcgcgtttcatgggaaaaggtggatgttagtttccacaatagtaaagtaagatctgcagcacatagtgtgattcaggtaaaagatcctgtgatgcatagcgaaggtgccgacgtcatacagcatatgattgaccaatttattctatagtaaaagccctggtctttggaaacagacctggaccaggatacgtcatttgctaactgcgggctgagtcaccagcctggtgagcacgtttatggaaatcccaggtataagacttagtctctgaatggtggatcaggtatatagttatagagggtggaaacacgtgcgcatgcctgttggttcatttagtcatatgtgatcatatacatgttgtacggtgcatgtaactttagtactatccttgtcattgtaaatgttcatttatttatagtattggtcttagattttagtaaagaaatcttttcaacggcttctttaattagatctttattgtttcttttttttttggctagccgaagatagaaaaaggaaaaatagaaaaaa

SEQ ID NO: 55447 - DNA, 1092 bp, Zea Mays
gtcaaaacaagatctcgcacctgtattcgacaatgctatacgagtaccagcacacccccatatgtatgggggtacggcgaggggatcgaggagtctcatagatggagcatagtctgcaacctttctctgggcattgccaagggactggatcacctgcacacaggcttggacaaaccgatggtccatggcaacctcaagacgagcaacgtccttctggacgccaactacgagtgcaggatatcggactacggcctctacctcctgctgagccccgccgctgcccaggagatgctggaggcctccgcggcgcaggggtacaaggcgccggagctggtcaagatgcgggacgccacgtgcgagagcgacgtctacagcctgggagtggtcctgctcgagctgctcgcgcagaaggagcgcgcggacgacgacggccggccgaacccgcgggacatcctcctcccggcctccttcaagaacctggtcctggagaggaagatctcggacgcgttcagctccgaccttgccaggcactgcaagaggtcggggaaggagaagagcctgaacgccttcttcgagctggccacggcctgctgcagcccgtcgccgtccctgagacccagcacgaggcaggtactcaagaggctcgaggagatcgcgagataaatggacgcgagtgctgagcaggcctggcgacttgctgcttaatctgcatcgctctctattgcagcataccgttgagctgagaagcgtctaccttccctaagctaaacgaagaacgtatttttgtggtgggcgagtaggaaatggatgcatgtttttcacgtccagtaacctgtactgtacagtttcaccgagatgcagggttgttcatcagaaaacatacagggtgtgctttcggtgcatgaggaatctccatgtggcggaatgttctctacagcgcgtatgtaacatggtatttgtcgtcgacatcgtgatactcgcatgctcgcggtgccataccatcaagtctggggttggtgatttgtccttatcacttgacacttgccaatgtaatcaacggatgaagatcccccttagctttcgacttgtttc

SEQ ID NO: 55448 - DNA, 773 bp, Zea Mays
aataacagcagacataactagaaacttcactttacacactttacggaagcatctatcgtaaaaaggaatgataattgggggagaaactaatacgcacagtacagattctgatgccttaggctaaaagaacaacttgcatcacgcatcatcactaaacagattaatattgttccaatggtacatcatgcacactgtgtaaagtactactgcaccgttgccctacagtctagctttttatttaaaaaaattgcaatgattaattttacaatatgcaaaggtaagtcaatggactacagtgctgagaactagatagccaataatttaacatgcagattgcacacaaggcaaagcaagtcttccaaggaagcttatatatgcaagcaaccatggggaaaacactaaccagagttgtccggtgaaggaagccaaacccacagaaattcagagctctccacaaggcagctatgctgatatttgggttaggggtctggatcattccaatgacgctcatctttgcaccatgcaggcgcctggttctccttgttgtcaagttccaggaactagaagcgagcatcatgcgcagtaggtcatcatatccagaagtatggagtcgcatagcgaggatacaaacaataagcatcacactgtgaaggaagattggaagtaattcccagttgagatatgcatttgaactttcatcagtctccttctcctgcacgtattgaatgcatatcagcatatgaaagcagtggtggcatgtaaccagaatcatg

SEQ ID NO: 55449 - DNA, 716 bp, Zea Mays
gccccgtgtctgaggtcgaggaggaggtcggggaggtcgaacagagcgtcgtcggggttgtccagctgtggcggcggcggcggcggcgaggcggacgcggagtcggcggcggcggccgggccgtcgtcggggtccgtggcggcggctgcattggcgggcgcctggaagtccgcggccgcggcgagcgcggcggcggcctggacgtccttgggcgcggcggtggccgggcggggcagatcgttcgcgagctccgggaagttgaggtgcgcggcgcggcccttgatcgccagcgcggctacgtcgtgggcgcgcgccgccatctcggcggtggcgaaggtgccgagccagatgcgcgacttcttgcgcggctcccggatctccgacacccacttgccccaggcccgcatgcgcacgccgcggtacgtcgggtggtgcccgtccttgctgcgccgccgcttcttgctgcccgcggcggaggattcggaggacgacgcggttggggacgcaggagcctcagcagaggacgaggacgtgggctcggagccggaggaggaagagtccatggccatggctcgtccctttttttctcctgctgttgtggggggtgttggtggagttggttggcagcggagagccgctgccgggggaggactgtgactgtgtgaggacgagggcacgaggcgagtgtggcgtggtgtggtgaggtgggagctgag

SEQ ID NO: 55450 - DNA, 649 bp, Zea Mays
aaaaggcctgctcgggtgaatttcttcgcttctttcgctgacgatgggtgcgcgcgctttttatttcgtgctgggctggagatgatcggtggacgaatccggccgtaatttaaaaggtgcatcatctttcgctaaagcgtctcgtgtggcattagtccgaatcggactagaacgcctttaaatatatagcactagtgtgcctgctacaactacaaaaaaaaaaagattcagtataacccctttgagcaacggagaatgaaaggagctagatgcgcggctagtcttgccgctgcaccatattcttgtcccacaatccaagcaaagacagacgaccagactggagggagcgaaaggaacgtgctggccggggtcgacgaatgatttttcttttatacatgtggtttgctttctaaatctgtaggagcagacgcaaaggagaaatggctctaatttggttccattccagctggtccaactccaacgctgctccatggtttacatcgattgcgctctggtccaccgccgcaattacagcccatagctaggccgtagatggccacacaccaagcagcagcagctcgaagccgcgcttgattctcgtcgactgagcaaaacagtctatttcactgcactcagtactcccacagca

SEQ ID NO: 55451 - DNA, 2125 bp, Zea Mays
ctctattcacatgaagaagcctcggggtttcaagtactaaagtggaatgcatcttttttttgtaaaataccaagtcttgcctttcgactggcgccccttctctataactgtggcaccaggagataactacttgactgtgcatatccgcacgctgggtgaccggacatccaaactttcgattctctgagattttgaactttgatggcagtgaaagggatcaggctccgaaaacagggagcaagaatatgtgtgttgtcttgcaagtcctctttcacgaatgagttgcttcttttatttttttaacatctaaatatccattcaaaatcatacacagtacttcactttgttcttcatgttatacagttcactaagtcagaaggaaccttgtgcctcctgtgtttccatgctttactattgaacaatgaacatatctgattcacaatgatttagagaacaaaacaacaaggggattaacattttactttcactactttagaccagcactcctgtccgtttttttgtattcaataataaaggccaatttctggcttctctttgcaatatgctttattgggattgaatctagaatcactgttcttaataatctagcacaaatatgaactgctgccaacaccaccatcttgctctttgtcttcaatatctggaacttttttggctggctgggggaggtgttcttatttctgaattgattcaagacatcgatactcccttagccaagggtgaaagggctataaagccaagaagacgaagaagggtgaagaattcaggttttcagaagcaatagtgaagactattttttggcttctctttgcaatatgctttattgggattggatcctcgatcactgttattaataatctaacacaaatatgagctgttgcagatcctattgacacaaccatctgactctctaccttcatttttttgcaatttttggttgcctgggaggtgttgttgttcctgagtatcttgtcaggcctccttcatgtcttctccctgttcaagtggtgggcttgggagattggctcttgagatatcttctctacgtacatatactataataaaattcttcatctaaatctagctcatatcatttattttctgatgctatatttttattttttaaaaacctgtgtaggttttgtaaacgaagggaatgaattctcatattacatactgatattttcaaatttcatcctaaaccaatatgtcaatctatcaagtataggttgtgaactgatatcactattttatcagcagcactcaagaagctaaagaatggaccatgtagccttaatacacagcaacagcaactgcaattctctttttgactacgatcaactttgtcctgtttcatttcccaagagtcatccctcaaggcgcaagaagctttgtcaaaacaatctaaagtgtttgcctattccaagaaggcgaccaagaggaacaaacctgataagtgaagaaaataggttctagaagaacattggccttaatttcataatatactgagggtcaataataccaggcttcaaggttagacagatggagagaatatatcaaaatgtagactggagattggaagtcgaggccacttactgatgaaatgattagctattgcgtatataaaccccaattttgaatttttttccattgtgttttgtatttgataagttttactttttgtttgccccttttatttattgcttacttgccatcaggtatgctagacatgatgtacactgtcagctgtacatatatgacttaatgagacagagactacagagggagtcatcatatgaaaatgatcttatagaggtgcaaaaaaatttgtactaatttacatcttatgtactaggtgctaagagaatatatagtttgatattgcggtctcttttaatgaaatcctaaattacgaccacatattttttaattcttttcctagacattgagttttcgagtgcatgacagtgtaaatgttagtctcatgttaatccactaaagaagtatgttatttctttgttgcttgtggttgttgaattgtatcaactgttatttggacagtcatatgtatcaaaatgcatgtcttgatgtatgtggagttttg

SEQ ID NO: 55452 - DNA, 3999 bp, Zea Mays
cggcgacagccgctttacactccgattccctccaccgccgctccaaaggtccaggggaacactcacattccaagcacatctctcaaggtgcccaagatatactaagcaaaaatcttgtatcctaatctgataacatgcataaatgtggatggaataggggcatatgactggttcaatcaaggccatgctcctgctgtgacattttaatgctaacgaataagatatcagcatcgatgaaaacagcctgaacataacccagcatactaacattcaagacaagatagcaataaaccaaatcaatacttctagctcattggaatgtcctcctgccttattttatccggattctttgagaaagagacatggatgcacccgattttccctgccctcttctatgcctgtgatagagtcatcaggaaatttcatgagaacgactaccattcaagtattgtgagcaatttatctgggagatgtgctctctattcacatgaagaagcctcggggtttcaagtactaaagtggaatgcatcttttttttgtaaaataccaagtcttgcctttcgactggcgccccttctctataactgtggcaccaggagataactacttgactgtgcatatccgcacgctgggtgaccggacatccaaactttcgattctctgagattttgaactttgatggcagtgaaagggatcaggctccgaaaacagggagcaagaatatgtgtgttgtcttgcaagtcctctttcacgaatgagttgcttcttttatttttttaacatctaaatatccattcaaaatcatacacagtacttcactttgttcttcatgttatacagttcactaagtcagaaggaaccttgtgcctcctgtgtttccatgctttactattgaacaatgaacatatctgattcacaatgatttagagaacaaaacaacaaggggattaacattttactttcactactttagaccagcactcctgtccgtttttttgtattcaataataaaggccaatttctggcttctctttgcaatatgctttattgggattgaatctagaatcactgttcttaataatctagcacaaatatgaactgctgccaacaccaccatcttgctctttgtcttcaatatctggaacttttttggctggctgggggaggtgttcttatttctgaattgattcaagacatcgatactcccttagccaagggtgaaagggctataaagccaagaagacgaagaagggtgaagaattcaggttttcagaagcaatagtgaagactattttttggcttctctttgcaatatgctttattgggattggatcctcgatcactgttattaataatctaacacaaatatgagctgttgcagatcctattgacacaaccatctgactctctaccttcatttttttgcaatttttggttgcctgggaggtgttgttgttcctgagtatcttgtcaggtaacatgatatttcatatttactcttggaaataatagcttttgtatggtgaaccatgcacaactaaacatagaaaaaacatgttccttttgtgttattcggtggaatccaacgataagatgtctgctactatcaaactgtgtatgaatgatttagtctacattttggaagtgtcattcacagttgatttaatttattgttctatgttgagaacaagaggtccgaataatacacatgttgactacagactgctcaaatcaaatcaagcatacgtgcttgatttttgagtttcgagctgtcaatgcacctatggtatctacataaacgttactggttaaggtgtgtatgtgggtatgcatcatgggttgtttgttattagcattgatggacaagctgtgtctatctctaatcaggacaagaactatatgaagatgcaagtttgttcttatcaaatcttattacttaaatctaagtttaataatttttttggaggaaaccacttctcacaggtttttgttatcgtcataggcatcttattatatagtatatcacttatccctatacctgctgctagctgccaattatattattgcaagcaactcaatgtactttggtattcacttttgctattgcattattgatacttatgtttctcaaacttcataggcctccttcatgtcttctccctgttcaagtggtgggcttgggagattggctcttgagatatcttctctacgtacatatactataataaaattcttcatctaaatctagctcatatcatttattttctgatgctatatttttattttttaaaaacctgtgtaggttttgtaaacgaagggaatgaattctcatattacatactgatattttcaaatttcatcctaaaccaatatgtcaatctatcaagtataggttgtgaactgatatcactattttatcagcagcactcaagaagctaaagaatggaccatgtagccttaatacacagcaacagcaactgcaattctctttttgactacgatcaactttgtcctgtttcatttcccaagagtcatccctcaaggcgcaagaagctttgtcaaaacaatctaaagtgtttgcctattccaagaaggcgaccaagaggaacaaacctgataagtgaagaaaataggttctagaagaacattggccttaatttcataatatactgaggtaagccattgaatctcaacatttccttctctaatccaggcaattgattaatgtttccgttagatttagagctcatacaaatctatgaagaatccaaaacacacataggtgcatatattgtttattgaaattcatgtccagttctaaaattacttgcctgctggatgttgtccagtgttgaaaataacatcgcacattcatcgatatactaatgtagcaataaggaggtagattaaataataaaattaataagatgcacactatgggttcatactgaactgttgccaagctacaatgcaacaggggccaaacaaactaccttatgctttcaaggggtaagaaagtttataaatcttcatccatctgaacgtccctgatgctttggcaccatattcactctaggagaaaaacttttagcaataaagtagatgtttatttcaatgtcctaaaataacattcttgccctttgtgtaatatttctgaaactgtgcgcctttccttcatctttctcgaagcttagaaaatgttttaaatgaaatgttgttttttatctttcgtttgcacatctacacactttatcttttttgacacaggacaagtttttttaattagggtcaataataccaggcttcaaggttagacagatggagagaatatatcaaaatgtagactggaggtccatgctacttcctgatgaaatgatcaaatattgcgcacataaaccctacaaaatttcttttatgttatgtttgtttttacatatgatttttttcgctccttttctttattgtgcagattggaagtcgaggccacttactgatgaaatgattagctattgcgtatataaaccccaattttgaatttttttccattgtgttttgtatttgataagttttactttttgtttgccccttttatttattgcttacttgccatcaggtatgctagacatgatgtacactgtcagctgtacatatatgacttaatgagacagagactacagagggagtcatcatatgaaaatgatcttatagaggtgcaaaaaaatttgtactaatttacatcttatgtactaggtgctaagagaatatatagtttgatattgcggtctcttttaatgaaatcctaaattacgaccacatattttttaattcttttcctagacattgagttttcgagtgcatgacagtgtaaatgttagtctcatgttaatccactaaagaagtatgttatttctttgttgcttgtggttgttgaattgtatcaactgttatttggacagtcatatgtatcaaaatgcatgtcttgatgtatgtggagttttg

SEQ ID NO: 55453 - DNA, 5391 bp, Zea Mays
ctccctcctcctcccaaaccccaccctccactgcttgcccgcggctccggcgacagccgctttacactccgattccctccaccgccgctccaaaggtccaggtaagcgcgctccctccccctcctccctccctcgcccgttcgtagctccggtgacagccgccatcgcttcgggctccagatcccagcgccagcgccccaaaggtcaggtaagcggaggcgactcttccccttctcccccattcgttttccttgctagggttcgtcgtcccctcctcattcccttcccgacgagctctctccccattgctagggttcgtcgtgctggggttggagtagacacggcggcggtggtggctcttccccttcccccctcatccatttttccttgctggggtttgactagacacagaaattcctcatgctgccatttagggtttaggtttggttctcctacgtttcaacctgaggtatcaatgattctgaagcatacgacatattttttgcggtacggcatgtagcaactacaaacctgcttgggattgctgtcttttgggtctgggtgtggaggtatttgaagatatgaagaataatgtctgaattggaccacactaattgttgttgacatgttctgccatatggagatggaaagtgatgccacttttctttgcaacattatcaacgtctatccattattaacgtctatctatatttgactatctaatcttaacgacgtgatgtttatttttctcatattctcaaaggggaacactcacattccaagcacatctctcaaggtgcccaagatatactaagcaaaaatcttgtatcctaatctgataacatgcataaatgtggatggaataggggcatatgactggttcaatcaaggccatgctcctgctgtgacattttaatgctaacgaataagatatcagcatcgatgaaaacagcctgaacataacccagcatactaacattcaagacaagatagcaataaaccaaatcaatacttctagctcattggaatgtcctcctgccttattttatccggattctttgagaaagagacatggatgcacccgattttccctgccctcttctatgcctgtgatagagtcatcaggaaatttcatgagaacgactaccattcaagtattgtgagcaatttatctgggagatgtgctctctattcacatgaagaagcctcggggtttcaagtactaaagtggaatgcatcttttttttgtaaaataccaagtcttgcctttcgactggcgccccttctctataactgtggcaccaggagataactacttgactgtgcatatccgcacgctgggtgaccggacatccaaactttcgattctctgagattttgaactttgatggcagtgaaagggatcaggctccgaaaacagggagcaagaatatgtgtgttgtcttgcaagtcctctttcacgaatgagttgcttcttttatttttttaacatctaaatatccattcaaaatcatacacagtacttcactttgttcttcatgttatacagttcactaagtcagaaggaaccttgtgcctcctgtgtttccatgctttactattgaacaatgaacatatctgattcacaatgatttagagaacaaaacaacaaggggattaacattttactttcactactttagaccagcactcctgtccgtttttttgtattcaataataaaggccaatttctggcttctctttgcaatatgctttattgggattgaatctagaatcactgttcttaataatctagcacaaatatgaactgctgccaacaccaccatcttgctctttgtcttcaatatctggaacttttttggctggctgggggaggtgttcttatttctgaattgattcaagacatcgatactcccttagccaagggtgaaagggctataaagccaagaagacgaagaagggtgaagaattcaggttttcagaagcaatagtgaagactattttttggcttctctttgcaatatgctttattgggattggatcctcgatcactgttattaataatctaacacaaatatgagctgttgcagatcctattgacacaaccatctgactctctaccttcatttttttgcaatttttggttgcctgggaggtgttgttgttcctgagtatcttgtcaggtaacatgatatttcatatttactcttggaaataatagcttttgtatggtgaaccatgcacaactaaacatagaaaaaacatgttccttttgtgttattcggtggaatccaacgataagatgtctgctactatcaaactgtgtatgaatgatttagtctacattttggaagtgtcattcacagttgatttaatttattgttctatgttgagaacaagaggtccgaataatacacatgttgactacagactgctcaaatcaaatcaagcatacgtgcttgatttttgagtttcgagctgtcaatgcacctatggtatctacataaacgttactggttaaggtgtgtatgtgggtatgcatcatgggttgtttgttattagcattgatggacaagctgtgtctatctctaatcaggacaagaactatatgaagatgcaagtttgttcttatcaaatcttattacttaaatctaagtttaataatttttttggaggaaaccacttctcacaggtttttgttatcgtcataggcatcttattatatagtatatcacttatccctatacctgctgctagctgccaattatattattgcaagcaactcaatgtactttggtattcacttttgctattgcattattgatacttatgtttctcaaacttcataggcctccttcatgtcttctccctgttcaagtggtgggcttgggagattggctcttgagatatcttctctacgtacatatactataataaaattcttcatctaaatctagctcatatcatttattttctgatgctatatttttattttttaaaaacctgtgtaggttttgtaaacgaagggaatgaattctcatattacatactgatattttcaaatttcatcctaaaccaatatgtcaatctatcaagtataggttgtgaactgatatcactattttatcagcagcactcaagaagctaaagaatggaccatgtagccttaatacacagcaacagcaactgcaattctctttttgactacgatcaactttgtcctgtttcatttcccaagagtcatccctcaaggtgcctattatagtattatcccatgttttacaattagtgtcagtactccttcactatgatgtgtttcccacgtctacaaaatacgacctttggattgaaatatttaaatttagtactcaaatgtcctttttcgtttcaatgtgtaatctaaagtttattctattctcttgggacactgctaaaaagaaagagtacatcgacaacaagatataatattttagtcacttacattacaaaatatgattctcacgtgtgcaagacgcgatgttgaaagtatttgtgatatatgtggtagcaatacttaacgccggacaaaagccgtttcgaaccggctttaaagaataggaatatataagagataagactcctttagtttcgaaccgacttgaaattgggttgcactacagtgcctaaagtaattttagtatgcttaatccactattgaaataattcagtgctaaattaatttagagtgtatggccaataaaattatctgaatgtatttttttcaaactgcttatgttgtttctggtgtataatctaaatttggttcttgacatcgctaaacatcttttctttgttgcctttgcaggcgcaagaagctttgtcaaaacaatctaaagtgtttgcctagtagtattctagcactattttttcgataagcttcaatttattttaaaaaaataatctgatataaggctttgtgttctgattcgaacatcagttccaagaaggcgaccaagaggaacaaacctgataagtgaagaaaataggttctagaagaacattggccttaatttcataatatactgaggtaagccattgaatctcaacatttccttctctaatccaggcaattgattaatgtttccgttagatttagagctcatacaaatctatgaagaatccaaaacacacataggtgcatatattgtttattgaaattcatgtccagttctaaaattacttgcctgctggatgttgtccagtgttgaaaataacatcgcacattcatcgatatactaatgtagcaataaggaggtagattaaataataaaattaataagatgcacactatgggttcatactgaactgttgccaagctacaatgcaacaggggccaaacaaactaccttatgctttcaaggggtaagaaagtttataaatcttcatccatctgaacgtccctgatgctttggcaccatattcactctaggagaaaaacttttagcaataaagtagatgtttatttcaatgtcctaaaataacattcttgccctttgtgtaatatttctgaaactgtgcgcctttccttcatctttctcgaagcttagaaaatgttttaaatgaaatgttgttttttatctttcgtttgcacatctacacactttatcttttttgacacaggacaagtttttttaattagggtcaataataccaggcttcaaggttagacagatggagagaatatatcaaaatgtagactggaggtccatgctacttcctgatgaaatgatcaaatattgcgcacataaaccctacaaaatttcttttatgttatgtttgtttttacatatgatttttttcgctccttttctttattgtgcagattggaagtcgaggccacttactgatgaaatgattagctattgcgtatataaaccccaattttgaatttttttccattgtgttttgtatttgataagttttactttttgtttgccccttttatttattgcttacttgccatcaggtatgctagacatgatgtacactgtcagctgtacatatatgacttaatgagacagagactacagagggagtcatcatatgaaaatgatcttatagaggtgcaaaaaaatttgtactaatttacatcttatgtactaggtgctaagagaatatatagtttgatattgcggtctcttttaatgaaatcctaaattacgaccacatattttttaattcttttcctagacattgagttttcgagtgcatgacagtgtaaatgttagtctcatgttaatccactaaagaagtatgttatttctttgttgcttgtggttgttgaattgtatcaactgttatttggacagtcatatgtatcaaaatgcatgtcttgatgtatgtggagttttg

SEQ ID NO: 55454 - DNA, 5403 bp, Zea Mays
ctccctcctcctcccaaaccccaccctccactgcttgcccgcggctccggcgacagccgctttacactccgattccctccaccgccgctccaaaggtccaggtaagcgcgctccctccccctcctccctccctcgcccgttcgtagctccggtgacagccgccatcgcttcgggctccagatcccagcgccagcgccccaaaggtcaggtaagcggaggcgactcttccccttctcccccattcgttttccttgctagggttcgtcgtcccctcctcattcccttcccgacgagctctctccccattgctagggttcgtcgtgctggggttggagtagacacggcggcggtggtggctcttccccttcccccctcatccatttttccttgctggggtttgactagacacagaaattcctcatgctgccatttagggtttaggtttggttctcctacgtttcaacctgaggtatcaatgattctgaagcatacgacatattttttgcggtacggcatgtagcaactacaaacctgcttgggattgctgtcttttgggtctgggtgtggaggtatttgaagatatgaagaataatgtctgaattggaccacactaattgttgttgacatgttctgccatatggagatggaaagtgatgccacttttctttgcaacattatcaacgtctatccattattaacgtctatctatatttgactatctaatcttaacgacgtgatgtttatttttctcatattctcaaaggggaacactcacattccaagcacatctctcaaggtgcccaagatatactaagcaaaaatcttgtatcctaatctgataacatgcataaatgtggatggaataggggcatatgactggttcaatcaaggccatgctcctgctgtgacattttaatgctaacgaataagatatcagcatcgatgaaaacagcctgaacataacccagttttttttaaagcatactaacattcaagacaagatagcaataaaccaaatcaatacttctagctcattggaatgtcctcctgccttattttatccggattctttgagaaagagacatggatgcacccgattttccctgccctcttctatgcctgtgatagagtcatcaggaaatttcatgagaacgactaccattcaagtattgtgagcaatttatctgggagatgtgctctctattcacatgaagaagcctcggggtttcaagtactaaagtggaatgcatcttttttttgtaaaataccaagtcttgcctttcgactggcgccccttctctataactgtggcaccaggagataactacttgactgtgcatatccgcacgctgggtgaccggacatccaaactttcgattctctgagattttgaactttgatggcagtgaaagggatcaggctccgaaaacagggagcaagaatatgtgtgttgtcttgcaagtcctctttcacgaatgagttgcttcttttatttttttaacatctaaatatccattcaaaatcatacacagtacttcactttgttcttcatgttatacagttcactaagtcagaaggaaccttgtgcctcctgtgtttccatgctttactattgaacaatgaacatatctgattcacaatgatttagagaacaaaacaacaaggggattaacattttactttcactactttagaccagcactcctgtccgtttttttgtattcaataataaaggccaatttctggcttctctttgcaatatgctttattgggattgaatctagaatcactgttcttaataatctagcacaaatatgaactgctgccaacaccaccatcttgctctttgtcttcaatatctggaacttttttggctggctgggggaggtgttcttatttctgaattgattcaagacatcgatactcccttagccaagggtgaaagggctataaagccaagaagacgaagaagggtgaagaattcaggttttcagaagcaatagtgaagactattttttggcttctctttgcaatatgctttattgggattggatcctcgatcactgttattaataatctaacacaaatatgagctgttgcagatcctattgacacaaccatctgactctctaccttcatttttttgcaatttttggttgcctgggaggtgttgttgttcctgagtatcttgtcaggtaacatgatatttcatatttactcttggaaataatagcttttgtatggtgaaccatgcacaactaaacatagaaaaaacatgttccttttgtgttattcggtggaatccaacgataagatgtctgctactatcaaactgtgtatgaatgatttagtctacattttggaagtgtcattcacagttgatttaatttattgttctatgttgagaacaagaggtccgaataatacacatgttgactacagactgctcaaatcaaatcaagcatacgtgcttgatttttgagtttcgagctgtcaatgcacctatggtatctacataaacgttactggttaaggtgtgtatgtgggtatgcatcatgggttgtttgttattagcattgatggacaagctgtgtctatctctaatcaggacaagaactatatgaagatgcaagtttgttcttatcaaatcttattacttaaatctaagtttaataatttttttggaggaaaccacttctcacaggtttttgttatcgtcataggcatcttattatatagtatatcacttatccctatacctgctgctagctgccaattatattattgcaagcaactcaatgtactttggtattcacttttgctattgcattattgatacttatgtttctcaaacttcataggcctccttcatgtcttctccctgttcaagtggtgggcttgggagattggctcttgagatatcttctctacgtacatatactataataaaattcttcatctaaatctagctcatatcatttattttctgatgctatatttttattttttaaaaacctgtgtaggttttgtaaacgaagggaatgaattctcatattacatactgatattttcaaatttcatcctaaaccaatatgtcaatctatcaagtataggttgtgaactgatatcactattttatcagcagcactcaagaagctaaagaatggaccatgtagccttaatacacagcaacagcaactgcaattctctttttgactacgatcaactttgtcctgtttcatttcccaagagtcatccctcaaggtgcctattatagtattatcccatgttttacaattagtgtcagtactccttcactatgatgtgtttcccacgtctacaaaatacgacctttggattgaaatatttaaatttagtactcaaatgtcctttttcgtttcaatgtgtaatctaaagtttattctattctcttgggacactgctaaaaagaaagagtacatcgacaacaagatataatattttagtcacttacattacaaaatatgattctcacgtgtgcaagacgcgatgttgaaagtatttgtgatatatgtggtagcaatacttaacgccggacaaaagccgtttcgaaccggctttaaagaataggaatatataagagataagactcctttagtttcgaaccgacttgaaattgggttgcactacagtgcctaaagtaattttagtatgcttaatccactattgaaataattcagtgctaaattaatttagagtgtatggccaataaaattatctgaatgtatttttttcaaactgcttatgttgtttctggtgtataatctaaatttggttcttgacatcgctaaacatcttttctttgttgcctttgcaggcgcaagaagctttgtcaaaacaatctaaagtgtttgcctagtagtattctagcactattttttcgataagcttcaatttattttaaaaaaataatctgatataaggctttgtgttctgattcgaacatcagttccaagaaggcgaccaagaggaacaaacctgataagtgaagaaaataggttctagaagaacattggccttaatttcataatatactgaggtaagccattgaatctcaacatttccttctctaatccaggcaattgattaatgtttccgttagatttagagctcatacaaatctatgaagaatccaaaacacacataggtgcatatattgtttattgaaattcatgtccagttctaaaattacttgcctgctggatgttgtccagtgttgaaaataacatcgcacattcatcgatatactaatgtagcaataaggaggtagattaaataataaaattaataagatgcacactatgggttcatactgaactgttgccaagctacaatgcaacaggggccaaacaaactaccttatgctttcaaggggtaagaaagtttataaatcttcatccatctgaacgtccctgatgctttggcaccatattcactctaggagaaaaacttttagcaataaagtagatgtttatttcaatgtcctaaaataacattcttgccctttgtgtaatatttctgaaactgtgcgcctttccttcatctttctcgaagcttagaaaatgttttaaatgaaatgttgttttttatctttcgtttgcacatctacacactttatcttttttgacacaggacaagtttttttaattagggtcaataataccaggcttcaaggttagacagatggagagaatatatcaaaatgtagactggaggtccatgctacttcctgatgaaatgatcaaatattgcgcacataaaccctacaaaatttcttttatgttatgtttgtttttacatatgatttttttcgctccttttctttattgtgcagattggaagtcgaggccacttactgatgaaatgattagctattgcgtatataaaccccaattttgaatttttttccattgtgttttgtatttgataagttttactttttgtttgccccttttatttattgcttacttgccatcaggtatgctagacatgatgtacactgtcagctgtacatatatgacttaatgagacagagactacagagggagtcatcatatgaaaatgatcttatagaggtgcaaaaaaatttgtactaatttacatcttatgtactaggtgctaagagaatatatagtttgatattgcggtctcttttaatgaaatcctaaattacgaccacatattttttaattcttttcctagacattgagttttcgagtgcatgacagtgtaaatgttagtctcatgttaatccactaaagaagtatgttatttctttgttgcttgtggttgttgaattgtatcaactgttatttggacagtcatatgtatcaaaatgcatgtcttgatgtatgtggagttttg

SEQ ID NO: 55455 - DNA, 4011 bp, Zea Mays
ctccctcctcctcccaaaccccaccctccactgcttgcccgcggctccggcgacagccgctttacactccgattccctccaccgccgctccaaaggtccaggtaagcgcgctccctccccctcctccctccctcgcccgttcgtagctccggtgacagccgccatcgcttcgggctccagatcccagcgccagcgccccaaaggtcaggtaagcggaggcgactcttccccttctcccccattcgttttccttgctagggttcgtcgtcccctcctcattcccttcccgacgagctctctccccattgctagggttcgtcgtgctggggttggagtagacacggcggcggtggtggctcttccccttcccccctcatccatttttccttgctggggtttgactagacacagaaattcctcatgctgccatttagggtttaggtttggttctcctacgtttcaacctgaggtatcaatgattctgaagcatacgacatattttttgcggtacggcatgtagcaactacaaacctgcttgggattgctgtcttttgggtctgggtgtggaggtatttgaagatatgaagaataatgtctgaattggaccacactaattgttgttgacatgttctgccatatggagatggaaagtgatgccacttttctttgcaacattatcaacgtctatccattattaacgtctatctatatttgactatctaatcttaacgacgtgatgtttatttttctcatattctcaaaggggaacactcacattccaagcacatctctcaaggtgcccaagatatactaagcaaaaatcttgtatcctaatctgataacatgcataaatgtggatggaataggggcatatgactggttcaatcaaggccatgctcctgctgtgacattttaatgctaacgaataagatatcagcatcgatgaaaacagcctgaacataacccaggtaacctatgtcagttgtacttacattttccatataacaccatggttttaggcttctatcaaactgatgaagactgaaatttgtctaagttttttttaaagcatactaacattcaagacaagatagcaataaaccaaatcaatacttctagctcattggaatgtcctcctgccttattttatccggattctttgagaaagagacatggatgcacccgattttccctgccctcttctatgcctgtgatagagtcatcaggaaatttcatgagaacgactaccattcaagtattgtgagcaatttatctgggagatgtgctctctattcacatgaagaagcctcggggtttcaagtactaaagtggaatgcatcttttttttgtaaaataccaagtcttgcctttcgactggtatcattttattaattattgcacacatatccaagaagtaatttatttgtggttcttgcttacagttttcccatatatacaggcgccccttctctataactgtggcaccaggagataactacttgactgtgcatatccgcacgctgggtgaccggacatccaaactttcgattctctgagattttgaactttgatggcagtgaaagggatcaggctccgaaaacagggagcaagaatatgtgtgttgtcttgcaagtcctctttcacgaatgagttgcttcttttatttttttaacatctaaatatccattcaaaatcatacacagtacttcactttgttcttcatgttatacagttcactaagtcagaaggaaccttgtgcctcctgtgtttccatgctttactattgaacaatgaacatatctgattcacaatgatttagagaacaaaacaacaaggggattaacattttactttcactactttagaccagcactcctgtccgtttttttgtattcaataataaaggccaatttctggcttctctttgcaatatgctttattgggattgaatctagaatcactgttcttaataatctagcacaaatatgaactgctgccaacaccaccatcttgctctttgtcttcaatatctggaacttttttggctggctgggggaggtgttcttatttctgaattgattcaagacatcgatactcccttagccaagggtgaaagggctataaagccaagaagacgaagaagggtgaagaattcaggttttcagaagcaatagtgaagactattttttggcttctctttgcaatatgctttattgggattggatcctcgatcactgttattaataatctaacacaaatatgagctgttgcagatcctattgacacaaccatctgactctctaccttcatttttttgcaatttttggttgcctgggaggtgttgttgttcctgagtatcttgtcaggcctccttcatgtcttctccctgttcaagtggtgggcttgggagattggctcttgagatatcttctctaccactcaagaagctaaagaatggaccatgtagccttaatacacagcaacagcaactgcaattctctttttgactacgatcaactttgtcctgtttcatttcccaagagtcatccctcaaggcgcaagaagctttgtcaaaacaatctaaagtgtttgcctattccaagaaggcgaccaagaggaacaaacctgataagtgaagaaaataggttctagaagaacattggccttaatttcataatatactgaggtaagccattgaatctcaacatttccttctctaatccaggcaattgattaatgtttccgttagatttagagctcatacaaatctatgaagaatccaaaacacacataggtgcatatattgtttattgaaattcatgtccagttctaaaattacttgcctgctggatgttgtccagtgttgaaaataacatcgcacattcatcgatatactaatgtagcaataaggaggtagattaaataataaaattaataagatgcacactatgggttcatactgaactgttgccaagctacaatgcaacaggggccaaacaaactaccttatgctttcaaggggtaagaaagtttataaatcttcatccatctgaacgtccctgatgctttggcaccatattcactctaggagaaaaacttttagcaataaagtagatgtttatttcaatgtcctaaaataacattcttgccctttgtgtaatatttctgaaactgtgcgcctttccttcatctttctcgaagcttagaaaatgttttaaatgaaatgttgttttttatctttcgtttgcacatctacacactttatcttttttgacacaggacaagtttttttaattagggtcaataataccaggcttcaaggttagacagatggagagaatatatcaaaatgtagactggaggtccatgctacttcctgatgaaatgatcaaatattgcgcacataaaccctacaaaatttcttttatgttatgtttgtttttacatatgatttttttcgctccttttctttattgtgcagattggaagtcgaggccacttactgatgaaatgattagctattgcgtatataaaccccaattttgaatttttttccattgtgttttgtatttgataagttttactttttgtttgccccttttatttattgcttacttgccatcaggtatgctagacatgatgtacactgtcagctgtacatatatgacttaatgagacagagactacagagggagtcatcatatgaaaatgatcttatagaggtgcaaaaaaatttgtactaatttacatcttatgtactaggtgctaagagaatatatagtttgatattgcggtctcttttaatgaaatcctaaattacgaccacatattttttaattcttttcctagacattgagttttcgagtgcatgacagtgtaaatgttagtctcatgttaatccactaaagaagtatgttatttctttgttgcttgtggttgttgaattgtatcaactgttatttggacagtcatatgtatcaaaatgcatgtcttgatgtatgtggagttttg

SEQ ID NO: 55456 - DNA, 3862 bp, Zea Mays
ctccctcctcctcccaaaccccaccctccactgcttgcccgcggctccggcgacagccgctttacactccgattccctccaccgccgctccaaaggtccaggtaagcgcgctccctccccctcctccctccctcgcccgttcgtagctccggtgacagccgccatcgcttcgggctccagatcccagcgccagcgccccaaaggtcaggtaagcggaggcgactcttccccttctcccccattcgttttccttgctagggttcgtcgtcccctcctcattcccttcccgacgagctctctccccattgctagggttcgtcgtgctggggttggagtagacacggcggcggtggtggctcttccccttcccccctcatccatttttccttgctggggtttgactagacacagaaattcctcatgctgccatttagggtttaggtttggttctcctacgtttcaacctgaggtatcaatgattctgaagcatacgacatattttttgcggtacggcatgtagcaactacaaacctgcttgggattgctgtcttttgggtctgggtgtggaggtatttgaagatatgaagaataatgtctgaattggaccacactaattgttgttgacatgttctgccatatggagatggaaagtgatgccacttttctttgcaacattatcaacgtctatccattattaacgtctatctatatttgactatctaatcttaacgacgtgatgtttatttttctcatattctcaaaggggaacactcacattccaagcacatctctcaaggtgcccaagatatactaagcaaaaatcttgtatcctaatctgataacatgcataaatgtggatggaataggggcatatgactggttcaatcaaggccatgctcctgctgtgacattttaatgctaacgaataagatatcagcatcgatgaaaacagcctgaacataacccaggtaacctatgtcagttgtacttacattttccatataacaccatggttttaggcttctatcaaactgatgaagactgaaatttgtctaagttttttttaaagcatactaacattcaagacaagatagcaataaaccaaatcaatacttctagctcattggaatgtcctcctgccttattttatccggattctttgagaaagagacatggatgcacccgattttccctgccctcttctatgcctgtgatagagtcatcaggaaatttcatgagaacgactaccattcaagtattgtgagcaatttatctgggagatgtgctctctattcacatgaagaagcctcggggtttcaagtactaaagtggaatgcatcttttttttgtaaaataccaagtcttgcctttcgactggcgccccttctctataactgtggcaccaggagataactacttgactgtgcatatccgcacgctgggtgaccggacatccaaactttcgattctctgagattttgaactttgatggcagtgaaagggatcaggctccgaaaacagggagcaagaatatgtgtgttgtcttgcaagtcctctttcacgaatgagttgcttcttttatttttttaacatctaaatatccattcaaaatcatacacagtacttcactttgttcttcatgttatacagttcactaagtcagaaggaaccttgtgcctcctgtgtttccatgctttactattgaacaatgaacatatctgattcacaatgatttagagaacaaaacaacaaggggattaacattttactttcactactttagaccagcactcctgtccgtttttttgtattcaataataaaggccaatttctggcttctctttgcaatatgctttattgggattgaatctagaatcactgttcttaataatctagcacaaatatgaactgctgccaacaccaccatcttgctctttgtcttcaatatctggaacttttttggctggctgggggaggtgttcttatttctgaattgattcaagacatcgatactcccttagccaagggtgaaagggctataaagccaagaagacgaagaagggtgaagaattcaggttttcagaagcaatagtgaagactattttttggcttctctttgcaatatgctttattgggattggatcctcgatcactgttattaataatctaacacaaatatgagctgttgcagatcctattgacacaaccatctgactctctaccttcatttttttgcaatttttggttgcctgggaggtgttgttgttcctgagtatcttgtcagcagcactcaagaagctaaagaatggaccatgtagccttaatacacagcaacagcaactgcaattctctttttgactacgatcaactttgtcctgtttcatttcccaagagtcatccctcaaggcgcaagaagctttgtcaaaacaatctaaagtgtttgcctattccaagaaggcgaccaagaggaacaaacctgataagtgaagaaaataggttctagaagaacattggccttaatttcataatatactgaggtaagccattgaatctcaacatttccttctctaatccaggcaattgattaatgtttccgttagatttagagctcatacaaatctatgaagaatccaaaacacacataggtgcatatattgtttattgaaattcatgtccagttctaaaattacttgcctgctggatgttgtccagtgttgaaaataacatcgcacattcatcgatatactaatgtagcaataaggaggtagattaaataataaaattaataagatgcacactatgggttcatactgaactgttgccaagctacaatgcaacaggggccaaacaaactaccttatgctttcaaggggtaagaaagtttataaatcttcatccatctgaacgtccctgatgctttggcaccatattcactctaggagaaaaacttttagcaataaagtagatgtttatttcaatgtcctaaaataacattcttgccctttgtgtaatatttctgaaactgtgcgcctttccttcatctttctcgaagcttagaaaatgttttaaatgaaatgttgttttttatctttcgtttgcacatctacacactttatcttttttgacacaggacaagtttttttaattagggtcaataataccaggcttcaaggttagacagatggagagaatatatcaaaatgtagactggaggtccatgctacttcctgatgaaatgatcaaatattgcgcacataaaccctacaaaatttcttttatgttatgtttgtttttacatatgatttttttcgctccttttctttattgtgcagattggaagtcgaggccacttactgatgaaatgattagctattgcgtatataaaccccaattttgaatttttttccattgtgttttgtatttgataagttttactttttgtttgccccttttatttattgcttacttgccatcaggtatgctagacatgatgtacactgtcagctgtacatatatgacttaatgagacagagactacagagggagtcatcatatgaaaatgatcttatagaggtgcaaaaaaatttgtactaatttacatcttatgtactaggtgctaagagaatatatagtttgatattgcggtctcttttaatgaaatcctaaattacgaccacatattttttaattcttttcctagacattgagttttcgagtgcatgacagtgtaaatgttagtctcatgttaatccactaaagaagtatgttatttctttgttgcttgtggttgttgaattgtatcaactgttatttggacagtcatatgtatcaaaatgcatgtcttgatgtatgtggagttttg

SEQ ID NO: 55457 - DNA, 3228 bp, Zea Mays
ctccctcctcctcccaaaccccaccctccactgcttgcccgcggctccggcgacagccgctttacactccgattccctccaccgccgctccaaaggtccaggtaagcgcgctccctccccctcctccctccctcgcccgttcgtagctccggtgacagccgccatcgcttcgggctccagatcccagcgccagcgccccaaaggtcaggtaagcggaggcgactcttccccttctcccccattcgttttccttgctagggttcgtcgtcccctcctcattcccttcccgacgagctctctccccattgctagggttcgtcgtgctggggttggagtagacacggcggcggtggtggctcttccccttcccccctcatccatttttccttgctggggtttgactagacacagaaattcctcatgctgccatttagggtttaggtttggttctcctacgtttcaacctgaggtatcaatgattctgaagcatacgacatattttttgcggtacggcatgtagcaactacaaacctgcttgggattgctgtcttttgggtctgggtgtggaggtatttgaagatatgaagaataatgtctgaattggaccacactaattgttgttgacatgttctgccatatggagatggaaagtgatgccacttttctttgcaacattatcaacgtctatccattattaacgtctatctatatttgactatctaatcttaacgacgtgatgtttatttttctcatattctcaaaggggaacactcacattccaagcacatctctcaaggtgcccaagatatactaagcaaaaatcttgtatcctaatctgataacatgcataaatgtggatggaataggggcatatgactggttcaatcaaggccatgctcctgctgtgacattttaatgctaacgaataagatatcagcatcgatgaaaacagcctgaacataacccagcatactaacattcaagacaagatagcaataaaccaaatcaatacttctagctcattggaatgtcctcctgccttattttatccggattctttgagaaagagacatggatgcacccgattttccctgccctcttctatgcctgtgatagagtcatcaggaaatttcatgagaacgactaccattcaagtattgtgagcaatttatctgggagatgtgctctctattcacatgaagaagcctcggggtttcaagtactaaagtggaatgcatcttttttttgtaaaataccaagtcttgcctttcgactggtatcattttattaattattgcacacatatccaagaagtaatttatttgtggttcttgcttacagttttcccatatatacaggcgccccttctctataactgtggcaccaggagataactacttgactgtgcatatccgcacgctgggtgaccggacatccaaactttcgattctctgagattttgaactttgatggcagtgaaagggatcaggctccgaaaacagggagcaagaatatgtgtgttgtcttgcaagtcctctttcacgaatgagttgcttcttttatttttttaacatctaaatatccattcaaaatcatacacagtacttcactttgttcttcatgttatacagttcactaagtcagaaggaaccttgtgcctcctgtgtttccatgctttactattgaacaatgaacatatctgattcacaatgatttagagaacaaaacaacaaggggattaacattttactttcactactttagaccagcactcctgtccgtttttttgtattcaataataaaggccaatttctggcttctctttgcaatatgctttattgggattgaatctagaatcactgttcttaataatctagcacaaatatgaactgctgccaacaccaccatcttgctctttgtcttcaatatctggaacttttttggctggctgggggaggtgttcttatttctgaattgattcaagacatcgatactcccttagccaagggtgaaagggctataaagccaagaagacgaagaagggtgaagaattcaggttttcagaagcaatagtgaagactattttttggcttctctttgcaatatgctttattgggattggatcctcgatcactgttattaataatctaacacaaatatgagctgttgcagatcctattgacacaaccatctgactctctaccttcatttttttgcaatttttggttgcctgggaggtgttgttgttcctgagtatcttgtcagcactcaagaagctaaagaatggaccatgtagccttaatacacagcaacagcaactgcaattctctttttgactacgatcaactttgtcctgtttcatttcccaagagtcatccctcaaggcgcaagaagctttgtcaaaacaatctaaagtgtttgcctattccaagaaggcgaccaagaggaacaaacctgataagtgaagaaaataggttctagaagaacattggccttaatttcataatatactgagggtcaataataccaggcttcaaggttagacagatggagagaatatatcaaaatgtagactggaggtccatgctacttcctgatgaaatgatcaaatattgcgcacataaaccctacaaaatttcttttatgttatgtttgtttttacatatgatttttttcgctccttttctttattgtgcagattggaagtcgaggccacttactgatgaaatgattagctattgcgtatataaaccccaattttgaatttttttccattgtgttttgtatttgataagttttactttttgtttgccccttttatttattgcttacttgccatcaggtatgctagacatgatgtacactgtcagctgtacatatatgacttaatgagacagagactacagagggagtcatcatatgaaaatgatcttatagaggtgcaaaaaaatttgtactaatttacatcttatgtactaggtgctaagagaatatatagtttgatattgcggtctcttttaatgaaatcctaaattacgaccacatattttttaattcttttcctagacattgagttttcgagtgcatgacagtgtaaatgttagtctcatgttaatccactaaagaagtatgttatttctttgttgcttgtggttgttgaattgtatcaactgttatttggacagtcatatgtatcaaaatgcatgtcttgatgtatgtggagttttg

SEQ ID NO: 55458 - DNA, 3779 bp, Zea Mays
ctccctcctcctcccaaaccccaccctccactgcttgcccgcggctccggcgacagccgctttacactccgattccctccaccgccgctccaaaggtccaggtaagcgcgctccctccccctcctccctccctcgcccgttcgtagctccggtgacagccgccatcgcttcgggctccagatcccagcgccagcgccccaaaggtcagggttcgtcgtgctggggttggagtagacacggcggcggtggtggctcttccccttcccccctcatccatttttccttgctggggtttgactagacacagaaattcctcatgctgccatttagggtttaggtttggttctcctacgtttcaacctgaggtatcaatgattctgaagcatacgacatattttttgcggtacggcatgtagcaactacaaacctgcttgggattgctgtcttttgggtctgggtgtggaggtatttgaagatatgaagaataatgtctgaattggaccacactaattgttgttgacatgttctgccatatggagatggaaagggaacactcacattccaagcacatctctcaaggtgcccaagatatactaagcaaaaatcttgtatcctaatctgataacatgcataaatgtggatggaataggggcatatgactggttcaatcaaggccatgctcctgctgtgacattttaatgctaacgaataagatatcagcatcgatgaaaacagcctgaacataacccagcatactaacattcaagacaagatagcaataaaccaaatcaatacttctagctcattggaatgtcctcctgccttattttatccggattctttgagaaagagacatggatgcacccgattttccctgccctcttctatgcctgtgatagagtcatcaggaaatttcatgagaacgactaccattcaagtattgtgagcaatttatctgggagatgtgctctctattcacatgaagaagcctcggggtttcaagtactaaagtggaatgcatcttttttttgtaaaataccaagtcttgcctttcgactggcgccccttctctataactgtggcaccaggagataactacttgactgtgcatatccgcacgctgggtgaccggacatccaaactttcgattctctgagattttgaactttgatggcagtgaaagggatcaggctccgaaaacagggagcaagaatatgtgtgttgtcttgcaagtcctctttcacgaatgagttgcttcttttatttttttaacatctaaatatccattcaaaatcatacacagtacttcactttgttcttcatgttatacagttcactaagtcagaaggaaccttgtgcctcctgtgtttccatgctttactattgaacaatgaacatatctgattcacaatgatttagagaacaaaacaacaaggggattaacattttactttcactactttagaccagcactcctgtccgtttttttgtattcaataataaaggccaatttctggcttctctttgcaatatgctttattgggattgaatctagaatcactgttcttaataatctagcacaaatatgaactgctgccaacaccaccatcttgctctttgtcttcaatatctggaacttttttggctggctgggggaggtgttcttatttctgaattgattcaagacatcgatactcccttagccaagggtgaaagggctataaagccaagaagacgaagaagggtgaagaattcaggttttcagaagcaatagtgaagactattttttggcttctctttgcaatatgctttattgggattggatcctcgatcactgttattaataatctaacacaaatatgagctgttgcagatcctattgacacaaccatctgactctctaccttcatttttttgcaatttttggttgcctgggaggtgttgttgttcctgagtatcttgtcaggtaacatgatatttcatatttactcttggaaataatagcttttgtatggtgaaccatgcacaactaaacatagaaaaaacatgttccttttgtgttattcggtggaatccaacgataagatgtctgctactatcaaactgtgtatgaatgatttagtctacattttggaagtgtcattcacagttgatttaatttattgttctatgttgagaacaagaggtccgaataatacacatgttgactacagactgctcaaatcaaatcaagcatacgtgcttgatttttgagtttcgagctgtcaatgcacctatggtatctacataaacgttactggttaaggtgtgtatgtgggtatgcatcatgggttgtttgttattagcattgatggacaagctgtgtctatctctaatcaggacaagaactatatgaagatgcaagtttgttcttatcaaatcttattacttaaatctaagtttaataatttttttggaggaaaccacttctcacaggtttttgttatcgtcataggcatcttattatatagtatatcacttatccctatacctgctgctagctgccaattatattattgcaagcaactcaatgtactttggtattcacttttgctattgcattattgatacttatgtttctcaaacttcataggcctccttcatgtcttctccctgttcaagtggtgggcttgggagattggctcttgagatatcttctctacgtacatatactataataaaattcttcatctaaatctagctcatatcatttattttctgatgctatatttttattttttaaaaacctgtgtaggttttgtaaacgaagggaatgaattctcatattacatactgatattttcaaatttcatcctaaaccaatatgtcaatctatcaagtataggttgtgaactgatatcactattttatcagcagcactcaagaagctaaagaatggaccatgtagccttaatacacagcaacagcaactgcaattctctttttgactacgatcaactttgtcctgtttcatttcccaagagtcatccctcaaggcgcaagaagctttgtcaaaacaatctaaagtgtttgcctattccaagaaggcgaccaagaggaacaaacctgataagtgaagaaaataggttctagaagaacattggccttaatttcataatatactgaggacaagtttttttaattagggtcaataataccaggcttcaaggttagacagatggagagaatatatcaaaatgtagactggagattggaagtcgaggccacttactgatgaaatgattagctattgcgtatataaaccccaattttgaatttttttccattgtgttttgtatttgataagttttactttttgtttgccccttttatttattgcttacttgccatcaggtatgctagacatgatgtacactgtcagctgtacatatatgacttaatgagacagagactacagagggagtcatcatatgaaaatgatcttatagaggtgcaaaaaaatttgtactaatttacatcttatgtactaggtgctaagagaatatatagtttgatattgcggtctcttttaatgaaatcctaaattacgaccacatattttttaattcttttcctagacattgagttttcgagtgcatgacagtgtaaatgttagtctcatgttaatccactaaagaagtatgttatttctttgttgcttgtggttgttgaattgtatcaactgttatttggacagtcatatgtatcaaaatgcatgtcttgatgtatgtggagttttg

SEQ ID NO: 55459 - DNA, 3913 bp, Zea Mays
ctccctcctcctcccaaaccccaccctccactgcttgcccgcggctccggcgacagccgctttacactccgattccctccaccgccgctccaaaggtccaggtaagcgcgctccctccccctcctccctccctcgcccgttcgtagctccggtgacagccgccatcgcttcgggctccagatcccagcgccagcgccccaaaggtcaggtaagcggaggcgactcttccccttctcccccattcgttttccttgctagggttcgtcgtcccctcctcattcccttcccgacgagctctctccccattgctagggttcgtcgtgctggggttggagtagacacggcggcggtggtggctcttccccttcccccctcatccatttttccttgctggggtttgactagacacagaaattcctcatgctgccatttagggtttaggtttggttctcctacgtttcaacctgaggtatcaatgattctgaagcatacgacatattttttgcggtacggcatgtagcaactacaaacctgcttgggattgctgtcttttgggtctgggtgtggaggtatttgaagatatgaagaataatgtctgaattggaccacactaattgttgttgacatgttctgccatatggagatggaaagtgatgccacttttctttgcaacattatcaacgtctatccattattaacgtctatctatatttgactatctaatcttaacgacgtgatgtttatttttctcatattctcaaaggggaacactcacattccaagcacatctctcaaggtgcccaagatatactaagcaaaaatcttgtatcctaatctgataacatgcataaatgtggatggaataggggcatatgactggttcaatcaaggccatgctcctgctgtgacattttaatgctaacgaataagatatcagcatcgatgaaaacagcctgaacataacccagcatactaacattcaagacaagatagcaataaaccaaatcaatacttctagctcattggaatgtcctcctgccttattttatccggattctttgagaaagagacatggatgcacccgattttccctgccctcttctatgcctgtgatagagtcatcaggaaatttcatgagaacgactaccattcaagtattgtgagcaatttatctgggagatgtgctctctattcacatgaagaagcctcggggtttcaagtactaaagtggaatgcatcttttttttgtaaaataccaagtcttgcctttcgactggcgccccttctctataactgtggcaccaggagataactacttgactgtgcatatccgcacgctgggtgaccggacatccaaactttcgattctctgagattttgaactttgatggcagtgaaagggatcaggctccgaaaacagggagcaagaatatgtgtgttgtcttgcaagtcctctttcacgaatgagttgcttcttttatttttttaacatctaaatatccattcaaaatcatacacagtacttcactttgttcttcatgttatacagttcactaagtcagaaggaaccttgtgcctcctgtgtttccatgctttactattgaacaatgaacatatctgattcacaatgatttagagaacaaaacaacaaggggattaacattttactttcactactttagaccagcactcctgtccgtttttttgtattcaataataaaggccaatttctggcttctctttgcaatatgctttattgggattgaatctagaatcactgttcttaataatctagcacaaatatgaactgctgccaacaccaccatcttgctctttgtcttcaatatctggaacttttttggctggctgggggaggtgttcttatttctgaattgattcaagacatcgatactcccttagccaagggtgaaagggctataaagccaagaagacgaagaagggtgaagaattcaggttttcagaagcaatagtgaagactattttttggcttctctttgcaatatgctttattgggattggatcctcgatcactgttattaataatctaacacaaatatgagctgttgcagatcctattgacacaaccatctgactctctaccttcatttttttgcaatttttggttgcctgggaggtgttgttgttcctgagtatcttgtcaggtaacatgatatttcatatttactcttggaaataatagcttttgtatggtgaaccatgcacaactaaacatagaaaaaacatgttccttttgtgttattcggtggaatccaacgataagatgtctgctactatcaaactgtgtatgaatgatttagtctacattttggaagtgtcattcacagttgatttaatttattgttctatgttgagaacaagaggtccgaataatacacatgttgactacagactgctcaaatcaaatcaagcatacgtgcttgatttttgagtttcgagctgtcaatgcacctatggtatctacataaacgttactggttaaggtgtgtatgtgggtatgcatcatgggttgtttgttattagcattgatggacaagctgtgtctatctctaatcaggacaagaactatatgaagatgcaagtttgttcttatcaaatcttattacttaaatctaagtttaataatttttttggaggaaaccacttctcacaggtttttgttatcgtcataggcatcttattatatagtatatcacttatccctatacctgctgctagctgccaattatattattgcaagcaactcaatgtactttggtattcacttttgctattgcattattgatacttatgtttctcaaacttcataggcctccttcatgtcttctccctgttcaagtggtgggcttgggagattggctcttgagatatcttctctacgtacatatactataataaaattcttcatctaaatctagctcatatcatttattttctgatgctatatttttattttttaaaaacctgtgtaggttttgtaaacgaagggaatgaattctcatattacatactgatattttcaaatttcatcctaaaccaatatgtcaatctatcaagtataggttgtgaactgatatcactattttatcagcagcactcaagaagctaaagaatggaccatgtagccttaatacacagcaacagcaactgcaattctctttttgactacgatcaactttgtcctgtttcatttcccaagagtcatccctcaaggcgcaagaagctttgtcaaaacaatctaaagtgtttgcctattccaagaaggcgaccaagaggaacaaacctgataagtgaagaaaataggttctagaagaacattggccttaatttcataatatactgagattggaagtcgaggccacttactgatgaaatgattagctattgcgtatataaaccccaattttgaatttttttccattgtgttttgtatttgataagttttactttttgtttgccccttttatttattgcttacttgccatcaggtatgctagacatgatgtacactgtcagctgtacatatatgacttaatgagacagagactacagagggagtcatcatatgaaaatgatcttatagaggtgcaaaaaaatttgtactaatttacatcttatgtactaggtgctaagagaatatatagtttgatattgcggtctcttttaatgaaatcctaaattacgaccacatattttttaattcttttcctagacattgagttttcgagtgcatgacagtgtaaatgttagtctcatgttaatccactaaagaagtatgttatttctttgttgcttgtggttgttgaattgtatcaactgttatttggacagtcatatgtatcaaaatgcatgtcttgatgtatgtggagttttg

SEQ ID NO: 55460 - DNA, 4175 bp, Zea Mays
ctccctcctcctcccaaaccccaccctccactgcttgcccgcggctccggcgacagccgctttacactccgattccctccaccgccgctccaaaggtccaggtaagcgcgctccctccccctcctccctccctcgcccgttcgtagctccggtgacagccgccatcgcttcgggctccagatcccagcgccagcgccccaaaggtcaggtaagcggaggcgactcttccccttctcccccattcgttttccttgctagggttcgtcgtcccctcctcattcccttcccgacgagctctctccccattgctagggttcgtcgtgctggggttggagtagacacggcggcggtggtggctcttccccttcccccctcatccatttttccttgctggggtttgactagacacagaaattcctcatgctgccatttagggtttaggtttggttctcctacgtttcaacctgaggtatcaatgattctgaagcatacgacatattttttgcggtacggcatgtagcaactacaaacctgcttgggattgctgtcttttgggtctgggtgtggaggtatttgaagatatgaagaataatgtctgaattggaccacactaattgttgttgacatgttctgccatatggagatggaaagtgatgccacttttctttgcaacattatcaacgtctatccattattaacgtctatctatatttgactatctaatcttaacgacgtgatgtttatttttctcatattctcaaaggggaacactcacattccaagcacatctctcaaggtgcccaagatatactaagcaaaaatcttgtatcctaatctgataacatgcataaatgtggatggaataggggcatatgactggttcaatcaaggccatgctcctgctgtgacattttaatgctaacgaataagatatcagcatcgatgaaaacagcctgaacataacccaggtaacctatgtcagttgtacttacattttccatataacaccatggttttaggcttctatcaaactgatgaagactgaaatttgtctaagttttttttaaagcatactaacattcaagacaagatagcaataaaccaaatcaatacttctagctcattggaatgtcctcctgccttattttatccggattctttgagaaagagacatggatgcacccgattttccctgccctcttctatgcctgtgatagagtcatcaggaaatttcatgagaacgactaccattcaagtattgtgagcaatttatctgggagatgtgctctctattcacatgaagaagcctcggggtttcaagtactaaagtggaatgcatcttttttttgtaaaataccaagtcttgcctttcgactggcgccccttctctataactgtggcaccaggagataactacttgactgtgcatatccgcacgctgggtgaccggacatccaaactttcgattctctgagattttgaactttgatggcagtgaaagggatcaggctccgaaaacagggagcaagaatatgtgtgttgtcttgcaagtcctctttcacgaatgagttgcttcttttatttttttaacatctaaatatccattcaaaatcatacacagtacttcactttgttcttcatgttatacagttcactaagtcagaaggaaccttgtgcctcctgtgtttccatgctttactattgaacaatgaacatatctgattcacaatgatttagagaacaaaacaacaaggggattaacattttactttcactactttagaccagcactcctgtccgtttttttgtattcaataataaaggccaatttctggcttctctttgcaatatgctttattgggattgaatctagaatcactgttcttaataatctagcacaaatatgaactgctgccaacaccaccatcttgctctttgtcttcaatatctggaacttttttggctggctgggggaggtgttcttatttctgaattgattcaagacatcgatactcccttagccaagggtgaaagggctataaagccaagaagacgaagaagggtgaagaattcaggttttcagaagcaatagtgaagactattttttggcttctctttgcaatatgctttattgggattggatcctcgatcactgttattaataatctaacacaaatatgagctgttgcagatcctattgacacaaccatctgactctctaccttcatttttttgcaatttttggttgcctgggaggtgttgttgttcctgagtatcttgtcaggtaacatgatatttcatatttactcttggaaataatagcttttgtatggtgaaccatgcacaactaaacatagaaaaaacatgttccttttgtgttattcggtggaatccaacgataagatgtctgctactatcaaactgtgtatgaatgatttagtctacattttggaagtgtcattcacagttgatttaatttattgttctatgttgagaacaagaggtccgaataatacacatgttgactacagactgctcaaatcaaatcaagcatacgtgcttgatttttgagtttcgagctgtcaatgcacctatggtatctacataaacgttactggttaaggtgtgtatgtgggtatgcatcatgggttgtttgttattagcattgatggacaagctgtgtctatctctaatcaggacaagaactatatgaagatgcaagtttgttcttatcaaatcttattacttaaatctaagtttaataatttttttggaggaaaccacttctcacaggtttttgttatcgtcataggcatcttattatatagtatatcacttatccctatacctgctgctagctgccaattatattattgcaagcaactcaatgtactttggtattcacttttgctattgcattattgatacttatgtttctcaaacttcataggcctccttcatgtcttctccctgttcaagtggtgggcttgggagattggctcttgagatatcttctctacgtacatatactataataaaattcttcatctaaatctagctcatatcatttattttctgatgctatatttttattttttaaaaacctgtgtaggttttgtaaacgaagggaatgaattctcatattacatactgatattttcaaatttcatcctaaaccaatatgtcaatctatcaagtataggttgtgaactgatatcactattttatcagcagcactcaagaagctaaagaatggaccatgtagccttaatacacagcaacagcaactgcaattctctttttgactacgatcaactttgtcctgtttcatttcccaagagtcatccctcaagttccaagaaggcgaccaagaggaacaaacctgataagtgaagaaaataggttctagaagaacattggccttaatttcataatatactgaggacaagtttttttaattagggtcaataataccaggcttcaaggttagacagatggagagaatatatcaaaatgtagactggaggtccatgctacttcctgatgaaatgatcaaatattgcgcacataaaccctacaaaatttcttttatgttatgtttgtttttacatatgatttttttcgctccttttctttattgtgcagattggaagtcgaggccacttactgatgaaatgattagctattgcgtatataaaccccaattttgaatttttttccattgtgttttgtatttgataagttttactttttgtttgccccttttatttattgcttacttgccatcaggtatgctagacatgatgtacactgtcagctgtacatatatgacttaatgagacagagactacagagggagtcatcatatgaaaatgatcttatagaggtgcaaaaaaatttgtactaatttacatcttatgtactaggtgctaagagaatatatagtttgatattgcggtctcttttaatgaaatcctaaattacgaccacatattttttaattcttttcctagacattgagttttcgagtgcatgacagtgtaaatgttagtctcatgttaatccactaaagaagtatgttatttctttgttgcttgtggttgttgaattgtatcaactgttatttggacagtcatatgtatcaaaatgcatgtcttgatgtatgtggagttttg

SEQ ID NO: 55461 - DNA, 4106 bp, Zea Mays
ctccctcctcctcccaaaccccaccctccactgcttgcccgcggctccggcgacagccgctttacactccgattccctccaccgccgctccaaaggtccaggtaagcgcgctccctccccctcctccctccctcgcccgttcgtagctccggtgacagccgccatcgcttcgggctccagatcccagcgccagcgccccaaaggtcaggtaagcggaggcgactcttccccttctcccccattcgttttccttgctagggttcgtcgtcccctcctcattcccttcccgacgagctctctccccattgctagggttcgtcgtgctggggttggagtagacacggcggcggtggtggctcttccccttcccccctcatccatttttccttgctggggtttgactagacacagaaattcctcatgctgccatttagggtttaggtttggttctcctacgtttcaacctgaggtatcaatgattctgaagcatacgacatattttttgcggtacggcatgtagcaactacaaacctgcttgggattgctgtcttttgggtctgggtgtggaggtatttgaagatatgaagaataatgtctgaattggaccacactaattgttgttgacatgttctgccatatggagatggaaagtgatgccacttttctttgcaacattatcaacgtctatccattattaacgtctatctatatttgactatctaatcttaacgacgtgatgtttatttttctcatattctcaaaggggaacactcacattccaagcacatctctcaaggtgcccaagatatactaagcaaaaatcttgtatcctaatctgataacatgcataaatgtggatggaataggggcatatgactggttcaatcaaggccatgctcctgctgtgacattttaatgctaacgaataagatatcagcatcgatgaaaacagcctgaacataacccaggtaacctatgtcagttgtacttacattttccatataacaccatggttttaggcttctatcaaactgatgaagactgaaatttgtctaagttttttttaaagcatactaacattcaagacaagatagcaataaaccaaatcaatacttctagctcattggaatgtcctcctgccttattttatccggattctttgagaaagagacatggatgcacccgattttccctgccctcttctatgcctgtgatagagtcatcaggaaatttcatgagaacgactaccattcaagtattgtgagcaatttatctgggagatgtgctctctattcacatgaagaagcctcggggtttcaagtactaaagtggaatgcatcttttttttgtaaaataccaagtcttgcctttcgactggcgccccttctctataactgtggcaccaggagataactacttgactgtgcatatccgcacgctgggtgaccggacatccaaactttcgattctctgagattttgaactttgatggcagtgaaagggatcaggctccgaaaacagggagcaagaatatgtgtgttgtcttgcaagtcctctttcacgaatgagttgcttcttttatttttttaacatctaaatatccattcaaaatcatacacagtacttcactttgttcttcatgttatacagttcactaagtcagaaggaaccttgtgcctcctgtgtttccatgctttactattgaacaatgaacatatctgattcacaatgatttagagaacaaaacaacaaggggattaacattttactttcactactttagaccagcactcctgtccgtttttttgtattcaataataaaggccaatttctggcttctctttgcaatatgctttattgggattgaatctagaatcactgttcttaataatctagcacaaatatgaactgctgccaacaccaccatcttgctctttgtcttcaatatctggaacttttttggctggctgggggaggtgttcttatttctgaattgattcaagacatcgatactcccttagccaagggtgaaagggctataaagccaagaagacgaagaagggtgaagaattcaggttttcagaagcaatagtgaagactattttttggcttctctttgcaatatgctttattgggattggatcctcgatcactgttattaataatctaacacaaatatgagctgttgcagatcctattgacacaaccatctgactctctaccttcatttttttgcaatttttggttgcctgggaggtgttgttgttcctgagtatcttgtcaggtaacatgatatttcatatttactcttggaaataatagcttttgtatggtgaaccatgcacaactaaacatagaaaaaacatgttccttttgtgttattcggtggaatccaacgataagatgtctgctactatcaaactgtgtatgaatgatttagtctacattttggaagtgtcattcacagttgatttaatttattgttctatgttgagaacaagaggtccgaataatacacatgttgactacagactgctcaaatcaaatcaagcatacgtgcttgatttttgagtttcgagctgtcaatgcacctatggtatctacataaacgttactggttaaggtgtgtatgtgggtatgcatcatgggttgtttgttattagcattgatggacaagctgtgtctatctctaatcaggacaagaactatatgaagatgcaagtttgttcttatcaaatcttattacttaaatctaagtttaataatttttttggaggaaaccacttctcacaggtttttgttatcgtcataggcatcttattatatagtatatcacttatccctatacctgctgctagctgccaattatattattgcaagcaactcaatgtactttggtattcacttttgctattgcattattgatacttatgtttctcaaacttcataggcctccttcatgtcttctccctgttcaagtggtgggcttgggagattggctcttgagatatcttctctacgtacatatactataataaaattcttcatctaaatctagctcatatcatttattttctgatgctatatttttattttttaaaaacctgtgtaggttttgtaaacgaagggaatgaattctcatattacatactgatattttcaaatttcatcctaaaccaatatgtcaatctatcaagtataggttgtgaactgatatcactattttatcagcagcactcaagaagctaaagaatggaccatgtagccttaatacacagcaacagcaactgcaattctctttttgactacgatcaactttgtcctgtttcatttcccaagagtcatccctcaaggcgcaagaagctttgtcaaaacaatctaaagtgtttgcctagtagtattctagcactattttttcgataagcttcaatttattttaaaaaaataatctgatataaggctttgtgttctgattcgaacatcagttccaagaaggcgaccaagaggaacaaacctgataagtgaagaaaataggttctagaagaacattggccttaatttcataatatactgaggattggaagtcgaggccacttactgatgaaatgattagctattgcgtatataaaccccaattttgaatttttttccattgtgttttgtatttgataagttttactttttgtttgccccttttatttattgcttacttgccatcaggtatgctagacatgatgtacactgtcagctgtacatatatgacttaatgagacagagactacagagggagtcatcatatgaaaatgatcttatagaggtgcaaaaaaatttgtactaatttacatcttatgtactaggtgctaagagaatatatagtttgatattgcggtctcttttaatgaaatcctaaattacgaccacatattttttaattcttttcctagacattgagttttcgagtgcatgacagtgtaaatgttagtctcatgttaatccactaaagaagtatgttatttctttgttgcttgtggttgttgaattgtatcaactgttatttggacagtcatatgtatcaaaatgcatgtcttgatgtatgtggagttttg

SEQ ID NO: 55462 - DNA, 3550 bp, Zea Mays
ctccctcctcctcccaaaccccaccctccactgcttgcccgcggctccggcgacagccgctttacactccgattccctccaccgccgctccaaaggtccaggtaagcgcgctccctccccctcctccctccctcgcccgttcgtagctccggtgacagccgccatcgcttcgggctccagatcccagcgccagcgccccaaaggtcaggtaagcggaggcgactcttccccttctcccccattcgttttccttgctagggttcgtcgtcccctcctcattcccttcccgacgagctctctccccattgctagggttcgtcgtgctggggttggagtagacacggcggcggtggtggctcttccccttcccccctcatccatttttccttgctggggtttgactagacacagaaattcctcatgctgccatttagggtttaggtttggttctcctacgtttcaacctgaggtatcaatgattctgaagcatacgacatattttttgcggtacggcatgtagcaactacaaacctgcttgggattgctgtcttttgggtctgggtgtggaggtatttgaagatatgaagaataatgtctgaattggaccacactaattgttgttgacatgttctgccatatggagatggaaagtgatgccacttttctttgcaacattatcaacgtctatccattattaacgtctatctatatttgactatctaatcttaacgacgtgatgtttatttttctcatattctcaaaggggaacactcacattccaagcacatctctcaaggtgcccaagatatactaagcaaaaatcttgtatcctaatctgataacatgcataaatgtggatggaataggggcatatgactggttcaatcaaggccatgctcctgctgtgacattttaatgctaacgaataagatatcagcatcgatgaaaacagcctgaacataacccaggtaacctatgtcagttgtacttacattttccatataacaccatggttttaggcttctatcaaactgatgaagactgaaatttgtctaagttttttttaaagcatactaacattcaagacaagatagcaataaaccaaatcaatacttctagctcattggaatgtcctcctgccttattttatccggattctttgagaaagagacatggatgcacccgattttccctgccctcttctatgcctgtgatagagtcatcaggaaatttcatgagaacgactaccattcaagtattgtgagcaatttatctgggagatgtgctctctattcacatgaagaagcctcggggtttcaagtactaaagtggaatgcatcttttttttgtaaaataccaagtcttgcctttcgactggcgccccttctctataactgtggcaccaggagataactacttgactgtgcatatccgcacgctgggtgaccggacatccaaactttcgattctctgagattttgaactttgatggcagtgaaagggatcaggctccgaaaacagggagcaagaatatgtgtgttgtcttgcaagtcctctttcacgaatgagttgcttcttttatttttttaacatctaaatatccattcaaaatcatacacagtacttcactttgttcttcatgttatacagttcactaagtcagaaggaaccttgtgcctcctgtgtttccatgctttactattgaacaatgaacatatctgattcacaatgatttagagaacaaaacaacaaggggattaacattttactttcactactttagaccagcactcctgtccgtttttttgtattcaataataaaggccaatttctggcttctctttgcaatatgctttattgggattgaatctagaatcactgttcttaataatctagcacaaatatgaactgctgccaacaccaccatcttgctctttgtcttcaatatctggaacttttttggctggctgggggaggtgttcttatttctgaattgattcaagacatcgatactcccttagccaagggtgaaagggctataaagccaagaagacgaagaagggtgaagaattcaggttttcagaagcaatagtgaagactattttttggcttctctttgcaatatgctttattgggattggatcctcgatcactgttattaataatctaacacaaatatgagctgttgcagatcctattgacacaaccatctgactctctaccttcatttttttgcaatttttggttgcctgggaggtgttgttgttcctgagtatcttgtcaggcctccttcatgtcttctccctgttcaagtggtgggcttgggagattggctcttgagatatcttctctacgtacatatactataataaaattcttcatctaaatctagctcatatcatttattttctgatgctatatttttattttttaaaaacctgtgtaggttttgtaaacgaagggaatgaattctcatattacatactgatattttcaaatttcatcctaaaccaatatgtcaatctatcaagtataggttgtgaactgatatcactattttatcagcagcactcaagaagctaaagaatggaccatgtagccttaatacacagcaacagcaactgcaattctctttttgactacgatcaactttgtcctgtttcatttcccaagagtcatccctcaaggcgcaagaagctttgtcaaaacaatctaaagtgtttgcctattccaagaaggcgaccaagaggaacaaacctgataagtgaagaaaataggttctagaagaacattggccttaatttcataatatactgaggacaagtttttttaattagggtcaataataccaggcttcaaggttagacagatggagagaatatatcaaaatgtagactggaggtccatgctacttcctgatgaaatgatcaaatattgcgcacataaaccctacaaaatttcttttatgttatgtttgtttttacatatgatttttttcgctccttttctttattgtgcagattggaagtcgaggccacttactgatgaaatgattagctattgcgtatataaaccccaattttgaatttttttccattgtgttttgtatttgataagttttactttttgtttgccccttttatttattgcttacttgccatcaggtatgctagacatgatgtacactgtcagctgtacatatatgacttaatgagacagagactacagagggagtcatcatatgaaaatgatcttatagaggtgcaaaaaaatttgtactaatttacatcttatgtactaggtgctaagagaatatatagtttgatattgcggtctcttttaatgaaatcctaaattacgaccacatattttttaattcttttcctagacattgagttttcgagtgcatgacagtgtaaatgttagtctcatgttaatccactaaagaagtatgttatttctttgttgcttgtggttgttgaattgtatcaactgttatttggacagtcatatgtatcaaaatgcatgtcttgatgtatgtggagttttg

SEQ ID NO: 55463 - DNA, 4599 bp, Zea Mays
gcgctccctcctcctcccaaaccccaccctccactgcttgcccgcggctccggcgacagccgctttacactccgattccctccaccgccgctccaaaggtccaggtaagcgcgctccctccccctcctccctccctcgcccgttcgtagctccggtgacagccgccatcgcttcgggctccagatcccagcgccagcgccccaaaggtcaggtaagcggaggcgactcttccccttctcccccattcgttttccttgctagggttcgtcgtcccctcctcattcccttcccgacgagctctctccccattgctagggttcgtcgtgctggggttggagtagacacggcggcggtggtggctcttccccttcccccctcatccatttttccttgctggggtttgactagacacagaaattcctcatgctgccatttagggtttaggtttggttctcctacgtttcaacctgaggtatcaatgattctgaagcatacgacatattttttgcggtacggcatgtagcaactacaaacctgcttgggattgctgtcttttgggtctgggtgtggaggtatttgaagatatgaagaataatgtctgaattggaccacactaattgttgttgacatgttctgccatatggagatggaaagtgatgccacttttctttgcaacattatcaacgtctatccattattaacgtctatctatatttgactatctaatcttaacgacgtgatgtttatttttctcatattctcaaaggggaacactcacattccaagcacatctctcaaggtgcccaagatatactaagcaaaaatcttgtatcctaatctgataacatgcataaatgtggatggaataggggcatatgactggttcaatcaaggccatgctcctgctgtgacattttaatgctaacgaataagatatcagcatcgatgaaaacagcctgaacataacccagcatactaacattcaagacaagatagcaataaaccaaatcaatacttctagctcattggaatgtcctcctgccttattttatccggattctttgagaaagagacatggatgcacccgattttccctgccctcttctatgcctgtgatagagtcatcaggaaatttcatgagaacgactaccattcaagtattgtgagcaatttatctgggagatgtgctctctattcacatgaagaagcctcggggtttcaagtactaaagtggaatgcatcttttttttgtaaaataccaagtcttgcctttcgactggcgccccttctctataactgtggcaccaggagataactacttgactgtgcatatccgcacgctgggtgaccggacatccaaactttcgattctctgagattttgaactttgatggcagtgaaagggatcaggctccgaaaacagggagcaagaatatgtgtgttgtcttgcaagtcctctttcacgaatgagttgcttcttttatttttttaacatctaaatatccattcaaaatcatacacagtacttcactttgttcttcatgttatacagttcactaagtcagaaggaaccttgtgcctcctgtgtttccatgctttactattgaacaatgaacatatctgattcacaatgatttagagaacaaaacaacaaggggattaacattttactttcactactttagaccagcactcctgtccgtttttttgtattcaataataaaggccaatttctggcttctctttgcaatatgctttattgggattgaatctagaatcactgttcttaataatctagcacaaatatgaactgctgccaacaccaccatcttgctctttgtcttcaatatctggaacttttttggctggctgggggaggtgttcttatttctgaattgattcaagacatcgatactcccttagccaagggtgaaagggctataaagccaagaagacgaagaagggtgaagaattcaggttttcagaagcaatagtgaagactattttttggcttctctttgcaatatgctttattgggattggatcctcgatcactgttattaataatctaacacaaatatgagctgttgcagatcctattgacacaaccatctgactctctaccttcatttttttgcaatttttggttgcctgggaggtgttgttgttcctgagtatcttgtcaggtaacatgatatttcatatttactcttggaaataatagcttttgtatggtgaaccatgcacaactaaacatagaaaaaacatgttccttttgtgttattcggtggaatccaacgataagatgtctgctactatcaaactgtgtatgaatgatttagtctacattttggaagtgtcattcacagttgatttaatttattgttctatgttgagaacaagaggtccgaataatacacatgttgactacagactgctcaaatcaaatcaagcatacgtgcttgatttttgagtttcgagctgtcaatgcacctatggtatctacataaacgttactggttaaggtgtgtatgtgggtatgcatcatgggttgtttgttattagcattgatggacaagctgtgtctatctctaatcaggacaagaactatatgaagatgcaagtttgttcttatcaaatcttattacttaaatctaagtttaataatttttttggaggaaaccacttctcacaggtttttgttatcgtcataggcatcttattatatagtatatcacttatccctatacctgctgctagctgccaattatattattgcaagcaactcaatgtactttggtattcacttttgctattgcattattgatacttatgtttctcaaacttcataggcctccttcatgtcttctccctgttcaagtggtgggcttgggagattggctcttgagatatcttctctacgtacatatactataataaaattcttcatctaaatctagctcatatcatttattttctgatgctatatttttattttttaaaaacctgtgtaggttttgtaaacgaagggaatgaattctcatattacatactgatattttcaaatttcatcctaaaccaatatgtcaatctatcaagtataggttgtgaactgatatcactattttatcagcagcactcaagaagctaaagaatggaccatgtagccttaatacacagcaacagcaactgcaattctctttttgactacgatcaactttgtcctgtttcatttcccaagagtcatccctcaaggtgcctattatagtattatcccatgttttacaattagtgtcagtactccttcactatgatgtgtttcccacgtctacaaaatacgacctttggattgaaatatttaaatttagtactcaaatgtcctttttcgtttcaatgtgtaatctaaagtttattctattctcttgggacactgctaaaaagaaagagtacatcgacaacaagatataatattttagtcacttacattacaaaatatgattctcacgtgtgcaagacgcgatgttgaaagtatttgtgatatatgtggtagcaatacttaacgccggacaaaagccgtttcgaaccggctttaaagaataggaatatataagagataagactcctttagtttcgaaccgacttgaaattgggttgcactacagtgcctaaagtaattttagtatgcttaatccactattgaaataattcagtgctaaattaatttagagtgtatggccaataaaattatctgaatgtatttttttcaaactgcttatgttgtttctggtgtataatctaaatttggttcttgacatcgctaaacatcttttctttgttgcctttgcaggcgcaagaagctttgtcaaaacaatctaaagtgtttgcctagtagtattctagcactattttttcgataagcttcaatttattttaaaaaaataatctgatataaggctttgtgttctgattcgaacatcagttccaagaaggcgaccaagaggaacaaacctgataagtgaagaaaataggttctagaagaacattggccttaatttcataatatactgagattggaagtcgaggccacttactgatgaaatgattagctattgcgtatataaaccccaattttgaatttttttccattgtgttttgtatttgataagttttactttttgtttgccccttttatttattgcttacttgccatcaggtatgctagacatgatgtacactgtcagctgtacatatatgacttaatgagacagagactacagagggagtcatcatatgaaaatgatcttatagaggtgcaaaaaaatttgtactaatttacatcttatgtactaggtgctaagagaatatatagtttgatattgcggtctcttttaatgaaatcctaaattacgaccacatattttttaattcttttcctagacattgagttttcgagtgcatgacagtgtaaatgttagtctcatgttaatccactaaagaagtatgttatttctttgttgcttgtggttgttgaattgtatcaactgttatttggacagtcatatgtatcaaaatgcatgtcttgatgtatgtggagttttg

SEQ ID NO: 55464 - DNA, 3062 bp, Zea Mays
ccgtcctcatcacgcgctccctcctcctcccaaaccccaccctccactgcttgcccgcggctccggcgacagccgctttacactccgattccctccaccgccgctccaaaggtccaggtaagcgcgctccctccccctcctccctccctcgcccgttcgtagctccggtgacagccgccatcgcttcgggctccagatcccagcgccagcgccccaaaggtcaggtaagcggaggcgactcttccccttctcccccattcgttttccttgctagggttcgtcgtcccctcctcattcccttcccgacgagctctctccccattgctagggttcgtcgtgctggggttggagtagacacggcggcggtggtggctcttccccttcccccctcatccatttttccttgctggggtttgactagacacagaaattcctcatgctgccatttagggtttaggtttggttctcctacgtttcaacctgaggtatcaatgattctgaagcatacgacatattttttgcggtacggcatgtagcaactacaaacctgcttgggattgctgtcttttgggtctgggtgtggaggtatttgaagatatgaagaataatgtctgaattggaccacactaattgttgttgacatgttctgccatatggagatggaaagtgatgccacttttctttgcaacattatcaacgtctatccattattaacgtctatctatatttgactatctaatcttaacgacgtgatgtttatttttctcatattctcaaaggggaacactcacattccaagcacatctctcaaggtgcccaagatatactaagcaaaaatcttgtatcctaatctgataacatgcataaatgtggatggaataggggcatatgactggttcaatcaaggccatgctcctgctgtgacattttaatgctaacgaataagatatcagcatcgatgaaaacagcctgaacataacccagcatactaacattcaagacaagatagcaataaaccaaatcaatacttctagctcattggaatgtcctcctgccttattttatccggattctttgagaaagagacatggatgcacccgattttccctgccctcttctatgcctgtgatagagtcatcaggaaatttcatgagaacgactaccattcaagtattgtgagcaatttatctgggagatgtgctctctattcacatgaagaagcctcggggtttcaagtactaaagtggaatgcatcttttttttgtaaaataccaagtcttgcctttcgactggcgccccttctctataactgtggcaccaggagataactacttgactgtgcatatccgcacgctgggtgaccggacatccaaactttcgattctctgagattttgaactttgatggcagtgaaagggatcaggctccgaaaacagggagcaagaatatgtgtgttgtcttgcaagtcctctttcacgaatgagttgcttcttttatttttttaacatctaaatatccattcaaaatcatacacagtacttcactttgttcttcatgttatacagttcactaagtcagaaggaaccttgtgcctcctgtgtttccatgctttactattgaacaatgaacatatctgattcacaatgatttagagaacaaaacaacaaggggattaacattttactttcactactttagaccagcactcctgtccgtttttttgtattcaataataaaggccaatttctggcttctctttgcaatatgctttattgggattgaatctagaatcactgttcttaataatctagcacaaatatgaactgctgccaacaccaccatcttgctctttgtcttcaatatctggaacttttttggctggctgggggaggtgttcttatttctgaattgattcaagacatcgatactcccttagccaagggtgaaagggctataaagccaagaagacgaagaagggtgaagaattcaggttttcagaagcaatagtgaagactattttttggcttctctttgcaatatgctttattgggattggatcctcgatcactgttattaataatctaacacaaatatgagctgttgcagatcctattgacacaaccatctgactctctaccttcatttttttgcaatttttggttgcctgggaggtgttgttgttcctgagtatcttgtcagcactcaagaagctaaagaatggaccatgtagccttaatacacagcaacagcaactgcaattctctttttgactacgatcaactttgtcctgtttcatttcccaagagtcatccctcaaggcgcaagaagctttgtcaaaacaatctaaagtgtttgcctattccaagaaggcgaccaagaggaacaaacctgataagtgaagaaaataggttctagaagaacattggccttaatttcataatatactgaggacaagtttttttaattagggtcaataataccaggcttcaaggttagacagatggagagaatatatcaaaatgtagactggagattggaagtcgaggccacttactgatgaaatgattagctattgcgtatataaaccccaattttgaatttttttccattgtgttttgtatttgataagttttactttttgtttgccccttttatttattgcttacttgccatcaggtatgctagacatgatgtacactgtcagctgtacatatatgacttaatgagacagagactacagagggagtcatcatatgaaaatgatcttatagaggtgcaaaaaaatttgtactaatttacatcttatgtactaggtgctaagagaatatatagtttgatattgcggtctcttttaatgaaatcctaaattacgaccacatattttttaattcttttcctagacattgagttttcgagtgcatgacagtgtaaatgttagtctcatgttaatccactaaagaagtatgttatttctttgttgcttgtggttgttgaattgtatcaactgttatttggacagtcatatgtatcaaaatgcatgtcttgatgtatgtggagttttg

SEQ ID NO: 55465 - DNA, 1294 bp, Zea Mays
cgcggctccggcgacagccgctttacactccgattccctccaccgccgctccaaaggtccaggtaagcgcgctccctccccctcctccctccctcgcccgttcgtagctccggtgacagccgccatcgcttcgggctccagatcccagcgccagcgccccaaaggtcaggtaagcggaggcgactcttccccttctcccccattcgttttccttgctagggttcgtcgtcccctcctcattcccttcccgacgagctctctccccattgctagggttcgtcgtgctggggttggagtagacacggcggcggtggtggctcttccccttcccccctcatccatttttccttgctggggtttgactagacacagaaattcctcatgctgccatttagggtttaggtttggttctcctacgtttcaacctgaggtatcaatgattctgaagcatacgacatattttttgcggtacggcatgtagcaactacaaacctgcttgggattgctgtcttttgggtctgggtgtggaggtatttgaagatatgaagaataatgtctgaattggaccacactaattgttgttgacatgttctgccatatggagatggaaagtgatgccacttttctttgcaacattatcaacgtctatccattattaacgtctatctatatttgactatctaatcttaacgacgtgatgtttatttttctcatattctcaaaggggaacactcacattccaagcacatctctcaaggtgcccaagatatactaagcaaaaatcttgtatcctaatctgataacatgcataaatgtggatggaataggggcatatgactggttcaatcaaggccatgctcctgctgtgacattttaatgctaacgaataagatatcagcatcgatgaaaacagcctgaacataacccagcatactaacattcaagacaagatagcaataaaccaaatcaatacttctagctcattggaatgtcctcctgccttattttatccggattctttgagaaagaggtaaggtcaatgtttgtttcagtctaattttttagtatgttttaatttcttcgcatctgctgaagactttaaatttgaactaagtctcaggagaagcatttgaattgttacagatacttttggtctcacctaactgtatggtatttatagtttgctcatttgtatacaatcattggctttacaaccttgtttggtcaacccaaaaaaaaaggtggacagagactgtctgtttcatcactcaccaagcacacccaacgtacattt

SEQ ID NO: 55466 - DNA, 750 bp, Zea Mays
ctaaactgctgttcaggcgagcagagaaaatggttatgtctttgtcatgcgataaggctgtttggaatgctgtcatgaataatgaggcagttcaagatttcaggagatctttacacgatggaaaagaaaatgatagaaacgaaaacactggtggtcctgctgaagtgcttaagtggatcctggaaagcgcccaggcaaaaatagttgaattcctagagaatgttcagaagataatcaacatgctgatccacactccagaggatgatgataatccagatggatacagcgatgcagttaaggtgtcgttcatgctcacggtattcgtcttcatcgtggtggccattgctcgtatcattatgaacattgggattacaaagtgtggtgaggcgagattctggcatcctacaagcccgtctatatatgttttgtagaacacaccaaagttcgataacttatcctacacacagttttactcaatgctttggctgtatcatttcatcccggcagatcatgcaagggaatgttgttctgggtcatatttgtgttgttcgactttggagccggatggacctctgtagctacacttccttactccagcagtccagcgccagcaaatttcatgtttgcagtccattttaagcatacagcattaactgttggaatagcctgtataaatgttacttgaggaaattattttacagggtgtttggatccattcatttcgagggaattaaaattatttaataaagt

SEQ ID NO: 55467 - DNA, 2081 bp, Zea Mays
attgtgcagcccagcctaccgcgcctgtcatcttcttcgatgtgggcggtgccctccactccacgacggcgcgccgcactctgcccacgacctcgacctcctcccccatgaccacgacctcaaccgctctgccagctccgccacttacgcacgcacgacctcaacctcgcctgattcagcgcatagaagagcgtgtggcgtcgaggtcgagcgtgcggcgccgaggtcgagcgtgcgtcaccgagggagaggaaaaccactgagcgttatttcctaagcctcctgcttgatgtctccaccgtccctcaacgcaattgccgccgcccgggatgcgctccacccccgcccgctaatcgtccccttgcaactgccgccgcggccgccaatcggcccccaagaaccaaaggttcgagctccgcaggtggcaagctccttcttcatccacgccctccctccgccttgagaaccagaggaaaccagagtcaccaaaactacgggcaagactgtacgaagggaaacatagtactcccacgaagaagaagtgctgcaactgcaggaactccaaatgtttgaagttgtttcgagtggcttcgcatcgcaggctgccaagcccaccgagaagcaggtcaaggttgcaaacatactacttgctcatgttggatgacatggaagcagtaggttgaccaaggcaacagctgagatagctcgtgcagccaaccgatcatggcttgctcttcttatcgatactgcatgtgaccagttttcatttatcctacaaagtctgtttgatctcgctatggagcacaaccgcaataaggactcacaatgtaagagcttgaccttgctattcatgctggttcgtcttgctttacatttgcctgggtatcatttggttcacagtgaagtaaattataattgtttagtaaatatttcattttattttgttctacatgttcatcaaaaggtaggcaaggattgcattttctctactgcatatttagtcatctgcattccccaacttatgctgtaaattttgctaccaaattatgctgtagattttgctttgcgatatctcagtaattgcaggagcataatttggtagctaatgtgttattgttttggtcttcccaatgacgactgttgttggcacttggcaggatgattttgtacgtcgtttgtgccaaactgttttagttttgaccaggtttatatgaaaaatagttacacaagtacattgtaaaagttattttataattaatatagtgatactaatttagtgttctacatgttgatattttttactatactttagtcaaccctaacttcgttttgacccaagaattttggaatggacagaatggttctttcattaatccattgttttgttttatatgttgatcagcccatcacaatgcctttgacagtgactttgctttttaaggtgcagtcaatacacatggcatccatcaaattacagaagaagttatttgtagttgcaaagagaatatcaaataaaatacttgttgagcttaagtttcttcatcaaatcatttttgggaggcttcaaatgtagcactataccatggtttggtgaaaggagagaagatgaaggtgctggtacatcacaatcaatactagaagcaagacagacgcacccactattgttactgaaggtcaagatgcacaagatgatctgacaacaccacatgcacctaagatgtccaaaaagattactccaaggaagaaaagcaattgaactaccttatgtatattcaaaattagtgtattatccactatgttgtgtcaagaactatgacttcaaaattagtgtgtcatgaactatgctgtttcatgaactatgtcttcaaattctgggaagtggagtgcagtttcttgtataattttgaacatgtccatgtgcacctactctgctaattgtgtcatggactgacatgaattatgtcatgaactctgccaactgtgtcatgaactgggaagtggagtgcaccaaccgtgtcatgaacatgtccagtttactgcaactctgccaatgataataaaatgtccagtttgtaggactg

SEQ ID NO: 55468 - DNA, 3314 bp, Zea Mays
attgtgcagcccagcctaccgcgcctgtcatcttcttcgatgtgggcggtgccctccactccacgacggcgcgccgcactctgcccacgacctcgacctcctcccccatgaccacgacctcaaccgctctgccagctccgccacttacgcacgcacgacctcaacctcgcctgattcagcgcatagaagagcgtgtggcgtcgaggtcgagcgtgcggcgccgaggtcgagcgtgcgtcaccgagggagaggaaaaccactgagcgttatttcctaagcctcctgcttgatgtctccaccgtccctcaacgcaattgccgccgcccgggatgcgctccacccccgcccgctaatcgtccccttgcaactgccgccgcggccgccaatcggcccccaagaaccaaaggttcgagctccgcaggtggcaagctccttcttcatccacgccctccctccgccttgagaaccagaggaaaccagagtcaccaaaactacgggcaagactgtacgaagggaaacatagtactcccacgaagaagaagtgctgcaactgcaggaactccaaatgtttgaagttgtttcgagtggcttcgcatcgcaggctgccaagcccaccgagaagcaggtcaaggtacttgccttatccgtgatgagcgaatgtagttgtaaaatgggaaacgttgctgttttattatatggccgggagtggtgaactggtgataggctactcttgtcagtgcatatgtattatttgcaacccatggattatgcaactatttctctattatatttatattttttccctgatagtgccttcatgttttgtgttgtgctttcacatcttgatattatgtgcctcagtcaaagtttcatatttgtttctattgttttcttggttcaaatcatgcgttgcttgatggtgctgctgatttagctctagagatatgggggaaactacggaggaggaacaaatacatagtgatattgccagctggcctggcattaatatgtctgtaaaacctaccaactccagccttaagttgtatggtggtgcagcttttgggagacatgcatgatttcattgtgtaatgtatttaatgaaatgcccacaagtccagtctcaagggagaaggtagtctttagcctgcaaccatacacatacacaatttattacgagaattgcttatataattatgtcattaggttgcaaacatactacttgctcatgttggatgacatggaagcagtaggttgaccaaggcaacagctgagatagctcgtgcagccaaccgatcatggcttgctcttcttatcgatactgcatgtgaccagttttcatttatcctacaaagtctgtttgatctcgctatggagcacaaccgcaataaggactcacaatgtaagagcttgaccttgctattcatgctggttcgtcttgctttacatttgcctgggtatcatttggttcacagtgaagtaaattataattgtttagtaaatatttcattttattttgttctacatgttcatcaaaaggtaggcaaggattgcattttctctactgcatatttagtcatctgcattccccaacttatgctgtaaattttgctaccaaattatgctgtagattttgctttgcgatatctcagtaattgcaggagcataatttggtagctaatgtgttattgttttggtcttcccaatgacgactgttgttggcacttggcaggatgattttgtacgtcgtttgtgccaaactgttttagttttgaccaggtttatatgaaaaatagttacacaagtacattgtaaaagttattttataattaatatagtgatactaatttagtgttctacatgttgatattttttactatactttagtcaaccctaacttcgttttgacccaagaattttggaatggacagaatggttctttcattaatccattgttttgttttatatgttgatcagcccatcacaatgcctttgacagtgactttgctttttaaggtgcagtcaatacacatggcatccatcaaattacagaagaagttatttgtaggtatctaagaagttggagttgcatcaaaaggcgagggtgtcgctaagttccaacatgcattaaaattctatttttgtgatataatattttattaaataatttgtgtgtctttgcaacgcactagcattacgcaaactcaaatagaaatttatatattatagtcattcttgtcattccgtatctatgttttattctaatttttaactttcgtggcaacgcacgggcacatacctattatttcatgatgtgtgatctctttctaagacttctatttccatctgaactacaatatatgatatttatcatcatttttttctagatccatctttcatcccatccactctctgaaaatctaagcttgaatgcccaatactaaattttgcattatggaagcagtttgaacaaagaacaatctctgtcactttgtgtggcccaccagtaaaaataagacaacttgttagtctgattatatgcttctttgattaagagggctatgttcaaataaaacattccagtaaactggacaaagtatcttgaactggaagaagcctttcaaaaatacacatcctttttctacagttcaataactcacaacttcaattctggatgcaagtgtttattattctacactctgctgattcagacctgaaaatgtttgcagttgcaaagagaatatcaaataaaatacttgttgagcttaagtttcttcatcaaatcatttttgggaggcttcaaatgtagcactataccatggtttggtgaaaggagagaagatgaaggtgctggtacatcacaatcaatactagaagcaagacagacgcacccactattgttactgaaggtcaagatgcacaagatgatctgacaacaccacatgcacctaagatgtccaaaaagattactccaaggaagaaaagcaattgaactaccttatgtatattcaaaattagtgtattatccactatgttgtgtcaagaactatgacttcaaaattagtgtgtcatgaactatgctgtttcatgaactatgtcttcaaattctgggaagtggagtgcagtttcttgtataattttgaacatgtccatgtgcacctactctgctaattgtgtcatggactgacatgaattatgtcatgaactctgccaactgtgtcatgaactgggaagtggagtgcaccaaccgtgtcatgaacatgtccagtttactgcaactctgccaatgataataaaatgtccagtttgtaggactg

SEQ ID NO: 55469 - DNA, 1412 bp, Zea Mays
attgtgcagcccagcctaccgcgcctgtcatcttcttcgatgtgggcggtgccctccactccacgacggcgcgccgcactctgcccacgacctcgacctcctcccccatgaccacgacctcaaccgctctgccagctccgccacttacgcacgcacgacctcaacctcgcctgattcagcgcatagaagagcgtgtggcgtcgaggtcgagcgtgcggcgccgaggtcgagcgtgcgtcaccgagggagaggaaaaccactgagcgttatttcctaagcctcctgcttgatgtctccaccgtccctcaacgcaattgccgccgcccgggatgcgctccacccccgcccgctaatcgtccccttgcaactgccgccgcggccgccaatcggcccccaagaaccaaaggttcgagctccgcaggtggcaagctccttcttcatccacgccctccctccgccttgagaaccagaggaaaccagagtcaccaaaactacgggcaagactgtacgaagggaaacatagtactcccacgaagaagaagtgctgcaactgcaggaactccaaatgtttgaagttgtttcgagtggcttcgcatcgcaggctgccaagcccaccgagaagcaggtcaaggttgcaaacatactacttgctcatgttggatgacatggaagcagtaggttgaccaaggcaacagctgagatagctcgtgcagccaaccgatcatggcttgctcttcttatcgatactgcatgtgaccagttttcatttatcctacaaagtctgtttgatctcgctatggagcacaaccgcaataaggactcacaatttgcaaagagaatatcaaataaaatacttgttgagcttaagtttcttcatcaaatcatttttgggaggcttcaaatgcactataccatggtttggtgaaaggagagaagatgaaggtgctggtacatcacaatcaatactagaagcaagacagacgcacccactattgttactgaaggtcaagatgcacaagatgatctgacaacaccacatgcacctaagatgtccaaaaagattactccaaggaagaaaagcaattgaactaccttatgtatattcaaaattagtgtattatccactatgttgtgtcaagaactatgacttcaaaattagtgtgtcatgaactatgctgtttcatgaactatgtcttcaaattctgggaagtggagtgcagtttcttgtataattttgaacatgtccatgtgcacctactctgctaattgtgtcatggactgacatgaattatgtcatgaactctgccaactgtgtcatgaactgggaagtggagtgcaccaaccgtgtcatgaacatgtccagtttactgcaactctgccaatgataataaaatgtccagtttgtaggactg

SEQ ID NO: 55470 - DNA, 2258 bp, Zea Mays
attgtgcagcccagcctaccgcgcctgtcatcttcttcgatgtgggcggtgccctccactccacgacggcgcgccgcactctgcccacgacctcgacctcctcccccatgaccacgacctcaaccgctctgccagctccgccacttacgcacgcacgacctcaacctcgcctgattcagcgcatagaagagcgtgtggcgtcgaggtcgagcgtgcggcgccgaggtcgagcgtgcgtcaccgagggagaggaaaaccactgagcgttatttcctaagcctcctgcttgatgtctccaccgtccctcaacgcaattgccgccgcccgggatgcgctccacccccgcccgctaatcgtccccttgcaactgccgccgcggccgccaatcggcccccaagaaccaaaggttcgagctccgcaggtggcaagctccttcttcatccacgccctccctccgccttgagaaccagaggaaaccagagtcaccaaaactacgggcaagactgtacgaagggaaacatagtactcccacgaagaagaagtgctgcaactgcaggaactccaaatgtttgaagttgtttcgagtggcttcgcatcgcaggctgccaagcccaccgagaagcaggtcaaggtacttgccttatccgtgatgagcgaatgtagttgtaaaatgggaaacgttgctgttttattatatggccgggagtggtgaactggtgataggctactcttgtcagtgcatatgtattatttgcaacccatggattatgcaactatttctctattatatttatattttttccctgatagtgccttcatgttttgtgttgtgctttcacatcttgatattatgtgcctcagtcaaagtttcatatttgtttctattgttttcttggttcaaatcatgcgttgcttgatggtgctgctgatttagctctagagatatgggggaaactacggaggaggaacaaatacatagtgatattgccagctggcctggcattaatatgtctgtaaaacctaccaactccagccttaagttgtatggtggtgcagcttttgggagacatgcatgatttcattgtgtaatgtatttaatgaaatgcccacaagtccagtctcaagggagaaggtagtctttagcctgcaaccatacacatacacaatttattacgagaattgcttatataattatgtcattaggttgcaaacatactacttgctcatgttggatgacatggaagcagtaggttgaccaaggcaacagctgagatagctcgtgcagccaaccgatcatggcttgctcttcttatcgatactgcatgtgaccagttttcatttatcctacaaagtctgtttgatctcgctatggagcacaaccgcaataaggactcacaatttgcaaagagaatatcaaataaaatacttgttgagcttaagtttcttcatcaaatcatttttgggaggcttcaaatgttctatgaacacaatgataataagatgagctacccagcaatggctcaacttctgtcaaatatactctactacaagagaaattgattgggataacatctctactactatgaagaatctaaggggtaggatgtctcccctggttcaattgaaagtagatgagaagagtaaggaacacaaaaaatacctaaggaggatgttgtatacctaaaagttggattgcaacttgagtatgataggggaactacgatggggaacagttggagtaatgatgctgcactataccatggtttggtgaaaggagagaagatgaaggtgctggtacatcacaatcaatactagaagcaagacagacgcacccactattgttactgaaggtcaagatgcacaagatgatctgacaacaccacatgcacctaagatgtccaaaaagattactccaaggaagaaaagcaattgaactaccttatgtatattcaaaattagtgtattatccactatgttgtgtcaagaactatgacttcaaaattagtgtgtcatgaactatgctgtttcatgaactatgtcttcaaattctgggaagtggagtgcagtttcttgtataattttgaacatgtccatgtgcacctactctgctaattgtgtcatggactgacatgaattatgtcatgaactctgccaactgtgtcatgaactgggaagtggagtgcaccaaccgtgtcatgaacatgtccagtttactgcaactctgccaatgataataaaatgtccagtttgtaggactg

SEQ ID NO: 55471 - DNA, 2697 bp, Zea Mays
attgtgcagcccagcctaccgcgcctgtcatcttcttcgatgtgggcggtgccctccactccacgacggcgcgccgcactctgcccacgacctcgacctcctcccccatgaccacgacctcaaccgctctgccagctccgccacttacgcacgcacgacctcaacctcgcctgattcagcgcatagaagagcgtgtggcgtcgaggtcgagcgtgcggcgccgaggtcgagcgtgcgtcaccgagggagaggaaaaccactgagcgttatttcctaagcctcctgcttgatgtctccaccgtccctcaacgcaattgccgccgcccgggatgcgctccacccccgcccgctaatcgtccccttgcaactgccgccgcggccgccaatcggcccccaagaaccaaaggttcgagctccgcaggtggcaagctccttcttcatccacgccctccctccgccttgagaaccagaggaaaccagagtcaccaaaactacgggcaagactgtacgaagggaaacatagtactcccacgaagaagaagtgctgcaactgcaggaactccaaatgtttgaagttgtttcgagtggcttcgcatcgcaggctgccaagcccaccgagaagcaggtcaaggtacttgccttatccgtgatgagcgaatgtagttgtaaaatgggaaacgttgctgttttattatatggccgggagtggtgaactggtgataggctactcttgtcagtgcatatgtattatttgcaacccatggattatgcaactatttctctattatatttatattttttccctgatagtgccttcatgttttgtgttgtgctttcacatcttgatattatgtgcctcagtcaaagtttcatatttgtttctattgttttcttggttcaaatcatgcgttgcttgatggtgctgctgatttagctctagagatatgggggaaactacggaggaggaacaaatacatagtgatattgccagctggcctggcattaatatgtctgtaaaacctaccaactccagccttaagttgtatggtggtgcagcttttgggagacatgcatgatttcattgtgtaatgtatttaatgaaatgcccacaagtccagtctcaagggagaaggtagtctttagcctgcaaccatacacatacacaatttattacgagaattgcttatataattatgtcattaggttgcaaacatactacttgctcatgttggatgacatggaagcagtaggttgaccaaggcaacagctgagatagctcgtgcagccaaccgatcatggcttgctcttcttatcgatactgcatgtgaccagttttcatttatcctacaaagtctgtttgatctcgctatggagcacaaccgcaataaggactcacaatgtgcagtcaatacacatggcatccatcaaattacagaagaagttatttgtaggtatctaagaagttggagttgcatcaaaaggcgagggtgtcgctaagttccaacatgcattaaaattctatttttgtgatataatattttattaaataatttgtgtgtctttgcaacgcactagcattacgcaaactcaaatagaaatttatatattatagtcattcttgtcattccgtatctatgttttattctaatttttaactttcgtggcaacgcacgggcacatacctattatttcatgatgtgtgatctctttctaagacttctatttccatctgaactacaatatatgatatttatcatcatttttttctagatccatctttcatcccatccactctctgaaaatctaagcttgaatgcccaatactaaattttgcattatggaagcagtttgaacaaagaacaatctctgtcactttgtgtggcccaccagtaaaaataagacaacttgttagtctgattatatgcttctttgattaagagggctatgttcaaataaaacattccagtaaactggacaaagtatcttgaactggaagaagcctttcaaaaatacacatcctttttctacagttcaataactcacaacttcaattctggatgcaagtgtttattattctacactctgctgattcagacctgaaaatgtttgcagttgcaaagagaatatcaaataaaatacttgttgagcttaagtttcttcatcaaatcatttttgggaggcttcaaatgcactataccatggtttggtgaaaggagagaagatgaaggtgctggtacatcacaatcaatactagaagcaagacagacgcacccactattgttactgaaggtcaagatgcacaagatgatctgacaacaccacatgcacctaagatgtccaaaaagattactccaaggaagaaaagcaattgaactaccttatgtatattcaaaattagtgtattatccactatgttgtgtcaagaactatgacttcaaaattagtgtgtcatgaactatgctgtttcatgaactatgtcttcaaattctgggaagtggagtgcagtttcttgtataattttgaacatgtccatgtgcacctactctgctaattgtgtcatggactgacatgaattatgtcatgaactctgccaactgtgtcatgaactgggaagtggagtgcaccaaccgtgtcatgaacatgtccagtttactgcaactctgccaatgataataaaatgtccagtttgtaggactg

SEQ ID NO: 55472 - DNA, 1139 bp, Zea Mays
attgtgcagcccagcctaccgcgcctgtcatcttcttcgatgtgggcggtgccctccactccacgacggcgcgccgcactctgcccacgacctcgacctcctcccccatgaccacgacctcaaccgctctgccagctccgccacttacgcacgcacgacctcaacctcgcctgattcagcgcatagaagagcgtgtggcgtcgaggtcgagcgtgcggcgccgaggtcgagcgtgcgtcaccgagggagaggaaaaccactgagcgttatttcctaagcctcctgcttgatgtctccaccgtccctcaacgcaattgccgccgcccgggatgcgctccacccccgcccgctaatcgtccccttgcaactgccgccgcggccgccaatcggcccccaagaaccaaaggttcgagctccgcaggtggcaagctccttcttcatccacgccctccctccgccttgagaaccagaggaaaccagagtcaccaaaactacgggcaagactgtacgaagggaaacatagtactcccacgaagaagaagtgctgcaactgcaggaactccaaatgtttgaagttgtttcgagtggcttcgcatcgcaggctgccaagcccaccgagaagcaggtcaagcactataccatggtttggtgaaaggagagaagatgaaggtgctggtacatcacaatcaatactagaagcaagacagacgcacccactattgttactgaaggtcaagatgcacaagatgatctgacaacaccacatgcacctaagatgtccaaaaagattactccaaggaagaaaagcaattgaactaccttatgtatattcaaaattagtgtattatccactatgttgtgtcaagaactatgacttcaaaattagtgtgtcatgaactatgctgtttcatgaactatgtcttcaaattctgggaagtggagtgcagtttcttgtataattttgaacatgtccatgtgcacctactctgctaattgtgtcatggactgacatgaattatgtcatgaactctgccaactgtgtcatgaactgggaagtggagtgcaccaaccgtgtcatgaacatgtccagtttactgcaactctgccaatgataataaaatgtccagtttgtaggactg

SEQ ID NO: 55473 - DNA, 2974 bp, Zea Mays
attgtgcagcccagcctaccgcgcctgtcatcttcttcgatgtgggcggtgccctccactccacgacggcgcgccgcactctgcccacgacctcgacctcctcccccatgaccacgacctcaaccgctctgccagctccgccacttacgcacgcacgacctcaacctcgcctgattcagcgcatagaagagcgtgtggcgtcgaggtcgagcgtgcggcgccgaggtcgagcgtgcgtcaccgagggagaggaaaaccactgagcgttatttcctaagcctcctgcttgatgtctccaccgtccctcaacgcaattgccgccgcccgggatgcgctccacccccgcccgctaatcgtccccttgcaactgccgccgcggccgccaatcggcccccaagaaccaaaggttcgagctccgcaggtggcaagctccttcttcatccacgccctccctccgccttgagaaccagaggaaaccagagtcaccaaaactacgggcaagactgtacgaagggaaacatagtactcccacgaagaagaagtgctgcaactgcaggaactccaaatgtttgaagttgtttcgagtggcttcgcatcgcaggctgccaagcccaccgagaagcaggtcaaggtacttgccttatccgtgatgagcgaatgtagttgtaaaatgggaaacgttgctgttttattatatggccgggagtggtgaactggtgataggctactcttgtcagtgcatatgtattatttgcaacccatggattatgcaactatttctctattatatttatattttttccctgatagtgccttcatgttttgtgttgtgctttcacatcttgatattatgtgcctcagtcaaagtttcatatttgtttctattgttttcttggttcaaatcatgcgttgcttgatggtgctgctgatttagctctagagatatgggggaaactacggaggaggaacaaatacatagtgatattgccagctggcctggcattaatatgtctgtaaaacctaccaactccagccttaagttgtatggtggtgcagcttttgggagacatgcatgatttcattgtgtaatgtatttaatgaaatgcccacaagtccagtctcaagggagaaggtagtctttagcctgcaaccatacacatacacaatttattacgagaattgcttatataattatgtcattaggttgcaaacatactacttgctcatgttggatgacatggaagcagtaggttgaccaaggcaacagctgagatagctcgtgcagccaaccgatcatggcttgctcttcttatcgatactgcatgtgaccagttttcatttatcctacaaagtctgtttgatctcgctatggagcacaaccgcaataaggactcacaatgtgcagtcaatacacatggcatccatcaaattacagaagaagttatttgtaggtatctaagaagttggagttgcatcaaaaggcgagggtgtcgctaagttccaacatgcattaaaattctatttttgtgatataatattttattaaataatttgtgtgtctttgcaacgcactagcattacgcaaactcaaatagaaatttatatattatagtcattcttgtcattccgtatctatgttttattctaatttttaactttcgtggcaacgcacgggcacatacctattatttcatgatgtgtgatctctttctaagacttctatttccatctgaactacaatatatgatatttatcatcatttttttctagatccatctttcatcccatccactctctgaaaatctaagcttgaatgcccaatactaaattttgcattatggaagcagtttgaacaaagaacaatctctgtcactttgtgtggcccaccagtaaaaataagacaacttgttagtctgattatatgcttctttgattaagagggctatgttcaaataaaacattccagtaaactggacaaagtatcttgaactggaagaagcctttcaaaaatacacatcctttttctacagttcaataactcacaacttcaattctggatgcaagtgtttattattctacactctgctgattcagacctgaaaatgtttgcagttgcaaagagaatatcaaataaaatacttgttgagcttaagtttcttcatcaaatcatttttgggaggcttcaaatgttctatgaacacaatgataataagatgagctacccagcaatggctcaacttctgtcaaatatactctactacaagagaaattgattgggataacatctctactactatgaagaatctaaggggtaggatgtctcccctggttcaattgaaagtagatgagaagagtaaggaacacaaaaaatacctaaggaggatgttgtatacctaaaagttggattgcaacttgagtatgataggggaactacgatggggaacagttggagtaatgatgctgtagcactataccatggtttggtgaaaggagagaagatgaaggtgctggtacatcacaatcaatactagaagcaagacagacgcacccactattgttactgaaggtcaagatgcacaagatgatctgacaacaccacatgcacctaagatgtccaaaaagattactccaaggaagaaaagcaattgaactaccttatgtatattcaaaattagtgtattatccactatgttgtgtcaagaactatgacttcaaaattagtgtgtcatgaactatgctgtttcatgaactatgtcttcaaattctgggaagtggagtgcagtttcttgtataattttgaacatgtccatgtgcacctactctgctaattgtgtcatggactgacatgaattatgtcatgaactctgccaactgtgtcatgaactgggaagtggagtgcaccaaccgtgtcatgaacatgtccagtttactgcaactctgccaatgataataaaatgtccagtttgtaggactg

SEQ ID NO: 55474 - DNA, 3007 bp, Zea Mays
attgtgcagcccagcctaccgcgcctgtcatcttcttcgatgtgggcggtgccctccactccacgacggcgcgccgcactctgcccacgacctcgacctcctcccccatgaccacgacctcaaccgctctgccagctccgccacttacgcacgcacgacctcaacctcgcctgattcagcgcatagaagagcgtgtggcgtcgaggtcgagcgtgcggcgccgaggtcgagcgtgcgtcaccgagggagaggaaaaccactgagcgttatttcctaagcctcctgcttgatgtctccaccgtccctcaacgcaattgccgccgcccgggatgcgctccacccccgcccgctaatcgtccccttgcaactgccgccgcggccgccaatcggcccccaagaaccaaaggttcgagctccgcaggtggcaagctccttcttcatccacgccctccctccgccttgagaaccagaggaaaccagagtcaccaaaactacgggcaagactgtacgaagggaaacatagtactcccacgaagaagaagtgctgcaactgcaggaactccaaatgtttgaagttgtttcgagtggcttcgcatcgcaggctgccaagcccaccgagaagcaggttgcaaacatactacttgctcatgttggatgacatggaagcagtaggttgaccaaggcaacagctgagatagctcgtgcagccaaccgatcatggcttgctcttcttatcgatactgcatgtgaccagttttcatttatcctacaaagtctgtttgatctcgctatggagcacaaccgcaataaggactcacaatgtaagagcttgaccttgctattcatgctggttcgtcttgctttacatttgcctgggtatcatttggttcacagtgaagtaaattataattgtttagtaaatatttcattttattttgttctacatgttcatcaaaaggtaggcaaggattgcattttctctactgcatatttagtcatctgcattccccaacttatgctgtaaattttgctaccaaattatgctgtagattttgctttgcgatatctcagtaattgcaggagcataatttggtagctaatgtgttattgttttggtcttcccaatgacgactgttgttggcacttggcaggatgattttgtacgtcgtttgtgccaaactgttttagttttgaccaggtttatatgaaaaatagttacacaagtacattgtaaaagttattttataattaatatagtgatactaatttagtgttctacatgttgatattttttactatactttagtcaaccctaacttcgttttgacccaagaattttggaatggacagaatggttctttcattaatccattgttttgttttatatgttgatcagcccatcacaatgcctttgacagtgactttgctttttaaggtgcagtcaatacacatggcatccatcaaattacagaagaagttatttgtaggtatctaagaagttggagttgcatcaaaaggcgagggtgtcgctaagttccaacatgcattaaaattctatttttgtgatataatattttattaaataatttgtgtgtctttgcaacgcactagcattacgcaaactcaaatagaaatttatatattatagtcattcttgtcattccgtatctatgttttattctaatttttaactttcgtggcaacgcacgggcacatacctattatttcatgatgtgtgatctctttctaagacttctatttccatctgaactacaatatatgatatttatcatcatttttttctagatccatctttcatcccatccactctctgaaaatctaagcttgaatgcccaatactaaattttgcattatggaagcagtttgaacaaagaacaatctctgtcactttgtgtggcccaccagtaaaaataagacaacttgttagtctgattatatgcttctttgattaagagggctatgttcaaataaaacattccagtaaactggacaaagtatcttgaactggaagaagcctttcaaaaatacacatcctttttctacagttcaataactcacaacttcaattctggatgcaagtgtttattattctacactctgctgattcagacctgaaaatgtttgcagttgcaaagagaatatcaaataaaatacttgttgagcttaagtttcttcatcaaatcatttttgggaggcttcaaatgttctatgaacacaatgataataagatgagctacccagcaatggctcaacttctgtcaaatatactctactacaagagaaattgattgggataacatctctactactatgaagaatctaaggggtaggatgtctcccctggttcaattgaaagtagatgagaagagtaaggaacacaaaaaatacctaaggaggatgttgtatacctaaaagttggattgcaacttgagtatgataggggaactacgatggggaacagttggagtaatgatgctgcactataccatggtttggtgaaaggagagaagatgaaggtgctggtacatcacaatcaatactagaagcaagacagacgcacccactattgttactgaaggtcaagatgcacaagatgatctgacaacaccacatgcacctaagatgtccaaaaagattactccaaggaagaaaagcaattgaactaccttatgtatattcaaaattagtgtattatccactatgttgtgtcaagaactatgacttcaaaattagtgtgtcatgaactatgctgtttcatgaactatgtcttcaaattctgggaagtggagtgcagtttcttgtataattttgaacatgtccatgtgcacctactctgctaattgtgtcatggactgacatgaattatgtcatgaactctgccaactgtgtcatgaactgggaagtggagtgcaccaaccgtgtcatgaacatgtccagtttactgcaactctgccaatgataataaaatgtccagtttgtaggactg

SEQ ID NO: 55475 - DNA, 3105 bp, Zea Mays
attgtgcagcccagcctaccgcgcctgtcatcttcttcgatgtgggcggtgccctccactccacgacggcgcgccgcactctgcccacgacctcgacctcctcccccatgaccacgacctcaaccgctctgccagctccgccacttacgcacgcacgacctcaacctcgcctgattcagcgcatagaagagcgtgtggcgtcgaggtcgagcgtgcggcgccgaggtcgagcgtgcgtcaccgagggagaggaaaaccactgagcgttatttcctaagcctcctgcttgatgtctccaccgtccctcaacgcaattgccgccgcccgggatgcgctccacccccgcccgctaatcgtccccttgcaactgccgccgcggccgccaatcggcccccaagaaccaaaggttcgagctccgcaggtggcaagctccttcttcatccacgccctccctccgccttgagaaccagaggaaaccagagtcaccaaaactacgggcaagactgtacgaagggaaacatagtactcccacgaagaagaagtgctgcaactgcaggaactccaaatgtttgaagttgtttcgagtggcttcgcatcgcaggctgccaagcccaccgagaagcaggtcaagtaggttgaccaaggcaacagctgagatagctcgtgcagccaaccgatcatggcttgctcttcttatcgatactgcatgtgaccagttttcatttatcctacaaagtctgtttgatctcgctatggagcacaaccgcaataaggactcacaatgtaagagcttgaccttgctattcatgctggttcgtcttgctttacatttgcctgggtatcatttggttcacagtgaagtaaattataattgtttagtaaatatttcattttattttgttctacatgttcatcaaaaggtaggcaaggattgcattttctctactgcatatttagtcatctgcattccccaacttatgctgtaaattttgctaccaaattatgctgtagattttgctttgcgatatctcagtaattgcaggagcataatttggtagctaatgtgttattgttttggtcttcccaatgacgactgttgttggcacttggcaggatgattttgtacgtcgtttgtgccaaactgttttagttttgaccaggtttatatgaaaaatagttacacaagtacattgtaaaagttattttataattaatatagtgatactaatttagtgttctacatgttgatattttttactatactttagtcaaccctaacttcgttttgacccaagaattttggaatggacagaatggttctttcattaatccattgttttgttttatatgttgatcagcccatcacaatgcctttgacagtgactttgctttttaaggtgcagtcaatacacatggcatccatcaaattacagaagaagttatttgtaggtatctaagaagttggagttgcatcaaaaggcgagggtgtcgctaagttccaacatgcattaaaattctatttttgtgatataatattttattaaataatttgtgtgtctttgcaacgcactagcattacgcaaactcaaatagaaatttatatattatagtcattcttgtcattccgtatctatgttttattctaatttttaactttcgtggcaacgcacgggcacatacctattatttcatgatgtgtgatctctttctaagacttctatttccatctgaactacaatatatgatatttatcatcatttttttctagatccatctttcatcccatccactctctgaaaatctaagcttgaatgcccaatactaaattttgcattatggaagcagtttgaacaaagaacaatctctgtcactttgtgtggcccaccagtaaaaataagacaacttgttagtctgattatatgcttctttgattaagagggctatgttcaaataaaacattccagtaaactggacaaagtatcttgaactggaagaagcctttcaaaaatacacatcctttttctacagttcaataactcacaacttcaattctggatgcaagtgtttattattctacactctgctgattcagacctgaaaatgtttgcagttgcaaagagaatatcaaataaaatacttgttgagcttaagtttcttcatcaaatcatttttgggaggcttcaaatgttctatgaacacaatgataataagatgagctacccagcaatggctcaacttctgtcaaatatactctactacaagagaaattgattgggataacatctctactactatgaagaatctaaggggtaggatgtctcccctggttcaattgaaagtagatgagaagagtaaggaacacaaaaaatacctaaggaggatgttgtatacctaaaagttggattgcaacttgagtatgataggggaactacgatggggaacagttggagtaatgatgctggtactaaaattttttctatgcctgatgatgagtacatatcagaagatacaattgttgtttatgataagctaaatcctgtaaatccaaacttctatttaacatgactctctttatttccactttacatgaaaagtagcactataccatggtttggtgaaaggagagaagatgaaggtgctggtacatcacaatcaatactagaagcaagacagacgcacccactattgttactgaaggtcaagatgcacaagatgatctgacaacaccacatgcacctaagatgtccaaaaagattactccaaggaagaaaagcaattgaactaccttatgtatattcaaaattagtgtattatccactatgttgtgtcaagaactatgacttcaaaattagtgtgtcatgaactatgctgtttcatgaactatgtcttcaaattctgggaagtggagtgcagtttcttgtataattttgaacatgtccatgtgcacctactctgctaattgtgtcatggactgacatgaattatgtcatgaactctgccaactgtgtcatgaactgggaagtggagtgcaccaaccgtgtcatgaacatgtccagtttactgcaactctgccaatgataataaaatgtccagtttgtaggactg

SEQ ID NO: 55476 - DNA, 1415 bp, Zea Mays
attgtgcagcccagcctaccgcgcctgtcatcttcttcgatgtgggcggtgccctccactccacgacggcgcgccgcactctgcccacgacctcgacctcctcccccatgaccacgacctcaaccgctctgccagctccgccacttacgcacgcacgacctcaacctcgcctgattcagcgcatagaagagcgtgtggcgtcgaggtcgagcgtgcggcgccgaggtcgagcgtgcgtcaccgagggagaggaaaaccactgagcgttatttcctaagcctcctgcttgatgtctccaccgtccctcaacgcaattgccgccgcccgggatgcgctccacccccgcccgctaatcgtccccttgcaactgccgccgcggccgccaatcggcccccaagaaccaaaggttcgagctccgcaggtggcaagctccttcttcatccacgccctccctccgccttgagaaccagaggaaaccagagtcaccaaaactacgggcaagactgtacgaagggaaacatagtactcccacgaagaagaagtgctgcaactgcaggaactccaaatgtttgaagttgtttcgagtggcttcgcatcgcaggctgccaagcccaccgagaagcaggtcaaggttgcaaacatactacttgctcatgttggatgacatggaagcagtaggttgaccaaggcaacagctgagatagctcgtgcagccaaccgatcatggcttgctcttcttatcgatactgcatgtgaccagttttcatttatcctacaaagtctgtttgatctcgctatggagcacaaccgcaataaggactcacaatttgcaaagagaatatcaaataaaatacttgttgagcttaagtttcttcatcaaatcatttttgggaggcttcaaatgtagcactataccatggtttggtgaaaggagagaagatgaaggtgctggtacatcacaatcaatactagaagcaagacagacgcacccactattgttactgaaggtcaagatgcacaagatgatctgacaacaccacatgcacctaagatgtccaaaaagattactccaaggaagaaaagcaattgaactaccttatgtatattcaaaattagtgtattatccactatgttgtgtcaagaactatgacttcaaaattagtgtgtcatgaactatgctgtttcatgaactatgtcttcaaattctgggaagtggagtgcagtttcttgtataattttgaacatgtccatgtgcacctactctgctaattgtgtcatggactgacatgaattatgtcatgaactctgccaactgtgtcatgaactgggaagtggagtgcaccaaccgtgtcatgaacatgtccagtttactgcaactctgccaatgataataaaatgtccagtttgtaggactg

SEQ ID NO: 55477 - DNA, 2691 bp, Zea Mays
attgtgcagcccagcctaccgcgcctgtcatcttcttcgatgtgggcggtgccctccactccacgacggcgcgccgcactctgcccacgacctcgacctcctcccccatgaccacgacctcaaccgctctgccagctccgccacttacgcacgcacgacctcaacctcgcctgattcagcgcatagaagagcgtgtggcgtcgaggtcgagcgtgcggcgccgaggtcgagcgtgcgtcaccgagggagaggaaaaccactgagcgttatttcctaagcctcctgcttgatgtctccaccgtccctcaacgcaattgccgccgcccgggatgcgctccacccccgcccgctaatcgtccccttgcaactgccgccgcggccgccaatcggcccccaagaaccaaaggttcgagctccgcaggtggcaagctccttcttcatccacgccctccctccgccttgagaaccagaggaaaccagagtcaccaaaactacgggcaagactgtacgaagggaaacatagtactcccacgaagaagaagtgctgcaactgcaggaactccaaatgtttgaagttgtttcgagtggcttcgcatcgcaggctgccaagcccaccgagaagcaggtcaaggtacttgccttatccgtgatgagcgaatgtagttgtaaaatgggaaacgttgctgttttattatatggccgggagtggtgaactggtgataggctactcttgtcagtgcatatgtattatttgcaacccatggattatgcaactatttctctattatatttatattttttccctgatagtgccttcatgttttgtgttgtgctttcacatcttgatattatgtgcctcagtcaaagtttcatatttgtttctattgttttcttggttcaaatcatgcgttgcttgatggtgctgctgatttagctctagagatatgggggaaactacggaggaggaacaaatacatagtgatattgccagctggcctggcattaatatgtctgtaaaacctaccaactccagccttaagttgtatggtggtgcagcttttgggagacatgcatgatttcattgtgtaatgtatttaatgaaatgcccacaagtccagtctcaagggagaaggtagtctttagcctgcaaccatacacatacacaatttattacgagaattgcttatataattatgtcattaggttgcaaacatactacttgctcatgttggatgacatggaagcagtaggttgaccaaggcaacagctgagatagctcgtgcagccaaccgatcatggcttgctcttcttatcgatactgcatgtgaccagttttcatttatcctacaaagtctgtttgatctcgctatggagcacaaccgcaataaggactcacaattcaatacacatggcatccatcaaattacagaagaagttatttgtaggtatctaagaagttggagttgcatcaaaaggcgagggtgtcgctaagttccaacatgcattaaaattctatttttgtgatataatattttattaaataatttgtgtgtctttgcaacgcactagcattacgcaaactcaaatagaaatttatatattatagtcattcttgtcattccgtatctatgttttattctaatttttaactttcgtggcaacgcacgggcacatacctattatttcatgatgtgtgatctctttctaagacttctatttccatctgaactacaatatatgatatttatcatcatttttttctagatccatctttcatcccatccactctctgaaaatctaagcttgaatgcccaatactaaattttgcattatggaagcagtttgaacaaagaacaatctctgtcactttgtgtggcccaccagtaaaaataagacaacttgttagtctgattatatgcttctttgattaagagggctatgttcaaataaaacattccagtaaactggacaaagtatcttgaactggaagaagcctttcaaaaatacacatcctttttctacagttcaataactcacaacttcaattctggatgcaagtgtttattattctacactctgctgattcagacctgaaaatgtttgcagttgcaaagagaatatcaaataaaatacttgttgagcttaagtttcttcatcaaatcatttttgggaggcttcaaatgcactataccatggtttggtgaaaggagagaagatgaaggtgctggtacatcacaatcaatactagaagcaagacagacgcacccactattgttactgaaggtcaagatgcacaagatgatctgacaacaccacatgcacctaagatgtccaaaaagattactccaaggaagaaaagcaattgaactaccttatgtatattcaaaattagtgtattatccactatgttgtgtcaagaactatgacttcaaaattagtgtgtcatgaactatgctgtttcatgaactatgtcttcaaattctgggaagtggagtgcagtttcttgtataattttgaacatgtccatgtgcacctactctgctaattgtgtcatggactgacatgaattatgtcatgaactctgccaactgtgtcatgaactgggaagtggagtgcaccaaccgtgtcatgaacatgtccagtttactgcaactctgccaatgataataaaatgtccagtttgtaggactg

SEQ ID NO: 55478 - DNA, 3240 bp, Zea Mays
attgtgcagcccagcctaccgcgcctgtcatcttcttcgatgtgggcggtgccctccactccacgacggcgcgccgcactctgcccacgacctcgacctcctcccccatgaccacgacctcaaccgctctgccagctccgccacttacgcacgcacgacctcaacctcgcctgattcagcgcatagaagagcgtgtggcgtcgaggtcgagcgtgcggcgccgaggtcgagcgtgcgtcaccgagggagaggaaaaccactgagcgttatttcctaagcctcctgcttgatgtctccaccgtccctcaacgcaattgccgccgcccgggatgcgctccacccccgcccgctaatcgtccccttgcaactgccgccgcggccgccaatcggcccccaagaaccaaaggttcgagctccgcaggtggcaagctccttcttcatccacgccctccctccgccttgagaaccagaggaaaccagagtcaccaaaactacgggcaagactgtacgaagggaaacatagtactcccacgaagaagaagtgctgcaactgcaggaactccaaatgtttgaagttgtttcgagtggcttcgcatcgcaggctgccaagcccaccgagaagcaggtcaaggtacttgccttatccgtgatgagcgaatgtagttgtaaaatgggaaacgttgctgttttattatatggccgggagtggtgaactggtgataggctactcttgtcagtgcatatgtattatttgcaacccatggattatgcaactatttctctattatatttatattttttccctgatagtgccttcatgttttgtgttgtgctttcacatcttgatattatgtgcctcagtcaaagtttcatatttgtttctattgttttcttggttcaaatcatgcgttgcttgatggtgctgctgatttagctctagagatatgggggaaactacggaggaggaacaaatacatagtgatattgccagctggcctggcattaatatgtctgtaaaacctaccaactccagccttaagttgtatggtggtgcagcttttgggagacatgcatgatttcattgtgtaatgtatttaatgaaatgcccacaagtccagtctcaagggagaaggttgcaaacatactacttgctcatgttggatgacatggaagcagtaggttgaccaaggcaacagctgagatagctcgtgcagccaaccgatcatggcttgctcttcttatcgatactgcatgtgaccagttttcatttatcctacaaagtctgtttgatctcgctatggagcacaaccgcaataaggactcacaatgtaagagcttgaccttgctattcatgctggttcgtcttgctttacatttgcctgggtatcatttggttcacagtgaagtaaattataattgtttagtaaatatttcattttattttgttctacatgttcatcaaaaggtaggcaaggattgcattttctctactgcatatttagtcatctgcattccccaacttatgctgtaaattttgctaccaaattatgctgtagattttgctttgcgatatctcagtaattgcaggagcataatttggtagctaatgtgttattgttttggtcttcccaatgacgactgttgttggcacttggcaggatgattttgtacgtcgtttgtgccaaactgttttagttttgaccaggtttatatgaaaaatagttacacaagtacattgtaaaagttattttataattaatatagtgatactaatttagtgttctacatgttgatattttttactatactttagtcaaccctaacttcgttttgacccaagaattttggaatggacagaatggttctttcattaatccattgttttgttttatatgttgatcagcccatcacaatgcctttgacagtgactttgctttttaaggtgcagtcaatacacatggcatccatcaaattacagaagaagttatttgtaggtatctaagaagttggagttgcatcaaaaggcgagggtgtcgctaagttccaacatgcattaaaattctatttttgtgatataatattttattaaataatttgtgtgtctttgcaacgcactagcattacgcaaactcaaatagaaatttatatattatagtcattcttgtcattccgtatctatgttttattctaatttttaactttcgtggcaacgcacgggcacatacctattatttcatgatgtgtgatctctttctaagacttctatttccatctgaactacaatatatgatatttatcatcatttttttctagatccatctttcatcccatccactctctgaaaatctaagcttgaatgcccaatactaaattttgcattatggaagcagtttgaacaaagaacaatctctgtcactttgtgtggcccaccagtaaaaataagacaacttgttagtctgattatatgcttctttgattaagagggctatgttcaaataaaacattccagtaaactggacaaagtatcttgaactggaagaagcctttcaaaaatacacatcctttttctacagttcaataactcacaacttcaattctggatgcaagtgtttattattctacactctgctgattcagacctgaaaatgtttgcagttgcaaagagaatatcaaataaaatacttgttgagcttaagtttcttcatcaaatcatttttgggaggcttcaaatgcactataccatggtttggtgaaaggagagaagatgaaggtgctggtacatcacaatcaatactagaagcaagacagacgcacccactattgttactgaaggtcaagatgcacaagatgatctgacaacaccacatgcacctaagatgtccaaaaagattactccaaggaagaaaagcaattgaactaccttatgtatattcaaaattagtgtattatccactatgttgtgtcaagaactatgacttcaaaattagtgtgtcatgaactatgctgtttcatgaactatgtcttcaaattctgggaagtggagtgcagtttcttgtataattttgaacatgtccatgtgcacctactctgctaattgtgtcatggactgacatgaattatgtcatgaactctgccaactgtgtcatgaactgggaagtggagtgcaccaaccgtgtcatgaacatgtccagtttactgcaactctgccaatgataataaaatgtccagtttgtaggactg

SEQ ID NO: 55479 - DNA, 2739 bp, Zea Mays
attgtgcagcccagcctaccgcgcctgtcatcttcttcgatgtgggcggtgccctccactccacgacggcgcgccgcactctgcccacgacctcgacctcctcccccatgaccacgacctcaaccgctctgccagctccgccacttacgcacgcacgacctcaacctcgcctgattcagcgcatagaagagcgtgtggcgtcgaggtcgagcgtgcggcgccgaggtcgagcgtgcgtcaccgagggagaggaaaaccactgagcgttatttcctaagcctcctgcttgatgtctccaccgtccctcaacgcaattgccgccgcccgggatgcgctccacccccgcccgctaatcgtccccttgcaactgccgccgcggccgccaatcggcccccaagaaccaaaggttcgagctccgcaggtggcaagctccttcttcatccacgccctccctccgccttgagaaccagaggaaaccagagtcaccaaaactacgggcaagactgtacgaagggaaacatagtactcccacgaagaagaagtgctgcaactgcaggaactccaaatgtttgaagttgtttcgagtggcttcgcatcgcaggctgccaagcccaccgagaagcaggtcaaggttgcaaacatactacttgctcatgttggatgacatggaagcagtaggttgaccaaggcaacagctgagatagctcgtgcagccaaccgatcatggcttgctcttcttatcgatactgcatgtgaccagttttcatttatcctacaaagtctgtttgatctcgctatggagcacaaccgcaataaggactcacaatgtaagagcttgaccttgctattcatgctggttcgtcttgctttacatttgcctgggtatcatttggttcacagtgaagtaaattataattgtttagtaaatatttcattttattttgttctacatgttcatcaaaaggtaggcaaggattgcattttctctactgcatatttagtcatctgcattccccaacttatgctgtaaattttgctaccaaattatgctgtagattttgctttgcgatatctcagtaattgcaggagcataatttggtagctaatgtgttattgttttggtcttcccaatgacgactgttgttggcacttggcaggatgattttgtacgtcgtttgtgccaaactgttttagttttgaccaggtttatatgaaaaatagttacacaagtacattgtaaaagttattttataattaatatagtgatactaatttagtgttctacatgttgatattttttactatactttagtcaaccctaacttcgttttgacccaagaattttggaatggacagaatggttctttcattaatccattgttttgttttatatgttgatcagcccatcacaatgcctttgacagtgactttgctttttaaggtgcagtcaatacacatggcatccatcaaattacagaagaagttatttgtaggtatctaagaagttggagttgcatcaaaaggcgagggtgtcgctaagttccaacatgcattaaaattctatttttgtgatataatattttattaaataatttgtgtgtctttgcaacgcactagcattacgcaaactcaaatagaaatttatatattatagtcattcttgtcattccgtatctatgttttattctaatttttaactttcgtggcaacgcacgggcacatacctattatttcatgatgtgtgatctctttctaagacttctatttccatctgaactacaatatatgatatttatcatcatttttttctagatccatctttcatcccatccactctctgaaaatctaagcttgaatgcccaatactaaattttgcattatggaagcagtttgaacaaagaacaatctctgtcactttgtgtggcccaccagtaaaaataagacaacttgttagtctgattatatgcttctttgattaagagggctatgttcaaataaaacattccagtaaactggacaaagtatcttgaactggaagaagcctttcaaaaatacacatcctttttctacagttcaataactcacaacttcaattctggatgcaagtgtttattattctacactctgctgattcagacctgaaaatgtttgcagttgcaaagagaatatcaaataaaatacttgttgagcttaagtttcttcatcaaatcatttttgggaggcttcaaatgcactataccatggtttggtgaaaggagagaagatgaaggtgctggtacatcacaatcaatactagaagcaagacagacgcacccactattgttactgaaggtcaagatgcacaagatgatctgacaacaccacatgcacctaagatgtccaaaaagattactccaaggaagaaaagcaattgaactaccttatgtatattcaaaattagtgtattatccactatgttgtgtcaagaactatgacttcaaaattagtgtgtcatgaactatgctgtttcatgaactatgtcttcaaattctgggaagtggagtgcagtttcttgtataattttgaacatgtccatgtgcacctactctgctaattgtgtcatggactgacatgaattatgtcatgaactctgccaactgtgtcatgaactgggaagtggagtgcaccaaccgtgtcatgaacatgtccagtttactgcaactctgccaatgataataaaatgtccagtttgtaggactg

SEQ ID NO: 55480 - DNA, 3013 bp, Zea Mays
attgtgcagcccagcctaccgcgcctgtcatcttcttcgatgtgggcggtgccctccactccacgacggcgcgccgcactctgcccacgacctcgacctcctcccccatgaccacgacctcaaccgctctgccagctccgccacttacgcacgcacgacctcaacctcgcctgattcagcgcatagaagagcgtgtggcgtcgaggtcgagcgtgcggcgccgaggtcgagcgtgcgtcaccgagggagaggaaaaccactgagcgttatttcctaagcctcctgcttgatgtctccaccgtccctcaacgcaattgccgccgcccgggatgcgctccacccccgcccgctaatcgtccccttgcaactgccgccgcggccgccaatcggcccccaagaaccaaaggttcgagctccgcaggtggcaagctccttcttcatccacgccctccctccgccttgagaaccagaggaaaccagagtcaccaaaactacgggcaagactgtacgaagggaaacatagtactcccacgaagaagaagtgctgcaactgcaggaactccaaatgtttgaagttgtttcgagtggcttcgcatcgcaggctgccaagcccaccgagaagcaggtcaaggttgcaaacatactacttgctcatgttggatgacatggaagcagtaggttgaccaaggcaacagctgagatagctcgtgcagccaaccgatcatggcttgctcttcttatcgatactgcatgtgaccagttttcatttatcctacaaagtctgtttgatctcgctatggagcacaaccgcaataaggactcacaatgtaagagcttgaccttgctattcatgctggttcgtcttgctttacatttgcctgggtatcatttggttcacagtgaagtaaattataattgtttagtaaatatttcattttattttgttctacatgttcatcaaaaggtaggcaaggattgcattttctctactgcatatttagtcatctgcattccccaacttatgctgtaaattttgctaccaaattatgctgtagattttgctttgcgatatctcagtaattgcaggagcataatttggtagctaatgtgttattgttttggtcttcccaatgacgactgttgttggcacttggcaggatgattttgtacgtcgtttgtgccaaactgttttagttttgaccaggtttatatgaaaaatagttacacaagtacattgtaaaagttattttataattaatatagtgatactaatttagtgttctacatgttgatattttttactatactttagtcaaccctaacttcgttttgacccaagaattttggaatggacagaatggttctttcattaatccattgttttgttttatatgttgatcagcccatcacaatgcctttgacagtgactttgctttttaaggtgcagtcaatacacatggcatccatcaaattacagaagaagttatttgtaggtatctaagaagttggagttgcatcaaaaggcgagggtgtcgctaagttccaacatgcattaaaattctatttttgtgatataatattttattaaataatttgtgtgtctttgcaacgcactagcattacgcaaactcaaatagaaatttatatattatagtcattcttgtcattccgtatctatgttttattctaatttttaactttcgtggcaacgcacgggcacatacctattatttcatgatgtgtgatctctttctaagacttctatttccatctgaactacaatatatgatatttatcatcatttttttctagatccatctttcatcccatccactctctgaaaatctaagcttgaatgcccaatactaaattttgcattatggaagcagtttgaacaaagaacaatctctgtcactttgtgtggcccaccagtaaaaataagacaacttgttagtctgattatatgcttctttgattaagagggctatgttcaaataaaacattccagtaaactggacaaagtatcttgaactggaagaagcctttcaaaaatacacatcctttttctacagttcaataactcacaacttcaattctggatgcaagtgtttattattctacactctgctgattcagacctgaaaatgtttgcagttgcaaagagaatatcaaataaaatacttgttgagcttaagtttcttcatcaaatcatttttgggaggcttcaaatgttctatgaacacaatgataataagatgagctacccagcaatggctcaacttctgtcaaatatactctactacaagagaaattgattgggataacatctctactactatgaagaatctaaggggtaggatgtctcccctggttcaattgaaagtagatgagaagagtaaggaacacaaaaaatacctaaggaggatgttgtatacctaaaagttggattgcaacttgagtatgataggggaactacgatggggaacagttggagtaatgatgctgcactataccatggtttggtgaaaggagagaagatgaaggtgctggtacatcacaatcaatactagaagcaagacagacgcacccactattgttactgaaggtcaagatgcacaagatgatctgacaacaccacatgcacctaagatgtccaaaaagattactccaaggaagaaaagcaattgaactaccttatgtatattcaaaattagtgtattatccactatgttgtgtcaagaactatgacttcaaaattagtgtgtcatgaactatgctgtttcatgaactatgtcttcaaattctgggaagtggagtgcagtttcttgtataattttgaacatgtccatgtgcacctactctgctaattgtgtcatggactgacatgaattatgtcatgaactctgccaactgtgtcatgaactgggaagtggagtgcaccaaccgtgtcatgaacatgtccagtttactgcaactctgccaatgataataaaatgtccagtttgtaggactg

SEQ ID NO: 55481 - DNA, 2382 bp, Zea Mays
attgtgcagcccagcctaccgcgcctgtcatcttcttcgatgtgggcggtgccctccactccacgacggcgcgccgcactctgcccacgacctcgacctcctcccccatgaccacgacctcaaccgctctgccagctccgccacttacgcacgcacgacctcaacctcgcctgattcagcgcatagaagagcgtgtggcgtcgaggtcgagcgtgcggcgccgaggtcgagcgtgcgtcaccgagggagaggaaaaccactgagcgttatttcctaagcctcctgcttgatgtctccaccgtccctcaacgcaattgccgccgcccgggatgcgctccacccccgcccgctaatcgtccccttgcaactgccgccgcggccgccaatcggcccccaagaaccaaaggttcgagctccgcaggtggcaagctccttcttcatccacgccctccctccgccttgagaaccagaggaaaccagagtcaccaaaactacgggcaagactgtacgaagggaaacatagtactcccacgaagaagaagtgctgcaactgcaggaactccaaatgtttgaagttgtttcgagtggcttcgcatcgcaggctgccaagcccaccgagaagcaggtcaaggttgcaaacatactacttgctcatgttggatgacatggaagcagtaggttgaccaaggcaacagctgagatagctcgtgcagccaaccgatcatggcttgctcttcttatcgatactgcatgtgaccagttttcatttatcctacaaagtctgtttgatctcgctatggagcacaaccgcaataaggactcacaatgtaagagcttgaccttgctattcatgctggttcgtcttgctttacatttgcctgggtatcatttggttcacagtgaagtaaattataattgtttagtaaatatttcattttattttgttctacatgttcatcaaaaggtaggcaaggattgcattttctctactgcatatttagtcatctgcattccccaacttatgctgtaaattttgctaccaaattatgctgtagattttgctttgcgatatctcagtaattgcaggagcataatttggtagctaatgtgttattgttttggtcttcccaatgacgactgttgttggcacttggcaggatgattttgtacgtcgtttgtgccaaactgttttagttttgaccaggtttatatgaaaaatagttacacaagtacattgtaaaagttattttataattaatatagtgatactaatttagtgttctacatgttgatattttttactatactttagtcaaccctaacttcgttttgacccaagaattttggaatggacagaatggttctttcattaatccattgttttgttttatatgttgatcagcccatcacaatgcctttgacagtgactttgctttttaaggtgcagtcaatacacatggcatccatcaaattacagaagaagttatttgtaggtatctaagaagttggagttgcatcaaaagttgcaaagagaatatcaaataaaatacttgttgagcttaagtttcttcatcaaatcatttttgggaggcttcaaatgttctatgaacacaatgataataagatgagctacccagcaatggctcaacttctgtcaaatatactctactacaagagaaattgattgggataacatctctactactatgaagaatctaaggggtaggatgtctcccctggttcaattgaaagtagatgagaagagtaaggaacacaaaaaatacctaaggaggatgttgtatacctaaaagttggattgcaacttgagtatgataggggaactacgatggggaacagttggagtaatgatgctgcactataccatggtttggtgaaaggagagaagatgaaggtgctggtacatcacaatcaatactagaagcaagacagacgcacccactattgttactgaaggtcaagatgcacaagatgatctgacaacaccacatgcacctaagatgtccaaaaagattactccaaggaagaaaagcaattgaactaccttatgtatattcaaaattagtgtattatccactatgttgtgtcaagaactatgacttcaaaattagtgtgtcatgaactatgctgtttcatgaactatgtcttcaaattctgggaagtggagtgcagtttcttgtataattttgaacatgtccatgtgcacctactctgctaattgtgtcatggactgacatgaattatgtcatgaactctgccaactgtgtcatgaactgggaagtggagtgcaccaaccgtgtcatgaacatgtccagtttactgcaactctgccaatgataataaaatgtccagtttgtaggactg

SEQ ID NO: 55482 - DNA, 3162 bp, Zea Mays
attgtgcagcccagcctaccgcgcctgtcatcttcttcgatgtgggcggtgccctccactccacgacggcgcgccgcactctgcccacgacctcgacctcctcccccatgaccacgacctcaaccgctctgccagctccgccacttacgcacgcacgacctcaacctcgcctgattcagcgcatagaagagcgtgtggcgtcgaggtcgagcgtgcggcgccgaggtcgagcgtgcgtcaccgagggagaggaaaaccactgagcgttatttcctaagcctcctgcttgatgtctccaccgtccctcaacgcaattgccgccgcccgggatgcgctccacccccgcccgctaatcgtccccttgcaactgccgccgcggccgccaatcggcccccaagaaccaaaggttcgagctccgcaggtggcaagctccttcttcatccacgccctccctccgccttgagaaccagaggaaaccagagtcaccaaaactacgggcaagactgtacgaagggaaacatagtactcccacgaagaagaagtgctgcaactgcaggaactccaaatgtttgaagttgtttcgagtggcttcgcatcgcaggctgccaagcccaccgagaagcaggtcaaggttgcaaacatactacttgctcatgttggatgacatggaagcagtaggttgaccaaggcaacagctgagatagctcgtgcagccaaccgatcatggcttgctcttcttatcgatactgcatgtgaccagttttcatttatcctacaaagtctgtttgatctcgctatggagcacaaccgcaataaggactcacaatgtaagagcttgaccttgctattcatgctggttcgtcttgctttacatttgcctgggtatcatttggttcacagtgaagtaaattataattgtttagtaaatatttcattttattttgttctacatgttcatcaaaaggtaggcaaggattgcattttctctactgcatatttagtcatctgcattccccaacttatgctgtaaattttgctaccaaattatgctgtagattttgctttgcgatatctcagtaattgcaggagcataatttggtagctaatgtgttattgttttggtcttcccaatgacgactgttgttggcacttggcaggatgattttgtacgtcgtttgtgccaaactgttttagttttgaccaggtttatatgaaaaatagttacacaagtacattgtaaaagttattttataattaatatagtgatactaatttagtgttctacatgttgatattttttactatactttagtcaaccctaacttcgttttgacccaagaattttggaatggacagaatggttctttcattaatccattgttttgttttatatgttgatcagcccatcacaatgcctttgacagtgactttgctttttaaggtgcagtcaatacacatggcatccatcaaattacagaagaagttatttgtagttgcaaagagaatatcaaataaaatacttgttgagcttaagtttcttcatcaaatcatttttgggaggcttcaaatggtaattagtatgtaaatattgtgcttttgcaatggatgatgcatatttctgttatggtttttctagacttcagttaatcatttcatccgagtcatttaaaagcatagtaaaatgtgtgatgggatcatgattgatatttgtaaagaatacgttcttatatttaatgattccttgtatgtgggtcatgaatacataattcacttgacctaaatgacatttttagtaacttgtattattcatgcctgcggaccaaacaatgtaatgtatttttgttggctttgttgattatgtttgtctgattcaaaccaaacagtgtaatgtaatgtaatgaggaagtactactggagccaaaccaaacaaatagtgtattttgttctcttgtaattgttactgtcggcaaaggtcccattaccatacgtatataaacactgacagactgttatttcaagaccatacttcctcatctgcaagtcactaggatctgttggcatagctatgtattattcaaggaccaccatttcctaaatggtgttttcaatagctatgtattatttagttttgatcatgactacattgataatatagctagctagaataatgtgagtaagtgttgtgtcaccttgaaccatattagtataggtttgtgatgcttttttgcattttcaccttttcagttctatgaacacaatgataataagatgagctacccagcaatggctcaacttctgtcaaatatactctactacaagagaaattgattgggataacatctctactactatgaagaatctaaggggtaggatgtctcccctggttcaattgaaagtagatgagaagagtaaggaacacaaaaaatacctaaggaggatgttgtatacctaaaagttggattgcaacttgagtatgataggggaactacgatggggaacagttggagtaatgatgctggtactaaaattttttctatgcctgatgatgagtacatatcagaagatacaattgttgtttatgataagctaaatcctgtaaatccaaacttctatttaacatgactctctttatttccactttacatgaaaagtagcactataccatggtttggtgaaaggagagaagatgaaggtgctggtacatcacaatcaatactagaagcaagacagacgcacccactattgttactgaaggtcaagatgcacaagatgatctgacaacaccacatgcacctaagatgtccaaaaagattactccaaggaagaaaagcaattgaactaccttatgtatattcaaaattagtgtattatccactatgttgtgtcaagaactatgacttcaaaattagtgtgtcatgaactatgctgtttcatgaactatgtcttcaaattctgggaagtggagtgcagtttcttgtataattttgaacatgtccatgtgcacctactctgctaattgtgtcatggactgacatgaattatgtcatgaactctgccaactgtgtcatgaactgggaagtggagtgcaccaaccgtgtcatgaacatgtccagtttactgcaactctgccaatgataataaaatgtccagtttgtaggactg

SEQ ID NO: 55483 - DNA, 1822 bp, Zea Mays
attgtgcagcccagcctaccgcgcctgtcatcttcttcgatgtgggcggtgccctccactccacgacggcgcgccgcactctgcccacgacctcgacctcctcccccatgaccacgacctcaaccgctctgccagctccgccacttacgcacgcacgacctcaacctcgcctgattcagcgcatagaagagcgtgtggcgtcgaggtcgagcgtgcggcgccgaggtcgagcgtgcgtcaccgagggagaggaaaaccactgagcgttatttcctaagcctcctgcttgatgtctccaccgtccctcaacgcaattgccgccgcccgggatgcgctccacccccgcccgctaatcgtccccttgcaactgccgccgcggccgccaatcggcccccaagaaccaaaggttcgagctccgcaggtggcaagctccttcttcatccacgccctccctccgccttgagaaccagaggaaaccagagtcaccaaaactacgggcaagactgtacgaagggaaacatagtactcccacgaagaagaagtgctgcaactgcaggaactccaaatgtttgaagttgtttcgagtggcttcgcatcgcaggctgccaagcccaccgagaagcaggtcaaggttgcaaacatactacttgctcatgttggatgacatggaagcagtaggttgaccaaggcaacagctgagatagctcgtgcagccaaccgatcatggcttgctcttcttatcgatactgcatgtgaccagttttcatttatcctacaaagtctgtttgatctcgctatggagcacaaccgcaataaggactcacaatttgcaaagagaatatcaaataaaatacttgttgagcttaagtttcttcatcaaatcatttttgggaggcttcaaatgttctatgaacacaatgataataagatgagctacccagcaatggctcaacttctgtcaaatatactctactacaagagaaattgattgggataacatctctactactatgaagaatctaaggggtaggatgtctcccctggttcaattgaaagtagatgagaagagtaaggaacacaaaaaatacctaaggaggatgttgtatacctaaaagttggattgcaacttgagtatgataggggaactacgatggggaacagttggagtaatgatgctggtactaaaattttttctatgcctgatgatgagtacatatcagaagatacaattgttgtttatgataagctaaatcctgtaaatccaaacttctatttaacatgactctctttatttccactttacatgaaaagtagcactataccatggtttggtgaaaggagagaagatgaaggtgctggtacatcacaatcaatactagaagcaagacagacgcacccactattgttactgaaggtcaagatgcacaagatgatctgacaacaccacatgcacctaagatgtccaaaaagattactccaaggaagaaaagcaattgaactaccttatgtatattcaaaattagtgtattatccactatgttgtgtcaagaactatgacttcaaaattagtgtgtcatgaactatgctgtttcatgaactatgtcttcaaattctgggaagtggagtgcagtttcttgtataattttgaacatgtccatgtgcacctactctgctaattgtgtcatggactgacatgaattatgtcatgaactctgccaactgtgtcatgaactgggaagtggagtgcaccaaccgtgtcatgaacatgtccagtttactgcaactctgccaatgataataaaatgtccagtttgtaggactg

SEQ ID NO: 55484 - DNA, 3514 bp, Zea Mays
attgtgcagcccagcctaccgcgcctgtcatcttcttcgatgtgggcggtgccctccactccacgacggcgcgccgcactctgcccacgacctcgacctcctcccccatgaccacgacctcaaccgctctgccagctccgccacttacgcacgcacgacctcaacctcgcctgattcagcgcatagaagagcgtgtggcgtcgaggtcgagcgtgcggcgccgaggtcgagcgtgcgtcaccgagggagaggaaaaccactgagcgttatttcctaagcctcctgcttgatgtctccaccgtccctcaacgcaattgccgccgcccgggatgcgctccacccccgcccgctaatcgtccccttgcaactgccgccgcggccgccaatcggcccccaagaaccaaaggttcgagctccgcaggtggcaagctccttcttcatccacgccctccctccgccttgagaaccagaggaaaccagagtcaccaaaactacgggcaagactgtacgaagggaaacatagtactcccacgaagaagaagtgctgcaactgcaggaactccaaatgtttgaagttgtttcgagtggcttcgcatcgcaggctgccaagcccaccgagaagcaggtcaaggtacttgccttatccgtgatgagcgaatgtagttgtaaaatgggaaacgttgctgttttattatatggccgggagtggtgaactggtgataggctactcttgtcagtgcatatgtattatttgcaacccatggattatgcaactatttctctattatatttatattttttccctgatagtgccttcatgttttgtgttgtgctttcacatcttgatattatgtgcctcagtcaaagtttcatatttgtttctattgttttcttggttcaaatcatgcgttgcttgatggtgctgctgatttagctctagagatatgggggaaactacggaggaggaacaaatacatagtgatattgccagctggcctggcattaatatgtctgtaaaacctaccaactccagccttaagttgtatggtggtgcagcttttgggagacatgcatgatttcattgtgtaatgtatttaatgaaatgcccacaagtccagtctcaagggagaaggttgcaaacatactacttgctcatgttggatgacatggaagcagtaggttgaccaaggcaacagctgagatagctcgtgcagccaaccgatcatggcttgctcttcttatcgatactgcatgtgaccagttttcatttatcctacaaagtctgtttgatctcgctatggagcacaaccgcaataaggactcacaatgtaagagcttgaccttgctattcatgctggttcgtcttgctttacatttgcctgggtatcatttggttcacagtgaagtaaattataattgtttagtaaatatttcattttattttgttctacatgttcatcaaaaggtaggcaaggattgcattttctctactgcatatttagtcatctgcattccccaacttatgctgtaaattttgctaccaaattatgctgtagattttgctttgcgatatctcagtaattgcaggagcataatttggtagctaatgtgttattgttttggtcttcccaatgacgactgttgttggcacttggcaggatgattttgtacgtcgtttgtgccaaactgttttagttttgaccaggtttatatgaaaaatagttacacaagtacattgtaaaagttattttataattaatatagtgatactaatttagtgttctacatgttgatattttttactatactttagtcaaccctaacttcgttttgacccaagaattttggaatggacagaatggttctttcattaatccattgttttgttttatatgttgatcagcccatcacaatgcctttgacagtgactttgctttttaaggtgcagtcaatacacatggcatccatcaaattacagaagaagttatttgtaggtatctaagaagttggagttgcatcaaaaggcgagggtgtcgctaagttccaacatgcattaaaattctatttttgtgatataatattttattaaataatttgtgtgtctttgcaacgcactagcattacgcaaactcaaatagaaatttatatattatagtcattcttgtcattccgtatctatgttttattctaatttttaactttcgtggcaacgcacgggcacatacctattatttcatgatgtgtgatctctttctaagacttctatttccatctgaactacaatatatgatatttatcatcatttttttctagatccatctttcatcccatccactctctgaaaatctaagcttgaatgcccaatactaaattttgcattatggaagcagtttgaacaaagaacaatctctgtcactttgtgtggcccaccagtaaaaataagacaacttgttagtctgattatatgcttctttgattaagagggctatgttcaaataaaacattccagtaaactggacaaagtatcttgaactggaagaagcctttcaaaaatacacatcctttttctacagttcaataactcacaacttcaattctggatgcaagtgtttattattctacactctgctgattcagacctgaaaatgtttgcagttgcaaagagaatatcaaataaaatacttgttgagcttaagtttcttcatcaaatcatttttgggaggcttcaaatgttctatgaacacaatgataataagatgagctacccagcaatggctcaacttctgtcaaatatactctactacaagagaaattgattgggataacatctctactactatgaagaatctaaggggtaggatgtctcccctggttcaattgaaagtagatgagaagagtaaggaacacaaaaaatacctaaggaggatgttgtatacctaaaagttggattgcaacttgagtatgataggggaactacgatggggaacagttggagtaatgatgctgcactataccatggtttggtgaaaggagagaagatgaaggtgctggtacatcacaatcaatactagaagcaagacagacgcacccactattgttactgaaggtcaagatgcacaagatgatctgacaacaccacatgcacctaagatgtccaaaaagattactccaaggaagaaaagcaattgaactaccttatgtatattcaaaattagtgtattatccactatgttgtgtcaagaactatgacttcaaaattagtgtgtcatgaactatgctgtttcatgaactatgtcttcaaattctgggaagtggagtgcagtttcttgtataattttgaacatgtccatgtgcacctactctgctaattgtgtcatggactgacatgaattatgtcatgaactctgccaactgtgtcatgaactgggaagtggagtgcaccaaccgtgtcatgaacatgtccagtttactgcaactctgccaatgataataaaatgtccagtttgtaggactg

SEQ ID NO: 55485 - DNA, 1490 bp, Zea Mays
attgtgcagcccagcctaccgcgcctgtcatcttcttcgatgtgggcggtgccctccactccacgacggcgcgccgcactctgcccacgacctcgacctcctcccccatgaccacgacctcaaccgctctgccagctccgccacttacgcacgcacgacctcaacctcgcctgattcagcgcatagaagagcgtgtggcgtcgaggtcgagcgtgcggcgccgaggtcgagcgtgcgtcaccgagggagaggaaaaccactgagcgttatttcctaagcctcctgcttgatgtctccaccgtccctcaacgcaattgccgccgcccgggatgcgctccacccccgcccgctaatcgtccccttgcaactgccgccgcggccgccaatcggcccccaagaaccaaaggttcgagctccgcaggtggcaagctccttcttcatccacgccctccctccgccttgagaaccagaggaaaccagagtcaccaaaactacgggcaagactgtacgaagggaaacatagtactcccacgaagaagaagtgctgcaactgcaggaactccaaatgtttgaagttgtttcgagtggcttcgcatcgcaggctgccaagcccaccgagaagcaggtcaagttgcaaagagaatatcaaataaaatacttgttgagcttaagtttcttcatcaaatcatttttgggaggcttcaaatgttctatgaacacaatgataataagatgagctacccagcaatggctcaacttctgtcaaatatactctactacaagagaaattgattgggataacatctctactactatgaagaatctaaggggtaggatgtctcccctggttcaattgaaagtagatgagaagagtaaggaacacaaaaaatacctaaggaggatgttgtatacctaaaagttggattgcaacttgagtatgataggggaactacgatggggaacagttggagtaatgatgctgcactataccatggtttggtgaaaggagagaagatgaaggtgctggtacatcacaatcaatactagaagcaagacagacgcacccactattgttactgaaggtcaagatgcacaagatgatctgacaacaccacatgcacctaagatgtccaaaaagattactccaaggaagaaaagcaattgaactaccttatgtatattcaaaattagtgtattatccactatgttgtgtcaagaactatgacttcaaaattagtgtgtcatgaactatgctgtttcatgaactatgtcttcaaattctgggaagtggagtgcagtttcttgtataattttgaacatgtccatgtgcacctactctgctaattgtgtcatggactgacatgaattatgtcatgaactctgccaactgtgtcatgaactgggaagtggagtgcaccaaccgtgtcatgaacatgtccagtttactgcaactctgccaatgataataaaatgtccagtttgtaggactg

SEQ ID NO: 55486 - DNA, 2393 bp, Zea Mays
attgtgcagcccagcctaccgcgcctgtcatcttcttcgatgtgggcggtgccctccactccacgacggcgcgccgcactctgcccacgacctcgacctcctcccccatgaccacgacctcaaccgctctgccagctccgccacttacgcacgcacgacctcaacctcgcctgattcagcgcatagaagagcgtgtggcgtcgaggtcgagcgtgcggcgccgaggtcgagcgtgcgtcaccgagggagaggaaaaccactgagcgttatttcctaagcctcctgcttgatgtctccaccgtccctcaacgcaattgccgccgcccgggatgcgctccacccccgcccgctaatcgtccccttgcaactgccgccgcggccgccaatcggcccccaagaaccaaaggttcgagctccgcaggtggcaagctccttcttcatccacgccctccctccgccttgagaaccagaggaaaccagagtcaccaaaactacgggcaagactgtacgaagggaaacatagtactcccacgaagaagaagtgctgcaactgcaggaactccaaatgtttgaagttgtttcgagtggcttcgcatcgcaggctgccaagcccaccgagaagcaggtcaaggttgcaaacatactacttgctcatgttggatgacatggaagcagtaggttgaccaaggcaacagctgagatagctcgtgcagccaaccgatcatggcttgctcttcttatcgatactgcatgtgaccagttttcatttatcctacaaagtctgtttgatctcgctatggagcacaaccgcaataaggactcacaattcaatacacatggcatccatcaaattacagaagaagttatttgtaggtatctaagaagttggagttgcatcaaaaggcgagggtgtcgctaagttccaacatgcattaaaattctatttttgtgatataatattttattaaataatttgtgtgtctttgcaacgcactagcattacgcaaactcaaatagaaatttatatattatagtcattcttgtcattccgtatctatgttttattctaatttttaactttcgtggcaacgcacgggcacatacctattatttcatgatgtgtgatctctttctaagacttctatttccatctgaactacaatatatgatatttatcatcatttttttctagatccatctttcatcccatccactctctgaaaatctaagcttgaatgcccaatactaaattttgcattatggaagcagtttgaacaaagaacaatctctgtcactttgtgtggcccaccagtaaaaataagacaacttgttagtctgattatatgcttctttgattaagagggctatgttcaaataaaacattccagtaaactggacaaagtatcttgaactggaagaagcctttcaaaaatacacatcctttttctacagttcaataactcacaacttcaattctggatgcaagtgtttattattctacactctgctgattcagacctgaaaatgtttgcagttgcaaagagaatatcaaataaaatacttgttgagcttaagtttcttcatcaaatcatttttgggaggcttcaaatgttctatgaacacaatgataataagatgagctacccagcaatggctcaacttctgtcaaatatactctactacaagagaaattgattgggataacatctctactactatgaagaatctaaggggtaggatgtctcccctggttcaattgaaagtagatgagaagagtaaggaacacaaaaaatacctaaggaggatgttgtatacctaaaagttggattgcaacttgagtatgataggggaactacgatggggaacagttggagtaatgatgctgcactataccatggtttggtgaaaggagagaagatgaaggtgctggtacatcacaatcaatactagaagcaagacagacgcacccactattgttactgaaggtcaagatgcacaagatgatctgacaacaccacatgcacctaagatgtccaaaaagattactccaaggaagaaaagcaattgaactaccttatgtatattcaaaattagtgtattatccactatgttgtgtcaagaactatgacttcaaaattagtgtgtcatgaactatgctgtttcatgaactatgtcttcaaattctgggaagtggagtgcagtttcttgtataattttgaacatgtccatgtgcacctactctgctaattgtgtcatggactgacatgaattatgtcatgaactctgccaactgtgtcatgaactgggaagtggagtgcaccaaccgtgtcatgaacatgtccagtttactgcaactctgccaatgataataaaatgtccagtttgtaggactg

SEQ ID NO: 55487 - DNA, 4259 bp, Zea Mays
attgtgcagcccagcctaccgcgcctgtcatcttcttcgatgtgggcggtgccctccactccacgacggcgcgccgcactctgcccacgacctcgacctcctcccccatgaccacgacctcaaccgctctgccagctccgccacttacgcacgcacgacctcaacctcgcctgattcagcgcatagaagagcgtgtggcgtcgaggtcgagcgtgcggcgccgaggtcgagcgtgcgtcaccgagggagaggaaaaccactgagcgttatttcctaagcctcctgcttgatgtctccaccgtccctcaacgcaattgccgccgcccgggatgcgctccacccccgcccgctaatcgtccccttgcaactgccgccgcggccgccaatcggcccccaagaaccaaaggttcgagctccgcaggtggcaagctccttcttcatccacgccctccctccgccttgagaaccagaggaaaccagagtcaccaaaactacgggcaagactgtacgaagggaaacatagtactcccacgaagaagaagtgctgcaactgcaggaactccaaatgtttgaagttgtttcgagtggcttcgcatcgcaggctgccaagcccaccgagaagcaggtcaaggtacttgccttatccgtgatgagcgaatgtagttgtaaaatgggaaacgttgctgttttattatatggccgggagtggtgaactggtgataggctactcttgtcagtgcatatgtattatttgcaacccatggattatgcaactatttctctattatatttatattttttccctgatagtgccttcatgttttgtgttgtgctttcacatcttgatattatgtgcctcagtcaaagtttcatatttgtttctattgttttcttggttcaaatcatgcgttgcttgatggtgctgctgatttagctctagagatatgggggaaactacggaggaggaacaaatacatagtgatattgccagctggcctggcattaatatgtctgtaaaacctaccaactccagccttaagttgtatggtggtgcagcttttgggagacatgcatgatttcattgtgtaatgtatttaatgaaatgcccacaagtccagtctcaagggagaaggtagtctttagcctgcaaccatacacatacacaatttattacgagaattgcttatataattatgtcattaggttgcaaacatactacttgctcatgttggatgacatggaagcagtaggttgaccaaggcaacagctgagatagctcgtgcagccaaccgatcatggcttgctcttcttatcgatactgcatgtgaccagttttcatttatcctacaaagtctgtttgatctcgctatggagcacaaccgcaataaggactcacaatgtaagagcttgaccttgctattcatgctggttcgtcttgctttacatttgcctgggtatcatttggttcacagtgaagtaaattataattgtttagtaaatatttcattttattttgttctacatgttcatcaaaaggtaggcaaggattgcattttctctactgcatatttagtcatctgcattccccaacttatgctgtaaattttgctaccaaattatgctgtagattttgctttgcgatatctcagtaattgcaggagcataatttggtagctaatgtgttattgttttggtcttcccaatgacgactgttgttggcacttggcaggatgattttgtacgtcgtttgtgccaaactgttttagttttgaccaggtttatatgaaaaatagttacacaagtacattgtaaaagttattttataattaatatagtgatactaatttagtgttctacatgttgatattttttactatactttagtcaaccctaacttcgttttgacccaagaattttggaatggacagaatggttctttcattaatccattgttttgttttatatgttgatcagcccatcacaatgcctttgacagtgactttgctttttaaggtgcagtcaatacacatggcatccatcaaattacagaagaagttatttgtaggtatctaagaagttggagttgcatcaaaaggcgagggtgtcgctaagttccaacatgcattaaaattctatttttgtgatataatattttattaaataatttgtgtgtctttgcaacgcactagcattacgcaaactcaaatagaaatttatatattatagtcattcttgtcattccgtatctatgttttattctaatttttaactttcgtggcaacgcacgggcacatacctattatttcatgatgtgtgatctctttctaagacttctatttccatctgaactacaatatatgatatttatcatcatttttttctagatccatctttcatcccatccactctctgaaaatctaagcttgaatgcccaatactaaattttgcattatggaagcagtttgaacaaagaacaatctctgtcactttgtgtggcccaccagtaaaaataagacaacttgttagtctgattatatgcttctttgattaagagggctatgttcaaataaaacattccagtaaactggacaaagtatcttgaactggaagaagcctttcaaaaatacacatcctttttctacagttcaataactcacaacttcaattctggatgcaagtgtttattattctacactctgctgattcagacctgaaaatgtttgcagttgcaaagagaatatcaaataaaatacttgttgagcttaagtttcttcatcaaatcatttttgggaggcttcaaatggtaattagtatgtaaatattgtgcttttgcaatggatgatgcatatttctgttatggtttttctagacttcagttaatcatttcatccgagtcatttaaaagcatagtaaaatgtgtgatgggatcatgattgatatttgtaaagaatacgttcttatatttaatgattccttgtatgtgggtcatgaatacataattcacttgacctaaatgacatttttagtaacttgtattattcatgcctgcggaccaaacaatgtaatgtatttttgttggctttgttgattatgtttgtctgattcaaaccaaacagtgtaatgtaatgtaatgaggaagtactactggagccaaaccaaacaaatagtgtattttgttctcttgtaattgttactgtcggcaaaggtcccattaccatacgtatataaacactgacagactgttatttcaagaccatacttcctcatctgcaagtcactaggatctgttggcatagctatgtattattcaaggaccaccatttcctaaatggtgttttcaatagctatgtattatttagttttgatcatgactacattgataatatagctagctagaataatgtgagtaagtgttgtgtcaccttgaaccatattagtataggtttgtgatgcttttttgcattttcaccttttcagttctatgaacacaatgataataagatgagctacccagcaatggctcaacttctgtcaaatatactctactacaagagaaattgattgggataacatctctactactatgaagaatctaaggggtaggatgtctcccctggttcaattgaaagtagatgagaagagtaaggaacacaaaaaatacctaaggaggatgttgtatacctaaaagttggattgcaacttgagtatgataggggaactacgatggggaacagttggagtaatgatgctgcactataccatggtttggtgaaaggagagaagatgaaggtgctggtacatcacaatcaatactagaagcaagacagacgcacccactattgttactgaaggtcaagatgcacaagatgatctgacaacaccacatgcacctaagatgtccaaaaagattactccaaggaagaaaagcaattgaactaccttatgtatattcaaaattagtgtattatccactatgttgtgtcaagaactatgacttcaaaattagtgtgtcatgaactatgctgtttcatgaactatgtcttcaaattctgggaagtggagtgcagtttcttgtataattttgaacatgtccatgtgcacctactctgctaattgtgtcatggactgacatgaattatgtcatgaactctgccaactgtgtcatgaactgggaagtggagtgcaccaaccgtgtcatgaacatgtccagtttactgcaactctgccaatgataataaaatgtccagtttgtaggactg

SEQ ID NO: 55488 - DNA, 3792 bp, Zea Mays
attgtgcagcccagcctaccgcgcctgtcatcttcttcgatgtgggcggtgccctccactccacgacggcgcgccgcactctgcccacgacctcgacctcctcccccatgaccacgacctcaaccgctctgccagctccgccacttacgcacgcacgacctcaacctcgcctgattcagcgcatagaagagcgtgtggcgtcgaggtcgagcgtgcggcgccgaggtcgagcgtgcgtcaccgagggagaggaaaaccactgagcgttatttcctaagcctcctgcttgatgtctccaccgtccctcaacgcaattgccgccgcccgggatgcgctccacccccgcccgctaatcgtccccttgcaactgccgccgcggccgccaatcggcccccaagaaccaaaggttcgagctccgcaggtgcatcgacgagaccgcgtagcctgcctgaaagatcaggtggtggggcatgtgtcgctgccgcggcacgcggtgccgctggcggtctctgtactgcagcttcgtccggtgccgccgcagccagtccagcgcccccccggtcgccgttcccttgaaaccagagtcaccaaaactacgggcaagactgtacgaagggaaacatagtactcccacgaagaagaagtgctgcaactgcaggaactccaaatgtttgaagttgtttcgagtggcttcgcatcgcaggctgccaagcccaccgagaagcaggtcaaggttgcaaacatactacttgctcatgttggatgacatggaagcagtaggttgaccaaggcaacagctgagatagctcgtgcagccaaccgatcatggcttgctcttcttatcgatactgcatgtgaccagttttcatttatcctacaaagtctgtttgatctcgctatggagcacaaccgcaataaggactcacaatgtaagagcttgaccttgctattcatgctggttcgtcttgctttacatttgcctgggtatcatttggttcacagtgaagtaaattataattgtttagtaaatatttcattttattttgttctacatgttcatcaaaaggtaggcaaggattgcattttctctactgcatatttagtcatctgcattccccaacttatgctgtaaattttgctaccaaattatgctgtagattttgctttgcgatatctcagtaattgcaggagcataatttggtagctaatgtgttattgttttggtcttcccaatgacgactgttgttggcacttggcaggatgattttgtacgtcgtttgtgccaaactgttttagttttgaccaggtttatatgaaaaatagttacacaagtacattgtaaaagttattttataattaatatagtgatactaatttagtgttctacatgttgatattttttactatactttagtcaaccctaacttcgttttgacccaagaattttggaatggacagaatggttctttcattaatccattgttttgttttatatgttgatcagcccatcacaatgcctttgacagtgactttgctttttaaggtgcagtcaatacacatggcatccatcaaattacagaagaagttatttgtaggtatctaagaagttggagttgcatcaaaaggcgagggtgtcgctaagttccaacatgcattaaaattctatttttgtgatataatattttattaaataatttgtgtgtctttgcaacgcactagcattacgcaaactcaaatagaaatttatatattatagtcattcttgtcattccgtatctatgttttattctaatttttaactttcgtggcaacgcacgggcacatacctattatttcatgatgtgtgatctctttctaagacttctatttccatctgaactacaatatatgatatttatcatcatttttttctagatccatctttcatcccatccactctctgaaaatctaagcttgaatgcccaatactaaattttgcattatggaagcagtttgaacaaagaacaatctctgtcactttgtgtggcccaccagtaaaaataagacaacttgttagtctgattatatgcttctttgattaagagggctatgttcaaataaaacattccagtaaactggacaaagtatcttgaactggaagaagcctttcaaaaatacacatcctttttctacagttcaataactcacaacttcaattctggatgcaagtgtttattattctacactctgctgattcagacctgaaaatgtttgcagttgcaaagagaatatcaaataaaatacttgttgagcttaagtttcttcatcaaatcatttttgggaggcttcaaatggtaattagtatgtaaatattgtgcttttgcaatggatgatgcatatttctgttatggtttttctagacttcagttaatcatttcatccgagtcatttaaaagcatagtaaaatgtgtgatgggatcatgattgatatttgtaaagaatacgttcttatatttaatgattccttgtatgtgggtcatgaatacataattcacttgacctaaatgacatttttagtaacttgtattattcatgcctgcggaccaaacaatgtaatgtatttttgttggctttgttgattatgtttgtctgattcaaaccaaacagtgtaatgtaatgtaatgaggaagtactactggagccaaaccaaacaaatagtgtattttgttctcttgtaattgttactgtcggcaaaggtcccattaccatacgtatataaacactgacagactgttatttcaagaccatacttcctcatctgcaagtcactaggatctgttggcatagctatgtattattcaaggaccaccatttcctaaatggtgttttcaatagctatgtattatttagttttgatcatgactacattgataatatagctagctagaataatgtgagtaagtgttgtgtcaccttgaaccatattagtataggtttgtgatgcttttttgcattttcaccttttcagttctatgaacacaatgataataagatgagctacccagcaatggctcaacttctgtcaaatatactctactacaagagaaattgattgggataacatctctactactatgaagaatctaaggggtaggatgtctcccctggttcaattgaaagtagatgagaagagtaaggaacacaaaaaatacctaaggaggatgttgtatacctaaaagttggattgcaacttgagtatgataggggaactacgatggggaacagttggagtaatgatgctgtagcactataccatggtttggtgaaaggagagaagatgaaggtgctggtacatcacaatcaatactagaagcaagacagacgcacccactattgttactgaaggtcaagatgcacaagatgatctgacaacaccacatgcacctaagatgtccaaaaagattactccaaggaagaaaagcaattgaactaccttatgtatattcaaaattagtgtattatccactatgttgtgtcaagaactatgacttcaaaattagtgtgtcatgaactatgctgtttcatgaactatgtcttcaaattctgggaagtggagtgcagtttcttgtataattttgaacatgtccatgtgcacctactctgctaattgtgtcatggactgacatgaattatgtcatgaactctgccaactgtgtcatgaactgggaagtggagtgcaccaaccgtgtcatgaacatgtccagtttactgcaactctgccaatgataataaaatgtccagtttgtaggactg

SEQ ID NO: 55489 - DNA, 2590 bp, Zea Mays
attgtgcagcccagcctaccgcgcctgtcatcttcttcgatgtgggcggtgccctccactccacgacggcgcgccgcactctgcccacgacctcgacctcctcccccatgaccacgacctcaaccgctctgccagctccgccacttacgcacgcacgacctcaacctcgcctgattcagcgcatagaagagcgtgtggcgtcgaggtcgagcgtgcggcgccgaggtcgagcgtgcgtcaccgagggagaggaaaaccactgagcgttatttcctaagcctcctgcttgatgtctccaccgtccctcaacgcaattgccgccgcccgggatgcgctccacccccgcccgctaatcgtccccttgcaactgccgccgcggccgccaatcggcccccaagaaccaaaggttcgagctccgcaggtgcatcgacgagaccgcgtagcctgcctgaaagatcaggtggtggggcatgtgtcgctgccgcggcacgcggtgccgctggcggtctctgtactgcagcttcgtccggtgccgccgcagccagtccagcgcccccccggtcgccgttcccttgaaaccagagtcaccaaaactacgggcaagactgtacgaagggaaacatagtactcccacgaagaagaagtgctgcaactgcaggaactccaaatgtttgaagttgtttcgagtggcttcgcatcgcaggctgccaagcccaccgagaagcaggtcaaggttgcaaacatactacttgctcatgttggatgacatggaagcagtaggttgaccaaggcaacagctgagatagctcgtgcagccaaccgatcatggcttgctcttcttatcgatactgcatgtgaccagttttcatttatcctacaaagtctgtttgatctcgctatggagcacaaccgcaataaggactcacaatgtaagagcttgaccttgctattcatgctggttcgtcttgctttacatttgcctgggtatcatttggttcacagtgaagtaaattataattgtttagtaaatatttcattttattttgttctacatgttcatcaaaaggtaggcaaggattgcattttctctactgcatatttagtcatctgcattccccaacttatgctgtaaattttgctaccaaattatgctgtagattttgctttgcgatatctcagtaattgcaggagcataatttggtagctaatgtgttattgttttggtcttcccaatgacgactgttgttggcacttggcaggatgattttgtacgtcgtttgtgccaaactgttttagttttgaccaggtttatatgaaaaatagttacacaagtacattgtaaaagttattttataattaatatagtgatactaatttagtgttctacatgttgatattttttactatactttagtcaaccctaacttcgttttgacccaagaattttggaatggacagaatggttctttcattaatccattgttttgttttatatgttgatcagcccatcacaatgcctttgacagtgactttgctttttaaggtgcagtcaatacacatggcatccatcaaattacagaagaagttatttgtagttgcaaagagaatatcaaataaaatacttgttgagcttaagtttcttcatcaaatcatttttgggaggcttcaaatgttctatgaacacaatgataataagatgagctacccagcaatggctcaacttctgtcaaatatactctactacaagagaaattgattgggataacatctctactactatgaagaatctaaggggtaggatgtctcccctggttcaattgaaagtagatgagaagagtaaggaacacaaaaaatacctaaggaggatgttgtatacctaaaagttggattgcaacttgagtatgataggggaactacgatggggaacagttggagtaatgatgctggtactaaaattttttctatgcctgatgatgagtacatatcagaagatacaattgttgtttatgataagctaaatcctgtaaatccaaacttctatttaacatgactctctttatttccactttacatgaaaagtagcactataccatggtttggtgaaaggagagaagatgaaggtgctggtacatcacaatcaatactagaagcaagacagacgcacccactattgttactgaaggtcaagatgcacaagatgatctgacaacaccacatgcacctaagatgtccaaaaagattactccaaggaagaaaagcaattgaactaccttatgtatattcaaaattagtgtattatccactatgttgtgtcaagaactatgacttcaaaattagtgtgtcatgaactatgctgtttcatgaactatgtcttcaaattctgggaagtggagtgcagtttcttgtataattttgaacatgtccatgtgcacctactctgctaattgtgtcatggactgacatgaattatgtcatgaactctgccaactgtgtcatgaactgggaagtggagtgcaccaaccgtgtcatgaacatgtccagtttactgcaactctgccaatgataataaaatgtccagtttgtaggactg

SEQ ID NO: 55490 - DNA, 839 bp, Zea Mays
aaataatatcacatattcacatggactctacatgacgattgagtgctctagcatcaggtgtcagatgtcaggctcaggtcatgagtctgattgctagctaccatgggcccctcaatgagagtaaaaatcctgttgttagaagggtgctcactattaacaactcgaggtctagaatcggtgataacctcatggggcgacctccagagtctagaagttgttacctgcaacaaaatcaaggatgaggaaataactcctacccttgcagagcttttctccaatctcaaagagctgaagtggcggcccgacaacaagtcacttcttgctgcaagcctcgttggcactgggatgggaaagaagggcagggtatttttcaaaaggcttatcttacctgcccatcaacgaatcaaagggaaggtgctcaacaattcagcaggtgttgctgcttagttggattgctagtcgaaactaggctaccgcacaaagttcctagttcttgacttgatcaaagtcaaccacgtttcttgatactcaaaagccgtacacaatgtggcatctgttcttccacttaagaccaaggacagtcataactagtcagaacctggtagtttgatgatgcacagtttcgggtaccaggcgcctgatttgtgtttgtacctgtgttcatgtgttgtaactgacaagctgaggtttgctcagaggagcctgaccgtagtatttctgtatgaggaaaagcattgcttcataaattatggcagagttaaattatggatagaaccagtagaaccacatgtttacagcacatggtctaactgtcgaatgaaagtgtgcctgacgtctga

SEQ ID NO: 55491 - DNA, 836 bp, Zea Mays
gctgttgcccccaggcgcctccaaacaagattaaaccactacctagaacgatcagtgctggagctcggcgtctctgcagccgccgccgccgcgcaggagctctgctgcatgtcgctgccccagactcgcgtccccttgagaccgtctgcgcagacagcaccggccaaggcacaaaaccgagggacgacgacaagttttgcctggtggagatggaggtccgtgactgcgagcttgaccagtacgggcttgtcagcagtgatgtatacgtggattacctcgaaaatgctcgggaagtgtttgcttcgaggctcggcatcggcagagattcgatcgcacgaacaggcaacgctctggcactctccgagcagaaactcaactactacacgcctctcaagcgtggcgctaggttcgttgtcatggtgagggtcgtccagatcaagggcgcgcggatggtcctcgagcacttcgtcgagacgctgccgccggagcgcaagctcgtcctggaagcgacggccaccgtggtcttcctcgacaaagactaccgtccgacgcgcgtgttcccggaggtggcgtccaagatgcggctgcacttcttctgatcctagctacgaccatgcaagcatgcatgttggatcttcgtgcctactgttgccatgctcaatgggtagtggtattaattagagcatattcgttgatccaaaggggtaactacatggagggggatgaaaaccgtttccgaaaaccccgtatatcgttcccgtaaagataatatcgttttaaaaaatattaccatatttaaaacatgaatttcaaatatccagcaagaccaggtaaag

SEQ ID NO: 55492 - DNA, 327 bp, Zea Mays
gtgagtttttcatgtctttcatgtctcctgagatgcttgaatcagctccaaattgttgcgtaatgtgaggaccaaaagcattccatttgggattcgaattccatgaagttttctttacctgtacgaacccccctttctggctttagtagattgaagataatttccatctggataatctgtaaagccttgcaaatatataatgagttcaatgttctttctggttcttgaatggaatctatattctttctgttgatgtactgtaacactcccttccctcttatacaatgagtacatgcattgcctttcaaaagcccctccttttgtgac

SEQ ID NO: 55493 - DNA, 936 bp, Zea Mays
aaaaaaccgaaacaaacagtcactcatcctctttctgtctttcacccccgcgttcacgccggcccaaaccccaaatcgcacgcgtcatcccaatcccaacccaattacgacacgcctgccgccgccacgccgcccgaaatccggaggggaagctcctcgacgacgtagcggccagtggcagctcggacgatggcctcgtccaactccgccgccccggctcccgccgacgggggcgacgacctcgaccagctcctcgacagcgcgctcgacgacttcaccaacctcgatctctctgcctctgccgcccccaaaaggatatggactccattgttgaaacaatgatgcagcaacttctgtccaaggagattcttcatgagcccatgaaggacattgtagaaaagtatccaaaatggctggaagataataaagataagataagcaaagaagaatatgggcgttataataatcagcttgaactcatggtgaagcttattgaggtctatgaaaatgatcctgagaacatgactaggatttttgacatcatgcaaaacatgcaagaatgtggtcaaccccccagtgatcttgtccaagatattgtacctgatctggatctaagcaagttgggacaactgtctcctgagatgcttgaatcagctccaaattgttgcgtaatgtgaggaccaaaagcattccatttgggattcgaattccatgaagttttctttacctgtacgaacccccctttctggctttagtagattgaagataatttccatctggataatctgtaaagccttgcaaatatataatgagttcaatgttctttctggttcttgaatggaatctatattctttctgttgatgtactgtaacactcccttccctcttatacaatgagtacatgcattgcctttcaaaagcccctccttttgtgac

SEQ ID NO: 55494 - DNA, 2443 bp, Zea Mays
gtcctccgttctcctcttcctctctctctcttctctctctctctctacggattgcctcacacgcatctcgcgtgcaattcaagttctcaggtactccgccgttgatgaactgcctccacacctgcggcgacaagaagacgctgaagaagtggtttttcatcgacaagacagtaggctaaatccagtcccagagaacaaattgaagcaccactccccaccgcacagcagcacagctcttctcttcaccgatcccgatggatatgggcagcggctcgtcacctgtcatcaccgatccgatatcgataagcccaccgctgctgggaggcttgacgtcgaacctgatgccgttctcggtcatgtccggaggctgctcctccagtcctagcatgagcgccagcagcaggcgtaaaatcgaggaggtccttgtcaatggcctgctagacgcgatgaaatcgtcgtcgcctcgcaagaagcacaacctcgccttcggacaggataattcgcccgacgaagatcctgcttacactgcatggctgatagtagccaacgcacagggcaggaggatcgctgtgttcttggattacgacggcaccctgtcgccgatcgtcgacgatcccgacaaagcgttcatgtcccctgtgatgagagctgctgttagaaatgtcgcgaagtacttccctaccgcgattgtcagcggaaggtcccgtaagaaggtgtttgaatttgtaaaactgacggaactgtactacgctggtagtcacgggatggacatagtgacatctgcagcagcacatgctactgaaaagtgcaaagaagccaatctcttccaacctgcttgcgagtttctccctatgattaatgaggtgtgttttatcttacagctactgcactaacaaactgcatttcttagtcgcagtacctcaacttgatatatctggaactctgttactgttcctagcgggtaatctatcaaatttccgtacttgctaagactatcttcacatactcatattcaaacttcgctctgcgaacaatgaaaaacagtgttttagccttttaggtaatcacatgagtaaactgctgagcacggtctaaaccgcacttctgcaacaggtttccaagtgcctcgtggaggtcacgagttcaattgaaggtgcaagagttgagaacaacaagttctgtgtatctgtacattaccgcaacgtagcagagaaggactggaaagtggtcgcaggactcgtgaaacaagtcttggaggccttccctcgtctcaaagtaaccaacgggcgaatggttttagaggttcgcccggtgatcgactgggacaagggaaaggctgtcgagttcctgcttcggtcgctcggcctaagcgactccgaagatgtggttcctatctacatcggagacgatcgaacagacgaagacgccttcaaggtactgcgagagcgaagctgtggatacggaatcctagtctcgcaggtgcccaaggacactgaagccttctactcgctgagagacccgtctgaagtgatggggttcctcaattccttggtgagatggaagaagcacccgctgtgacgcaactgaaaacacaacgactgattcagaagccgtaaagcgactgtacttcgtgcggcggcaattttgtagagtttttggctcaccgggtggctcattctttcatgcgtttttattttttatttttttaactgtcacagtccttcgtcactgagaaataacaagtggttgtcccacaccctcttgcaactgtaatctgtaagcaagaggccctccctgttcggtctatatatatatattgaataaaaccgggacgcttttgccttgccctgaaactgcatcttccggtggtgttgattcggcaccaaagcgtgccagaacacaatagtatcatgcacttgaccgtgggatgctgatgctcgcggctaaaagaaaaaagatactgtgccaacacttaaactgaaaagacaaaggtttcatggcaaaaattggtgatccataggcgatggttagtggcatcatgagtctgctgcctggtgaggtcgggggagatggctcgtaggcgaaaaaaaaggtaaggcgtccaggtatacctttgtcgtcttcctcatgttccccgtcggccagcgttgccgcgtccgctctccatgggccgcatcctctcgcttgccacgaggctagcgtcgcctctccttctcgcgcgagctggatcggctggtcctcaggggtttctgcgtctcgctcggcccatagcggctgtctggatgcgtcgtcgtgtggatcgggggagataaaaggtacgagattagggtttccttcagatttcattggtgctcattctttcccacatttcgcgtcgttcctctctcgtctctagtctcttccatgctcgtcgcgttccagcttcagtggaggttggttttct

SEQ ID NO: 55495 - DNA, 726 bp, Zea Mays
aaaggtcccgatattcacatagtagattcattgattgaatggccctactttggaataaagccctctggggttcatgtagcttccagtctggcagttgcacatacaggtgatacaagtttacagctgatctcgctgaagtagccttcatgagtttgtgttgttttcttctggttgagccttaaggcatctttgggaagcatgagatgggctagcaagtggctgaggcagtgcgaaacagaacaaaaccaagacgacgagtggccagttgggcgttaggtgctggtgagcgactcgaaaacgttagcagcagcatcctgtgggcagctgcgccctcgtgtatccgacttggactccaattccccccaaggaatcgtgtcgccagcagtcagcagaaaccatgtcgccagcagtgacgcttcagtgttaacccctcttggaattgacgtgctaccaaaagcttttagttggcaatgaataacgaaaggtgatgcatgaaagatgtcgcacgttgggttagcatctgcatgaaattggctgggcaccgaccaattaagattgtagcaccctgttgtatactttttatggagaacaagtttcttgacactgttgacagagatatgctatccaagtcccggcgagacatatgaacagaatagtttgaagtacgcttgagctctttagcttacagtttcggtttgcctatcgacagagggaacaccatgccat

SEQ ID NO: 55496 - DNA, 603 bp, Zea Mays
ctgagatctaatgtgcattggttgctttatagtgccaatgttttcttatgccaattctttgcatctttgggaagcatgagatgggctagcaagtggctgaggcagtgcgaaacagaacaaaaccaagacgacgagtggccagttgggcgttaggtgctggtgagcgactcgaaaacgttagcagcagcatcctgtgggcagctgcgccctcgtgtatccgacttggactccaattccccccaaggaatcgtgtcgccagcagtcagcagaaaccatgtcgccagcagtgacgcttcagtgttaacccctcttggaattgacgtgctaccaaaagcttttagttggcaatgaataacgaaaggtgatgcatgaaagatgtcgcacgttgggttagcatctgcatgaaattggctgggcaccgaccaattaagattgtagcaccctgttgtatactttttatggagaacaagtttcttgacactgttgacagagatatgctatccaagtcccggcgagacatatgaacagaatagtttgaagtacgcttgagctctttagcttacagtttcggtttgcctatcgacagagggaacaccatgccat

SEQ ID NO: 55497 - DNA, 1629 bp, Zea Mays
ctcagtctcagcccaccgctgtatccatccttccctccaactccacagaaccaacaccgacatcgaagcggcgaaccaaccgccgcaatcgggccacaccaatcaccgccgcaacaacaggcatgccgcggcccccgccgccgggccgcgggaccccaggcgcaaggcggccgatccgggacttcttcgccacctggctcgccaccctccgctcaccgctcctcccgctgctccgccgcgcgctctccacctcctcctcgtccggctcctgggacgacccgctctcctccgccgccgcggctgtcgaggctcacttccaggcgcactggtccgcgctcgacgctgccgcacgccaggacccaacgcgggtcatcgccgcgggggactggcggtccccgctcgagctccccttcctgtggcttggggacgtccacccctccctccttacctcgctcctccgcacgctctcgccctcgccgcgactcctcgctgccgtcgaccgcgtcgaccgccggatccgcaccgccgtccctgccgtctccgaccgcctccgccaggcccaggaagcttttgtggccgccgaggcaaccggcgccgccgacgtggaggcgttcttggcggagctaaagggcgtcgctctcgaagccaaccggctgcgtcggggcgtactctcagacctcgtcgccgccgctggggggtaccaggcggcgctgtacctcgaggcgctctcgcgcttcgtgttgtccatgcacgaccccgaggtgctccgccgcttcgaccagtgtcgcgcctcgcctcgtagctagttacccttcttgttctcaaggtccgtgtaaatatttcaagaaaatgccgcaccaatattgagcaatggcatcaataaagttcttgtctgtatagcttagtgatagtttctgtacaaccttattctgcaaatggtttcctcaaatcatcgatgaactgtatgagaaaatggcatctttgggaagcatgagatgggctagcaagtggctgaggcagtgcgaaacagaacaaaaccaagacgacgaggtatcgtaactgggtgcagatgcaatgtctgccaatcgttcagttcacaacatgcaattttttttcataacgtagctcgtgttcttgttcgctttttttctttcttggcagtggccagttgggcgttaggtgctggtgagcgactcgaaaacgttagcagcagcatcctgtgggcagctgcgccctcgtgtatccgacttggactccaattccccccaaggaatcgtgtcgccagcagtcagcagaaaccatgtcgccagcagtgacgcttcagtgttaacccctcttggaattgacgtgctaccaaaagcttttagttggcaatgaataacgaaaggtgatgcatgaaagatgtcgcacgttgggttagcatctgcatgaaattggctgggcaccgaccaattaagattgtagcaccctgttgtatactttttatggagaacaagtttcttgacactgttgacagagatatgctatccaagtcccggcgagacatatgaacagaatagtttgaagtacgcttgagctctttagcttacagtttcggtttgcctatcgacagagggaacaccatgccat

SEQ ID NO: 55498 - DNA, 849 bp, Zea Mays
attttttcttgcttctgctcttgcagtctttgtaaattcaggtgtcagtgttggattcaaataccttttaaaaaatagaggttagcattccactagaatatatggtcacatgtggctacctatttcctgcattcaaaatgtagtcacatgagcagtgatgaactgacgataccatatttggctacttatttcttgcattgaaaatgtggagctaaagtgtgtatgttttgttacacaaacgttggtgttgttgtgcttcttttgctgaagcactgccttttacggttggcgacactcaatgttcgatcacctgtacaaaacaatatatgcattttcttttgagcaattcttttaaaatatatagggcaatgaagagcttcatattgtgttgaacctttgcctataatattaagttgcaaaagagagttttatacttacgacatgctacattttgttatccttatagctggttagcctattgcagaaggtggttgaacttgtactttgagaccaaatatatattgcatacttgatattatactatatttgagcttgtctttcttattctactcttatctgttcttatgaagattagaggaatgtgtttggggtgagtgatttttttgtgttgtttccactgtccatggctatggagaaggagcaaaggaggccacgtagctcgaagatagcgtcagtgtccatgaaggcgtccttcgcaaatgcgacgcttcaaggcatgaagaacagaagccatttttgaagggacacaaaaactgtactgcaacaagacgtgtggacaagctgaggaagaagttgtggcacgaggagaacgtccaccgagctctaaag

SEQ ID NO: 55499 - DNA, 2692 bp, Zea Mays
cacgcccccaccggtcgccgccctcgcgtccacctcatcctccccgcgatgctctcgcttctcctcgcgcaaaccatagggtccgatggtgcctacagtccctggactctggaggacttcgacatgcacgagaacctgttgtatcggtcgggactagcgatggcagcggtcgcggtgctcctaccagagggaaacctaaccggtgccccgtcgacctctaggcactgtgggcagggcggccgttggcgaggccgtgcccccatcctccccgccccgacagacgatctgagccgtcgccgaggctgactgcgccatcgccctcaccctacagaagacgtggaggaggaaggtcctacagaatatgcggaggtcggcagcgagggtggcaagcgggtagtggtggacgcctctcacgtggtcagccacaccgaccacggcatgccttggaagctcctcaacgcggtgtgtgagacagggctcgtcttctttcgcgcacccatggaggacaagctccagttcacctacgacccggccagggatgccgtcttggagtgggtcgtattgaagtatcaagagcttttggtgatcgccagtttaagaaggtttgctgatgcgtaccattgtttgcttaatcatagatgctatctattgcccatcactgtttgatttgaaatattcttgtttccttacatttacatgcagttttcttcataaagcggacattcagatcgaaagcattaagtaatattgaaacttggttatttgcctgtgactattctgaatctgattggcagagttcatatgcattaagtaatctgattggcatgccaggatcgatgtagtgaatgagcactttttaattgttgttccttgttgtgaagtaactgtgagtgtttgtcccatgggttcagttccaataatctttcttaagataattgcttacaatttttaattacattttggtattcttatcagacatcctgattgcaagctagttgttagccatgatgactatagcttaacttccaagctgccaagggagagaacttctgttgtaacggtactaagaaacccagttgattgtgtatttagcacatatgagttcttagttgaagttgtagctagattccttgtgcacccaaacttaacttctgtgaagttaatgagtacccgtgtgttaacaaattgttgtgttgtccttgtccgaactttagatatctggccttggaattacttggttccatgtatcagggaagacctgtttgccagggtatgcctgttactttcagtttagcctttggtttcaatttgcactttatagaattatactgacagaaaataatagttctctttttcatagcaatttcccagtacatattgtcttgtcaaactgaccaatttatatgttcattgttcagtgattttgttgcaaatctgtaccagtactgtgttatgtctcatgtgtatttatacgttataatgttatacattctcgcacaagcaaaactatagcaaacatctgcctgccgctgatttccttagccagctttaaaaaacctggtttactattttttatgtgtactcatgttaccttgacagattactgagttaacgaacaactcatactttgatgtagcacatgaggttcgacattatgtgaggaagcagccggatcttggtcgtattgtgcttgtagttgctaaggtatataatgaatgtcatgaaggattgttttcccttaatcccatattgtgtgagatactaaatatatgtcctgaaaacaacttacgtgtaggactcgcaaaacccccgctaagcaaactgatagaaaacttttagaggtggaaatgatgaagatgatagtgctgatgtcgacacaaatgatcctgctgtacctcagtaactccactttcttcccagccctttagagatgatatgaccatctttgttcgactattttcccagcactggtctataccgcagatcgatgcataaacaactgctttagaaaaacatagttttgaaggataaaactgaagattaggaatgacaaattaaagagtcatcatagctaatgaacatcttagctaccaaaaatcatgtttgtccatctagaaacctttttcccctgctcactgccctatgattaccaggtttgagaattctttttccaatagaatttgtaggctacaataacctggctcaaagaatgtgaattcatttccctttgtgctaaagaatcacaaatagttgtatgtactcctaaacatgaataagtgcagtcattttgtagaaattaaatcatgtgacattctatgcagaagatactaatagtaccaccactaccatgttctacttcaacaacaaacttcagaaaagattaagaggtcaacgttttaaaatgaatggagctttttatagactgtttgcaaatgaagcttcccatggttcagaaaacaataactatattgaccaaaagttgagccacttcccacatggtatgcggtcttacagtccaaacatcaagctacgtcttgttgactgtgatgttaatgccatgaaccgagtagcagtttatgcccatgagaatgcttcaatgccccatttgggtcttgtgggcaaatgatcggatggtgcataacttcgatgtagcttatttggtcagcttataatggaacgatgggaagacttt

SEQ ID NO: 55500 - DNA, 2729 bp, Zea Mays
ctctatgttttgctagacttgtacctatagcccatattctggcccaataatttctcctattgttatttgactcctctagtacgcagcctctttagacatgccgccgtcagtgccaatggaagaaaaaggcagcgggaaagcaacatatcgaaggaaaaattcactccagcacaacaccgtttgctgatgcagcacaaagagcaaatttcgagggcaaacgagcgattcatccagttcaagggaagatgggagaggatgtgaatggagaaccctacaaaccctacacggagaaagttttgccctgtttagttcctcatgttggcatgaaatttagaaatccagaagagggttggaagttttggctggcatacgatggtcagagtggttttgatgttagaaagcactatgcaaacaaaagtaagattgatggaaagataacatcatgtagatttgtttgtgccaatgaaggtcatagaggaaaggacaaaaggagtgatcaagtaaaatgtcaacgagctgaaacaagaacggattgtgaagtgcgtatgggtcttgcaaaggataaagagatggatggatataaagtttatgatctaaagttggaacacaatcatgaccttcactcaccagaaacttttcacttgatggtgtcacaaagaaaaatttcagaattgcaagcctttgaaattgaagctgctgatgattcaggaataggtcctaaagcatcacacgaattagcatgtcgccaagtgggtggaccgcttaatctgagttataccctacgtgaccataaaaactatttgaggggaaagcgacaacgagagatggcatatggtcaagctggaagcatgctcaaatactttcaagataaaatagcagagaacccatcatttcaatatgcgacacaaatggatattgaggagaagattgcaaacatattttgggctgatgctaaaatgattgctgattatatacattttggtgatgttgtttcctttgacactacttttggaacaaatagagagagtcggccttttggtgtttttgttggattcaaccagttcagagaaacagtagtttttggtgctgctctaatgtatgatgaaacatttgagtcttttcggtggctctttgagacctttctacaagcacataatagaaaacaaccaaaaacgttctacacagaccaagattttgcaatggggaaggcggttgaactagtgtttcatgaggcatggcatggattgtgcacttttcacataatgcaaaatgctatcaaacatttgcctaaacaagaaaaagctaaaggctcaaatgttctagctgatttcagtgcatgcatgtttgagtatgtggaccaggaaacatttgacagagaatttgccatcttgaggacaaagatacaaaagcaaacttggttagacaacatttacaatttgaaagaaaaatgggctgaatgttatatgaaagatgtttatacattgggcatgcgaagcacacaattgagtgagagtctaaacaatgatttgaaaattcacttcaaatcagattttgacatcattcgatttttgaaacattttgaaagggtggtgcaaggaaaaagaaataatgagttaaactcagaatttgaatcgaggaaaaaaataccgagggtcataatgaagatacctatgctgttgcaagcaagcaagttgtacacaccagtcatatttgaagcttttcaaggtcaatatgaaaggtctatgacatcatgcactagagtattggatggaaataatgaatatcttgttgcaacagggagccttggtgaggaacttgtccttgatgaagagtttagagttattggaaatcctttggaccaaacagctacatgcagttgcaacttatttaatagaattggaataatatgtgcccatgctttaaaagttcttgatttaatgaatatcaagtcattgcctacacaatatatattaaagagatggacacgacaagcatgtagtggcattgtacaggatatgaatggaaaaatataattgaaaatccaaagcttgatgtattgcttcgttatagatatttctctcacaaacttctgaatttggcacatcgagcagcctactttccagagtgctcttcactaatggacaacgcaatagacctccttagccaacagcttgaagacaaaattagtacatgcccaagtatttctaatgctgatcaaagtgtagctcatgttgatgttgctccacccaatgacacattgagtaatgcacggttaaagaaaaaagatatccgttaagaagttcaaagagacaaaaacttggttgggaagaaaagcacaaagggaggaaaaaaggtcaaaggaaaactttggtgtctgtacaagtaccaatgatatggggaaagaagcaagcatcgacaagggtaaggactctgaagaatataggaccatcagctccttcactcaactactgaatggagtaggcagtgatgatctgaaaattgaggaattattttagtttttgggcaaatcaagagagctagtttgttattgacacctgtattttgttcctggaattgtaaggtttaaactacactgcaaattgtggagtattttgttagaaagtgcacactgcaaaaacattcagtctggattgaatgttcagactaaaacaaaaacgttcatcaggaaatcttcagtgctagaattctcaatagtaattacattcact

SEQ ID NO: 55501 - DNA, 2736 bp, Zea Mays
ctctatgttttgctagacttgtacctatagcccatattctggcccaataatttctcctattgttatttgactcctctagtacgcagcctctttagacatgccgccgtcagtgccaatggaagaaaaaggcagcgggaaagcaacatatcgaaggaaaaattcactccagcacaacaccgtttgctgatgcagcacaaagagcaaatttcgagggcaaacgagcgattcatccagttcaagggaagatgggagaggatgtgaatggagaaccctacaaaccctacacggagaaagttttgccctgtttagttcctcatgttggcatgaaatttagaaatccagaagagggttggaagttttggctggcatacgatggtcagagtggttttgatgttagaaagcactatgcaaacaaaagtaagattgatggaaagataacatcatgtagatttgtttgtgccaatgaaggtcatagaggaaaggacaaaaggagtgatcaagtaaaatgtcaacgagctgaaacaagaacggattgtgaagtgcgtatgggtcttgcaaaggataaagagatggatggatataaagtttatgatctaaagttggaacacaatcatgaccttcactcaccagaaacttttcacttgatggtgtcacaaagaaaaatttcagaattgcaagcctttgaaattgaagctgctgatgattcaggaataggtcctaaagcatcacacgaattagcatgtcgccaagtgggtggaccgcttaatctgagttataccctacgtgaccataaaaactatttgaggggaaagcgacaacgagagatggcatatggtcaagctggaagcatgctcaaatactttcaagataaaatagcagagaacccatcatttcaatatgcgacacaaatggatattgaggagaagattgcaaacatattttgggctgatgctaaaatgattgctgattatatacattttggtgatgttgtttcctttgacactacttttggaacaaatagagagagtcggccttttggtgtttttgttggattcaaccagttcagagaaacagtagtttttggtgctgctctaatgtatgatgaaacatttgagtcttttcggtggctctttgagacctttctacaagcacataatagaaaacaaccaaaaacgttctacacagaccaagattttgcaatggggaaggcggttgaactagtgtttcatgaggcatggcatggattgtgcacttttcacataatgcaaaatgctatcaaacatttgcctaaacaagaaaaagctaaaggctcaaatgttctagctgatttcagtgcatgcatgtttgagtatgtggaccaggaaacatttgacagagaatttgccatcttgaggacaaagatacaaaagcaaacttggttagacaacatttacaatttgaaagaaaaatgggctgaatgttatatgaaagatgtttatacattgggcatgcgaagcacacaattgagtgagagtctaaacaatgatttgaaaattcacttcaaatcagattttgacatcattcgatttttgaaacattttgaaagggtggtgcaaggaaaaagaaataatgagttaaactcagaatttgaatcgaggaaaaaaataccgagggtcataatgaagatacctatgctgttgcaagcaagcaagttgtacacaccagtcatatttgaagcttttcaaggtcaatatgaaaggtctatgacatcatgcactagagtattggatggaaataatgaatatcttgttgcaacagggagccttggtgaggaacttgtccttgatgaagagtttagagttattggaaatcctttggaccaaacagctacatgcagttgcaacttatttaatagaattggaataatatgtgcccatgctttaaaagttcttgatttaatgaatatcaagtcattgcctacacaatatatattaaagagatggacacgacaagcatgtagtggcattgtacaggatatgaatggaaaaatataattgaaaatccaaagcttgatgtattgcttcgttatagatatttctctcacaaacttctgaatttggcacatcgagcagcctactttccagagtgctcttcactaatggacaacgcaatagacctccttagccaacagcttgaagacaaaattagtacatgcccaagtatttctaatgctgatcaaagtgtagctcatgttgatgttgctccacccaatgacacattgagtaatgcacggttaaagaaaaaagatatccgttaagaagttcaaagagacaaaaacttggttgggaagaaaagcacaaagggaggaaaaaaggtcaaaggaaaactttggtgtctgtacaagtaccaatggcacaagatatggggaaagaagcaagcatcgacaagggtaaggactctgaagaatataggaccatcagctccttcactcaactactgaatggagtaggcagtgatgatctgaaaattgaggaattattttagtttttgggcaaatcaagagagctagtttgttattgacacctgtattttgttcctggaattgtaaggtttaaactacactgcaaattgtggagtattttgttagaaagtgcacactgcaaaaacattcagtctggattgaatgttcagactaaaacaaaaacgttcatcaggaaatcttcagtgctagaattctcaatagtaattacattcact

SEQ ID NO: 55502 - DNA, 3248 bp, Zea Mays
ctatcatcacttcatcagatttttagtagaagagatatctactacgtcaaagtgctttggaattatttatggtagacaggtcaaactttttatttgatttcgaggatataggatcacgtacacatgcttatcgggcccttgttcacaccaaacctccttatttgaacaccgtttccgttgctacccaaaggcctgaacaaatcttcaagcagacacagttgatggagcgctgggctaaatgggagattagcaattttgaatatttgatggaactgaacactctcgctggccgcacttacaatgacattactcagtatcctgtttttccatgggtaatagcagattacaagtccaaaactttggatttggaaagtccgtccacataccgagatctttcaaagccaattggtgcactaaatcctgcacgtttgaagaaattccaagaccattactccagtttcaaggatccaatcatcccaaaatttcactatggttcacattactccaatcctggcacggtattgtattatcttgctaggatagaaccttttagcatcctctatgctcagctgcaaggtgccaagttcgatcatgatgattgtgcattctctgatgtcgccagaacatggaacagtgttcttgagggcatgaatgatgtaaaagagctagttccagagatgttttaccttcctgaggtatttactaatataaggcagtgaaactggaacccttaatgtttgagtattattgcaggttctgtagcactgcctccttgggctaaaaatgctgttgattttatacatatgcatcggaaagctctcgagagtgatcatgtctccacacgtttgcatgaatggatcgatctaatatttggatataaacaaagaggtaaaggagcagaggtagccaacaatatcttccctcatgttacatatgatgggatggtggacattgataaaatcactgatccagtgcaacggcgaagtgtacaaaatcaaatatgttattttggacagacaccatctcaattgctgacagttccacacataagaaggcggtcgttgacacaaatattacaattgcagacaatattccggaacccaagtgaggttagatcttatgtgcttccaagtccagagcactgcaatgttcctgctagcacgatgcttgtatccaatgattgtcttgtagtcatagattctaatgttcccacagcacatgtggcattgcaccattggcagccaaataccccagatggcctaggggcgcctttcctctttcatcacgggaaaaatgccataaattcaagtggtggtgcaatatttcgcatatttaaaggatcttcaggttctgcagaagactatcagtttccacgagctgtagcatttgcagcctctgcagtacaaagttcatcagctgttgttgttacatgtgacaaagaagttataactggcaggcatgcagataactctgtgaagatgatctctccggatggagcaaggactatcgaaactgcatttgggcatcttgcacctgtgacctgcctcgcactgtctgcagacagtagctatcttgttacagggtctcgtgacacaacagttatactttggaggatacgtcaggtgggttctgcacataagaaaaatgctccagaacctccaccatctacaccgacaacacctactagtcctctagccactggtagtagcagcgacagtagtccaagcaaaactctagaaacctacaggaggcgacgaattgaaggccctatgcatgtactaagaggacatctcggagaagtaacctgctgttctgttagttctgatttggggcttgttggttcatcttcgagtgtgtctggtgtcctattacattccttgagaacaggtcggctaataaagaagctcgatgtgccagaagcccattccatatgcttttcttctcaaggcattgtattggtttggaatgaagttgagaacagactgtccaccttcactgttaacggaatccctattgctaccgcagttgtgtcacctttctctgcacgagtcagttgcattgagatttctacagatgggcaatttgctgcaatgggaacttgttcatctagcaatgacaatcatgactgcagcactgctctggaagataattctgagcttgacaagcccggtagtgatgaggatgtacaaggatcaaatgagaccaggctatctgttgacgctccctctatctgcttccttgatctatacaaacttgaggtaatccataagctgaagctggaagaaggacaggacgtcacagcactcgctctagaccaagaaaacaccacccttctggtttcgacagctgataagcagctaatagtctacacgggtccggctccaagtaccccgtaggtcaatccattagctccccggtgcttggttggaaaaaatgtaatggagatcagcgctagctaccttgacggcccaactgacagtgagctcggagacgacagtacagataatgcacgttaggcgacgggcttctcttgccgtgagcatggcgctgctgtacgtagaggctccaatggattgtgctgtaatacaagactgagactggaacctgaaatgggcgacatgtgcaccaaaaggtgaagagccgttgcgctgctggaaaactctcctgtacagggacctcgttgacattttccatgtagtcgtagtgaaacctgccacgctgcggccaaaataattgttagaagcagcaatccgaatgtaattattgccagtgcctcgtacaagtcgcgttagcttcttgttagccgtgtgcaacggcgagccggcacgcaaagatttgttagcttgttgtcattgcatctgtgtacaaagtctcgtccaagaaattgattcactttcgcttgcgcacaacgtagacacgcaatcccttgttcagatgtagtagcttataggtagattgtgttgattatatgttcaaaaagtaattaaaacgtccattagcagagggagagtgtgtgtatataaaggggatcgcgcgtgctgaagttgggagatagattccacttccacgttctagccactctgttgcccctcctgctatgttacggccgtcatttttcacttgcggcaagcaatgccacaatgttttatcttcgtacatgtgaataccttgctactggttctgtgatattgatgagcaacgaacatgtgaagcacagattaatgtatcttgtttcactaatacacgag

SEQ ID NO: 55503 - DNA, 3384 bp, Zea Mays
ctcctctgtagtcccgatagtgtcacctcaaagaggattaacttcatagttgatgagcatatgagtgacagttacatggatgatattgcatccactagtggccaatatgatcagcaagatagagatcggagctggttcctatcatcacttcatcagatttttagtagaagatatctactacgtcaaagtgctttggaattatttatggtagacaggtcaaactttttatttgatttcgaggatataggatcacgtacacatgcttatcgggcccttgttcacaccaaacctccttatttgaacaccgtttccgttgctacccaaaggcctgaacaaatcttcaagcagacacagttgatggagcgctgggctaaatgggagattagcaattttgaatatttgatggaactgaacactctcgctggccgcacttacaatgacattactcagtatcctgtttttccatgggtaatagcagattacaagtccaaaactttggatttggaaagtccgtccacataccgagatctttcaaagccaattggtgcactaaatcctgcacgtttgaagaaattccaagaccattactccagtttcaaggatccaatcatcccaaaatttcactatggttcacattactccaatcctggcacggtattgtattatcttgctaggatagaaccttttagcatcctctatgctcagctgcaaggtgccaagttcgatcatgatgattgtgcattctctgatgtcgccagaacatggaacagtgttcttgagggcatgaatgatgtaaaagagctagttccagagatgttttaccttcctgaggtatttactaatataaggcagtgaaactggaacccttaatgtttgagtattattgcaggttctgtagcactgcctccttgggctaaaaatgctgttgattttatacatatgcatcggaaagctctcgagagtgatcatgtctccacacgtttgcatgaatggatcgatctaatatttggatataaacaaagaggtaaaggagcagaggtagccaacaatatcttccctcatgttacatatgatgggatggtggacattgataaaatcactgatccagtgcaacggcgaagtgtacaaaatcaaatatgttattttggacagacaccatctcaattgctgacagttccacacataagaaggcggtcgttgacacaaatattacaattgcagacaatattccggaacccaagtgaggttagatcttatgtgcttccaagtccagagcactgcaatgttcctgctagcacgatgcttgtatccaatgattgtcttgtagtcatagattctaatgttcccacagcacatgtggcattgcaccattggcagccaaataccccagatggcctaggggcgcctttcctctttcatcacgggaaaaatgccataaattcaagtggtggtgcaatatttcgcatatttaaaggatcttcaggttctgcagaagactatcagtttccacgagctgtagcatttgcagcctctgcagtacaaagttcatcagctgttgttgttacatgtgacaaagaagttataactggcaggcatgcagataactctgtgaagatgatctctccggatggagcaaggactatcgaaactgcatttgggcatcttgcacctgtgacctgcctcgcactgtctgcagacagtagctatcttgttacagggtctcgtgacacaacagttatactttggaggatacgtcaggtgggttctgcacataagaaaaatgctccagaacctccaccatctacaccgacaacacctactagtcctctagccactggtagtagcagcgacagtagtccaagcaaaactctagaaacctacaggaggcgacgaattgaaggccctatgcatgtactaagaggacatctcggagaagtaacctgctgttctgttagttctgatttggggcttgttggttcatcttcgagtgtgtctggtgtcctattacattccttgagaacaggtcggctaataaagaagctcgatgtgccagaagcccattccatatgcttttcttctcaaggcattgtattggtttggaatgaagttgagaacagactgtccaccttcactgttaacggaatccctattgctaccgcagttgtgtcacctttctctgcacgagtcagttgcattgagatttctacagatgggcaatttgctgcaatgggaacttgttcatctagcaatgacaatcatgactgcagcactgctctggaagataattctgagcttgacaagcccggtagtgatgaggatgtacaaggatcaaatgagaccaggctatctgttgacgctccctctatctgcttccttgatctatacaaacttgaggtaatccataagctgaagctggaagaaggacaggacgtcacagcactcgctctagaccaagaaaacaccacccttctggtttcgacagctgataagcagctaatagtctacacgggtccggctccaagtaccccgtaggtcaatccattagctccccggtgcttggttggaaaaaatgtaatggagatcagcgctagctaccttgacggcccaactgacagtgagctcggagacgacagtacagataatgcacgttaggcgacgggcttctcttgccgtgagcatggcgctgctgtacgtagaggctccaatggattgtgctgtaatacaagactgagactggaacctgaaatgggcgacatgtgcaccaaaaggtgaagagccgttgcgctgctggaaaactctcctgtacagggacctcgttgacattttccatgtagtcgtagtgaaacctgccacgctgcggccaaaataattgttagaagcagcaatccgaatgtaattattgccagtgcctcgtacaagtcgcgttagcttcttgttagccgtgtgcaacggcgagccggcacgcaaagatttgttagcttgttgtcattgcatctgtgtacaaagtctcgtccaagaaattgattcactttcgcttgcgcacaacgtagacacgcaatcccttgttcagatgtagtagcttataggtagattgtgttgattatatgttcaaaaagtaattaaaacgtccattagcagagggagagtgtgtgtatataaaggggatcgcgcgtgctgaagttgggagatagattccacttccacgttctagccactctgttgcccctcctgctatgttacggccgtcatttttcacttgcggcaagcaatgccacaatgttttatcttcgtacatgtgaataccttgctactggttctgtgatattgatgagcaacgaacatgtgaagcacagattaatgtatcttgtttcactaatacacgag

SEQ ID NO: 55504 - DNA, 8726 bp, Zea Mays
ccatgtgcgccgcttcgggtctcctcgcagtcctcctcgaagtcgcagagaagctgttcgtcggaatgggtcggggcagcaagtgggacgggacgccgcttgtgcagtgcattcaagtgttgggtgggcactctgtcagtgtaagggacttacacacctggctccttttgatcaagaaggcgctcggcacgcagtgggccacgcagctgactatcgcgttggaaaacgccgtggctagcaatgaagctaaagggccggcggtgaccttcgagtttgacggggagagctccggcttgctcgccccgggggacaaccggtggccattctcgaatggtcttgggtttgccacatggatatacgtagagtccttctcaggctcacttaacacagctacggccactgcagccgttgcagccgctgcagcatctgcatctgggaagtcatcaccttcagcagcagcggctgctgcctgcacgcttgcgggagaagggacaaagcacatgcccaggattttcagtttccttacttcggaaaaccatggtattgaggcctatttcaatgaccagtttctagttgtggagagtgcggctgggaaggggaagaaggcttctctccatttcacttatgaattcaaaccccggtgctggtactttgttggtctggagcactctagcaaacaagctttgcttggtaagtctgagagtgaattgcggttgtatgtggatggggaccttcatgagagctgtccatttgagcccccacgcatcgtgaaaccactggttttttgttgcattgggaccaatccatcaccaactattgccggtcttcagcggcggcggcggcaatgtccattgtttgctgagatgggacctatctatatctttacagagcctatcgggccagagaaaatgagtcgacttgcttccaggggaggagatgcacttcccagcttcggcaacggtgctggttttccttggaaagctacaagtaaccacatcagggaaactgcagaggatggttatacactcgatattgagattggtggaagcttacatcttctttatcatcccagcctgctcaatggccggttttgttctgatgcttcaccttctggctcaacaggtactcaccgaagacctgcagaagttcttggcatggttcatatctctaatcgtgtccgtccagctgaatctttatgggcattggcttatggtggtcctatggcattattaccactgattgtgagcaatgtcgagatggataacctggaacctatacttggcgatttgtcatcgtctcttgctactgcatctctttctgttcctattttcaggatcatttctgtggctgttcaacatcctgggaataaagaagagttatgccgtactcatggaccagagcttctatctcaagttttacattatgtattggacacactatccagacttgaaagtggaaagaaagagatactgagtgatgaagagcttgttactgcaattgtatctttgtgtcagtctcaaagaaacgatcatagtcaaaaggtgcagctctttagcactttgctgttggacctgaagatgtggagttcatgcaactatattttgcagaaaaagcttctttcttcacttgcagacatggtttttgcagaatctacttgcatgcgtgatgcaaatgcactgcaaatgcttcttgatgggtgcagaaggtgttactgggtagttcatgaagcagattcaattgataccttcacacttactggaaacgagagacctttgggaaatgtgaatgctctggtcgatgagcttttggttgttattgaactgttgataggagcagcaccttctacattggcttctgatgatgttcgttgtttggttggatttattgtagactgcccacaacctaaccagagggaagctaaatctggtgatagcaatattctccatagctgtaatgtgtcacatgattctgcttcgtggaatgaatcttctaagcttaccaataaggattcaaaatttaaaaatgccagtggtgaaacaaactgccaggatcatcagattcaatcagtgcagcattatgaacccaactctcatgaaactggagttggacttggatctactagcaaatggagcctattaaagggtcagttcttaaagaatttgggtggcatggatgttccaaatatctctgacaatgtgcaaaatattgataatggtgatggagttcttgttgggatagtccgtgttttgggcgctttagttgcttcaggccacctgacttctacctcgcctactgtgagaccgaagttaccaagtggttttctgactacctctaatggagaaggaaataccatgtttgaagacagagtatctctactgctctttgcattgcagaaagctttccaagcagccccgaggaggcttatgaccagaaatgtctacacggcgttaatttcttcagtgatcaatgtttcttcaaaagataacctgaaaaatttacaagattctggataccattttaaacacattcctcttttggtagtcctacttcgttctcttccatatgcatcaaggtcattccaagctcgtgttattcaggatcttctatatttggtttgcagtcaccccaagaacagaagtacaatgacttccatcaatgaatggccagaatgcatattggaagttttgatttctaatcatgagatgggggacaacaaagattcagatggtataagcatatgtgaggttgaagacgtagtacacaatcttctacttgttgtgctgcagcattcaatgcgaaaaaaagatgggtggaaggacgtagaggcaacaatacattgtgcagaatggctttcaatggttggaggaactagcaccggtgaccaaagaattaggcgtgaagaagcattaccaattttcaagaggagattactgggtagtctgcttaatttttctgcccaggagcttcaagttcagcaaactgaagggattgctgctgctgcagctggtgttgcagcagagggtttagtgcctaaagaaacaaaagtacatgcagagaaagttgccaatctctcagtaatgttggctgagaatgcagttgttctgctgatgcttgtggaagatcatttgaggtcacgcagtcaacaatttttcatggcctgtttagctgatagtgctgcctcacctgcttcaatggcttcatcagctgtcagtaggtcaaattcattgagtagaactggcagtgagcatttggaagctggggactcgagacagtctttgtcaagtgatgctggtggtcttccagttgatgttcttgcttctacggtagatacaaatgggcaactttctgctgaagtgatggaacgtgtaacagcagcagcagcagctgagccttatggatctgtcagacatgcatttgtatcttatgggagctgtatttcggatctttcagaagggtggaagtacagaacccgattgtggtatggtgtatgcatccctcccaaatctaatgtgtttggtggtggggggagtggttgggtgtcatggaagtccgttcttgagaaggactccgatggaaactggattgaacttccattggtaaagaagtcagtagcgatgctgcaggcacttcttttagattctggacttggtggttgcctcgatagtggagttggatttgggcctggcatgggtgttatgggtgcctttaatcagttgttagatagtgatcagccatttttttgcatgctccggttgatccttgtttcaatgagggaggatgacagtggggaggatgacattttcatgaggaacattagcatgaagaatgtgatttcagaagtattaggctgtcaaactggaagcatgctgggacttggtggtaactccagtgcatctatgagaaaacgtccagctgcacttttgtggagagtgcttggccctgttcttaatatgccagtttctgaatctaagagacaacgagttctggttgcttcttctattctttattcagagttatggcatgctgtaagcagtgacagaaaaccagtgagaaaaaagtatgttggattgatcatgccgccatttgtagctgtcctgaaaagatatcgttctgttttggctggtatacatgagcttacatgtccagatgtgcaaaatccactacttattgatgactgggcttcgacagcagacacttcacctgttgaggttggtgttgcaatgatatcacctgcctgggctgctgcttttgcctctccaccagttgcaatggcattggccatgattgctgctggtgcctctgggacagaaacaatagcaccgccaaccaataagttgcgcaggcgtgacacctcattgctagaacgtagggcagctaaattgcacactttctcaagttttcagatgcctatagatactacaccaagcttgcccacatcagcaccaaaggacaaagcagctgcaaaagctgcagccttggctgctgctcgtgaccttgagcgtagtgctaagattggttcaagaaggggtcttagtgctgtagcgatggctacttcaggacagaggaggtctgctggtgatattgagagagcccaaaggtggaacatatctgaagctatgggtgctgcatggatggagtgtctgcagtctgctgactcaaagtctgtttcaggaagagatttttctgctctttcatacaaatatgttgcacttcttgtttccagttttgcgttagcacgcaatttgcagcgagttgagatggagagacgaacacaagtcgaaatattgaaccgcagttgcatgtctattggacttcgggcatggcagcatcttcttcactgcttgatagagacaagtagactctacggaccttttggagaactcctctgtagtcccgatagtattttctggaagttagacttaactgaaagttcgttaagaatgagaagatttatgaaaaggaactacaattggttgaatcacttgggtgcttctgctaattatgtggagcagaagtttctttgtgatggtgcagacgcatgccactcagaagatggagactctttacttagtgttcttcctgcaagttctttgattacagtagatgaagtacatgaacaaattgtgcagagacaaagtgataatatctgcagcagtgtggatgatcaactgacagattcgtcaacaactgatcagatttttacaggatcaatagattcaagaagttctgacttttctggtgttcgcaacttgattcgatccacagtagttacacctggttacaagactaataatgagcgaattattattgaacttccttcaatgatgattcggccattgaaggttgtacgaggaaccttccaagtcacctcaaagaggattaacttcatagttgatgagcatatgagtgacagttacatggatgatattgcatccactagtggccaatatgatcagcaagatagagatcggagctggttcctatcatcacttcatcagatttttagtagaagatatctactacgtcaaagtgctttggaattatttatggtagacaggtcaaactttttatttgatttcgaggatataggatcacgtacacatgcttatcgggcccttgttcacaccaaacctccttatttgaacaccgtttccgttgctacccaaaggcctgaacaaatcttcaagcagacacagttgatggagcgctgggctaaatgggagattagcaattttgaatatttgatggaactgaacactctcgctggccgcacttacaatgacattactcagtatcctgtttttccatgggtaatagcagattacaagtccaaaactttggatttggaaagtccgtccacataccgagatctttcaaagccaattggtgcactaaatcctgcacgtttgaagaaattccaagaccattactccagtttcaaggatccaatcatcccaaaatttcactatggttcacattactccaatcctggcacggtattgtattatcttgctaggatagaaccttttagcatcctctatgctcagctgcaaggtgccaagttcgatcatgatgattgtgcattctctgatgtcgccagaacatggaacagtgttcttgagggcatgaatgatgtaaaagagctagttccagagatgttttaccttcctgaggtatttactaatataaggcagtgaaactggaacccttaatgtttgagtattattgcaggttctgtagcactgcctccttgggctaaaaatgctgttgattttatacatatgcatcggaaagctctcgagagtgatcatgtctccacacgtttgcatgaatggatcgatctaatatttggatataaacaaagaggtaaaggagcagaggtagccaacaatatcttccctcatgttacatatgatgggatggtggacattgataaaatcactgatccagtgcaacggcgaagtgtacaaaatcaaatatgttattttggacagacaccatctcaattgctgacagttccacacataagaaggcggtcgttgacacaaatattacaattgcagacaatattccggaacccaagtgaggttagatcttatgtgcttccaagtccagagcactgcaatgttcctgctagcacgatgcttgtatccaatgattgtcttgtagtcatagattctaatgttcccacagcacatgtggcattgcaccattggcagccaaataccccagatggcctaggggcgcctttcctctttcatcacgggaaaaatgccataaattcaagtggtggtgcaatatttcgcatatttaaaggatcttcaggttctgcagaagactatcagtttccacgagctgtagcatttgcagcctctgcagtacaaagttcatcagctgttgttgttacatgtgacaaagaagttataactggcaggcatgcagataactctgtgaagatgatctctccggatggagcaaggactatcgaaactgcatttgggcatcttgcacctgtgacctgcctcgcactgtctgcagacagtagctatcttgttacagggtctcgtgacacaacagttatactttggaggatacgtcaggtgggttctgcacataagaaaaatgctccagaacctccaccatctacaccgacaacacctactagtcctctagccactggtagtagcagcgacagtagtccaagcaaaactctagaaacctacaggaggcgacgaattgaaggccctatgcatgtactaagaggacatctcggagaagtaacctgctgttctgttagttctgatttggggcttgttggttcatcttcgagtgtgtctggtgtcctattacattccttgagaacaggtcggctaataaagaagctcgatgtgccagaagcccattccatatgcttttcttctcaaggcattgtattggtttggaatgaagttgagaacagactgtccaccttcactgttaacggaatccctattgctaccgcagttgtgtcacctttctctgcacgagtcagttgcattgagatttctacagatgggcaatttgctgcaatgggaacttgttcatctagcaatgacaatcatgactgcagcactgctctggaagataattctgagcttgacaagcccggtagtgatgaggatgtacaaggatcaaatgagaccaggctatctgttgacgctccctctatctgcttccttgatctatacaaacttgaggtaatccataagctgaagctggaagaaggacaggacgtcacagcactcgctctagaccaagaaaacaccacccttctggtttcgacagctgataagcagctaatagtctacacgggtccggctccaagtaccccgtaggtcaatccattagctccccggtgcttggttggaaaaaatgtaatggagatcagcgctagctaccttgacggcccaactgacagtgagctcggagacgacagtacagataatgcacgttaggcgacgggcttctcttgccgtgagcatggcgctgctgtacgtagaggctccaatggattgtgctgtaatacaagactgagactggaacctgaaatgggcgacatgtgcaccaaaaggtgaagagccgttgcgctgctggaaaactctcctgtacagggacctcgttgacattttccatgtagtcgtagtgaaacctgccacgctgcggccaaaataattgttagaagcagcaatccgaatgtaattattgccagtgcctcgtacaagtcgcgttagcttcttgttagccgtgtgcaacggcgagccggcacgcaaagatttgttagcttgttgtcattgcatctgtgtacaaagtctcgtccaagaaattgattcactttcgcttgcgcacaacgtagacacgcaatcccttgttcagatgtagtagcttataggtagattgtgttgattatatgttcaaaaagtaattaaaacgtccattagcagagggagagtgtgtgtatataaaggggatcgcgcgtgctgaagttgggagatagattccacttccacgttctagccactctgttgcccctcctgctatgttacggccgtcatttttcacttgcggcaagcaatgccacaatgttttatcttcgtacatgtgaataccttgctactggttctgtgatattgatgagcaacgaacatgtgaagcacagattaatgtatcttgtttcactaatacacgag

SEQ ID NO: 55505 - DNA, 8825 bp, Zea Mays
ccatgtgcgccgcttcgggtctcctcgcagtcctcctcgaagtcgcagagaagctgttcgtcggaatgggtcggggcagcaagtgggacgggacgccgcttgtgcagtgcattcaagtgttgggtgggcactctgtcagtgtaagggacttacacacctggctccttttgatcaagaaggcgctcggcacgcagtgggccacgcagctgactatcgcgttggaaaacgccgtggctagcaatgaagctaaagggccggcggtgaccttcgagtttgacggggagagctccggcttgctcgccccgggggacaaccggtggccattctcgaatggtcttgggtttgccacatggatatacgtagagtccttctcaggctcacttaacacagctacggccactgcagccgttgcagccgctgcagcatctgcatctgggaagtcatcaccttcagcagcagcggctgctgcctgcacgcttgcgggagaagggacaaagcacatgcccaggattttcagtttccttacttcggaaaaccatggtattgaggcctatttcaatgaccagtttctagttgtggagagtgcggctgggaaggggaagaaggcttctctccatttcacttatgaattcaaaccccggtgctggtactttgttggtctggagcactctagcaaacaagctttgcttggtaagtctgagagtgaattgcggttgtatgtggatggggaccttcatgagagctgtccatttgagcccccacgcatcgtgaaaccactggttttttgttgcattgggaccaatccatcaccaactattgccggtcttcagcggcggcggcggcaatgtccattgtttgctgagatgggacctatctatatctttacagagcctatcgggccagagaaaatgagtcgacttgcttccaggggaggagatgcacttcccagcttcggcaacggtgctggttttccttggaaagctacaagtaaccacatcagggaaactgcagaggatggttatacactcgatattgagattggtggaagcttacatcttctttatcatcccagcctgctcaatggccggttttgttctgatgcttcaccttctggctcaacaggtactcaccgaagacctgcagaagttcttggcatggttcatatctctaatcgtgtccgtccagctgaatctttatgggcattggcttatggtggtcctatggcattattaccactgattgtgagcaatgtcgagatggataacctggaacctatacttggcgatttgtcatcgtctcttgctactgcatctctttctgttcctattttcaggatcatttctgtggctgttcaacatcctgggaataaagaagagttatgccgtactcatggaccagagcttctatctcaagttttacattatgtattggacacactatccagacttgaaagtggaaagaaagagatactgagtgatgaagagcttgttactgcaattgtatctttgtgtcagtctcaaagaaacgatcatagtcaaaaggtgcagctctttagcactttgctgttggacctgaagatgtggagttcatgcaactatattttgcagaaaaagcttctttcttcacttgcagacatggtttttgcagaatctacttgcatgcgtgatgcaaatgcactgcaaatgcttcttgatgggtgcagaaggtgttactgggtagttcatgaagcagattcaattgataccttcacacttactggaaacgagagacctttgggaaatgtgaatgctctggtcgatgagcttttggttgttattgaactgttgataggagcagcaccttctacattggcttctgatgatgttcgttgtttggttggatttattgtagactgcccacaacctaaccaggttgctagggtattgcttctcatctacagattgattgtgcacccgaacacttctagagccaatacgtttgctcagtcgttcatttctcgtggagtagtagaagcattactcgttcttttgcagagggaagctaaatctggtgatagcaatattctccatagctgtaatgtgtcacatgattctgcttcgtggaatgaatcttctaagcttaccaataaggattcaaaatttaaaaatgccagtggtgaaacaaactgccaggatcatcagattcaatcagtgcagcattatgaacccaactctcatgaaactggagttggacttggatctactagcaaatggagcctattaaagggtcagttcttaaagaatttgggtggcatggatgttccaaatatctctgacaatgtgcaaaatattgataatggtgatggagttcttgttgggatagtccgtgttttgggcgctttagttgcttcaggccacctgacttctacctcgcctactgtgagaccgaagttaccaagtggttttctgactacctctaatggagaaggaaataccatgtttgaagacagagtatctctactgctctttgcattgcagaaagctttccaagcagccccgaggaggcttatgaccagaaatgtctacacggcgttaatttcttcagtgatcaatgtttcttcaaaagataacctgaaaaatttacaagattctggataccattttaaacacattcctcttttggtagtcctacttcgttctcttccatatgcatcaaggtcattccaagctcgtgttattcaggatcttctatatttggtttgcagtcaccccaagaacagaagtacaatgacttccatcaatgaatggccagaatgcatattggaagttttgatttctaatcatgagatgggggacaacaaagattcagatggtataagcatatgtgaggttgaagacgtagtacacaatcttctacttgttgtgctgcagcattcaatgcgaaaaaaagatgggtggaaggacgtagaggcaacaatacattgtgcagaatggctttcaatggttggaggaactagcaccggtgaccaaagaattaggcgtgaagaagcattaccaattttcaagaggagattactgggtagtctgcttaatttttctgcccaggagcttcaagttcagcaaactgaagggattgctgctgctgcagctggtgttgcagcagagggtttagtgcctaaagaaacaaaagtacatgcagagaaagttgccaatctctcagtaatgttggctgagaatgcagttgttctgctgatgcttgtggaagatcatttgaggtcacgcagtcaacaatttttcatggcctgtttagctgatagtgctgcctcacctgcttcaatggcttcatcagctgtcagtaggtcaaattcattgagtagaactggcagtgagcatttggaagctggggactcgagacagtctttgtcaagtgatgctggtggtcttccagttgatgttcttgcttctacggtagatacaaatgggcaactttctgctgaagtgatggaacgtgtaacagcagcagcagcagctgagccttatggatctgtcagacatgcatttgtatcttatgggagctgtatttcggatctttcagaagggtggaagtacagaacccgattgtggtatggtgtatgcatccctcccaaatctaatgtgtttggtggtggggggagtggttgggtgtcatggaagtccgttcttgagaaggactccgatggaaactggattgaacttccattggtaaagaagtcagtagcgatgctgcaggcacttcttttagattctggacttggtggttgcctcgatagtggagttggatttgggcctggcatgggtgttatgggtgcctttaatcagttgttagatagtgatcagccatttttttgcatgctccggttgatccttgtttcaatgagggaggatgacagtggggaggatgacattttcatgaggaacattagcatgaagaatgtgatttcagaagtattaggctgtcaaactggaagcatgctgggacttggtggtaactccagtgcatctatgagaaaacgtccagctgcacttttgtggagagtgcttggccctgttcttaatatgccagtttctgaatctaagagacaacgagttctggttgcttcttctattctttattcagagttatggcatgctgtaagcagtgacagaaaaccagtgagaaaaaagtatgttggattgatcatgccgccatttgtagctgtcctgaaaagatatcgttctgttttggctggtatacatgagcttacatgtccagatgtgcaaaatccactacttattgatgactgggcttcgacagcagacacttcacctgttgaggttggtgttgcaatgatatcacctgcctgggctgctgcttttgcctctccaccagttgcaatggcattggccatgattgctgctggtgcctctgggacagaaacaatagcaccgccaaccaataagttgcgcaggcgtgacacctcattgctagaacgtagggcagctaaattgcacactttctcaagttttcagatgcctatagatactacaccaagcttgcccacatcagcaccaaaggacaaagcagctgcaaaagctgcagccttggctgctgctcgtgaccttgagcgtagtgctaagattggttcaagaaggggtcttagtgctgtagcgatggctacttcaggacagaggaggtctgctggtgatattgagagagcccaaaggtggaacatatctgaagctatgggtgctgcatggatggagtgtctgcagtctgctgactcaaagtctgtttcaggaagagatttttctgctctttcatacaaatatgttgcacttcttgtttccagttttgcgttagcacgcaatttgcagcgagttgagatggagagacgaacacaagtcgaaatattgaaccgcagttgcatgtctattggacttcgggcatggcagcatcttcttcactgcttgatagagacaagtagactctacggaccttttggagaactcctctgtagtcccgatagtattttctggaagttagacttaactgaaagttcgttaagaatgagaagatttatgaaaaggaactacaattggttgaatcacttgggtgcttctgctaattatgtggagcagaagtttctttgtgatggtgcagacgcatgccactcagaagatggagactctttacttagtgttcttcctgcaagttctttgattacagtagatgaagtacatgaacaaattgtgcagagacaaagtgataatatctgcagcagtgtggatgatcaactgacagattcgtcaacaactgatcagatttttacaggatcaatagattcaagaagttctgacttttctggtgttcgcaacttgattcgatccacagtagttacacctggttacaagactaataatgagcgaattattattgaacttccttcaatgatgattcggccattgaaggttgtacgaggaaccttccaagtcacctcaaagaggattaacttcatagttgatgagcatatgagtgacagttacatggatgatattgcatccactagtggccaatatgatcagcaagatagagatcggagctggttcctatcatcacttcatcagatttttagtagaagatatctactacgtcaaagtgctttggaattatttatggtagacaggtcaaactttttatttgatttcgaggatataggatcacgtacacatgcttatcgggcccttgttcacaccaaacctccttatttgaacaccgtttccgttgctacccaaaggcctgaacaaatcttcaagcagacacagttgatggagcgctgggctaaatgggagattagcaattttgaatatttgatggaactgaacactctcgctggccgcacttacaatgacattactcagtatcctgtttttccatgggtaatagcagattacaagtccaaaactttggatttggaaagtccgtccacataccgagatctttcaaagccaattggtgcactaaatcctgcacgtttgaagaaattccaagaccattactccagtttcaaggatccaatcatcccaaaatttcactatggttcacattactccaatcctggcacggtattgtattatcttgctaggatagaaccttttagcatcctctatgctcagctgcaaggtgccaagttcgatcatgatgattgtgcattctctgatgtcgccagaacatggaacagtgttcttgagggcatgaatgatgtaaaagagctagttccagagatgttttaccttcctgaggtatttactaatgtaaacccaagtggaagactaggttctgtagcactgcctccttgggctaaaaatgctgttgattttatacatatgcatcggaaagctctcgagagtgatcatgtctccacacgtttgcatgaatggatcgatctaatatttggatataaacaaagaggtaaaggagcagaggtagccaacaatatcttccctcatgttacatatgatgggatggtggacattgataaaatcactgatccagtgcaacggcgaagtgtacaaaatcaaatatgttattttggacagacaccatctcaattgctgacagttccacacataagaaggcggtcgttgacacaaatattacaattgcagacaatattccggaacccaagtgaggttagatcttatgtgcttccaagtccagagcactgcaatgttcctgctagcacgatgcttgtatccaatgattgtcttgtagtcatagattctaatgttcccacagcacatgtggcattgcaccattggcagccaaataccccagatggcctaggggcgcctttcctctttcatcacgggaaaaatgccataaattcaagtggtggtgcaatatttcgcatatttaaaggatcttcaggttctgcagaagactatcagtttccacgagctgtagcatttgcagcctctgcagtacaaagttcatcagctgttgttgttacatgtgacaaagaagttataactggcaggcatgcagataactctgtgaagatgatctctccggatggagcaaggactatcgaaactgcatttgggcatcttgcacctgtgacctgcctcgcactgtctgcagacagtagctatcttgttacagggtctcgtgacacaacagttatactttggaggatacgtcaggtgggttctgcacataagaaaaatgctccagaacctccaccatctacaccgacaacacctactagtcctctagccactggtagtagcagcgacagtagtccaagcaaaactctagaaacctacaggaggcgacgaattgaaggccctatgcatgtactaagaggacatctcggagaagtaacctgctgttctgttagttctgatttggggcttgttggttcatcttcgagtgtgtctggtgtcctattacattccttgagaacaggtcggctaataaagaagctcgatgtgccagaagcccattccatatgcttttcttctcaaggcattgtattggtttggaatgaagttgagaacagactgtccaccttcactgttaacggaatccctattgctaccgcagttgtgtcacctttctctgcacgagtcagttgcattgagatttctacagatgggcaatttgctgcaatgggaacttgttcatctagcaatgacaatcatgactgcagcactgctctggaagataattctgagcttgacaagcccggtagtgatgaggatgtacaaggatcaaatgagaccaggctatctgttgacgctccctctatctgcttccttgatctatacaaacttgaggtaatccataagctgaagctggaagaaggacaggacgtcacagcactcgctctagaccaagaaaacaccacccttctggtttcgacagctgataagcagctaatagtctacacgggtccggctccaagtaccccgtaggtcaatccattagctccccggtgcttggttggaaaaaatgtaatggagatcagcgctagctaccttgacggcccaactgacagtgagctcggagacgacagtacagataatgcacgttaggcgacgggcttctcttgccgtgagcatggcgctgctgtacgtagaggctccaatggattgtgctgtaatacaagactgagactggaacctgaaatgggcgacatgtgcaccaaaaggtgaagagccgttgcgctgctggaaaactctcctgtacagggacctcgttgacattttccatgtagtcgtagtgaaacctgccacgctgcggccaaaataattgttagaagcagcaatccgaatgtaattattgccagtgcctcgtacaagtcgcgttagcttcttgttagccgtgtgcaacggcgagccggcacgcaaagatttgttagcttgttgtcattgcatctgtgtacaaagtctcgtccaagaaattgattcactttcgcttgcgcacaacgtagacacgcaatcccttgttcagatgtagtagcttataggtagattgtgttgattatatgttcaaaaagtaattaaaacgtccattagcagagggagagtgtgtgtatataaaggggatcgcgcgtgctgaagttgggagatagattccacttccacgttctagccactctgttgcccctcctgctatgttacggccgtcatttttcacttgcggcaagcaatgccacaatgttttatcttcgtacatgtgaataccttgctactggttctgtgatattgatgagcaacgaacatgtgaagcacagattaatgtatcttgtttcactaatacacgag

SEQ ID NO: 55506 - DNA, 8828 bp, Zea Mays
ccatgtgcgccgcttcgggtctcctcgcagtcctcctcgaagtcgcagagaagctgttcgtcggaatgggtcggggcagcaagtgggacgggacgccgcttgtgcagtgcattcaagtgttgggtgggcactctgtcagtgtaagggacttacacacctggctccttttgatcaagaaggcgctcggcacgcagtgggccacgcagctgactatcgcgttggaaaacgccgtggctagcaatgaagctaaagggccggcggtgaccttcgagtttgacggggagagctccggcttgctcgccccgggggacaaccggtggccattctcgaatggtcttgggtttgccacatggatatacgtagagtccttctcaggctcacttaacacagctacggccactgcagccgttgcagccgctgcagcatctgcatctgggaagtcatcaccttcagcagcagcggctgctgcctgcacgcttgcgggagaagggacaaagcacatgcccaggattttcagtttccttacttcggaaaaccatggtattgaggcctatttcaatgaccagtttctagttgtggagagtgcggctgggaaggggaagaaggcttctctccatttcacttatgaattcaaaccccggtgctggtactttgttggtctggagcactctagcaaacaagctttgcttggtaagtctgagagtgaattgcggttgtatgtggatggggaccttcatgagagctgtccatttgagcccccacgcatcgtgaaaccactggttttttgttgcattgggaccaatccatcaccaactattgccggtcttcagcggcggcggcggcaatgtccattgtttgctgagatgggacctatctatatctttacagagcctatcgggccagagaaaatgagtcgacttgcttccaggggaggagatgcacttcccagcttcggcaacggtgctggttttccttggaaagctacaagtaaccacatcagggaaactgcagaggatggttatacactcgatattgagattggtggaagcttacatcttctttatcatcccagcctgctcaatggccggttttgttctgatgcttcaccttctggctcaacaggtactcaccgaagacctgcagaagttcttggcatggttcatatctctaatcgtgtccgtccagctgaatctttatgggcattggcttatggtggtcctatggcattattaccactgattgtgagcaatgtcgagatggataacctggaacctatacttggcgatttgtcatcgtctcttgctactgcatctctttctgttcctattttcaggatcatttctgtggctgttcaacatcctgggaataaagaagagttatgccgtactcatggaccagagcttctatctcaagttttacattatgtattggacacactatccagacttgaaagtggaaagaaagagatactgagtgatgaagagcttgttactgcaattgtatctttgtgtcagtctcaaagaaacgatcatagtcaaaaggtgcagctctttagcactttgctgttggacctgaagatgtggagttcatgcaactatattttgcagaaaaagcttctttcttcacttgcagacatggtttttgcagaatctacttgcatgcgtgatgcaaatgcactgcaaatgcttcttgatgggtgcagaaggtgttactgggtagttcatgaagcagattcaattgataccttcacacttactggaaacgagagacctttgggaaatgtgaatgctctggtcgatgagcttttggttgttattgaactgttgataggagcagcaccttctacattggcttctgatgatgttcgttgtttggttggatttattgtagactgcccacaacctaaccaggttgctagggtattgcttctcatctacagattgattgtgcacccgaacacttctagagccaatacgtttgctcagtcgttcatttctcgtggagtagtagaagcattactcgttcttttgcagagggaagctaaatctggtgatagcaatattctccatagctgtaatgtgtcacatgattctgcttcgtggaatgaatcttctaagcttaccaataaggattcaaaatttaaaaatgccagtggtgaaacaaactgccaggatcatcagattcaatcagtgcagcattatgaacccaactctcatgaaactggagttggacttggatctactagcaaatggagcctattaaagggtcagttcttaaagaatttgggtggcatggatgttccaaatatctctgacaatgtgcaaaatattgataatggtgatggagttcttgttgggatagtccgtgttttgggcgctttagttgcttcaggccacctgacttctacctcgcctactgtgagaccgaagttaccaagtggttttctgactacctctaatggagaaggaaataccatgtttgaagacagagtatctctactgctctttgcattgcagaaagctttccaagcagccccgaggaggcttatgaccagaaatgtctacacggcgttaatttcttcagtgatcaatgtttcttcaaaagataacctgaaaaatttacaagattctggataccattttaaacacattcctcttttggtagtcctacttcgttctcttccatatgcatcaaggtcattccaagctcgtgttattcaggatcttctatatttggtttgcagtcaccccaagaacagaagtacaatgacttccatcaatgaatggccagaatgcatattggaagttttgatttctaatcatgagatgggggacaacaaagattcagatggtataagcatatgtgaggttgaagacgtagtacacaatcttctacttgttgtgctgcagcattcaatgcgaaaaaaagatgggtggaaggacgtagaggcaacaatacattgtgcagaatggctttcaatggttggaggaactagcaccggtgaccaaagaattaggcgtgaagaagcattaccaattttcaagaggagattactgggtagtctgcttaatttttctgcccaggagcttcaagttcagcaaactgaagggattgctgctgctgcagctggtgttgcagcagagggtttagtgcctaaagaaacaaaagtacatgcagagaaagttgccaatctctcagtaatgttggctgagaatgcagttgttctgctgatgcttgtggaagatcatttgaggtcacgcagtcaacaatttttcatggcctgtttagctgatagtgctgcctcacctgcttcaatggcttcatcagctgtcagtaggtcaaattcattgagtagaactggcagtgagcatttggaagctggggactcgagacagtctttgtcaagtgatgctggtggtcttccagttgatgttcttgcttctacggtagatacaaatgggcaactttctgctgaagtgatggaacgtgtaacagcagcagcagcagctgagccttatggatctgtcagacatgcatttgtatcttatgggagctgtatttcggatctttcagaagggtggaagtacagaacccgattgtggtatggtgtatgcatccctcccaaatctaatgtgtttggtggtggggggagtggttgggtgtcatggaagtccgttcttgagaaggactccgatggaaactggattgaacttccattggtaaagaagtcagtagcgatgctgcaggcacttcttttagattctggacttggtggttgcctcgatagtggagttggatttgggcctggcatgggtgttatgggtgcctttaatcagttgttagatagtgatcagccatttttttgcatgctccggttgatccttgtttcaatgagggaggatgacagtggggaggatgacattttcatgaggaacattagcatgaagaatgtgatttcagaagtattaggctgtcaaactggaagcatgctgggacttggtggtaactccagtgcatctatgagaaaacgtccagctgcacttttgtggagagtgcttggccctgttcttaatatgccagtttctgaatctaagagacaacgagttctggttgcttcttctattctttattcagagttatggcatgctgtaagcagtgacagaaaaccagtgagaaaaaagtatgttggattgatcatgccgccatttgtagctgtcctgaaaagatatcgttctgttttggctggtatacatgagcttacatgtccagatgtgcaaaatccactacttattgatgactgggcttcgacagcagacacttcacctgttgaggttggtgttgcaatgatatcacctgcctgggctgctgcttttgcctctccaccagttgcaatggcattggccatgattgctgctggtgcctctgggacagaaacaatagcaccgccaaccaataagttgcgcaggcgtgacacctcattgctagaacgtagggcagctaaattgcacactttctcaagttttcagatgcctatagatactacaccaagcttgcccacatcagcaccaaaggacaaagcagctgcaaaagctgcagccttggctgctgctcgtgaccttgagcgtagtgctaagattggttcaagaaggggtcttagtgctgtagcgatggctacttcaggacagaggaggtctgctggtgatattgagagagcccaaaggtggaacatatctgaagctatgggtgctgcatggatggagtgtctgcagtctgctgactcaaagtctgtttcaggaagagatttttctgctctttcatacaaatatgttgcacttcttgtttccagttttgcgttagcacgcaatttgcagcgagttgagcagatggagagacgaacacaagtcgaaatattgaaccgcagttgcatgtctattggacttcgggcatggcagcatcttcttcactgcttgatagagacaagtagactctacggaccttttggagaactcctctgtagtcccgatagtattttctggaagttagacttaactgaaagttcgttaagaatgagaagatttatgaaaaggaactacaattggttgaatcacttgggtgcttctgctaattatgtggagcagaagtttctttgtgatggtgcagacgcatgccactcagaagatggagactctttacttagtgttcttcctgcaagttctttgattacagtagatgaagtacatgaacaaattgtgcagagacaaagtgataatatctgcagcagtgtggatgatcaactgacagattcgtcaacaactgatcagatttttacaggatcaatagattcaagaagttctgacttttctggtgttcgcaacttgattcgatccacagtagttacacctggttacaagactaataatgagcgaattattattgaacttccttcaatgatgattcggccattgaaggttgtacgaggaaccttccaagtcacctcaaagaggattaacttcatagttgatgagcatatgagtgacagttacatggatgatattgcatccactagtggccaatatgatcagcaagatagagatcggagctggttcctatcatcacttcatcagatttttagtagaagatatctactacgtcaaagtgctttggaattatttatggtagacaggtcaaactttttatttgatttcgaggatataggatcacgtacacatgcttatcgggcccttgttcacaccaaacctccttatttgaacaccgtttccgttgctacccaaaggcctgaacaaatcttcaagcagacacagttgatggagcgctgggctaaatgggagattagcaattttgaatatttgatggaactgaacactctcgctggccgcacttacaatgacattactcagtatcctgtttttccatgggtaatagcagattacaagtccaaaactttggatttggaaagtccgtccacataccgagatctttcaaagccaattggtgcactaaatcctgcacgtttgaagaaattccaagaccattactccagtttcaaggatccaatcatcccaaaatttcactatggttcacattactccaatcctggcacggtattgtattatcttgctaggatagaaccttttagcatcctctatgctcagctgcaaggtgccaagttcgatcatgatgattgtgcattctctgatgtcgccagaacatggaacagtgttcttgagggcatgaatgatgtaaaagagctagttccagagatgttttaccttcctgaggtatttactaatgtaaacccaagtggaagactaggttctgtagcactgcctccttgggctaaaaatgctgttgattttatacatatgcatcggaaagctctcgagagtgatcatgtctccacacgtttgcatgaatggatcgatctaatatttggatataaacaaagaggtaaaggagcagaggtagccaacaatatcttccctcatgttacatatgatgggatggtggacattgataaaatcactgatccagtgcaacggcgaagtgtacaaaatcaaatatgttattttggacagacaccatctcaattgctgacagttccacacataagaaggcggtcgttgacacaaatattacaattgcagacaatattccggaacccaagtgaggttagatcttatgtgcttccaagtccagagcactgcaatgttcctgctagcacgatgcttgtatccaatgattgtcttgtagtcatagattctaatgttcccacagcacatgtggcattgcaccattggcagccaaataccccagatggcctaggggcgcctttcctctttcatcacgggaaaaatgccataaattcaagtggtggtgcaatatttcgcatatttaaaggatcttcaggttctgcagaagactatcagtttccacgagctgtagcatttgcagcctctgcagtacaaagttcatcagctgttgttgttacatgtgacaaagaagttataactggcaggcatgcagataactctgtgaagatgatctctccggatggagcaaggactatcgaaactgcatttgggcatcttgcacctgtgacctgcctcgcactgtctgcagacagtagctatcttgttacagggtctcgtgacacaacagttatactttggaggatacgtcaggtgggttctgcacataagaaaaatgctccagaacctccaccatctacaccgacaacacctactagtcctctagccactggtagtagcagcgacagtagtccaagcaaaactctagaaacctacaggaggcgacgaattgaaggccctatgcatgtactaagaggacatctcggagaagtaacctgctgttctgttagttctgatttggggcttgttggttcatcttcgagtgtgtctggtgtcctattacattccttgagaacaggtcggctaataaagaagctcgatgtgccagaagcccattccatatgcttttcttctcaaggcattgtattggtttggaatgaagttgagaacagactgtccaccttcactgttaacggaatccctattgctaccgcagttgtgtcacctttctctgcacgagtcagttgcattgagatttctacagatgggcaatttgctgcaatgggaacttgttcatctagcaatgacaatcatgactgcagcactgctctggaagataattctgagcttgacaagcccggtagtgatgaggatgtacaaggatcaaatgagaccaggctatctgttgacgctccctctatctgcttccttgatctatacaaacttgaggtaatccataagctgaagctggaagaaggacaggacgtcacagcactcgctctagaccaagaaaacaccacccttctggtttcgacagctgataagcagctaatagtctacacgggtccggctccaagtaccccgtaggtcaatccattagctccccggtgcttggttggaaaaaatgtaatggagatcagcgctagctaccttgacggcccaactgacagtgagctcggagacgacagtacagataatgcacgttaggcgacgggcttctcttgccgtgagcatggcgctgctgtacgtagaggctccaatggattgtgctgtaatacaagactgagactggaacctgaaatgggcgacatgtgcaccaaaaggtgaagagccgttgcgctgctggaaaactctcctgtacagggacctcgttgacattttccatgtagtcgtagtgaaacctgccacgctgcggccaaaataattgttagaagcagcaatccgaatgtaattattgccagtgcctcgtacaagtcgcgttagcttcttgttagccgtgtgcaacggcgagccggcacgcaaagatttgttagcttgttgtcattgcatctgtgtacaaagtctcgtccaagaaattgattcactttcgcttgcgcacaacgtagacacgcaatcccttgttcagatgtagtagcttataggtagattgtgttgattatatgttcaaaaagtaattaaaacgtccattagcagagggagagtgtgtgtatataaaggggatcgcgcgtgctgaagttgggagatagattccacttccacgttctagccactctgttgcccctcctgctatgttacggccgtcatttttcacttgcggcaagcaatgccacaatgttttatcttcgtacatgtgaataccttgctactggttctgtgatattgatgagcaacgaacatgtgaagcacagattaatgtatcttgtttcactaatacacgag

SEQ ID NO: 55507 - DNA, 1238 bp, Zea Mays
acaaaacgtgcctttcctcatagcccaagcccaccgtcagcacgcttacactcgctcgtttcccaacgcgcacccaacatggccgctccgaccgccgccgtcgacactgccgccccgcctcctcctccctcggcagaggccgcggctgcacctgtactggatcaaaaggtctctcctgctgctgcccctcagcccgatgcgcccgcgcccgcgcccgcgccgaagaagcggaagctcgaggaagcggggttccacacctccgaatactacaagatccgtgccgtcgtcgccgatctgcgtgttcgcttcgtccaggttcacgaagctactgatttccgcaacacggatgctgcacgtgagattatgagagaaataaatgtggtaatggatctatccaagaaaatgaggctcaagcttggtgctacttctgaacctgtgaaaccattggagaagccttcagttggacttgtgaaggatgagcttgtgaaaccatcagagaagccttcatctggacctgtgacgggggaacctgtaaagccaccggagaagccttcagctggacctgtgaaggacgagcctatgaaaccatcggagaagccttctgctgaacctgtgaagaacgaacccagtgagccagctctagctggagaaaacaatcgagctcccagggtaagccagactacaagttctccaaataatgcaggtattgatgcaccagtagtcaagcatgataactcagaggcacggaagtgaagacgatagaggaagcccaaagtaccgatccatcgagatagcatatcacgcaaatctgctggacaaaaatgcagagtgaccggttgattccataggggctcagatttttcttgcccctatcgggggtaaaattattcgctttgggctaatggacgaagagtcgtggacacatcgagatccaaactagattgtcttcagttgttcatatccattcattcagtactatgttgctaatttcccatgaacaattttatcttcaaatagctactctctaactgcatcattctatacatcacattggcctgcagcctgctgtatgaagttaattgccagtcaatttcaagtcgtgcttgagaagaggtgatggaattgcaagcgagttgtgtggctactggagactctcctcaattggtgatattttcttttggagcatgactgggcatgggtgggcacgacattgtggcgacatcagaagaacatatgct

SEQ ID NO: 55508 - DNA, 792 bp, Zea Mays
cacaaaacgtgcctttcctcatagcccaagcccaccgtcagcacgcttacactcgctcgtttcccaacgcgcacccaacatggccgctccgaccgccgccgtcgacactgccgccccgcctcctcctccctcggcagaggccgcggctgcacctgtactggatcaaaaggtctctcctgctgctgcccctcagcccgatgcgcccgcgcccgcgcccgcgccgaagaagcggaagctcgaggaagcggggttccacacctccgaatactacaagatccgtgccgtcgtcgccgatctgcgtgttcgcttcgtccagaaataaatgtggtaatggatctatccaagaaaatgaggctcaagcttggtgctacttctgaacctgtgaaaccattggagaagccttcagttggacttgtgaaggatgagcttgtgaaaccatcagagaagccttcatctggacctgtgacgggggaacctgtaaagccaccggagaagccttcagctggacctgtgaaggacgagcctatgaaaccatcggagaagccttctgctgaacctgtgaagaacgaacccagtgagccagctctagctggagaaaacaatcgagctcccaggcctgctgtatgaagttaattgccagtcaatttcaagtcgtgcttgagaagaggtgatggaattgcaagcgagttgtgtggctactggagactctcctcaattggtgatattttcttttggagcatgactgggcatgggtgggcacgacattgtggcgacatcagaagaacatatgct

SEQ ID NO: 55509 - DNA, 1339 bp, Zea Mays
aaatgtaccctggatttttaaaagtaaaattcctctgaaattttggagtgagcttgtttttcatatcgtttcatgtatagagagagggagagataaagagaatttgatgagtgccaatatgcatccggcctttaccgatgtgtctggggtccggtcacaaaacgtgcctttcctcatagcccaagcccaccgtcagcacgcttacactcgctcgtttcccaacgcgcacccaacatggccgctccgaccgccgccgtcgacactgccgccccgcctcctcctccctcggcagaggccgcggctgcacctgtactggatcaaaaggtctctcctgctgctgcccctcagcccgatgcgcccgcgcccgcgcccgcgccgaagaagcggaagctcgaggaagcggggttccacacctccgaatactacaagatccgtgccgtcgtcgccgatctgcgtgttcgcttcgtccagaaataaatgtggtaatggatctatccaagaaaatgaggctcaagcttggtgctacttctgaacctgtgaaaccattggagaagccttcagttggacttgtgaaggatgagcttgtgaaaccatcagagaagccttcatctggacctgtgacgggggaacctgtaaagccaccggagaagccttcagctggacctgtgaaggacgagcctatgaaaccatcggagaagccttctgctgaacctgtgaagaacgaacccagtgagccagctctagctggagaaaacaatcgagctcccagggtaagccagactacaagttctccaaataatgcaggtattgatgcaccagtagtcaagcatgataactcagaggcacggaagtgaagacgatagaggaagcccaaagtaccgatccatcgagatagcatatcacgcaaatctgctggacaaaaatgcagagtgaccggttgattccataggggctcagatttttcttgcccctatcgggggtaaaattattcgctttgggctaatggacgaagagtcgtggacacatcgagatccaaactagattgtcttcagttgttcatatccattcattcagtactatgttgctaatttcccatgaacaattttatcttcaaatagctactctctaactgcatcattctatacatcacattggcctgcagcctgctgtatgaagttaattgccagtcaatttcaagtcgtgcttgagaagaggtgatggaattgcaagcgagttgtgtggctactggagactctcctcaattggtgatattttcttttggagcatgactgggcatgggtgggcacgacattgtggcgacatcagaagaacatatgct

SEQ ID NO: 55510 - DNA, 817 bp, Zea Mays
acaaaacgtgcctttcctcatagcccaagcccaccgtcagcacgcttacactcgctcgtttcccaacgcgcacccaacatggccgctccgaccgccgccgtcgacactgccgccccgcctcctcctccctcggcagaggccgcggctgcacctgtactggatcaaaaggtctctcctgctgctgcccctcagcccgatgcgcccgcgcccgcgcccgcgccgaagaagcggaagctcgaggaagcggggttccacacctccgaatactacaagatccgtgccgtcgtcgccgatctgcgtgttcgcttcgtccaggttcacgaagctactgatttccgcaacacggatgctgcacgtgagattatgagagaaataaatgtggtaatggatctatccaagaaaatgaggctcaagcttggtgctacttctgaacctgtgaaaccattggagaagccttcagttggacttgtgaaggatgagcttgtgaaaccatcagagaagccttcatctggacctgtgacgggggaacctgtaaagccaccggagaagccttcagctggacctgtgaaggacgagcctatgaaaccatcggagaagccttctgctgaacctgtgaagaacgaacccagtgagccagctctagctggagaaaacaatcgagctcccaggcctgctgtatgaagttaattgccagtcaatttcaagtcgtgcttgagaagaggtgatggaattgcaagcgagttgtaaggctttctggctcacctcacatttcaaacttcattctatgtgcagtccatggtgtaaaacagtattttgc

SEQ ID NO: 55511 - DNA, 1405 bp, Zea Mays
acaaaacgtgcctttcctcatagcccaagcccaccgtcagcacgcttacactcgctcgtttcccaacgcgcacccaacatggccgctccgaccgccgccgtcgacactgccgccccgcctcctcctccctcggcagaggccgcggctgcacctgtactggatcaaaaggtctctcctgctgctgcccctcagcccgatgcgcccgcgcccgcgcccgcgccgaagaagcggaagctcgaggaagcggggttccacacctccgaatactacaagatccgtgccgtcgtcgccgatctgcgtgttcgcttcgtccaggttcacgaagctactgatttccgcaacacggatgctgcacgtgagattatgagagtccgtttcagagtttcagatctctgggcattataggtcggaggtgaagacttaaaacgcagccatcagagttgtcggaatctatttgcagggtggtcccacagggacttcataaaacttagtgcctacacatggtggtgtcatacacatgacgaggacgaaacattttgtggtgcgagtggcatagatgtcaacagaaataaatgtggtaatggatctatccaagaaaatgaggctcaagcttggtgctacttctgaacctgtgaaaccattggagaagccttcagttggacttgtgaaggatgagcttgtgaaaccatcagagaagccttcatctggacctgtgacgggggaacctgtaaagccaccggagaagccttcagctggacctgtgaaggacgagcctatgaaaccatcggagaagccttctgctgaacctgtgaagaacgaacccagtgagccagctctagctggagaaaacaatcgagctcccagggtaagccagactacaagttctccaaataatgcaggtattgatgcaccagtagtcaagcatgataactcagaggcacggaagtgaagacgatagaggaagcccaaagtaccgatccatcgagatagcatatcacgcaaatctgctggacaaaaatgcagagtgaccggttgattccataggggctcagatttttcttgcccctatcgggggtaaaattattcgctttgggctaatggacgaagagtcgtggacacatcgagatccaaactagattgtcttcagttgttcatatccattcattcagtactatgttgctaatttcccatgaacaattttatcttcaaatagctactctctaactgcatcattctatacatcacattggcctgcagcctgctgtatgaagttaattgccagtcaatttcaagtcgtgcttgagaagaggtgatggaattgcaagcgagttgtaaggctttctggctcacctcacatttcaaacttcattctatgtgcagtccatggtgtaaaacagtattttgc

SEQ ID NO: 55512 - DNA, 1316 bp, Zea Mays
cacaaaacgtgcctttcctcatagcccaagcccaccgtcagcacgcttacactcgctcgtttcccaacgcgcacccaacatggccgctccgaccgccgccgtcgacactgccgccccgcctcctcctccctcggcagaggccgcggctgcacctgtactggatcaaaaggtctctcctgctgctgcccctcagcccgatgcgcccgcgcccgcgcccgcgccgaagaagcggaagctcgaggaagcggggttccacacctccgaatactacaagatccgtgccgtcgtcgccgatctgcgtgttcgcttcgtccaggttcacgaagctactgatttccgcaacacggatgctgcacgtgagattatgagagggtggtcccacagggacttcataaaacttagtgcctacacatggtggtgtcatacacatgacgaggacgaaacattttgtggtgcgagtggcatagatgtcaacagaaataaatgtggtaatggatctatccaagaaaatgaggctcaagcttggtgctacttctgaacctgtgaaaccattggagaagccttcagttggacttgtgaaggatgagcttgtgaaaccatcagagaagccttcatctggacctgtgacgggggaacctgtaaagccaccggagaagccttcagctggacctgtgaaggacgagcctatgaaaccatcggagaagccttctgctgaacctgtgaagaacgaacccagtgagccagctctagctggagaaaacaatcgagctcccagggtaagccagactacaagttctccaaataatgcaggtattgatgcaccagtagtcaagcatgataactcagaggcacggaagtgaagacgatagaggaagcccaaagtaccgatccatcgagatagcatatcacgcaaatctgctggacaaaaatgcagagtgaccggttgattccataggggctcagatttttcttgcccctatcgggggtaaaattattcgctttgggctaatggacgaagagtcgtggacacatcgagatccaaactagattgtcttcagttgttcatatccattcattcagtactatgttgctaatttcccatgaacaattttatcttcaaatagctactctctaactgcatcattctatacatcacattggcctgcagcctgctgtatgaagttaattgccagtcaatttcaagtcgtgcttgagaagaggtgatggaattgcaagcgagttgtaaggctttctggctcacctcacatttcaaacttcattctatgtgcagtccatggtgtaaaacagtattttgc

SEQ ID NO: 55513 - DNA, 3435 bp, Zea Mays
gcatcctgcattacccccctcgcgcgtccctctccgatccctcaccccccagattcctcctgcctacgctcgcgggtctctcctgcccgcccgatttcgcctcggacctcgtcgtccatggtgtgctttttcttcgtggcgatttgctgcgcctcgtcgccggcgaccttggcgcttgcaggcggccgactgcagtagggcaggtctgcttccacagacgtcttcgccgtttgagaggtggcgcccacctccaccgtctcgtctgctgcctgctctagtggtgccggacctggggtggagcggagatccacaagggcttggattgctttcgttgtcttgctggctttgaggtggagatgacactaagttgaaatttttatcacacgaggaagcaagaacaggaaaaaaaatcacatttcagtgttgcactctgtggagggttcattgttggtccaccaaactactgcagtgctggagggtttttgttgaagtcctcttcatgttcaccatttctaaattgtcataggctcatagcattgtagctgatcagtcttcaagatcttcctatgagtacatagataaatcatcatcgtatctgtgttaagtatgccaccatggtggggaaaatcttcatccaaagaagtgaaaaagtctgccaaagaaaacctcatcgacacatttcagcgtctcataagttcaaatgagcaaaagggaagcagaaaatcacgaagtagtcgtagacatggtaaagacacagctggtgacaaaggttgctggtccactgcccaatcccgctcaacatccccttcaaaagaggtctctcgatgtcagagctttgcagcagatagaccacatgcacagccacttcctcttcccaaatcacgtgctaaggtgacacgtacttcttctgatattaccaactcaaagtccactttggaaaagcatggcaaaggacaactgcttccactccctccaattcagcctaaaaaaagacctgaagctactgaacctgttactgaagtagctactgcttcggtctccagcaactgttctattgacagtgatgatcctggtgattctcagcttcagagtcctgtgggaaatgaggctgaaaatgcgactagaattactgcaacaagtagttcaagtgttgtgcgcaaagaatgttctagtgctattaccagaaagaacacaaaggaagttgcaaagccaaacagtgcttttctcagtaaccaaatcctgtcaacatctccaagagtgctccagtccaggttctggtcagacatctgggcataattcagtgggaggtgatatgctaggcccaatcttttggcagcctagccgaggtagtccagagtgttcaccaattccaagcccaagaatgacgagtcctggtccaagttctcgggtgcatagtggaagtgtctctcctttgcatccaagagctggtggggtcactcctgaatccccaacaaatcgacatgctgaagggaacaagaagcaaacccacagattgccgcttccgccattaagcattgctaatagttctacctttttgccaaacagctctaacccaactagtcctatatctcgtagtcctggtagaacagagaatccaccgagtcctggttcacggtggaagaagggaaaattgattggccgtgggacatttggccatgtatatgctggttttaacagtgacagaggtgaaatgtgtgcgatgaaggaggttacccttttctcagatgatcctaaatcaaaagaaagtgcaaaacagctctgccaggaaatatcacttctgagccgactgcagcacccaaacattgtgcgatactatggatctgaaactgttgatgataagctttacatatacctggagtatgtttctggtggatctatacataagcttctccaagagtatggacagtttggtgaacaagccatttgcagttatactaagcaaatacttttgggcctagcttatttgcatgcaaagaatacagtacacagagacatcaaaggcgcaaacatattggtagaccctaatggccgcgtgaagctcgctgactttgggatggcaaaacatatcaatgggcagcagtgccctttctcatttaagggtagcccgtactggatggctcctgaggttataaaaaatgctagcggatgtaaccttgcagttgatatatggagtttaggatgcacagtcctagagatggctacttcaaaaccaccatggagccaatatgaagggattgccgcaatgtttaagataggaaacagtaaggagcttccaccaataccggatcacctctcagaagaagggaaagacttcataagacagtgcttgcaacgtgatccatccagccgtccaacagcagtggatcttctgcagcatccattcgtacaaaatgcaccgccacttgaaaaatcatctgcctctcatccactggaacagttgacggctatatcatgcagaacaaattcgaaggtggttgagcatgccagaaatatgtcctcgcttggtttggaaggccaatcaattttgcagagaagagctgccaaattttctttgccaaatagtgatatccatatacggagtaatatatcttgtcctgtatctccatgtggaagtcctcttctaagatcaagatctccacagcatcaaaatggtagaatgtcaccttctccaatttgcagccccaggactacttcgggtgcttcaactcctctgactggtggtagtggagctgttcctttaaaccatgtgaggcaaccagcttacagaaatgagggcttcacggtcacatcaagaggttttgatgaccacatgcctagccggcctgttgatccagtacatggacgttttattcgagtgcagcaattttccgtgggtcggcaggagagggtagtctctgaagttgacattctgagctctcaatatggaaagatgagacatgcaaatgtgtgggatccgcatgataggccattaccttctgagcgttcctctcaacagtgctttgggaatcatgcgaagctaaaaccttcactggacttgagatctgatgctgacagttggcagtggataaagattctcaaatgtcaatctcatattcccattactctaaagaagatgagacatgccctatcaggaaggggatgttgtatactcaaggacccaaaacagtgactctgaacctgtatactcttactctcgtatctacaacaatttagttttcgttttcttctatgggtttggaggccattgtacagaagggaactctcaacaagaaatccagattacatggcacaggcgaaagcaatttaaaggatatagagtggacttggacgaaggcaaagagatgatccaaaagatcaacacatgaagaaagatactggaagacccaatgaagaatccaagacacaggatggaag

SEQ ID NO: 55514 - DNA, 3724 bp, Zea Mays
gcatcctgcattacccccctcgcgcgtccctctccgatccctcaccccccagattcctcctgcctacgctcgcgggtctctcctgcccgcccgatttcgcctcggacctcgtcgtccatggtgtgctttttcttcgtggcgatttgctgcgcctcgtcgccggcgaccttggcgcttgcaggcggccgactgcagtagggcaggtctgcttccacagacgtcttcgccgtttgagaggtggcgcccacctccaccgtctcgtctgctgcctgctctagtggtgccggacctggggtggagcggagatccacaagggcttggattgctttcgttgtcttgctggctttgaggtggagatgacactaagttgaaatttttatcacacgaggaagcaagaacaggaaaaaaaatcacatttcagtgttgcactctgtggagggttcattgttggtccaccaaactactgcagtgctggagggtttttgttgaagtcctcttcatgttcaccatttctaaattgtcataggctcatagcattgtagctgatcagtcttcaagatcttcctatgagtacatagataaatcatcatcgtatctgtgttaagtatgccaccatggtggggaaaatcttcatccaaagaagtgaaaaagtctgccaaagaaaacctcatcgacacatttcagcgtctcataagttcaaatgagcaaaagggaagcagaaaatcacgaagtagtcgtagacatggtaaagacacagctggtgacaaaggttgctggtccactgcccaatcccgctcaacatccccttcaaaagaggtctctcgatgtcagagctttgcagcagatagaccacatgcacagccacttcctcttcccaaatcacgtgctaaggtgacacgtacttcttctgatattaccaactcaaagtccactttggaaaagcatggcaaaggacaactgcttccactccctccaattcagcctaaaaaaagacctgaagctactgaacctgttactgaagtagctactgcttcggtctccagcaactgttctattgacagtgatgatcctggtgattctcagcttcagagtcctgtgggaaatgaggctgaaaatgcgactagaattactgcaacaagtagttcaagtgttgtgcgcaaagaatgttctagtgctattaccagaaagaacacaaaggaagttgcaaagccaaacagtgcttttctcagtaaccaaatcctgtcaacatctccaagaggtacctttgctgatggttatcaatccaatttacaaagcccccgacagattgccctggagagtgctccgaatagtttgatgtcaagtccttctcgaagcccaagaaatatatgtcctgttcagattccaacttcagctttttgggcaataaaacctcatactgatgtaactttccttgggtctggtcagtgctccagtccaggttctggtcagacatctgggcataattcagtgggaggtgatatgctaggcccaatcttttggcagcctagccgaggtagtccagagtgttcaccaattccaagcccaagaatgacgagtcctggtccaagttctcgggtgcatagtggaagtgtctctcctttgcatccaagagctggtggggtcactcctgaatccccaacaaatcgacatgctgaagggaacaagaagcaaacccacagattgccgcttccgccattaagcattgctaatagttctacctttttgccaaacagctctaacccaactagtcctatatctcgtagtcctggtagaacagagaatccaccgagtcctggttcacggtggaagaagggaaaattgattggccgtgggacatttggccatgtatatgctggttttaacagtgacagaggtgaaatgtgtgcgatgaaggaggttacccttttctcagatgatcctaaatcaaaagaaagtgcaaaacagctctgccaggaaatatcacttctgagccgactgcagcacccaaacattgtgcgatactatggatctgaaactgttgatgataagctttacatatacctggagtatgtttctggtggatctatacataagcttctccaagagtatggacagtttggtgaacaagccatttgcagttatactaagcaaatacttttgggcctagcttatttgcatgcaaagaatacagtacacagagacatcaaaggcgcaaacatattggtagaccctaatggccgcgtgaagctcgctgactttgggatggcaaaacatatcaatgggcagcagtgccctttctcatttaagggtagcccgtactggatggctcctgaggttataaaaaatgctagcggatgtaaccttgcagttgatatatggagtttaggatgcacagtcctagagatggctacttcaaaaccaccatggagccaatatgaagggattgccgcaatgtttaagataggaaacagtaaggagcttccaccaataccggatcacctctcagaagaagggaaagacttcataagacagtgcttgcaacgtgatccatccagccgtccaacagcagtggatcttctgcagcatccattcgtacaaaatgcaccgccacttgaaaaatcatctgcctctcatccactggaacagttgacggctatatcatgcagaacaaattcgaaggtggttgagcatgccagaaatatgtcctcgcttggtttggaaggccaatcaattttgcagagaagagctgccaaattttctttgccaaatagtgatatccatatacggagtaatatatcttgtcctgtatctccatgtggaagtcctcttctaagatcaagatctccacagcatcaaaatggtagaatgtcaccttctccaatttgcagccccaggactacttcgggtgcttcaactcctctgactggtggtagtggagctgttcctttaaaccatgtgaggcaaccagcttacagaaatgagggcttcacggtcacatcaagaggttttgatgaccacatgcctagccggcctgttgatccagtacatggacgttttattcgagtgcagcaattttccgtgggtcggcaggagagggtagtctctgaagttgacattctgagctctcaatatggaaagatgagacatgcaaatgtgtgggatccgcatgataggccattaccttctgagcgttcctctcaacagtgctttgggaatcatgcgaagctaaaaccttcactggacttgagatctggtcctcggcaacctgggcgcaatcatggccattgattctgtagcaaaagttaatggataagctttcagtcgtgtctatgtgatagctagtggtcctaagctggttcactgaaacctttaattgtatcatagtagaagatgttcattaattatttcagatgctgacagttggcagtggataaagattctcaaatgtcaatctcatattcccattactctaaagaagatgagacatgccctatcaggaaggggatgttgtatactcaaggacccaaaacagtgactctgaacctgtatactcttactctcgtatctacaacaatttagttttcgttttcttctatgggtttggaggccattgtacagaagggaactctcaacaagaaatccagattacatggcacaggcgaaagcaaaacaagctttagtcggtgacaccagtgaaagaaaggcaagcagccaaggagtcaag

SEQ ID NO: 55515 - DNA, 3866 bp, Zea Mays
cctcactcgcacaagagcattgcggagcacacagcagacaaggcgaacaataactgcccccccttcatcctcccccgctcccgtcgtcgtctcctttccaccccctttcccccgccccctgcatcctgcattacccccctcgcgcgtccctctccgatccctcaccccccagattcctcctgcctacgctcgcgggtctctcctgcccgcccgatttcgcctcggacctcgtcgtccatggtgtgctttttcttcgtggcgatttgctgcgcctcgtcgccggcgaccttggcgcttgcaggcggccgactgcagtagggcaggtctgcttccacagacgtcttcgccgtttgagaggtggcgcccacctccaccgtctcgtctgctgcctgctctagtggtgccggacctggggtggagcggagatccacaagggcttggattgctttcgttgtcttgctggctttgaggtggagatgacactaagttgaaatttttatcacacgaggaagcaagaacaggaaaaaaaatcacatttcagtgttgcactctgtggagggttcattgttggtccaccaaactactgcagtgctggagggtttttgttgaagtcctcttcatgttcaccatttctaaattgtcataggctcatagcattgtagctgatcagtcttcaagatcttcctatgagtacatagataaatcatcatcgtatctgtgttaagtatgccaccatggtggggaaaatcttcatccaaagaagtgaaaaagtctgccaaagaaaacctcatcgacacatttcagcgtctcataagttcaaatgagcaaaagggaagcagaaaatcacgaagtagtcgtagacatggtaaagacacagctggtgacaaaggttgctggtccactgcccaatcccgctcaacatccccttcaaaagaggtctctcgatgtcagagctttgcagcagatagaccacatgcacagccacttcctcttcccaaatcacgtgctaaggtgacacgtacttcttctgatattaccaactcaaagtccactttggaaaagcatggcaaaggacaactgcttccactccctccaattcagcctaaaaaaagacctgaagctactgaacctgttactgaagtagctactgcttcggtctccagcaactgttctattgacagtgatgatcctggtgattctcagcttcagagtcctgtgggaaatgaggctgaaaatgcgactagaattactgcaacaagtagttcaagtgttgtgcgcaaagaatgttctagtgctattaccagaaagaacacaaaggaagttgcaaagccaaacagtgcttttctcagtaaccaaatcctgtcaacatctccaagaggtacctttgctgatggttatcaatccaatttacaaagcccccgacagattgccctggagagtgctccgaatagtttgatgtcaagtccttctcgaagcccaagaaatatatgtcctgttcagattccaacttcagctttttgggcaataaaacctcatactgatgtaactttccttgggtctggtcagtgctccagtccaggttctggtcagacatctgggcataattcagtgggaggtgatatgctaggcccaatcttttggcagcctagccgaggtagtccagagtgttcaccaattccaagcccaagaatgacgagtcctggtccaagttctcgggtgcatagtggaagtgtctctcctttgcatccaagagctggtggggtcactcctgaatccccaacaaatcgacatgctgaagggaacaagaagcaaacccacagattgccgcttccgccattaagcattgctaatagttctacctttttgccaaacagctctaacccaactagtcctatatctcgtagtcctggtagaacagagaatccaccgagtcctggttcacggtggaagaagggaaaattgattggccgtgggacatttggccatgtatatgctggttttaacagtgacagaggtgaaatgtgtgcgatgaaggaggttacccttttctcagatgatcctaaatcaaaagaaagtgcaaaacagctctgccaggaaatatcacttctgagccgactgcagcacccaaacattgtgcgatactatggatctgaaactgttgatgataagctttacatatacctggagtatgtttctggtggatctatacataagcttctccaagagtatggacagtttggtgaacaagccatttgcagttatactaagcaaatacttttgggcctagcttatttgcatgcaaagaatacagtacacagagacatcaaaggcgcaaacatattggtagaccctaatggccgcgtgaagctcgctgactttgggatggcaaaacatatcaatgggcagcagtgccctttctcatttaagggtagcccgtactggatggctcctgaggttataaaaaatgctagcggatgtaaccttgcagttgatatatggagtttaggatgcacagtcctagagatggctacttcaaaaccaccatggagccaatatgaagggattgccgcaatgtttaagataggaaacagtaaggagcttccaccaataccggatcacctctcagaagaagggaaagacttcataagacagtgcttgcaacgtgatccatccagccgtccaacagcagtggatcttctgcagcatccattcgtacaaaatgcaccgccacttgaaaaatcatctgcctctcatccactggaacagttgacggctatatcatgcagaacaaattcgaaggtggttgagcatgccagaaatatgtcctcgcttggtttggaaggccaatcaattttgcagagaagagctgccaaattttctttgccaaatagtgatatccatatacggagtaatatatcttgtcctgtatctccatgtggaagtcctcttctaagatcaagatctccacagcatcaaaatggtagaatgtcaccttctccaatttgcagccccaggactacttcgggtgcttcaactcctctgactggtggtagtggagctgttcctttaaaccatgtgaggcaaccagcttacagaaatgagggcttcacggtcacatcaagaggttttgatgaccacatgcctagccggcctgttgatccagtacatggacgttttattcgagtgcagcaattttccgtgggtcggcaggagagggtagtctctgaagttgacattctgagctctcaatatggaaagatgagacatgcaaatgtgtgggatccgcatgataggccattaccttctgagcgttcctctcaacagtgctttgggaatcatgcgaagctaaaaccttcactggacttgagatctggtcctcggcaacctgggcgcaatcatggccattgattctgtagcaaaagttaatggataagctttcagtcgtgtctatgtgatagctagtggtcctaagctggttcactgaaacctttaattgtatcatagtagaagatgttcattaattatttcagatgctgacagttggcagtggataaagattctcaaatgtcaatctcatattcccattactctaaagaagatgagacatgccctatcaggaaggggatgttgtatactcaaggacccaaaacagtgactctgaacctgtatactcttactctcgtatctacaacaatttagttttcgttttcttctatgggtttggaggccattgtacagaagggaactctcaacaagaaatccagattacatggcacaggcgaaagcaataaatttaaaaagttcgtcccatggaatctggaaatagaagaagccacggcagcaagaagggagagagctgaccggag

SEQ ID NO: 55516 - DNA, 3592 bp, Zea Mays
cctgcatcctgcattacccccctcgcgcgtccctctccgatccctcaccccccagattcctcctgcctacgctcgcgggtctctcctgcccgcccgatttcgcctcggacctcgtcgtccatggtgtgctttttcttcgtggcgatttgctgcgcctcgtcgccggcgaccttggcgcttgcaggcggccgactgcagtagggcaggtctgcttccacagacgtcttcgccgtttgagaggtggcgcccacctccaccgtctcgtctgctgcctgctctagtggtgccggacctggggtggagcggagatccacaagggcttggattgctttcgttgtcttgctggctttgaggtggagatgacactaagttgaaatttttatcacacgaggaagcaagaacaggaaaaaaaatcacatttcagtgttgcactctgtggagggttcattgttggtccaccaaactactgcagtgctggagggtttttgttgaagtcctcttcatgttcaccatttctaaattgtcataggctcatagcattgtagctgatcagtcttcaagatcttcctatgagtacatagataaatcatcatcgtatctgtgttaagtatgccaccatggtggggaaaatcttcatccaaagaagtgaaaaagtctgccaaagaaaacctcatcgacacatttcagcgtctcataagttcaaatgagcaaaagggaagcagaaaatcacgaagtagtcgtagacatggtaaagacacagctggtgacaaaggttgctggtccactgcccaatcccgctcaacatccccttcaaaagaggtctctcgatgtcagagctttgcagcagatagaccacatgcacagccacttcctcttcccaaatcacgtgctaaggtgacacgtacttcttctgatattaccaactcaaagtccactttggaaaagcatggcaaaggacaactgcttccactccctccaattcagcctaaaaaaagacctgaagctactgaacctgttactgaagtagctactgcttcggtctccagcaactgttctattgacagtgatgatcctggtgattctcagcttcagagtcctgtgggaaatgaggctgaaaatgcgactagaattactgcaacaagtagttcaagtgttgtgcgcaaagaatgttctagtgctattaccagaaagaacacaaaggaagttgcaaagccaaacagtgcttttctcagtaaccaaatcctgtcaacatctccaagaggtacctttgctgatggttatcaatccaatttacaaagcccccgacagattgccctggagagtgctccgaatagtttgatgtcaagtccttctcgaagcccaagaaatatatgtcctgttcagattccaacttcagctttttgggcaataaaacctcatactgatgtaactttccttgggtctggtcagtgctccagtccaggttctggtcagacatctgggcataattcagtgggaggtgatatgctaggcccaatcttttggcagcctagccgaggtagtccagagtgttcaccaattccaagcccaagaatgacgagtcctggtccaagttctcgggtgcatagtggaagtgtctctcctttgcatccaagagctggtggggtcactcctgaatccccaacaaatcgacatgctgaagggaacaagaagcaaacccacagattgccgcttccgccattaagcattgctaatagttctacctttttgccaaacagctctaacccaactagtcctatatctcgtagtcctggtagaacagagaatccaccgagtcctggttcacggtggaagaagggaaaattgattggccgtgggacatttggccatgtatatgctggttttaacagtgacagaggtgaaatgtgtgcgatgaaggaggttacccttttctcagatgatcctaaatcaaaagaaagtgcaaaacagctctgccaggaaatatcacttctgagccgactgcagcacccaaacattgtgcgatactatggatctgaaactgttgatgataagctttacatatacctggagtatgtttctggtggatctatacataagcttctccaagagtatggacagtttggtgaacaagccatttgcagttatactaagcaaatacttttgggcctagcttatttgcatgcaaagaatacagtacacagagacatcaaaggcgcaaacatattggtagaccctaatggccgcgtgaagctcgctgactttgggatggcaaaacatatcaatgggcagcagtgccctttctcatttaagggtagcccgtactggatggctcctgaggttataaaaaatgctagcggatgtaaccttgcagttgatatatggagtttaggatgcacagtcctagagatggctacttcaaaaccaccatggagccaatatgaagggattgccgcaatgtttaagataggaaacagtaaggagcttccaccaataccggatcacctctcagaagaagggaaagacttcataagacagtgcttgcaacgtgatccatccagccgtccaacagcagtggatcttctgcagcatccattcgtacaaaatgcaccgccacttgaaaaatcatctgcctctcatccactggaacagttgacggctatatcatgcagaacaaattcgaaggtggttgagcatgccagaaatatgtcctcgcttggtttggaaggccaatcaattttgcagagaagagctgccaaattttctttgccaaatagtgatatccatatacggagtaatatatcttgtcctgtatctccatgtggaagtcctcttctaagatcaagatctccacagcatcaaaatggtagaatgtcaccttctccaatttgcagccccaggactacttcgggtgcttcaactcctctgactggtggtagtggagctgttcctttaaaccatgtgaggcaaccagcttacagaaatgagggcttcacggtcacatcaagaggttttgatgaccacatgcctagccggcctgttgatccagtacatggacgttttattcgagtgcagcaattttccgtgggtcggcaggagagggtagtctctgaagttgacattctgagctctcaatatggaaagatgagacatgcaaatgtgtgggatccgcatgataggccattaccttctgagcgttcctctcaacagtgctttgggaatcatgcgaagctaaaaccttcactggacttgagatctgatgctgacagttggcagtggataaagattctcaaatgtcaatctcatattcccattactctaaagaagatgagacatgccctatcaggaaggggatgttgtatactcaaggacccaaaacagtgactctgaacctgtatactcttactctcgtatctacaacaatttagttttcgttttcttctatgggtttggaggccattgtacagaagggaactctcaacaagaaatccagattacatggcacaggcgaaagcaaaactataacaactgaacaaactaggaaaagggaagtggaagagtacttacaggaacatgggagtccctggcattcctc

SEQ ID NO: 55517 - DNA, 3925 bp, Zea Mays
gcatcctgcattacccccctcgcgcgtccctctccgatccctcaccccccagattcctcctgcctacgctcgcgggtctctcctgcccgcccgatttcgcctcggacctcgtcgtccatggtgtgctttttcttcgtggcgatttgctgcgcctcgtcgccggcgaccttggcgcttgcaggcggccgactgcagtagggcaggtctgcttccacagacgtcttcgccgtttgagaggtggcgcccacctccaccgtctcgtctgctgcctgctctagtggtgccggacctggggtggagcggagatccacaagggcttggattgctttcgttgtcttgctggctttgaggtggagatgacactaagttgaaatttttatcacacgaggaagcaagaacaggaaaaaaaatcacatttcagtgttgcactctgtggagggttcattgttggtccaccaaactactgcagtgctggagggtttttgttgaagtcctcttcatgttcaccatttctaaattgtcataggctcatagcattgtagctgatcagtcttcaagatcttcctatgagtacatagataaatcatcatcgtatctgtgttaagtatgccaccatggtggggaaaatcttcatccaaagaagtgaaaaagtctgccaaagaaaacctcatcgacacatttcagcgtctcataagttcaaatgagcaaaagggaagcagaaaatcacgaagtagtcgtagacatggtaaagacacagctggtgacaaaggttgctggtccactgcccaatcccgctcaacatccccttcaaaagaggtctctcgatgtcagagctttgcagcagatagaccacatgcacagccacttcctcttcccaaatcacgtgctaaggtgacacgtacttcttctgatattaccaactcaaagtccactttggaaaagcatggcaaaggacaactgcttccactccctccaattcagcctaaaaaaagacctgaagctactgaacctgttactgaagtagctactgcttcggtctccagcaactgttctattgacagtgatgatcctggtgattctcagcttcagagtcctgtgggaaatgaggctgaaaatgcgactagaattactgcaacaagtagttcaagtgttgtgcgcaaagaatgttctagtgctattaccagaaagaacacaaaggaagttgcaaagccaaacagtgcttttctcagtaaccaaatcctgtcaacatctccaagaggtacctttgctgatggttatcaatccaatttacaaagcccccgacagattgccctggagagtgctccgaatagtttgatgtcaagtccttctcgaagcccaagaaatatatgtcctgttcagattccaacttcagctttttgggcaataaaacctcatactgatgtaactttccttgggtctggtcagtgctccagtccaggttctggtcagacatctgggcataattcagtgggaggtgatatgctaggcccaatcttttggcagcctagccgaggtagtccagagtgttcaccaattccaagcccaagaatgacgagtcctggtccaagttctcgggtgcatagtggaagtgtctctcctttgcatccaagagctggtggggtcactcctgaatccccaacaaatcgacatgctgaagggaacaagaagcaaacccacagattgccgcttccgccattaagcattgctaatagttctacctttttgccaaacagctctaacccaactagtcctatatctcgtagtcctggtagaacagagaatccaccgagtcctggttcacggtggaagaagggaaaattgattggccgtgggacatttggccatgtatatgctggttttaacagtgacagaggtgaaatgtgtgcgatgaaggaggttacccttttctcagatgatcctaaatcaaaagaaagtgcaaaacagctctgccaggaaatatcacttctgagccgactgcagcacccaaacattgtgcgatactatggatctgaaactgttgatgataagctttacatatacctggagtatgtttctggtggatctatacataagcttctccaagagtatggacagtttggtgaacaagccatttgcagttatactaagcaaatacttttgggcctagcttatttgcatgcaaagaatacagtacacagagacatcaaaggcgcaaacatattggtagaccctaatggccgcgtgaagctcgctgactttgggatggcaaaacatatcaatgggcagcagtgccctttctcatttaagggtagcccgtactggatggctcctgaggttataaaaaatgctagcggatgtaaccttgcagttgatatatggagtttaggatgcacagtcctagagatggctacttcaaaaccaccatggagccaatatgaagggattgccgcaatgtttaagataggaaacagtaaggagcttccaccaataccggatcacctctcagaagaagggaaagacttcataagacagtgcttgcaacgtgatccatccagccgtccaacagcagtggatcttctgcagcatccattcgtacaaaatgcaccgccacttgaaaaatcatctgcctctcatccactggaacagttgacggctatatcatgcagaacaaattcgaaggtggttgagcatgccagaaatatgtcctcgcttggtttggaaggccaatcaattttgcagagaagagctgccaaattttctttgccaaatagtgatatccatatacggagtaatatatcttgtcctgtatctccatgtggaagtcctcttctaagatcaagatctccacagcatcaaaatggtagaatgtcaccttctccaatttgcagccccaggactacttcgggtgcttcaactcctctgactggtggtagtggagctgttcctttaaaccatgtgaggcaaccagcttacagaaatgagggcttcacggtcacatcaagaggttttgatgaccacatgcctagccggcctgttgatccagtacatggacgttttattcgagtgcagcaattttccgtgggtcggcaggagagggtagtctctgaagttgacattctgagctctcaatatggaaagatgagacatgcaaatgtgtgggatccgcatgataggccattaccttctgagcgttcctctcaacagtgctttgggaatcatgcgaagctaaaaccttcactggacttgagatctggtcctcggcaacctgggcgcaatcatggccattgattctgtagcaaaagttaatggataagctttcagtcgtgtctatgtgatagctagtggtcctaagctggttcactgaaacctttaattgtatcatagtagaagatgttcattaattatttcagatgctgacagttggcagtggataaagattctcaaatgtcaatctcatattcccattactctaaagaagatgagacatgccctatcaggaaggggatgttgtatactcaaggacccaaaacagtgactctgaacctgtatactcttactctcgtatctacaacaatttagttttcgttttcttctatgggtttggaggccattgtacagaagggaactctcaacaagaaatccagattacatggcacaggcgaaagcaaaacggcgcagcagtgagcaccagccctgaagagacgacgaataggaatcgacagagaaactaggcgtgggcagacaagaagacatcacaggaagacgcccgttcttcggactggcatgtctcggcacggccacggcagcttaagacctgctcttgaacgggatggctctgatgatcacctggtggtagatggcagccagagcagcgccaatgaaggggccgacccagaagatccactgcaaaacaatcataggttat

SEQ ID NO: 55518 - DNA, 4092 bp, Zea Mays
cccttggcccttcccacctcactcgcacaagagcattgcggagcacacagcagacaaggcgaacaataactgcccccccttcatcctcccccgctcccgtcgtcgtctcctttccaccccctttcccccgccccctgcatcctgcattacccccctcgcgcgtccctctccgatccctcaccccccagattcctcctgcctacgctcgcgggtctctcctgcccgcccgatttcgcctcggacctcgtcgtccatggtgtgctttttcttcgtggcgatttgctgcgcctcgtcgccggcgaccttggcgcttgcaggcggccgactgcagtagggcaggtctgcttccacagacgtcttcgccgtttgagaggtggcgcccacctccaccgtctcgtctgctgcctgctctagtggtgccggacctggggtggagcggagatccacaagggcttggattgctttcgttgtcttgctggctttgaggtggagatgacactaagttgaaatttttatcacacgaggaagcaagaacaggaaaaaaaatcacatttcagtgttgcactctgtggagggttcattgttggtccaccaaactactgcagtgctggagggtttttgttgaagtcctcttcatgttcaccatttctaaattgtcataggctcatagcattgtagctgatcagtcttcaagatcttcctatgagtacatagataaatcatcatcgtatctgtgttaagtatgccaccatggtggggaaaatcttcatccaaagaagtgaaaaagtctgccaaagaaaacctcatcgacacatttcagcgtctcataagttcaaatgagcaaaagggaagcagaaaatcacgaagtagtcgtagacatggtaaagacacagctggtgacaaaggttgctggtccactgcccaatcccgctcaacatccccttcaaaagaggtctctcgatgtcagagctttgcagcagatagaccacatgcacagccacttcctcttcccaaatcacgtgctaaggtgacacgtacttcttctgatattaccaactcaaagtccactttggaaaagcatggcaaaggacaactgcttccactccctccaattcagcctaaaaaaagacctgaagctactgaacctgttactgaagtagctactgcttcggtctccagcaactgttctattgacagtgatgatcctggtgattctcagcttcagagtcctgtgggaaatgaggctgaaaatgcgactagaattactgcaacaagtagttcaagtgttgtgcgcaaagaatgttctagtgctattaccagaaagaacacaaaggaagttgcaaagccaaacagtgcttttctcagtaaccaaatcctgtcaacatctccaagaggtacctttgctgatggttatcaatccaatttacaaagcccccgacagattgccctggagagtgctccgaatagtttgatgtcaagtccttctcgaagcccaagaaatatatgtcctgttcagattccaacttcagctttttgggcaataaaacctcatactgatgtaactttccttgggtctggtcagtgctccagtccaggttctggtcagacatctgggcataattcagtgggaggtgatatgctaggcccaatcttttggcagcctagccgaggtagtccagagtgttcaccaattccaagcccaagaatgacgagtcctggtccaagttctcgggtgcatagtggaagtgtctctcctttgcatccaagagctggtggggtcactcctgaatccccaacaaatcgacatgctgaagggaacaagaagcaaacccacagattgccgcttccgccattaagcattgctaatagttctacctttttgccaaacagctctaacccaactagtcctatatctcgtagtcctggtagaacagagaatccaccgagtcctggttcacggtggaagaagggaaaattgattggccgtgggacatttggccatgtatatgctggttttaacagtgacagaggtgaaatgtgtgcgatgaaggaggttacccttttctcagatgatcctaaatcaaaagaaagtgcaaaacagctctgccaggaaatatcacttctgagccgactgcagcacccaaacattgtgcgatactatggatctgaaactgttgatgataagctttacatatacctggagtatgtttctggtggatctatacataagcttctccaagagtatggacagtttggtgaacaagccatttgcagttatactaagcaaatacttttgggcctagcttatttgcatgcaaagaatacagtacacagagacatcaaaggcgcaaacatattggtagaccctaatggccgcgtgaagctcgctgactttgggatggcaaaacatatcaatgggcagcagtgccctttctcatttaagggtagcccgtactggatggctcctgaggttataaaaaatgctagcggatgtaaccttgcagttgatatatggagtttaggatgcacagtcctagagatggctacttcaaaaccaccatggagccaatatgaagggattgccgcaatgtttaagataggaaacagtaaggagcttccaccaataccggatcacctctcagaagaagggaaagacttcataagacagtgcttgcaacgtgatccatccagccgtccaacagcagtggatcttctgcagcatccattcgtacaaaatgcaccgccacttgaaaaatcatctgcctctcatccactggaacagttgacggctatatcatgcagaacaaattcgaaggtggttgagcatgccagaaatatgtcctcgcttggtttggaaggccaatcaattttgcagagaagagctgccaaattttctttgccaaatagtgatatccatatacggagtaatatatcttgtcctgtatctccatgtggaagtcctcttctaagatcaagatctccacagcatcaaaatggtagaatgtcaccttctccaatttgcagccccaggactacttcgggtgcttcaactcctctgactggtggtagtggagctgttcctttaaaccatgtgaggcaaccagcttacagaaatgagggcttcacggtcacatcaagaggttttgatgaccacatgcctagccggcctgttgatccagtacatggacgttttattcgagtgcagcaattttccgtgggtcggcaggagagggtagtctctgaagttgacattctgagctctcaatatggaaagatgagacatgcaaatgtgtgggatccgcatgataggccattaccttctgagcgttcctctcaacagtgctttgggaatcatgcgaagctaaaaccttcactggacttgagatctggtcctcggcaacctgggcgcaatcatggccattgattctgtagcaaaagttaatggataagctttcagtcgtgtctatgtgatagctagtggtcctaagctggttcactgaaacctttaattgtatcatagtagaagatgttcattaattatttcagatgctgacagttggcagtggataaagattctcaaatgtcaatctcatattcccattactctaaagaagatgagacatgccctatcaggaaggggatgttgtatactcaaggacccaaaacagtgactctgaacctgtatactcttactctcgtatctacaacaatttagttttcgttttcttctatgggtttggaggccattgtacagaagggaactctcaacaagaaatccagattacatggcacaggcgaaagcaatggtccggtggtgagggagcctataccttatcgttttgcgcccttcaccttcgaaaacgccttggcggcttgcgagttgcgagccaaaacaatcaagggaacaacccatgtgccatggcgtagagtacgcaggcagcaagccagcaatgcattagccattagctcccagggtcccccatccagcagtcttttacacctgtcatccatcatgttcgtcctcactccaatcatggcgctgccagaaggccacccacacacaccaggtccaccatcgctgtagattcaaat

SEQ ID NO: 55519 - DNA, 346 bp, Zea Mays
aaagacattgcaatccctgaaggaaaattatgctttatttgtatctccgagactatgaacctcatttttttattcacttcgctcatgaagaagtctaaatccgtcgaaatgcgacgatctgttacaagaactgtgactggaacctacaaaacctactgctttcgagtaagaattcgaggattgagtcgatgtacatgcaatcccatccaagaaatccttcacaggatcaagttactgccaaggattcatcaagaatcgctctcgagaagtaagaatccggggagattcaatcgagaaggcttcttgatcgatggtcagaatccaccaaagaactcgtcaaggacca

SEQ ID NO: 55520 - DNA, 5636 bp, Zea Mays
cctgccaaccctactcccgtcagcccacgccgagccgctcggaccggatcggccgtatttaaacgcacccccgtgtgacctcctcaaaacacgcgaatcgtaccggtacgaacactgagcacgcacgcacgcacgcaaactcaaaggagtgtgaccacggaactgaagccatggcggttacagttgagaagggctctatgggcgagccggcgctgctgctggagcgcagccgggcgatcaccctgcacggccgtgaccggaagggccgtgccgtcgtcaggatcgtcggcaactactttccagcgcgcgcgctgggcggccgggcggaggaggcgctgcggtcgtacctgcgggagcgcatcctcccggagatcggggaccgcgagttcgtggtcgtgtacatgcactcccgcgtggatcgcggccacaacttccccggcgtcggtgcgatccgcggcgcgtacgagacgctgccggccgcggccaaggagaggctgcgcgccgtctacttcgtgcacccggccctccagtccaggatcttcttcgccaccttcgggcgcttcctcttcagctcagggttgtatgagaagctgcgatacatgagccggcttgagtacgtttgggcccacatagacaaggagcagctggaggtccccgactgcgtgcgcgagcacgacgacgagctggagcgccgcccgctgatggactacggcatcgaggcgacggagacccgctgcatgtatgacgccgcgtccatggacacctcggcgtccctgcactcgctccgctgcgtctcctagtcgcctggacagtggcatcccgattcccgccggagcttcggcacccgagcaccttcgatgcaggacaatggaggggcaacgaagctagattcgtcatagcaacacagggagacaatgcaagaagaaggtgtcatcctgaatactgaaagcaaaagataatgttgtccttgtattttttgtaactcatgtgtgtaatctttgtgagtgtaagtgtaattttgtatgaagctgtacgattctgtataaatagatgaatagtgccctgcataaatttccttttgaagggctgaacaattgttgtgtgtaatcttttctctagagcacattcgttctaactcattctgtagagccgaaggtacgattataaattcattatacgaaaaagaagaaatatgatattaatacatcaaagatgaattattatgttaaaatttctttacattccttacttatttaggtaattaagtcataaccttcatcttcgaaggagggataactccttaaggacgaaggttgattatctttttaacattatgttgccttgatttttattgtgcatatcaattgagaacagatgaccaacaatcagctcttatttaacaacatttatatccatcgcaaatctcaaaccatcatctccaaaccattgcaatatatattgattgagatggatacaagtacaaccaaatatgacttttcgggatgaacttgtatccgttttaaagaaatggaatttatataatgtttgtttcaacatttctagagtattaacaatttcccacgtgaacagatagtgttgttttacctatgcatatacttgtctatttgaatcaattcaacacaggctattgtttccttactagcaatccactctcctcatggacgagcctagacagaccctagctcgctggagtttagttgactcgggctatgaccagcaggtcatgtgtatagtcacgtaaaacactattttgcaccatttatatagtggagtttaaaatgagagagataagaatctcatgagtcttagtagacatggactgagtcctgaggagaagtctattcctagtaatcatgttctgttgtaagttacaaacattactttcataaaacagtaatactgcgacaatatgataaacaattggtgaattaattagggttcaatttaaattcatgccacataagatgaacacgaaacactcctagctttactaagtttaggctccacgaagttggaggaagtaatacaaaagcgtatttcgtttgtctctactctttttaagctccaccaaaacctcgctcgctgcaaccatgacaccctggtatcacctcaccctccttatcgttctttgttcatctcacctcatttagcccatccgacaagcgtctgaccatgacaacccgctcgctacatacctcatcgtcgtctaccgcccggatggtctggttggtgtcgacgagctggaggcgctcgagcacttgcacacacacctcctcaagtaggtgtgcaacactagcgactcggtgaccgcagagcggttttcgatggtggggtcgcacctcatctactcgtatagccatgtggtgagcaggttctcggcgtggctcacacggcaggaggtcgatgacgtggcgaggttcccctagttcatcgagatcatcccgaacaagagctacaagcttatttccgacgacgcgtcggcttcttcgcagctatcatggcttgacaatgttagggatggcgtgtggtgcaagggcaacatgggtgaggttatgatcattggcatccttgacgcaggcatcaccaccataggccaaatcaatgccaactccaaagccaaagggatgccaccgcctccggtcaagtggaaggacaggtgtgacaataaccaagcatgcaacaacaagttgattgggttcaaaacattcgtagataccagtgatacgtgtgggaattccctgctgcagcgcgcatccgttcttggaatcgagtacgacaaggcgttcgcggtggcgcccaaggcgcacctcgtgatgtaccatgtgtgcgacgaggagtgccaccccaaagaagtaagagcagggatggactccgcggtggacgacgacgtcgacgtcatatcgatgtccttcaatggcaccgaggacaacatggtgttccatgacgatgtcgtgaccgcaccgtggtataatgttgtcgcccaatgcctcttatatgacctcactgtcggtgagttcatcccgtatctatgcgttatgagcctcgatgcggaccggaaatgcaagatcgtggagccgacgcacgcctcgtgcgcggagatcggggagatcgcgacgaaggacctaaactacccttccatcatgatcttcacgggcaacgacgtgtggcaagtggaggcgaagcagtcagtgaccaagccatacatggcccagtgcaagtggcctgggcccctaaaaatctgagggcctccaactcttaatgtgttggatactttagtatgtctaaatagggagatatactcacatacagaaaatgaacacgaaccgttataccgcgcgatacaaaggctaggatagcgccgtcgccgatcctttgaggcataaggtacctatcgccgattagatagctcttatatttagcacgtctcaatagtcaccttcacctctgtagtcaacacgtaacatcaacatctaagagcaaaccaactaggttgtaggcaagaatttaaaccttacatggggaagtggtgacttgatcatcaattgattcctccagcatcacgtatgtattaggcaataaaaccactagtatttttaggtgattacaataaactaagccccattaattaaataatgtattcattttactaggtgtgtactagtttaattaattactttggcccttgttcctcgtgaaatagagagataaattttatcgtcacaactttaaaaataaaaatatcatttgtatgaaaagtcaacaaagacctaagtctgtgtttcactctagggctcaaaaaatataattatgggcctgacgctgacgaacgtgggggagcccgagaagacaaacagagcataggttgacgtagcggtgaacccgtcgactctggtgttcagagacatttgccagaagagggacttcgttgtcacggttagagatgacaatgggtacccgaaacccgaaatccgatgggtaaaaaccctattagggcatgggtatggcagattttgatacccatggatattttattgggtcatttgttatgcccattaggtacggtgggcgtgggtatgttctttgttgcccccatactcgctacccgatggggaacccgctaatatatgatacatgggtccagattcaaatattaagtattgtgtattgaacaattagatttgaagacatgattttgtccacagttttgtagaatcaatgctatgttttgtgtgatttgaaggcatgatggtgttatttagtggcttactaaatgctttcttgttttcgttattttttatttttcctctatattggttctttcttgtgctgcacatttgttgttttaggtggttatttagtatcacttttacatttttggcagatattgttgagcttaaccttcttaagacaactaagattacttttaagaatggcaaggatgatctgatgaactttgagtccactattaagcctgatgaaggatactacatgtaagtggtcctgaggagaatggcgtaattgccttatgctattcacaacatatatattcatcatgtacgttactcattctgtcctaattttacatgtagatatcccatcgtgcatctactatgtatatattgaaaatggaattgaactgtttgcaaatagagttttgagcatgaaagggcatactcttgttagggtgggttttgttatggattttgatatgtttggacaaaatagaattatatgctttgctagatattcttgggtttcatgccatattaggctttgttcggttatttcaattccacgtggattgaagtggattgggtgggattgagatgtattttgacttgctatggatttaaaccgactaaatctcacccaatccacatggtttaatagcaaaacgaacaagccgttatagtgttaggacgcatccttggacacctaggctctgtctgggtgatgactactcaacaccattaatagtatttttcttgcttatcatcatatcacaatgttcctaattgcttgccgaagcaaaccgaggatatttccccttttgtcttttggtggtttgctcttttagttgggttggtgaacatttgatccttagatattgcttttactcaaaattagaagcataattttgtggattttttcaccacggaggaaccgaaatttgttactctgaagttcgagttatgaactcaagactacctttattttttttatttttgtttcccctattcaatataatgccttattactaaccttgttttctaatgtgcaaatgcttattgttaggggtggaaaatttatttttactttccaagtttacctgcatgaacctccaaaagtcaagtgcaagactaaggtttaccatcccaatatttacttggagggaaacgtatgcctgaatagtctgcttgaagactggaagcctgtcctgaacatcaacaccattgtgtacatggttgaatcttcttttcttgcaacctaatgatgaggatcccctgaaccatgatgcagcaattgttctctgtgatgacccaaaaaagtttgggaagaatgtctagcaggcgatggctagatgatacattggtgaaacccacttccctcggtgt

SEQ ID NO: 55521 - DNA, 920 bp, Zea Mays
cctgccaaccctactcccgtcagcccacgccgagccgctcggaccggatcggccgtatttaaacgcacccccgtgtgacctcctcaaaacacgcgaatcgtaccggtacgaacactgagcacgcacgcacgcacgcaaactcaaaggagtgtgaccacggaactgaagccatggcggttacagttgagaagggctctatgggcgagccggcgctgctgctggagcgcagccgggcgatcaccctgcacggccgtgaccggaagggccgtgccgtcgtcaggatcgtcggcaactactttccagcgcgcgcgctgggcggccgggcggaggaggcgctgcggtcgtacctgcgggagcgcatcctcccggagatcggggaccgcgagttcgtggtcgtgtacatgcactcccgcgtggatcgcggccacaacttccccggcgtcggtgcgatccgcggcgcgtacgagacgctgccggccgcggccaaggagaggctgcgcgccgtctacttcgtgcacccggccctccagtccaggatcttcttcgccaccttcgggcgcttcctcttcagctcagggttgtatgagaagctgcgatacatgagccggcttgagtacgtttgggcccacatagacaaggagcagctggaggtccccgactgcgtgcgcgagcacgacgacgagctggagcgccgcccgctgatggactacggcatcgaggcgacggagacccgctgcatgtatgacgccgcgtccatggacacctcggcgtccctgcactcgctccgctgcgtctcctagtcgcctggacagtggcatcccgattcccgccgtattctcaacttcagctccaaccttgggctctgcaccagcagcaatactctcaacttcagcaccaggattgtgctcggcagtttccat

SEQ ID NO: 55522 - DNA, 1418 bp, Zea Mays
ctcagtccctcaccatacctccgaggctccgaccaaaacaccagggtcccagtgctcttggctctaagatggcggcgccggaaccggaggccaagctggaagccgtaaccccatctcggtcctacgagctgccaccggagtccgaatccgacgcccctgcctccaccggcacccaggagctaaagccgtgggagcagcacgccgcggtgatcaacctcccgcgctacgactaccgcgcatcagggtccctcctcctccgttcgcattccggcttcctcatcacgtgccccatcaaaccatgtgatgtgaaaaatgcaattaagaaaagaaaactgtgctcggaggcatcaggaagtttagaagaggcagtaacgaatgggaatagtagcagtgtttcagaatcaattggaagcaccggaaacacaagctcaccccagtccaaggtgaatgacaatgttgacagggcttcaaatctctcactgatccgggaaactcaaatctccacagtaaggatccaacttcattatggtgccaccgcatattcccaattcaagaaacttgcattctatcagaagaagacctgcatgccactgtgtcaaagttattccttgacttctcgaggagcaagacaaacgaagacaagcctataaagtttgcggttgcctataatagaaggggcattgatgagacagagaagaacagtaatgaaggttcaaaccagcagactttgatggatagggagcaatgtttcaaagtggtagctgctgctgtcaaatccgttgctgagaactcagtggttgatcttagatcgcctgaggttgcggtactcgttgagatgctcccggtttccggggtacctcttggatcttcggtggctggggtgtctgttctcccagccgaactcatctcgaccaaacctcgcctttgtgtcaggtctttggtgcctgatgcaaaagcaggaaaaaagaagtgaaatacggtggcgcctcgtcaaccagagtatctgtaatgggaaactgccgatgcagtttttcacatgcctatttgtaccagagtaccatcgccttaattaagccttgtttttatgaggacatgaaaccatgatcagggcttgtccttttttacattaatcaaggcgagtttttaataatcatagaagacactggtatgccttcgacaatgtatcatcctttgcccccgcacaaatagtcgtctgtctgcctttggggatgtcaaattgtgttttgtggcagcatagaagggagttcattcagttcttgccttcttgtacttgtcgtccttttttttagcagcgtgccgaaatgtcaaaactggccggccatgatggtctctccactgtttgtctcagaactttgtccatcgtgtgcagccacaaagcatgatgcatgttgctgaag

SEQ ID NO: 55523 - DNA, 1541 bp, Zea Mays
ctcagtccctcaccatacctccgaggctccgaccaaaacaccagggtcccagtgctcttggctctaagatggcggcgccggaaccggaggccaagctggaagccgtaaccccatctcggtcctacgagctgccaccggagtccgaatccgacgcccctgcctccaccggcacccaggagctaaagccgtgggagcagcacgccgcggtgatcaacctcccgcgctacgactaccgcgcatcagggtccctcctcctccgttcgcattccggcttcctcatcacgtgccccatcaagcgtgaaaaaagtgcaaccaaggaagccattcccatccttgaagagaaccatgtgatgtgaaaaatgcaattaagaaaagaaaactgtgctcggaggcatcaggaagtttagaagaggcagtaacgaatgggaatagtagcagtgtttcagaatcaattggaagcaccggaaacacaagctcaccccagtccaaggtgaatgacaatgttgacagggcttcaaatctctcactggttaagctatcaagaagtggcttgctcttctttaaatttcctagtggaggcgttcatgtagttgagatgcttactgaaatacttcattcactcagatccgggaaactcaaatctccacaatggtgccaccgcatattcccaattcaagaaacttgcattctatcagaagaagacctgcatgccactgtgtcaaagttattccttgacttctcgaggagcaagacaaacgaagacaagcctataaagtttgcggttgcctataatagaaggggcattgatgagacagagaagaacagtaatgaaggttcaaaccagcagactttgatggatagggagcaatgtttcaaagtggtagctgctgctgtcaaatccgttgctgagaactcagtggttgatcttagatcgcctgaggttgcggtactcgttgagatgctcccggtttccggggtacctcttggatcttcggtggctggggtgtctgttctcccagccgaactcatctcgaccaaacctcgcctttgtgtcaggtctttggtgcctgatgcaaaagcaggaaaaaagaagtgaaatacggtggcgcctcgtcaaccagagtatctgtaatgggaaactgccgatgcagtttttcacatgcctatttgtaccagagtaccatcgccttaattaagccttgtttttatgaggacatgaaaccatgatcagggcttgtccttttttacattaatcaaggcgagtttttaataatcatagaagacactggtatgccttcgacaatgtatcatcctttgcccccgcacaaatagtcgtctgtctgcctttggggatgtcaaattgtgttttgtggcagcatagaagggagttcattcagttcttgccttcttgtacttgtcgtccttttttttagcagcgtgccgaaatgtcaaaactggccggccatgatggtctctccactgtttgtctcagaactttgtccatcgtgtgcagccacaaagcatgatgcatgttgctgaag

SEQ ID NO: 55524 - DNA, 1480 bp, Zea Mays
ctcagtccctcaccatacctccgaggctccgaccaaaacaccagggtcccagtgctcttggctctaagatggcggcgccggaaccggaggccaagctggaagccgtaaccccatctcggtcctacgagctgccaccggagtccgaatccgacgcccctgcctccaccggcacccaggagctaaagccgtgggagcagcacgccgcggtgatcaacctcccgcgctacgactaccgcgcatcagggtccctcctcctccgttcgcattccggcttcctcatcacgtgccccatcaagcgtgaaaaaagtgcaaccaaggaagccattcccatccttgaagagtaccatgcaaattgctgtgtttctgaacatgcagaaccatgtgatgtgaaaaatgcaattaagaaaagaaaactgtgctcggaggcatcaggaagtttagaagaggcagtaacgaatgggaatagtagcagtgtttcagaatcaattggaagcaccggaaacacaagctcaccccagtccaaggtgaatgacaatgttgacagggcttcaaatctctcactgatccgggaaactcaaatctccacaatggtgccaccgcatattcccaattcaagaaacttgcattctatcagaagaagacctgcatgccactgtgtcaaagttattccttgacttctcgaggagcaagacaaacgaagacaagcctataaagtttgcggttgcctataatagaaggggcattgatgagacagagaagaacagtaatgaaggttcaaaccagcagactttgatggatagggagcaatgtttcaaagtggtagctgctgctgtcaaatccgttgctgagaactcagtggttgatcttagatcgcctgaggttgcggtactcgttgagatgctcccggtttccggggtacctcttggatcttcggtggctggggtgtctgttctcccagccgaactcatctcgaccaaacctcgcctttgtgtcaggtctttggtgcctgatgcaaaagcaggaaaaaagaagtgaaatacggtggcgcctcgtcaaccagagtatctgtaatgggaaactgccgatgcagtttttcacatgcctatttgtaccagagtaccatcgccttaattaagccttgtttttatgaggacatgaaaccatgatcagggcttgtccttttttacattaatcaaggcgagtttttaataatcatagaagacactggtatgccttcgacaatgtatcatcctttgcccccgcacaaatagtcgtctgtctgcctttggggatgtcaaattgtgttttgtggcagcatagaagggagttcattcagttcttgccttcttgtacttgtcgtccttttttttagcagcgtgccgaaatgtcaaaactggccggccatgatggtctctccactgtttgtctcagaactttgtccatcgtgtgcagccacaaagcatgatgcatgttgctgaag

SEQ ID NO: 55525 - DNA, 1499 bp, Zea Mays
ctcagtccctcaccatacctccgaggctccgaccaaaacaccagggtcccagtgctcttggctctaagatggcggcgccggaaccggaggccaagctggaagccgtaaccccatctcggtcctacgagctgccaccggagtccgaatccgacgcccctgcctccaccggcacccaggagctaaagccgtgggagcagcacgccgcggtgatcaacctcccgcgctacgactaccgcgcatcagggtccctcctcctccgttcgcattccggcttcctcatcacgtgccccatcaagcgtgaaaaaagtgcaaccaaggaagccattcccatccttgaagagtaccatgcaaattgctgtgtttctgaacatgcagaaccatgtgatgtgaaaaatgcaattaagaaaagaaaactgtgctcggaggcatcaggaagtttagaagaggcagtaacgaatgggaatagtagcagtgtttcagaatcaattggaagcaccggaaacacaagctcaccccagtccaaggtgaatgacaatgttgacagggcttcaaatctctcactgatccgggaaactcaaatctccacagtaaggatccaacttcattatggtgccaccgcatattcccaattcaagaaacttgcattctatcagaagaagacctgcatgccactgtgtcaaagttattccttgacttctcgaggagcaagacaaacgaagacaagcctataaagtttgcggttgcctataatagaaggggcattgatgagacagagaagaacagtaatgaaggttcaaaccagcagactttgatggatagggagcaatgtttcaaagtggtagctgctgctgtcaaatccgttgctgagaactcagtggttgatcttagatcgcctgaggttgcggtactcgttgagatgctcccggtttccggggtacctcttggatcttcggtggctggggtgtctgttctcccagccgaactcatctcgaccaaacctcgcctttgtgtcaggtctttggtgcctgatgcaaaagcaggaaaaaagaagtgaaatacggtggcgcctcgtcaaccagagtatctgtaatgggaaactgccgatgcagtttttcacatgcctatttgtaccagagtaccatcgccttaattaagccttgtttttatgaggacatgaaaccatgatcagggcttgtccttttttacattaatcaaggcgagtttttaataatcatagaagacactggtatgccttcgacaatgtatcatcctttgcccccgcacaaatagtcgtctgtctgcctttggggatgtcaaattgtgttttgtggcagcatagaagggagttcattcagttcttgccttcttgtacttgtcgtccttttttttagcagcgtgccgaaatgtcaaaactggccggccatgatggtctctccactgtttgtctcagaactttgtccatcgtgtgcagccacaaagcatgatgcatgttgctgaag

SEQ ID NO: 55526 - DNA, 2085 bp, Zea Mays
cagaaccctcagtccctcaccatacctccgaggctccgaccaaaacaccagggtcccagtgctcttggctctaagatggcggcgccggaaccggaggccaagctggaagccgtaaccccatctcggtcctacgagctgccaccggagtccgaatccgacgcccctgcctccaccggcacccaggagctaaagccgtgggagcagcacgccgcggtgatcaacctcccgcgctacgactaccgcgcatcagggtccctcctcctccgttcgcattccggcttcctcatcacgtgccccatcatatcatttatgaaactttgactactaaagaagagtttgaatcagtattgatggcacatgggcattcttacaaacctgatgtgcttttttatattcgtacagagcgtgaaaaaagtgcaaccaaggaagccattcccatccttgaagaggtcattgctcattatgttgctccatagtatttaattgtgttcccagttgataattctagtccatgaattttatcttagagaacgtcgctatttcaatctgcgttttattttagcaatataccaaattatgttgcatttcattcactatttgatgcacaccctcaaactcaatgaagttttatattttattattttcccacctaatagtaattactggattaccggttccaccttctgttcatatggctttctcatgctatatgcttgagtgtgtaggttttttttacttcttttgagttgcactgtttgcaacttcattatgtagtcttttctccaacgattgaatagctcaggtatgactatgagcattagcagtttcagggacatttacaaattcagttttacatcttttgttcgaaattcttttcaactctagcttccacacagtacatgttaaaatatgctgatgtgaaagcttcattttgtcttttgttcagtaccatgcaaattgctgtgtttctgaacatgcagaaccatgtgatgtgaaaaatgcaattaagaaaagaaaactgtgctcggaggcatcaggaagtttagaagaggcagtaacgaatgggaatagtagcagtgtttcagaatcaattggaagcaccggaaacacaagctcaccccagtccaaggtgaatgacaatgttgacagggcttcaaatctctcactgatccgggaaactcaaatctccacaatggtgccaccgcatattcccaattcaagaaacttgcattctatcagaagaagacctgcatgccactgtgtcaaagttattccttgacttctcgaggagcaagacaaacgaagacaagcctataaagtttgcggttgcctataatagaaggggcattgatgagacagagaagaacagtaatgaaggttcaaaccagcagactttgatggatagggagcaatgtttcaaagtggtagctgctgctgtcaaatccgttgctgagaactcagtggttgatcttagatcgcctgaggttgcggtactcgttgagatgctcccggtttccggggtacctcttggatcttcggtggctggggtgtctgttctcccagccgaactcatctcgaccaaacctcgcctttgtgtcaggtctttggtgcctgatgcaaaagcaggaaaaaagaagtgaaatacggtggcgcctcgtcaaccagagtatctgtaatgggaaactgccgatgcagtttttcacatgcctatttgtaccagagtaccatcgccttaattaagccttgtttttatgaggacatgaaaccatgatcagggcttgtccttttttacattaatcaaggcgagtttttaataatcatagaagacactggtatgccttcgacaatgtatcatcctttgcccccgcacaaatagtcgtctgtctgcctttggggatgtcaaattgtgttttgtggcagcatagaagggagttcattcagttcttgccttcttgtacttgtcgtccttttttttagcagcgtgccgaaatgtcaaaactggccggccatgatggtctctccactgtttgtctcagaactttgtccatcgtgtgcagccacaaagcatgatgcatgttgctgaag

SEQ ID NO: 55527 - DNA, 1822 bp, Zea Mays
ctcagtttacgctatttatattatgcgcctgctagtcagaaccctcagtccctcaccatacctccgaggctccgaccaaaacaccagggtcccagtgctcttggctctaagatggcggcgccggaaccggaggccaagctggaagccgtaaccccatctcggtcctacgagctgccaccggagtccgaatccgacgcccctgcctccaccggcacccaggagctaaagccgtgggagcagcacgccgcggtgatcaacctcccgcgctacgactaccgcgcatcagggtccctcctcctccgttcgcattccggcttcctcatcacgtgccccatcaagcgtgaaaaaagtgcaaccaaggaagccattcccatccttgaagaggtcattgctcattatgttgctccatagtatttaattgtgttcccagttgataattctagtccatgaattttatcttagagaacgtcgctatttcaatctgcgttttattttagcaatataccaaattatgttgcatttcattcactatttgatgcacaccctcaaactcaatgaagttttatattttattattttcccacctaatagtaattactggattaccggttccaccttctgttcatatggctttctcatgctatatgcttgagtgtgtaggttttttttacttcttttgagttgcactgtttgcaacttcattatgtagtcttttctccaacgattgaatagctcagaaccatgtgatgtgaaaaatgcaattaagaaaagaaaactgtgctcggaggcatcaggaagtttagaagaggcagtaacgaatgggaatagtagcagtgtttcagaatcaattggaagcaccggaaacacaagctcaccccagtccaagatccgggaaactcaaatctccacagtaaggatccaacttcattatggtgccaccgcatattcccaattcaagaaacttgcattctatcagaagaagacctgcatgccactgtgtcaaagttattccttgacttctcgaggagcaagacaaacgaagacaagcctataaagtttgcggttgcctataatagaaggggcattgatgagacagagaagaacagtaatgaaggttcaaaccagcagactttgatggatagggagcaatgtttcaaagtggtagctgctgctgtcaaatccgttgctgagaactcagtggttgatcttagatcgcctgaggttgcggtactcgttgagatgctcccggtttccggggtacctcttggatcttcggtggctggggtgtctgttctcccagccgaactcatctcgaccaaacctcgcctttgtgtcaggtctttggtgcctgatgcaaaagcaggaaaaaagaagtgaaatacggtggcgcctcgtcaaccagagtatctgtaatgggaaactgccgatgcagtttttcacatgcctatttgtaccagagtaccatcgccttaattaagccttgtttttatgaggacatgaaaccatgatcagggcttgtccttttttacattaatcaaggcgagtttttaataatcatagaagacactggtatgccttcgacaatgtatcatcctttgcccccgcacaaatagtcgtctgtctgcctttggggatgtcaaattgtgttttgtggcagcatagaagggagttcattcagttcttgccttcttgtacttgtcgtccttttttttagcagcgtgccgaaatgtcaaaactggccggccatgatggtctctccactgtttgtctcagaactttgtccatcgtgtgcagccacaaagcatgatgcatgttgctgaag

SEQ ID NO: 55528 - DNA, 2039 bp, Zea Mays
ctcagtttacgctatttatattatgcgcctgctagtcagaaccctcagtccctcaccatacctccgaggctccgaccaaaacaccagggtcccagtgctcttggctctaagatggcggcgccggaaccggaggccaagctggaagccgtaaccccatctcggtcctacgagctgccaccggagtccgaatccgacgcccctgcctccaccggcacccaggagctaaagccgtgggagcagcacgccgcggtgatcaacctcccgcgctacgactaccgcgcatcagggtccctcctcctccgttcgcattccggcttcctcatcacgtgccccatcaagcgtgaaaaaagtgcaaccaaggaagccattcccatccttgaagaggtcattgctcattatgttgctccatagtatttaattgtgttcccagttgataattctagtccatgaattttatcttagagaacgtcgctatttcaatctgcgttttattttagcaatataccaaattatgttgcatttcattcactatttgatgcacaccctcaaactcaatgaagttttatattttattattttcccacctaatagtaattactggattaccggttccaccttctgttcatatggctttctcatgctatatgcttgagtgtgtaggttttttttacttcttttgagttgcactgtttgcaacttcattatgtagtcttttctccaacgattgaatagctcaggtatgactatgagcattagcagtttcagggacatttacaaattcagttttacatcttttgttcgaaattcttttcaactctagcttccacacagtacatgttaaaatatgctgatgtgaaagcttcattttgtcttttgttcagtaccatgcaaattgctgtgtttctgaacatgcagaaccatgtgatgtgaaaaatgcaattaagaaaagaaaactgtgctcggaggcatcaggaagtttagaagaggcagtaacgaatgggaatagtagcagtgtttcagaatcaattggaagcaccggaaacacaagctcaccccagtccaaggtgaatgacaatgttgacagggcttcaaatctctcactgatccgggaaactcaaatctccacagtaaggatccaacttcattatggtgccaccgcatattcccaattcaagaaacttgcattctatcagaagaagacctgcatgccactgtgtcaaagttattccttgacttctcgaggagcaagacaaacgaagacaagcctataaagtttgcggttgcctataatagaaggggcattgatgagacagagaagaacagtaatgaaggttcaaaccagcagactttgatggatagggagcaatgtttcaaagtggtagctgctgctgtcaaatccgttgctgagaactcagtggttgatcttagatcgcctgaggttgcggtactcgttgagatgctcccggtttccggggtacctcttggatcttcggtggctggggtgtctgttctcccagccgaactcatctcgaccaaacctcgcctttgtgtcaggtctttggtgcctgatgcaaaagcaggaaaaaagaagtgaaatacggtggcgcctcgtcaaccagagtatctgtaatgggaaactgccgatgcagtttttcacatgcctatttgtaccagagtaccatcgccttaattaagccttgtttttatgaggacatgaaaccatgatcagggcttgtccttttttacattaatcaaggcgagtttttaataatcatagaagacactggtatgccttcgacaatgtatcatcctttgcccccgcacaaatagtcgtctgtctgcctttggggatgtcaaattgtgttttgtggcagcatagaagggagttcattcagttcttgccttcttgtacttgtcgtccttttttttagcagcgtgccgaaatgtcaaaactggccggccatgatggtctctccactgtttgtctcagaactttgtccatcgtgtgcagccacaaagcatgatgcatgttgctgaag

SEQ ID NO: 55529 - DNA, 1631 bp, Zea Mays
cggaatctaaagaagtacgcctcccagcctcagtttacgctatttatattatgcgcctgctagtcagaaccctcagtccctcaccatacctccgaggctccgaccaaaacaccagggtcccagtgctcttggctctaagatggcggcgccggaaccggaggccaagctggaagccgtaaccccatctcggtcctacgagctgccaccggagtccgaatccgacgcccctgcctccaccggcacccaggagctaaagccgtgggagcagcacgccgcggtgatcaacctcccgcgctacgactaccgcgcatcagggtccctcctcctccgttcgcattccggcttcctcatcacgtgccccatcaagcgtgaaaaaagtgcaaccaaggaagccattcccatccttgaagagaaccatgtgatgtgaaaaatgcaattaagaaaagaaaactgtgctcggaggcatcaggaagtttagaagaggcagtaacgaatgggaatagtagcagtgtttcagaatcaattggaagcaccggaaacacaagctcaccccagtccaaggtgaatgacaatgttgacagggcttcaaatctctcactggttaagctatcaagaagtggcttgctcttctttaaatttcctagtggaggcgttcatgtagttgagatgcttactgaaatacttcattcactcagatccgggaaactcaaatctccacagtaaggatccaacttcattatggtgccaccgcatattcccaattcaagaaacttgcattctatcagaagaagacctgcatgccactgtgtcaaagttattccttgacttctcgaggagcaagacaaacgaagacaagcctataaagtttgcggttgcctataatagaaggggcattgatgagacagagaagaacagtaatgaaggttcaaaccagcagactttgatggatagggagcaatgtttcaaagtggtagctgctgctgtcaaatccgttgctgagaactcagtggttgatcttagatcgcctgaggttgcggtactcgttgagatgctcccggtttccggggtacctcttggatcttcggtggctggggtgtctgttctcccagccgaactcatctcgaccaaacctcgcctttgtgtcaggtctttggtgcctgatgcaaaagcaggaaaaaagaagtgaaatacggtggcgcctcgtcaaccagagtatctgtaatgggaaactgccgatgcagtttttcacatgcctatttgtaccagagtaccatcgccttaattaagccttgtttttatgaggacatgaaaccatgatcagggcttgtccttttttacattaatcaaggcgagtttttaataatcatagaagacactggtatgccttcgacaatgtatcatcctttgcccccgcacaaatagtcgtctgtctgcctttggggatgtcaaattgtgttttgtggcagcatagaagggagttcattcagttcttgccttcttgtacttgtcgtccttttttttagcagcgtgccgaaatgtcaaaactggccggccatgatggtctctccactgtttgtctcagaactttgtccatcgtgtgcagccacaaagcatgatgcatgttgctgaag

SEQ ID NO: 55530 - DNA, 2185 bp, Zea Mays
ctcgcaattattccctctacccctcggcatcttgtctaattgaaaatatattgggtgaaaagatcttggaaacatgcaagatgtggctgaacacaaggtgcacgttttaactagtcataggctgatgtcaagagctgtgagcctgtgaccaacttctttaaaagtagatatgttttgctagagtgggagtgtcgggctgttgagctgattggttcgtctggcattttggcggttgacagtaataaccgttgtttaagatatattccccacctctctttcacatcaggagaaaggcattactgttgcatgccaaacatggtagtgatctactgcaattcagaagggatatgcttattagaaattcgttataaggcatttgatgaggtcgaaggcattgaggtcgcctggaatcaaatcaacatagatgaggtgatgcagtgtccagataatcttgataggctctacacagaagttcatcttctgaagtcactcaagcatgaaaatgttatgaagttttattattcatggattgatgaccagagtaagaaaattaatgtcatcacagagttgttcacgtctggaagcctcaggcattaccgtcagaaacatccacgtgttaacttgaaggcaataaagaattgggcaaggcagattcttcatggattggattacctgcatagccaccaacctccgattatccatagagacttgaagtgtgataatatttttgttaatggaaaccatggagaagttaagattggagatcttggactagctacagtaatgcaaacacctagggtaccccagaattcatggcacctgaactttatgatgaaaattatgatgagcgtgttgatatttactcatttggaatgtgtttgttggagatctttactcttgaatatccatacagtgaatgtacgaatccagctcagatttttaagaaagtatccacaggtgttaaacctgctgcattggctagaatttctgatcttcaagtaaagcagtttattgagaaatgtttagttcctgcttctgagaggtcgtctgccaaagaacttctgcaagacacatttctttgtcctgacaatacacatgaacctgctgtcactaagtttatatctccagcacctaaaaaaacagtagatatctctctggcgtctttgcatatggatgttgacactttggaatctagccatactgattcaggcaaggaaaatggatctgttgctccacatacaccagttttggagttcacaagaaccaacaaaaatacagagctaaagctaaagggcgagaaacttgataacaactccgtgtcactggttttgcgaattgctgatttctctggtcatgcaagaaatatccatttcctcttttacttggactctgatacagctatgtctgtagctgctgaaatggttgaacaattggagttagcggactgcgacgttacgttcattgctgattttattgaccttttgatagtgaatcttattccaggttggagacctgtaaatgatgcagcagcgaactcgtataggcgatctgaaagtgaacttgcagtcaattcccatcagaacatctcaaagttggtacctgattatgcattaattgatggtgtgatgcgcccaaaagatgtgaatgcatcaactagttgccttgactctgtctcaagtgcaaccaacctaggaggatcacaaggttctgaaggttcagtcatttctgtacagcttgctgagagttccaaaagtgtgagtgactatggggccgaggattatggcactatggactgtggtgggtacaaagacggaatcagcacattagattgcagccatgttttagataatggatcgaggtcgattttccatatagatcaagcatcacctttcttggagttggccagctgtggttcatcaacttcaactgataaccaggatgtgatgaacggggagcttgtttttattgaagctcagtacaagcacttggttgatgagttgacaaggatgcgagaagaggctagggaaggagctcgaaaaaactggttgccagatacatgatgtttttgttcaaatttggcatttcctctaaacatcataaactatgttcgatttcatgtttgaagtgtgagaaatgttaataatctgttttagttaaagcattgatgtagtttgcaagtcacagc

SEQ ID NO: 55531 - DNA, 2520 bp, Zea Mays
ccgaacgcccaactactagtatctcttctgtcttctccggttctccctatcccacctttccctccccaccacctacctaccgcttattcaccgtcgcctaccacctccccctcctccacgtgccgacttccgctccgcaccgccaatccgtcgtaaccctagcctagcccagcctggcctcacctgattccgatccgtccatgttcgccgcgaggaattttcctcccatgggttccgcatacgccgccgagaggacgccgatcgatggagaatgaggtgctgcgtctgccgcgtatcctccgccgggtgccgggccatgggcgtcgcgggacgggccaatccgacgtcgtcgctgcgcagccgacgctgcctccgcatgcggccgtcttacgccccgttctccgagcccttcactgaacccccggcacccgccgcaccatcataccctgctgccgcgcacagtgcgtaggagccgcgggcggaccaccgacatcttcggcgatctccattcctctttgcttcctctctctctctctctctctctctccccctccccccctctcgctcgtagagtcatttgcttgtcggggccgatccggaatggaggtgtttggttgtgggacccacaacgatgtggtcgatgctgaatacgcggaagtagatccaaccgggcgatacatgcgcttataaggcatttgatgaggtcgaaggcattgaggtcgcctggaatcaaatcaacatagatgaggtgatgcagtgtccagataatcttgataggctctacacagaagttcatcttctgaagtcactcaagcatgaaaatgttatgaagttttattattcatggattgatgaccagagtaagaaaattaatgtcatcacagagttgttcacgtctggaagcctcaggcattaccgtcagaaacatccacgtgttaacttgaaggcaataaagaattgggcaaggcagattcttcatggattggattacctgcatagccaccaacctccgattatccatagagacttgaagtgtgataatatttttgttaatggaaaccatggagaagttaagattggagatcttggactagctacagtaatgcaaacacctagggtgaggagtgttattggtaccccagaattcatggcacctgaactttatgatgaaaattatgatgagcgtgttgatatttactcatttggaatgtgtttgttggagatctttactcttgaatatccatacagtgaatgtacgaatccagctcagatttttaagaaagtatccacaggtgttaaacctgctgcattggctagaatttctgatcttcaagtaaagcagtttattgagaaatgtttagttcctgcttctgagaggtcgtctgccaaagaacttctgcaagacacatttctttgtcctgacaatacacatgaacctgctgtcactaagtttatatctccagcacctaaaaaaacagtagatatctctctggcgtctttgcatatggatgttgacactttggaatctagccatactgattcaggcaaggaaaatggatctgttgctccacatacaccagttttggagttcacaagaaccaacaaaaatacagagctaaagctaaagggcgagaaacttgataacaactccgtgtcactggttttgcgaattgctgatttctctggtcatgcaagaaatatccatttcctcttttacttggactctgatacagctatgtctgtagctgctgaaatggttgaacaattggagttagcggactgcgacgttacgttcattgctgattttattgaccttttgatagtgaatcttattccaggttggagacctgtaaatgatgcagcagcgaactcgtataggcgatctgaaagtgaacttgcagtcaattcccatcagaacatctcaaagttggtacctgattatgcattaattgatggtgtgatgcgcccaaaagatgtgaatgcatcaactagttgccttgactctgtctcaagtgcaaccaacctaggaggatcacaaggttctgaaggttcagtcatttctgtacagcttgctgagagttccaaaagtgtgagtgactatggggccgaggattatggcactatggactgtggtgggtacaaagacggaatcagcacattagattgcagccatgttttagataatggatcgaggtcgattttccatatagatcaagcatcacctttcttggagttggccagctgtggttcatcaacttcaactgataaccaggatgtgatgaacggggagcttgtttttattgaagctcagtacaagcacttggttgatgagttgacaaggatgcgagaagaggctagggaaggagctcgaaaaaactggttgccagatacatgatgtttttgttcaaatttggcatttcctctaaacatcataaactatgttcgatttcatgtttgaagtgtgagaaatgttaataatctgttttagttaaagcattgatgtagtttgcaagtcacagc

SEQ ID NO: 55532 - DNA, 1268 bp, Zea Mays
ctacactcatgtaactgctggtacttcgaggtccctcctcatcttaatttctttgaacccagctagtgcattcactttgtcccatttgcttaagagccaagctgaggagccttcgcttcccccttagttcagttcaccgtgggttgtagtggctcacgtcttcatgtctgtgttagcgttcccctagccgcacctggtgtttgcccaggttcttcgcacggcgattccctgtgtttgatgaccacgccatccagttctccgcctcatcgtggccaacacaactcgagctggtgaatgtcgtctggagcagcctcactatcgcgatctgattcccgagtcagctccgcttacgtttgggtgtttggtggtgaagaaatgaaagtcttggggctgcgtaggaaaaggtttttttgtacttttctttccaatttcagattatagctgagacctagaaaattacagaaaaatactaaaaacgtgaaaccaattttgttgagttcaccaaggtgagtactctctgatagaaatattcattaggcttgaacaacaacttttgtgtttaggccttaattaaagtaacttgctaacgcttgttttagttatagaaatatagctccaaaaatgctgaaactttgtgggaggtttaatatgtctaaagtagtgttgggtaaaagttttaatgtatttggagatggtttgtccgactaaattcagtttaggcttttagatcaaatgttaagtataggtataggtaagcttgtcatgtgcttggttagagatgtttatgttccccacctctcctttgtgagagtttgcatatcatatcattacataagcattcatgtattggtaattgacttgtagaacacctagaagaagtggtgtttaaagaagaagcctgccccaagtactgttgatccagtggtggagtctcatctaactgtagaaaggttttggatcttctcctgcgataaggagaagttttattcccttatcctttgggtagttacttcatgtggaggacttgaagcttagaatgtttttatatatctcttatggaaaggcttcacccttccaattattgtaataagttatgcacttcgagtactatcaagacttgtaataaatacatctctttctacaatgtaaaacttgagttctggaatgtaaagtgtactttgtaaaagtcttccggtctatctccaatgtgtgtgtatcaaatgtgattactgtaatatacctgttatgtgggagatccttgggatgag

SEQ ID NO: 55533 - DNA, 2064 bp, Zea Mays
gtattttcaaccttgggtttctatagcaagttagtagatctatggttgggaaataactcttgtgaattaagatggatctgttgctattggaaattgacagaaaaaggggtcccaatttggtcctgcagtcaagttcgactagttcaacttggatataaaaaaatatctgcagacagtatcccaatctactacacgcttccaggaaactctaaaaaaatggatgagaataactctatcctgaacaaaatggggaggggttcacgtgaataaattttacagctcaggggcagcagaggcagaattgagcatatcttaaatggtgactcagctgcttgtgtgttttgctgtcagcacaggattaagcctccaccctttacctctctgtatattggtcctgtgtggagtggggaagtgaagccacgtgcctacactcatgtaactgctggtacttcgaggtccctcctcatcttaatttctttgaacccagctagtgcattcactttgtcccatttgcttaagagccaagctgaggagccttcgcttcccccttagttcagttcaccgtgggttgtagtggctcacgtcttcatgtctgtgttagcgttcccctagccgcacctggtgtttgcccaggttcttcgcacggcgattccctgtgtttgatgaccacgccatccagttctccgcctcatcgtggccaacacaactcgagctggtgaatgtcgtctggagcagcctcactatcgcgatctgattcccgagtcagctccgcttacgtttgggtgtttggtggtgaagaaatgaaagtcttggggctgcgtaggaaaaggtttttttgtacttttctttccaatttcagattatagctgagacctagaaaattacagaaaaatactaaaaacgtgaaaccaattttgttgagttcaccaaggtgagtactctctgatagaaatattcattaggcttgaacaacaacttttgtgtttaggccttaattaaagtaacttgctaacgcttgttttagttatagaaatatagctccaaaaatgctgaaactttgtgggaggtttaatatgtctaaagtagtgttgggtaaaagttttaatgtatttggagatggtttgtccgactaaattcagtttaggcttttagatcaaatgttaagtataggtataggtaagcttgtcatgtgcttggttagagatgtttatgttccccacctctcctttgtgagagtttgcatatcatatcattacataagcattcatgtattggtaattgacttgtagaacacctagaagaagtggtgtttaaagaagaagcctgccccaagtactgttgatccagtggtggagtctcatctaactgtagaaaggttttggatcttctcctgcgataaggcaagccccggtgcatttgccaccttccttgtgtttacaaaatttttatcacttatatgctgcattaggttattggagttgattgatcaaacccttgatgcattaccatccttgaaagcttgattaccataccttgttacctgtttaataaaagctagtgatgcttagtcacgctgatagattaagaaaaatgtttttgatcgatgactcatgtttttacaaacaagaaaatggacttgaaataatgaaggcatcaagacgttgataaattcattatccaagcatggcccctctgtcaggcgccaaatttttgaaatagtttaaaatgggaccagacactgagcaggaaaagtcgcccgtctgtgtcgattaaggaccgtaccgattgttggcctgctgatctaggaccttttatctggccacatacctcgtcatgggtaagcttgaacccggctattccatacgtgaaaagacaatcgcgcactgggagtggagagatggcgagagtggcacgtaccctcctggcaaaggaccgcctaaaaggggtggtgtgctctcgggtggcgcggacctgttcatgtgatggagggtccgtgggaatggtagacatgtgcaaaagagttaagggaagcatatgtcgtgtggttggagatccccagctggg

SEQ ID NO: 55534 - DNA, 1604 bp, Zea Mays
gtattttcaaccttgggtttctatagcaagttagtagatctatggttgggaaataactcttgtgaattaagatggatctgttgctattggaaattgacagaaaaaggggtcccaatttggtcctgcagtcaagttcgactagttcaacttggatataaaaaaatatctgcagacagtatcccaatctactacacgcttccaggaaactctaaaaaaatggatgagaataactctatcctgaacaaaatggggaggggttcacgtgaataaattttacagctcaggggcagcagaggcagaattgagcatatcttaaatggtgactcagctgcttgtgtgttttgctgtcagcacaggattaagcctccaccctttacctctctgtatattggtcctgtgtggagtggggaagtgaagccacgtgcctacactcatgtaactgctggtacttcgaggtccctcctcatcttaatttctttgaacccagctagtgcattcactttgtcccatttgcttaagagccaagctgaggagccttcgcttcccccttagttcagttcaccgtgggttgtagtggctcacgtcttcatgtctgtgttagcgttcccctagccgcacctggtgtttgcccaggttcttcgcacggcgattccctgtgtttgatgaccacgccatccagttctccgcctcatcgtggccaacacaactcgagctggtgaatgtcgtctggagcagcctcactatcgcgatctgattcccgagtcagctccgcttacgtttgggtgtttggtggtgaagaaatgaaagtcttggggctgcgtaggaaaagaacacctagaagaagtggtgtttaaagaagaagcctgccccaagtactgttgatccagtggtggagtctcatctaactgtagaaaggttttggatcttctcctgcgataaggcaagccccggtgcatttgccaccttccttgtgtttacaaaatttttatcacttatatgctgcattaggttattggagttgattgatcaaacccttgatgcattaccatccttgaaagcttgattaccataccttgttacctgtttaataaaagctagtgatgcttagtcacgctgatagattaagaaaaatgtttttgatcgatgactcatgtttttacaaacaagaaaatggacttgaaataatgaaggcatcaagacgttgataaattcattatccaagcatggcccctctgtcaggcgccaaatttttgaaatagtttaaaatgggaccagacactgagcaggaaaagtcgcccgtctgtgtcgattaaggaccgtaccgattgttggcctgctgatctaggaccttttatctggccacatacctcgtcatgggtaagcttgaacccggctattccatacgtgaaaagacaatcgcgcactgggagtggagagatggcgagagtggcacgtaccctcctggcaaaggaccgcctaaaaggggtggtgtgctctcgggtggcgcggacctgttcatgtgatggagggtccgtgggaatggtagacatgtgcaaaagagttaagggaagcatatgtcgtgtggttggagatccccagctggg

SEQ ID NO: 55535 - DNA, 2659 bp, Zea Mays
gtttagatttgtgcggtatcagccttgttgcctcataagtacaaccaagcgaggccaaagtgtgcagttatttctggacggaccgaaaaaaaaactagaagtaaatacgtgtacacatatatatagatctacacaaacatcgcgacgaggacaagaatgataggctgtattaggtaggttttatagatatattcaaggctcaagtgaccgcgggcgtcgttcgatcgatcatgagtccatcgttcttgaattcagaaaccaggatgtgtttaattaaagcactaaaaccacacccccggttagttgctcgcacgtggcacggttccctacgcacgtgcgaggccccatcatgccaagggctgcgcgcgcggctggctgctgtcaccgactggttttttctgtagctccctccggacccggcccaaaaaaaaatcgctacgtacacggacaaagctagcacgcttggaaaagcgttacatggacgaaattttttgacgcgtttccgaaaactgccggggcaccgatttcggttgctcttcctcctcgcttcgcttcgctccagcaccagcagcagcagcagcctccagcgagcgagcctagctagacgcataaaaatattgcgagaaaaagaatcgcactatctcgtctcatgacatatgaaggagaagactagagaagggggccggggagcaattccactacacaggacattcctcctccctcgcccgtcccatccagctccagtacgctcctcctcctccttcctcctgcgcctcgtcctcgtcctcgtcgtcgtagtcgtcctcagctcgtacgtcttcttcctcgcccctcggaggcaacaaccaccacacgggagaaccgctggcgaggagcggaattgggatccttgcatgcatggatgcggcgcagtggcatcaggggctagggctagggaagcccatggaggagatgctcatggctggaaacgcaaatctaaaccagaatccaaacccaccgccggctgcgccctcggctcccggcgcccagagggcaggcgctcccgccgcggttgcggcagcgccgcctagcgctggcgcgaccggaggagcggggccggagcggcgggcgcggccgcagaaggagaaggcgctcaactgcccgcggtgcaactccaccaataccaagttctgctattacaacaactatagcctccagcagccgcgctacttctgcaagacgtgccgtcgctactggaccgagggcggctcgctccgcaacgttccggtgggcggcggctccaggaagaacaagcgctcgtcctcggccgtgtcgtcggcggctgcggccgccgccgcctccacctccgcggctatgtctggcacggtccccgtggggctcgcggccaagaaccccaagttgatgcacgagggcgcgcacgacctcaacctggcgttccctcaccacaacggccgcgctctgcagccaccggagttcccggcgttcccgagcctggagagcagcagcgtgtgcaaccccggagctgccatgctgggcaacggcgccgccggcaggggcatgggcgcgctctcgggtttggagctgctgaggagcacgggctgctacgtcccactgcagcactttcagctagggatgcccgcggagtacgcagccgcgggattctcgctgggcgagttccgcgttccgccgccgccgcagtctcagagtgtgttcgggttctccctggacacgcacggcacggggggagttggcggcgccgggggttacagtgccgggctgcaggagagcgcggctggcaggatgctcttccccttcgaggacttgaagccggcagtgagcgctgctggcggcggcgcgagcaacggagctgatcatcatcactacgagcacagcaaagatcaagcagcaggcgacggcggcggagccagcggcgtcaccggcggccacgaggctccagcaggattctggagcaatagcatgatcgggaatggcagcagcaatggtggcggaggctcttggtaaatggtaaggcggcgcgccatgcatggctcatgcacgcgccgttgtcagcatgcggagataggggggtagagacaaggatcggagttaataagagggtggaggtgattagtgttcacatatggcgtttgatctctctggttgtttgccttctctttttattttcggttcttggtgttcgtgtgtgtcaatcgacttgggggctaacacagcaggatatacagattgttaaggcggtgaaccgattatttacagcttctcttagccaatccatctctcgttttctgattctgtaatccaaggaacaagctgtcaatcacgttgtgcattgcatgcgcattatgtagagtatgtattaattgagcagctctagctatgttagtgttacaagttaaatcacaccgtacgtatcatgcttcacttacgtacttttgtgacgtgcttttaagtcttgataacacatgttgggggcattcggcttccgaaggtcctcaaaaacatgatttaacagtgtttctagagtgtaatgtgtgaacaggtaccttcggacttatgtcaaagagggagaacctcaaaagatacgaaggttggcagtgccgaagctgtgaagcaggaaagcttcggcatgttcgcagaaaag

SEQ ID NO: 55536 - DNA, 5866 bp, Zea Mays
cgggccttcatttaattcgagatgaggcgaggagtcgtgtgctagggcgaagaaaggcaatcaccggcgttgccgcaattgtggcggagggctgcactgccttgggcgggcctctggtgagggagaacaacgctgagccattcattcgtgataggatggctgcgattaggttataggattgaataattgtacaacgctgagccaaacattcgtgatcggatggctaaatgtgatgctaaaaatatagaataccaattggggtttttgcatatcaatgactctttctccttgatggattctttagaggaagaaaatgaagtaccagttgatgaaagtcaattggataaggatgcaacatttgataatggatcacctctaaatacaaatattattgtccaagaagattatatttgcacggatgctgatcttgccctcatcgattggattaaagaaatcccttgtgaaccaagggtagaagttgtgctcatcgatgatgcctgtgtggaaaggaaatggatggcatgtctatttcaactgggcgcatatctaggtgatgaggtgatagactgttacataaatttaataaaaactaaacagcaactaaaatgcagatctggaggtcgtgtacacatagaaaatgctcttcagttcaactttttaaagcgagacagtgatgttaaaactaaaacagatgagctatatctaattacagacatgacacaaatatgtagtgctgaacgaagggttttactccacctagaccatgatatggtgtttattccaataaacatccgaggaatgcactggtatcttaccgtcatcaatgcaagaaatatagagatacaagtactcgattcacttggtactacatttgaccgcaatgacctcactgactcgattaaagggcagcaaaggcaaattaatatggtatctcagcgtaaagagttaaaagatcacagctcttcatgtggcctatttattttgaactatatcgaatactggacaggggatgagctgtctgacagttttacccaggatgacatgtcacactttagaaaaaaaaaattggctgctatattactatcttcatacatgaacaaaagaaggggatatctgatatacaaatatgataaagaagttcatactggaagcccctctgatgttgagatattagatagcccaacaaatcataagaagaggaaactactccatgtgcttgataatagcgaggtattgagggaagatgaggatggcctcattactcaagcagacttacaaaggtggtttgttgatgaatgggataaaagaactcatacaaaagtctcgatggatgggtgcacggacgactttttaatgagtggtcttttcacaaaagacatgccagtgactaaagccgatttaatagatgtgctatgtgattacattatggcaatccaagatgataggacattagagtaagtacccattgttttgtctattttatttataccaattacgtagagtcttgatatagacttccgtcatgtcatgctacattacaggatgatatgagtgcgaagtttcaacccttttaagatagaaatatctttcaaagacctgcagaacatattaagtataaatctagatatgactctaaaatattttgacattgcatggttgttcgattgcttgccaataaagagtcacgtaagccgaaaggtgaaatcataaagaatagaaagcattatagggacatgggcttctgggtaagtttatttccaatcaataatgtatcaatatatattatctatatatatctaatcctcatgtggtcatgtatatatatttatccagagaatgattggttttggtaaactgccaaagtaccatgaggaccctacagcagaagagttaacaaaaacactcgattgttggccatcaatgaactattatatcacggcttgtaaatatgtaagtatgagttcatttcaaatgtatttataaagggcacttctttgcaatcctaatgactgatattttacaggttcttatgccatggaaattcaacggttgctacgcccttttcgtaatagatcatggtaaaaaacacgtcacttttattgactttgcacctaatcaagattggtgtaagcacatgccatacaagaggttcgcagaagcgattatcatcgcctcaaagaaatataagattgtctatagcaagaaacgtactggatggacagaggatatttttaagtggcaatatacaattcaacctggtgttccaattgacttaaaagagtattttctccgtaccatcttcttagcaattttaattttttttgtctatgatttccattgtatataacttagttggcaaaacattattctataggattaacaccagctaccttatcctacaagctatggccatgtgggggatgatagtccaataaaatttgttagggtgagtggagtacgttcctttcatattcaaacatacattctagttacataataaaaaattaacgttttgttctcttataagtcttatgtgtaggatgcaaagattcttcagagaaactttattatcgaactgttaagttacgaggaaaattcgtgcagatatgccatctcgataaatatacagcagagagttaacaatattgttaaaaaagattagattagtgtataaggtgtcaacatatttacttatgattaagcattatatatttactctttaaaaattatttgtgtgattccatttcaatctatttgggtagacatatttatatcgttctgtatctatgtttaataatcacatattttgtcgtcactattgtactcacgctgcacatagtcagggccctaagtccattggagggtcgtaatttgtgttccgtggcatcgcatgggcacgttcctagttctataaaatataccatttttaaaattatagagtatatgcatgcttttaactatgctcaccccgatctcgctagggttcccatgatggcgacaccgcgttccccgagccccctccgcgccacccgacatcgccgaggagcgacgaagagtccaagagcgcgtcgccatcacggtgctcgctgtgacgaccgtcgctccacggcgcggctactgcggtggggcgggcatagagcgatgcgggaacctcgctactggtgcaggaagctgcggcggagtagctggactcccgcctcgtggtaacgcttgacttcttctggaacatcgcctttatcctcgtatccgccgttgtgctcgtgctcagccacgacgagagctcctccatgccgctctgtttctgcatttgtgggtacgccgcccagtgtgtcctccacatggtctgcgtcgccatcgagtatggtatgcgatacggctaacgctgcgggtcgccaattcccgctgacgaggagagcggaagtggtacatcgtcctcctccagcaacgatgatgacaaagagcacgactcccatggtcgaagtggtacgtggagagggagggagggagggagctattaccattgccttcggtcagtagctggagtgattttcatgtttgtacttatagcttggagattcttactttcggcttattattccttatttctagtttttgtttgaatgttccatagtctcttgaaatgttgtttgtgttgcgattttattctaggcagtgcatgggaacaacatatcaaggggtgactgtgacagttgaacaataaacgaattgtaatagtgcatctgatctggttgtgttttgttccttcacccaatccaaatattctgcctgattctgcaaaacacaggcacatttatccactcacttagatccagttgcatgcaagatcattctcatagcactcctgccgaaggggtcttcctgtaccactatttttcttcggattgtttttgtttggtgtcctcatctagcacttagcttctagtatgttagtatcatcttccttggtgatctcctcatctccaccatctttggcaacaaggagccaaggacaaagccctccagtgcgagccagctaatgaaactggcctgcttccaagtgccagtctagctggggagtgacattgatgaatgttactgggtgatctggatctggacgctgctaagcaaggggattgtagccttgaaggtggggctggcatacaatggtggccatggattctactgctagtgagtaagcagaccaactatgtggaaaggggttaggcagttgttgacagtaggatggatgaaagtgcgaatctaacggtgtagtggcagaaggagcaagctgagggtggaaagtggtgctattttttccacccagagaaaaaaatggtgacacaggagcaaaactctttgatgaagtgctgtgagagtagtttttctttgcattgaagttcgatataagctacttatatttatcttattatgcattcaaaagctatatcatatggagagcggtctgtgtggtaattggtactaaaagctcagtggaacttaagtttttgaggcgaaattcctagattgagtggagagcagcaacttttcaacaagtaccacataccacgtctgtgaagcctatgtgatgagattactacaattgtttcttgcactgcccagtctagttatttttgtttcttaggtcatccacttgatcacagagtaatacaagtttatttggccatactggtgcatagggcagtgatgacgttcaaaatgcgcacatgtgggactaatgagtaacagaggacactgttcactggattttgctgtataatttgaaactttaaacaagatgtgtgacagatatatgggtttgatagacttagtaagatactaaaatagacacctgcagtgcattttatgtctgcttttgtaggtatgactactgcttttggtatattttgcatatttggttatttgtggactaacttggtggttagcttttcatattttattattcattgctcatactgcattgttctgcttcatatgtggcattgcccacaattattttttcgttcattccaaaaaaacaaatgaattatagcgccatacatgatcactttgaattctctactgcctactgaattcatcccccatattgttttctatttcctagccctatttaatggttaattgttttgttaatatctgtaacatgtaaactgccaactatgttctctttgctgtcttgtagtatagctaaacatctggagtctgctaacacaatgttctcattcctatggtggctaattggattgtattgggtatctgttggtggagaagttcttacccgtgatgcacttcatctttactggctttgcattgtatttttggcatttgatgtttttttgttgtcttctgtgtggttttggcctgcatcattggtattgctgtttgttgctgccttccttgtatcatagcaattttatatgcattgtcggatcaggagggagcatctgaagatgacattcatcaaattccaaaatacaaatttcggaagatggaagagccagaaaagcgacctagtagtgtgcctggatcttctggtggaattatgatagaatgtggcacaaatcaacctattgaaaaagtacttgcagctgaagacgtgatcttcctggcaaactttgttccgacttctcttaattctgatggccttgttcaggtgagtgctgtatttgcctttcggcttatgatggtgcagagcctcgtgaacttccttctggccaccattttcattgggtttgcatcgataaatggttgcacatcaatgccacatgccccctatgcaagtacaatgttcggaaaaacactagcagaagtggcagtgaagaagtataaatctctgtgggaatcttga

SEQ ID NO: 55537 - DNA, 2476 bp, Zea Mays
cacacccacacacacacgccgctcggaatcggagcttgcatccgaccgcgagcaagcggaccaaatcctcctccatattctatcgcgtgcacgcatctggccgcctcgaccctcggcggcggcggcggcgacggcgacgacgacgatggggctggagatggaggcgatggcggggtcgatcggcgtgtcggtgcccgtgctccggttcctgctctgtttcgcggccaccatcccgacgggcctcctgtggcgcgcggtgcccggcgccatggggcgccacctctacgcggggctcactggtgccacgctctcctacctctccttcggggccacctccaacctcctcttcgtcgtgcccatgacgctcggttaccttgccatgctcctgttccgccgccacgccgggctcatcaccttcctcggcgccttcggcttcctcatcgcatgtcatgtgtactacatgagcggggatgcgtggaaggagggaggcattgatgcaactggagctttaatggttttaacgctgaaagtcatttcgtgctcaataaactacagtgatggtatcttgaaggaagagggtttacgcgatgctcagaaaaaaaaccgattgactaagcttccttctctaattgaatattttgggtattgtctctgttgtgggagccactttgctggaccggtatatgagatgaaagattatcttgaatggactgaaaggaaaggaatatgggctagcccaactccttcgccattgttacctactttgcgtgctctagttcaggctggtatatgcatggggttatatttatacctgtcacctaaatttccactctcacggtttagtgagcccctatattatgaatggggtttttggcaccgactcttctatcagtacatgtcaggctttaccgctcgttggaaatattactttatatggtcaatttcagaagcctcaattatcatatctggtctaggctttactggttggtcggaatcttctcccccaaaagccaaatgggatcgtgcaaaaaatgttgatgtattaggtgttgaattagctggaagttcagttcaattgccccttgtgtggaatattcaagtgagcacatggctacgatactatgtctatgagaggttaattcagaaaggaaagaaaccaggtttccttcaattgttgggtacacagacagtcagtgccatctggcatggactatatcctggatatatcatattctttgttcaatcagcattgatgataaatggttcacgagttatatacagatggcagcaagcagcgagcagttcattactaagcggtatcctggcctttctaaattttgcttatacattgctggtgcttaactactcctgcatcgggttccaggtactgagcttcaaagaaaccttggcatcctaccggagcgtatattatgttggcacaattgttcccattgtgtgtcttctgctgggcaatgttatcaagccagcaaggaaggcgaaggctcggaagaccgagtgaggaaatactcactcaagtgacctttacatagaagaaagatggtgaagcttcaacgaagataaggacattctagttttcaatttatttattctgtctttttgtacggtatcaaatttagcataaggataatgtggtgaccccggttctcctacctcggaactcgattgcgattgatcaatcattaaaacgtgacataaccactggattttcctttacttaatgactactcatacgtgtgtgcgaatgattttttgtcctgacgggcctttttctattgtgttcccatctgcctgctgaatgtcttccggacgccttcccacctggagcttttatttttgactggcaagatctattcaccgtaagtgatatccatggatgcatacatcaggagtgatgaggataccaaatcatcaacttgctcatcaggagtgaggataccaaatcatcaacttgctcatcaggagtgaggataccaaatcatcaacttgctcaggcacgtcgcacatgctgtgtatttcgtctacgaattgaccatgcggaaagtcaaattttgcccgtaatctcagttttcactccacggtccacgcggcatcttgttcttttaatatgcatccttttgcggcgtggtttatgagcgtcaaaatttaaattcagattgctgttagagcttgatggagggttttgatgtagtgcgcatggagatggaggtgatgggcgctttccgcgtggtcatactactaggaaccgacgagcccgacgtccgatttttatgggtcatataaatggtgcagcgcggtatacgcccgtgcggcccggtccaacccaacgtgcggcaagggcggcggcgtggtgagttctggtgttgacgtgacgtggtgttgacgctggactgctggtggtggtggcttcattcttgcatggcagtggcggaggacaaaatttttttatggctctacg

SEQ ID NO: 55538 - DNA, 2128 bp, Zea Mays
cacacccacacacacacgccgctcggaatcggagcttgcatccgaccgcgagcaagcggaccaaatcctcctccatattctatcgcgtgcacgcatctggccgcctcgaccctcggcggcggcggcggcgacggcgacgacgacgatggggctggagatggaggcgatggcggggtcgatcggcgtgtcggtgcccgtgctccggttcctgctctgtttcgcggccaccatcccgacgggcctcctgtggcgcgcggtgcccggcgccatggggcgccacctctacgcggggctcactggtgccacgctctcctacctctccttcggggccacctccaacctcctcttcgtcgtgcccatgacgctcggttaccttgccatgctcctgttccgccgccacgccgggctcatcaccttcctcggcgccttcggcttcctcatcgcatgtcatgtgtactacatgagcggggatgcgtggaaggagggaggcattgatgcaactgtgatggtatcttgaaggaagagggtttacgcgatgctcagaaaaaaaaccgattgactaagcttccttctctaattgaatattttgggtattgtctctgttgtgggagccactttgctggaccggtatatgagatgaaagattatcttgaatggactgaaaggaaaggaatatgggctagcccaactccttcgccattgttacctactttgcgtgctctagttcaggctggtatatgcatggggttatatttatacctgtcacctaaatttccactctcacggtttagtgagcccctatattatgaatggggtttttggcaccgactcttctatcagtacatgtcaggctttaccgctcgttggaaatattactttatatggtcaatttcagaagcctcaattatcatatctggtctaggctttactggttggtcggaatcttctcccccaaaagccaaatgggatcgtgcaaaaaatgttgatgtattaggtgttgaattagctggaagttcagttcaattgccccttgtgtggaatattcaagtgagcacatggctacgatactatgtctatgagaggttaattcagaaaggaaagaaaccaggtttccttcaattgttgggtacacagacagtcagtgccatctggcatggactatatcctggatatatcatattctttgttcaatcagcattgatgataaatggttcacgagttatatacagatggcagcaagcagcgagcagttcattactaagcggtatcctggcctttctaaattttgcttatacattgctggtgcttaactactcctgcatcgggttccaggtactgagcttcaaagaaaccttggcatcctaccggagcgtatattatgttggcacaattgttcccattgtgtgtcttctgctgggcaatgttatcaagccagcaaggaaggcgaaggctcggaagaccgagtgaggaaatactcactcaagtgacctttacatagaagaaagatggtgaagcttcaacgaagataaggacattctagttttcaatttatttattctgtctttttgtacggtatcaaatttagcataaggataatgtggtgaccccggttctcctacctcggaactcgattgcgattgatcaatcattaaaacgtgacataaccactggattttcctttacttaatgactactcatacgtgtgtgcgaatgattttttgtcctgacgggcctttttctattgtgttcccatctgcctgctgaatgtcttccggacgccttcccacctggagcttttatttttgactggcaagatctattcaccgtaagtgatatccatggatgcatacatcaggagtgatgaggataccaaatcatcaacttgctcatcaggagtgaggataccaaatcatcaacttgctcatcaggagtgaggataccaaatcatcaacttgctcaggcacgtcgcacatgctgtgtatttcgtctacgaattgaccatgcggaaagtcaaattttgcccgtaatctcagttttcactccacggtccacgcggcatcttgttcttttaatatgcatccttttgcggcgtggtttatgagcgtcaaaatttaaattcagattgctg

SEQ ID NO: 55539 - DNA, 2737 bp, Zea Mays
aaatatattaaaaatatcataatattgcagcttgcttacgatggcagatcatataagcggacagtgttgtcatttaatgaacacagtagcacaggttttgactgtgcgtcaggcataccactgagggcaagtgcaccctgaaggtggaagagaaccattagcatacacgtcaaaacataagaaaagataatgaaggattgcatttgcatgttacagaataaattggcaaagatgatgaaccctgttaggccttttcgttttgtacttaaaccatgtggattgaggtggattttgactagttgtggatttattcccccctcaatccacatggatttggaaaaaacgaaaagaaatgctgacaaaacaaacgattctgatggacagtaataactaatgggtacaggcagaagtcatagttctcaattcaaaaattcagaaaaagaacagtacagatataacaagttgacaactgttcttggttttaaagactaaaagatgttagttggagagttagagggtgttagtgattaagaattcaaaatactattctcaaataccacttaggaagattaagacattttaagggtttagtgcctactgggtatgggaaacgtaacctcaaaaaccttctattttatggaagatgtagggcatgctataatttgtttgccaggtttgttatggtccgcttgggcacttttagatctcttgcctagtcttacttgaccttgctgggcaaggatacatatttggcaggagtactaagagcttgctttgctaggcaagcttcatggcactaccaagaaaatcctcattgagccggagccgatttggctcccctacttggacaagattagcacgagcagtgaggaaaaacacttggcataaggaaacaggtgtgatcccaagccagccaaccaacatgcctcaccgaccctgggacctgcttcttttctgggtacgaaaggcacaagctcctattatttgcacatgactgcctaccatcaagagatgtactagcacagattatcatctgggttaggattttctgttcaagtctccagttactctgcgacatgtactagcatagatgctagctaaataatagtgcacatacaataggcactaggcagacctggtgacggaggctcccacatgagtggcgtctagagaagaaataaattgaggcaagccttccgccgcagctgcggagaggctgcttcgaacacaggacctagtgactcagtgaaatagctctaatagtgcacatacaatactgacaaaaaaaaactaaaccatatattgcatgatcaaaccactagtctagttcttggattgcttaaatttcaacataacttacataaataaataactatattggaatggttaacactaaaaacaataagaaaattccttatctgacattaaaaaaagattgaaatcctatattcgccatgaaaaaagttgtcatgcctgccatcatttcgatttttcattccctgtctatcactgccatctaattttgctgaaacagtagttaacaggagtctaaaattgttattttgttcttctctacccagctcttatttctccttcacctacatgcctcaaaggtcactggaacacagctgtacaggaaccagggcaaatgggatacacgtttgatggaggcctgtgctcaatcagtcgttacagcctgctatggtgccactggctccacactctgactcaggcttgcattgcacgcaccttgccagcctgccgcgtcccacgcccttcacctcagcaccacacatgttcaattgttcatcaccacggtcataggccactgcacgtcagaggctggcgttccttgctgtgttgctgcgtgtctcgcgttctgccttgtgcttgcattgtgcagccacaggtcagaggtccaacacctaatgcgtgctctccttcccttttccctcttgactatcaaatcaacataggccacgacaaggaagaccccacgtaggctgagcgccgggcgcagttagactcacctttgccatggcgactgagaggcaggtctcactgttgtcatcctttgctgccatgttgtcgctgctagccctgaaccacggcatccccagtggagtcgatgtctgccaccgaggacacccctttcccttcccctagcccgccttcaccatagtgcacctacactggtcttagagatccaccaagatgctgtgttgtgacaccagcacagtataggccgccatgcgggcatggagccatggcaccagagtagagcacccttctgcactgcatgtcttctgtggtgtgcctccgtgatctctgtgtcgctgatccgcgagtgtgcttcttgtggaagaagcaagtggcaccacccacggcatatccgccagcatcagtgcctcaaaggccactgccgaagccatgtccccatcccctgcaccaccgctcagtgctccatgtgcaagtgcagggccacagctgtgtccaggaagtgggagatcttgggacttaatcggatggagctagtgcctaatgtcctttaggggagaagaaatgaagggagaaaaggaagctttctcttttgcttgtttggtgcagaggaagcaagggtgatctaatcatttcccatagtaattgacacttaaagggaactacagattttttttagtggcaagaaaggaatttcaatcttttatgctggtctacaggtttccaagaacaatccgag

SEQ ID NO: 55540 - DNA, 2104 bp, Zea Mays
ctctattcccgtcaccgaaattcctcgagctacttcaaaacacacacaacaccgatgccgccgccgccgccaccaccaatcaccgctgcacccatgatcccggcatccccaaaaaagccgatcccgtccccgcgccaaatcgcagcgctagtgctgagccatccgtcctccacgctcaccgccgcgtcggcgcgctccctctcggcgtccctcctggccgccggccccgcgtccgcgttcccgatcccgacccccgtggccaacgccgtcatcaaactcctgtggcaccacgccccacgcgcgctcctcttcttccacgctctcctccgcctcccagagcgctcgcgcgacctctccccgtgcacggtcgacctcgcgctcgacctcgccgcgcgcctgcgccacccacgtcagctcacgagctccatcctcgcgctcttcccgcgccacggcctcgccttcaccccgcgcacgttccccatcctgttcgagcggtttgcgatgtcccaccgccgccccgacctcgccatccggctcttcctctctctccaccgctcccacggcatcgcgcaggacctcccgttgttcaattccctcctcgacgcgctcgtcaagtcgcggcgcgcgagcaaggcggcctccctcgtccgtgccctcgagcagcggttccctcctgacgcggtcacgtacaacaccctggctgacggatggtgccgcgtcaaggacacctcccgtgcgctcgacatcttgcggcagatggtcgagtcagggattgccccaacgaaagcaacctataacatcatcctcaaaggtttcttccgttctggacagttgcagcacgcatgggacttcttcctccagatgaagaggagaggcagcaatgacgagaactgtaagcctgacgtcgtatcgtacaccaccgtactgcacgggctcggtgttgccgggcagctggacaaagcccgcaaagtgtttgacgaaatgtctatagaaggatgcaagccatcgactgcgacttataacgcattaattcaggtaacctgtaagaagggcaacttggaggatgccgtggcagtgtttgatgatatggtcagaaagggttacattccaaatgtggttacctatactgtcttgatccgaggcctctgccatgctgggaaggttgttcgagctatgaagcttttggataggatgaagagtgaaggttgtgagcctaatgttcagacatacaacgttcttatcaggtattcacttgaggaaggggagattgagaaaggcttggatttgttcgagacaatgagcaagggagaggaatgcttgcccaaccaagatacatataatattataataagtgcaatgtttgtgcgtaagagggcagaggacatggcggtggctgccagaatggtggtggaaatggtggataggggctacttgccaagaaagtttatgttcaatcgtgtactgaatggattaatgttgactggaaatcaagagctttctagagagctcttgagaatgcaggagaaatatacgcgcttgcgacgagaaataagattgtgattggcattggattttttggatgatatatacattcaacatcttttgccctgggtacagcctacagaagatcaaaatctagatgcagcaccaggataacctagtcagttagcactcctagcctcctactgtccagtgattactgatctgtctgatatggagctgaaacatcattcaaaccagggtttgtgtctacgctggctcactagcatgtagcacgagatgttcagtatttacgcaggtggcagatcaagatatatgccacggcattcacaattgttatggaccaggtgcgtactgcatactgtatttggcacaatattgcgttttgcagttggacagttctttactggttggtaggtgtttacagttgcactggactttcatttgcttctattctatgcatttggaaccaaacgcatgagtaaaactttgtaggaaccatttataacgggtgaaactattcatgctatctattaaagataactattcactgctatgtgcctatgttttgaacgggcatgttcctttgttgactgaacctttt

SEQ ID NO: 55541 - DNA, 1985 bp, Zea Mays
ctctattcccgtcaccgaaattcctcgagctacttcaaaacacacacaacaccgatgccgccgccgccgccaccaccaatcaccgctgcacccatgatcccggcatccccaaaaaagccgatcccgtccccgcgccaaatcgcagcgctagtgctgagccatccgtcctccacgctcaccgccgcgtcggcgcgctccctctcggcgtccctcctggccgccggccccgcgtccgcgttcccgatcccgacccccgtggccaacgccgtcatcaaactcctgtggcaccacgccccacgcgcgctcctcttcttccacgctctcctccgcctcccagagcgctcgcgcgacctctccccgtgcacggtcgacctcgcgctcgacctcgccgcgcgcctgcgccacccacgtcagctcacgagctccatcctcgcgctcttcccgcgccacggcctcgccttcaccccgcgcacgttccccatcctgttcgagcggtttgcgatgtcccaccgccgccccgacctcgccatccggctcttcctctctctccaccgctcccacggcatcgcgcaggacctcccgttgttcaattccctcctcgacgcgctcgtcaagtcgcggcgcgcgagcaaggcggcctccctcgtccgtgccctcgagcagcggttccctcctgacgcggtcacgtacaacaccctggctgacggatggtgccgcgtcaaggacacctcccgtgcgctcgacatcttgcggcagatggtcgagtcagggattgccccaacgaaagcaacctataacatcatcctcaaaggtttcttccgttctggacagttgcagcacgcatgggacttcttcctccagatgaagaggagaggcagcaatgacgagaactgtaagcctgacgtcgtatcgtacaccaccgtactgcacgggctcggtgttgccgggcagctggacaaagcccgcaaagtgtttgacgaaatgtctatagaaggatgcaagccatcgactgcgacttataacgcattaattcaggtaacctgtaagaagggcaacttggaggatgccgtggcagtgtttgatgatatggtcagaaagggttacattccaaatgtggttacctatactgtcttgatccgaggcctctgccatgctgggaaggttgttcgagctatgaagcttttggataggatgaagagtgaaggttgtgagcctaatgttcagacatacaacgttcttatcaggtattcacttgaggaaggggagattgagaaaggcttggatttgttcgagacaatgagcaagggagaggaatgcttgcccaaccaagatacatataatattataataagtgcaatgtttgtgcgtaagagggcagaggacatggcggtggctgccagaatggtggtggaaatggtggataggggctacttgccaagaaagtttatgttcaatcgtgtactgaatggattaatgttgactggaaatcaagagctttctagagagctcttgagaatgcaggagaaatatacgcgcttgcgacgagaaataagattgtgattggcattggattttttggatgatatatacattcaacatcttttgccctgggtacagcctacagaagatcaaaatctagatgcagcaccaggataacctagtcagttagcactcctagcctcctactgtccagtgattactgatctgtctgatatggagctgaaacatcattgctcttacagtacttccatgtccaacccccaaatcaaacgctacctaagatatcaagcacactgtaaattctctctgtcatcttttacttcaaggaatgatttatggtgatggatatataggcatgtagcagatggattgccatttgccaagcattcggatcatccgatgagtagtgtgggctggcttgctgacgaacatcaataagacaggatctctactcatgacacctgcacttgtttttgatgttttcc

SEQ ID NO: 55542 - DNA, 1886 bp, Zea Mays
ctctattcccgtcaccgaaattcctcgagctacttcaaaacacacacaacaccgatgccgccgccgccgccaccaccaatcaccgctgcacccatgatcccggcatccccaaaaaagccgatcccgtccccgcgccaaatcgcagcgctagtgctgagccatccgtcctccacgctcaccgccgcgtcggcgcgctccctctcggcgtccctcctggccgccggccccgcgtccgcgttcccgatcccgacccccgtggccaacgccgtcatcaaactcctgtggcaccacgccccacgcgcgctcctcttcttccacgctctcctccgcctcccagagcgctcgcgcgacctctccccgtgcacggtcgacctcgcgctcgacctcgccgcgcgcctgcgccacccacgtcagctcacgagctccatcctcgcgctcttcccgcgccacggcctcgccttcaccccgcgcacgttccccatcctgttcgagcggtttgcgatgtcccaccgccgccccgacctcgccatccggctcttcctctctctccaccgctcccacggcatcgcgcaggacctcccgttgttcaattccctcctcgacgcgctcgtcaagtcgcggcgcgcgagcaaggcggcctccctcgtccgtgccctcgagcagcggttccctcctgacgcggtcacgtacaacaccctggctgacggatggtgccgcgtcaaggacacctcccgtgcgctcgacatcttgcggcagatggtcgagtcagggattgccccaacgaaagcaacctataacatcatcctcaaaggtttcttccgttctggacagttgcagcacgcatgggacttcttcctccagatgaagaggagaggcagcaatgacgagaactgtaagcctgacgtcgtatcgtacaccaccgtactgcacgggctcggtgttgccgggcagctggacaaagcccgcaaagtgtttgacgaaatgtctatagaaggatgcaagccatcgactgcgacttataacgcattaattcaggtaacctgtaagaagggcaacttggaggatgccgtggcagtgtttgatgatatggtcagaaagggttacattccaaatgtggttacctatactgtcttgatccgaggcctctgccatgctgggaaggttgttcgagctatgaagcttttggataggatgaagagtgaaggttgtgagcctaatgttcagacatacaacgttcttatcaggtattcacttgaggaaggggagattgagaaaggcttggatttgttcgagacaatgagcaagggagaggaatgcttgcccaaccaagatacatataatattataataagtgcaatgtttgtgcgtaagagggcagaggacatggcggtggctgccagaatggtggtggaaatggtggataggggctacttgccaagaaagtttatgttcaatcgtgtactgaatggattaatgttgactggaaatcaagagctttctagagagctcttgagaatgcaggagaaatatacgcgcttgcgacgagaaataagattgtgattggcattggattttttggatgatatatacattcaacatcttttgccctgggtacagcctacagaagatcaaaatctagatgcagcaccaggataacctagtcagttagcactcctagcctcctactgtccagtgattactgatctgtctgatatggagctgaaacatcattatttatggtgatggatatataggcatgtagcagatggattgccatttgccaagcattcggatcatccgatgagtagtgtgggctggcttgctgacgaacatcaataagacaggatctctactcatgacacctgcacttgtttttgatgttttcc

SEQ ID NO: 55543 - DNA, 937 bp, Zea Mays
gctaaatgtgtcacactttgcctaatgttagtcgttcgaattgaataactaaccttaggtagaaaagttaggcaaagtgtggcaactgaggtagtgaaccaaacaggccctaaaaacgcaaggatttctcggttcctcctcgtcctcgcgctctcccggtctcctctcccccgagcatcccaaaaaatactcggccactgcgctatctcgcccaccaagccagcaccagcagcggcgcgcgatggccaccgcgccctacgcctcctccctcttcctggcttcctcccccatctccaccgcgccacgaatccgcgccgggccctgccctccgtccgcccagccatccctgcggctccggccgaggccgtccccggcagccgcggccgccgtccaggcggagcaccagcccgcgttgaccgcggcgccgaagccacccgcgctaccgttccgcgtgggccacggcttcgacctccaccgcctggagcccgacctcccgctcatcatcggcggcatcaacatcccccacgaccgcggctgcgaggctcactctgacggtgaaattgatgcatgaagcaggctacgagctgggcaaccttgatgctacgctgatcttgcaaaaaccaaaaattagcccattcaaggagacaatccgatcgaatttgtgcgacctacttggggcagatccatctgtggtcaatctcaaggccaagacgcacgagaaagttgacagtctaggggagaacaggagcatagctgctcatactgtagttctcctgatgcgaaagtagaaagaacaaatggcagctaattgtatcatgctacacggaaaaggttgttatcttatacttgtgattgttgagtgatctagccagtatggaaaatcttcatgtggtagaaacaataaagctgattgcaatgagaatttttctgtatttca

SEQ ID NO: 55544 - DNA, 1614 bp, Zea Mays
agatacggaggggcaaggtacgtggtgccttaccttggctaaggcactgaatctggatccctcctccacctccacgcgagcggacgacacgaagcggccatagccgcacgttgggatcccctccgctacgcctctcgatggtctccgccagcgcgccgccgccgcaggcccagtccgacgcggccgggtcgggggaggaagtgagcaagaaggtgcggaagccgtacacaatcaccaagtcccgggagagctggacggagcaggagcacgacaagttcctcgaggccctgcagctctttgatcgtgactggaagaagatagaggcttttgttggctccaagactgtcatccagattaggagccatgcacagaagtaccttttgaaggttcagaaaaatggaaccagcgaacatgtcccacctccacgaccaaagcgaaaagctgcccatccatatcctcagaaggcttccaagaatggaactctggcatgaacgtgcctgtttcttcatgggctcatagttccatcccacaagctgttgcttcatcaatggtgaaagaagatttaggtgctggaacaccaggttcaaacaatttttgctcaagtagtactgaaggccttccaagaacttggcaacctggtgaaacaaatgatccaataaatcaaattccgtcactccgccgtcagtacctcatgatatttctgataatcatcttgtagtgcaaaatacttactccgattctgtccatctctactatttctaagaattatgtcttaaccatcctcctgtgcatcttttcttgtgaatttgtaagcttcaatctcaaatccgctggccccttcttttagaatgaaccgaacctccaatattctcttgatgatgcttaacatacagagaaacggtgtaacacaaaacagcacaatccatttctttgtactgtttctttttcaaatattttactgttttcaatattgaatctatgtcttgaatgaattgctagcttatctaattcatatttacattcttgacatttcaattatgtctttccaatgtttgatatagttatgccagattttgcgggagtgtacagcttcttaggtagtgttttcgatccaagtacaagtggtcatctgcagaaacttaaggagatgaatccaattgacgttgagacggcactgttgttgatgaggaatctctccatcaatttaaccagtcctgattttgaagatcaagtgaaattgatgcatgaagcaggctacgagctgggcaaccttgatgctacgctgatcttgcaaaaaccaaaaattagcccattcaaggagacaatccgatcgaatttgtgcgacctacttggggcagatccatctgtggtcaatctcaaggccaagacgcacgagaaagttgacagtctaggggagaacaggagcatagctgctcatactgtagttctcctgatgcgaaagtagaaagaacaaatggcagctaattgtatcatgctacacggaaaaggttgttatcttatacttgtgattgttgagtgatctagccagtatggaaaatcttcatgtggtagaaacaataaagctgattgcaatgagaatttttctgtatttca

SEQ ID NO: 55545 - DNA, 1611 bp, Zea Mays
agatacggaggggcaaggtacgtggtgccttaccttggctaaggcactgaatctggatccctcctccacctccacgcgagcggacgacacgaagcggccatagccgcacgttgggatcccctccgctacgcctctcgatggtctccgccagcgcgccgccgccgcaggcccagtccgacgcggccgggtcgggggaggaagtgagcaagaaggtgcggaagccgtacacaatcaccaagtcccgggagagctggacggagcaggagcacgacaagttcctcgaggccctgcagctctttgatcgtgactggaagaagatagaggcttttgttggctccaagactgtcatccagattaggagccatgcacagaagtaccttttgaaggttcagaaaaatggaaccagcgaacatgtcccacctccacgaccaaagcgaaaagctgcccatccatatcctcagaaggcttccaagaatggaactctggcatgaacgtgcctgtttcttcatgggctcatagttccatcccacaagctgttgcttcatcaatggtgaaagatttaggtgctggaacaccaggttcaaacaatttttgctcaagtagtactgaaggccttccaagaacttggcaacctggtgaaacaaatgatccaataaatcaaattccgtcactccgccgtcagtacctcatgatatttctgataatcatcttgtagtgcaaaatacttactccgattctgtccatctctactatttctaagaattatgtcttaaccatcctcctgtgcatcttttcttgtgaatttgtaagcttcaatctcaaatccgctggccccttcttttagaatgaaccgaacctccaatattctcttgatgatgcttaacatacagagaaacggtgtaacacaaaacagcacaatccatttctttgtactgtttctttttcaaatattttactgttttcaatattgaatctatgtcttgaatgaattgctagcttatctaattcatatttacattcttgacatttcaattatgtctttccaatgtttgatatagttatgccagattttgcgggagtgtacagcttcttaggtagtgttttcgatccaagtacaagtggtcatctgcagaaacttaaggagatgaatccaattgacgttgagacggcactgttgttgatgaggaatctctccatcaatttaaccagtcctgattttgaagatcaagtgaaattgatgcatgaagcaggctacgagctgggcaaccttgatgctacgctgatcttgcaaaaaccaaaaattagcccattcaaggagacaatccgatcgaatttgtgcgacctacttggggcagatccatctgtggtcaatctcaaggccaagacgcacgagaaagttgacagtctaggggagaacaggagcatagctgctcatactgtagttctcctgatgcgaaagtagaaagaacaaatggcagctaattgtatcatgctacacggaaaaggttgttatcttatacttgtgattgttgagtgatctagccagtatggaaaatcttcatgtggtagaaacaataaagctgattgcaatgagaatttttctgtatttca

SEQ ID NO: 55546 - DNA, 1630 bp, Zea Mays
agatacggaggggcaaggtacgtggtgccttaccttggctaaggcactgaatctggatccctcctccacctccacgcgagcggacgacacgaagcggccatagccgcacgttgggatcccctccgctacgcctctcgatggtctccgccagcgcgccgccgccgcaggcccagtccgacgcggccgggtcgggggaggaagtgagcaagaaggtgcggaagccgtacacaatcaccaagtcccgggagagctggacggagcaggagcacgacaagttcctcgaggccctgcagctctttgatcgtgactggaagaagatagaggcttttgttggctccaagactgtcatccagattaggagccatgcacagaagtaccttttgaaggttcagaaaaatggaaccagcgaacatgtcccacctccacgaccaaagcgaaaagctgcccatccatatcctcagaaggcttccaagaatgattcatcttccatccataggaactctggcatgaacgtgcctgtttcttcatgggctcatagttccatcccacaagctgttgcttcatcaatggtgaaagatttaggtgctggaacaccaggttcaaacaatttttgctcaagtagtactgaaggccttccaagaacttggcaacctggtgaaacaaatgatccaataaatcaaattccgtcactccgccgtcagtacctcatgatatttctgataatcatcttgtagtgcaaaatacttactccgattctgtccatctctactatttctaagaattatgtcttaaccatcctcctgtgcatcttttcttgtgaatttgtaagcttcaatctcaaatccgctggccccttcttttagaatgaaccgaacctccaatattctcttgatgatgcttaacatacagagaaacggtgtaacacaaaacagcacaatccatttctttgtactgtttctttttcaaatattttactgttttcaatattgaatctatgtcttgaatgaattgctagcttatctaattcatatttacattcttgacatttcaattatgtctttccaatgtttgatatagttatgccagattttgcgggagtgtacagcttcttaggtagtgttttcgatccaagtacaagtggtcatctgcagaaacttaaggagatgaatccaattgacgttgagacggcactgttgttgatgaggaatctctccatcaatttaaccagtcctgattttgaagatcaagtgaaattgatgcatgaagcaggctacgagctgggcaaccttgatgctacgctgatcttgcaaaaaccaaaaattagcccattcaaggagacaatccgatcgaatttgtgcgacctacttggggcagatccatctgtggtcaatctcaaggccaagacgcacgagaaagttgacagtctaggggagaacaggagcatagctgctcatactgtagttctcctgatgcgaaagtagaaagaacaaatggcagctaattgtatcatgctacacggaaaaggttgttatcttatacttgtgattgttgagtgatctagccagtatggaaaatcttcatgtggtagaaacaataaagctgattgcaatgagaatttttctgtatttca

SEQ ID NO: 55547 - DNA, 1030 bp, Zea Mays
agatacggaggggcaaggtacgtggtgccttaccttggctaaggcactgaatctggatccctcctccacctccacgcgagcggacgacacgaagcggccatagccgcacgttgggatcccctccgctacgcctctcgatggtctccgccagcgcgccgccgccgcaggcccagtccgacgcggccgggtcgggggaggaagtgagcaagaaggtgcggaagccgtacacaatcaccaagtcccgggagagctggacggagcaggagcacgacaagttcctcgaggccctgcagctctttgatcgtgactggaagaagatagaggcttttgttggctccaagactgtcatccagattaggagccatgcacagaagtaccttttgaaggttcagaaaaatggaaccagcgaacatgtcccacctccacgaccaaagcgaaaagctgcccatccatatcctcagaaggcttccaagaatgttatgccagattttgcgggagtgtacagcttcttaggtagtgttttcgatccaagtacaagtggtcatctgcagaaacttaaggagatgaatccaattgacgttgagacggcactgttgttgatgaggaatctctccatcaatttaaccagtcctgattttgaagatcaagtgaaattgatgcatgaagcaggctacgagctgggcaaccttgatgctacgctgatcttgcaaaaaccaaaaattagcccattcaaggagacaatccgatcgaatttgtgcgacctacttggggcagatccatctgtggtcaatctcaaggccaagacgcacgagaaagttgacagtctaggggagaacaggagcatagctgctcatactgtagttctcctgatgcgaaagtagaaagaacaaatggcagctaattgtatcatgctacacggaaaaggttgttatcttatacttgtgattgttgagtgatctagccagtatggaaaatcttcatgtggtagaaacaataaagctgattgcaatgagaatttttctgtatttca

SEQ ID NO: 55548 - DNA, 1349 bp, Zea Mays
ggcagatacggaggggcaaggtacgtggtgccttaccttggctaaggcactgaatctggatccctcctccacctccacgcgagcggacgacacgaagcggccatagccgcacgttgggatcccctccgctacgcctctcgatggtctccgccagcgcgccgccgccgcaggcccagtccgacgcggccgggtcgggggaggaagtgagcaagaaggtgcggaagccgtacacaatcaccaagtcccgggagagctggacggagcaggagcacgacaagttcctcgaggccctgcagctctttgatcgtgactggaagaagatagaggcttttgttggctccaagactgtcatccagattaggagccatgcacagaagtaccttttgaaggttcagaaaaatggaaccagcgaacatgtcccacctccacgaccaaagcgaaaagctgcccatccatatcctcagaaggcttccaagaatgattcatcttccatccataggaactctggcatgaacgtgcctgtttcttcatgggctcatagttccatcccacaagctgttgcttcatcaatggtgaaagaagatttaggtgctggaacaccaggttcaaacaatttttgctcaagtagtactgaaggccttccaagaacttggcaacctggtgaaacaaatgatccaataaatcaaattccgtcactccgccttatgccagattttgcgggagtgtacagcttcttaggtagtgttttcgatccaagtacaagtggtcatctgcagaaacttaaggagatgaatccaattgacgttgagacggcactgttgttgatgaggaatctctccatcaatttaaccagtcctgattttgaagatcaaaggaagttgttgtccttatacagcgcttctgatggacctgggctagggagctcaagaagttcagctctagcgacgagcgcgcctttcatgtaaggtgaaattgatgcatgaagcaggctacgagctgggcaaccttgatgctacgctgatcttgcaaaaaccaaaaattagcccattcaaggagacaatccgatcgaatttgtgcgacctacttggggcagatccatctgtggtcaatctcaaggccaagacgcacgagaaagttgacagtctaggggagaacaggagcatagctgctcatactgtagttctcctgatgcgaaagtagaaagaacaaatggcagctaattgtatcatgctacacggaaaaggttgttatcttatacttgtgattgttgagtgatctagccagtatggaaaatcttcatgtggtagaaacaataaagctgattgcaatgagaatttttctgtatttca

SEQ ID NO: 55549 - DNA, 753 bp, Zea Mays
gctaaatgtgtcacactttgcctaatgttagtcgttcgaattgaataactaaccttaggtagaaaagttaggcaaagtgtggcaactgaggtagtgaaccaaacaggccctaaaaacgcaaggatttctcggttcctcctcgtcctcgcgctctcccggtctcctctcccccgagcatcccaaaaaatactcggccactgcgctatctcgcccaccaagccagcaccagcagcggcgcgcgatggccaccgcgccctacgcctcctccctcttcctggcttcctcccccatctccaccgcgccacgaatccgcgccgggccctgccctccgtccgcccagccatccctgcggctccggccgaggccgtccccggcagccgcggccgccgtccaggcggagcaccagcccgcgttgaccgcggcgccgaagccacccgcgctaccgttccgcgtgggccacggcttcgacctccaccgcctggagcccgacctcccgctcatcatcggcggcatcaacatcccccacgaccgcggctgcgaggctcactctgacggcgacgtgctgctgcactgcgtggtggacgcgattctcggcgcgctggggctgccagacatcggccagattttcccggactccgacccccgttggaagggcgccgattcttcggtgttcatgagggaagctaaaacaattgcttctattttagcattgaagtgcctgaagtctcaatatgcaacactttaagctcctag

SEQ ID NO: 55550 - DNA, 1609 bp, Zea Mays
agatacggaggggcaaggtacgtggtgccttaccttggctaaggcactgaatctggatccctcctccacctccacgcgagcggacgacacgaagcggccatagccgcacgttgggatcccctccgctacgcctctcgatggtctccgccagcgcgccgccgccgcaggcccagtccgacgcggccgggtcgggggaggaagtgagcaagaaggtgcggaagccgtacacaatcaccaagtcccgggagagctggacggagcaggagcacgacaagttcctcgaggccctgcagctctttgatcgtgactggaagaagatagaggcttttgttggctccaagactgtcatccagattaggagccatgcacagaagtaccttttgaaggttcagaaaaatggaaccagcgaacatgtcccacctccacgaccaaagcgaaaagctgcccatccatatcctcagaaggcttccaagaatgattcatcttccatccataggaactctggcatgaacgtgcctgtttcttcatgggctcatagttccatcccacaagctgttgcttcatcaatggtgaaagaagatttaggtgctggaacaccaggttcaaacaatttttgctcaagtagtactgaaggccttccaagaacttggcaacctggtgaaacaaatgatccaataaatcaaattccgtcactccgccttatgccagattttgcgggagtgtacagcttcttaggtagtgttttcgatccaagtacaagtggtcatctgcagaaacttaaggagatgaatccaattgacgttgagacggcactgttgttgatgaggaatctctccatcaatttaaccagtcctgattttgaagatcaagtcttgccaattcgtgatgccagtactcagcagagcaggcctgaagtccgaaccactatcttatagcatagactcttatctcctgacacccacaaagggatgaaagtgaggaagttgttgtccttatacagcgcttctgatggacctgggctagggagctcaagaagttcagctctagcgacgagcgcgcctttcatgtaaggaagcgtgcacccttcctggcctttcctatccccaaaagctcggccatctaggctcgtgaaatgctgcttcagatcaaggctgtccttggaaatgggaagatgaaaggagaatctgggtaatgccggttgctccctttcccattctttgttgagttcagctttctgattggtttctggtggccctcttgatacggaacttgtgcgctccgtctgagaaagcatgtgtgcaaagtttcatttgaggagttgaggcgatcatggcgctgtaaaatgcggcttatcttcccccttcagggctggtttggtggaccaaccctcaaacatttgcaattcctatgtacgtctgtagtgcatcaggtgttgttgcccacgtgtaaaaggaaaataaattcacaatgtaaaggagacttgtgcgttagcactaccatttgaatttatgaaatgtcaaagcagcccagcgagtttgtacttgccacatttttttgtcgctgtatcagcagtctggctactctggcatcgagttcgtttccaagggtg

SEQ ID NO: 55551 - DNA, 1622 bp, Zea Mays
agatacggaggggcaaggtacgtggtgccttaccttggctaaggcactgaatctggatccctcctccacctccacgcgagcggacgacacgaagcggccatagccgcacgttgggatcccctccgctacgcctctcgatggtctccgccagcgcgccgccgccgcaggcccagtccgacgcggccgggtcgggggaggaagtgagcaagaaggtgcggaagccgtacacaatcaccaagtcccgggagagctggacggagcaggagcacgacaagttcctcgaggccctgcagctctttgatcgtgactggaagaagatagaggcttttgttggctccaagactgtcatccagattaggagccatgcacagaagtaccttttgaaggttcagaaaaatggaaccagcgaacatgtcccacctccacgaccaaagcgaaaagctgcccatccatatcctcagaaggcttccaagaatggaactctggcatgaacgtgcctgtttcttcatgggctcatagttccatcccacaagctgttgcttcatcaatggtgaaagaagatttaggtgctggaacaccaggttcaaacaatttttgctcaagtagtactgaaggccttccaagaacttggcaacctggtgaaacaaatgatccaataaatcaaattccgtcactccgccttatgccagattttgcgggagtgtacagcttcttaggtagtgttttcgatccaagtacaagtggtcatctgcagaaacttaaggagatgaatccaattgacgttgagacggcactgttgttgatgaggaatctctccatcaatttaaccagtcctgattttgaagatcaaaggaagttgttgtccttatacagcgcttctgatggacctgggctagggagctcaagaagttcagctctagcgacgagcgcgcctttcatgtaaggtctctcggcatataatttcagttcgacagacctcaggaggatagtgcctgccctggcgtagtagcaccgatgagtgatgaaggaggcgtttgcaccttttgtgcttctcgctagctccatgccttcggctgacgattgtgaagcgtgcacccttcctggcctttcctatccccaaaagctcggccatctaggctcgtgaaatgctgcttcagatcaaggctgtccttggaaatgggaagatgaaaggagaatctgggtaatgccggttgctccctttcccattctttgttgagttcagctttctgattggtttctggtggccctcttgatacggaacttgtgcgctccgtctgagaaagcatgtgtgcaaagtttcatttgaggagttgaggcgatcatggcgctgtaaaatgcggcttatcttcccccttcagggctggtttggtggaccaaccctcaaacatttgcaattcctatgtacgtctgtagtgcatcaggtgttgttgcccacgtgtaaaaggaaaataaattcacaatgtaaaggagacttgtgcgttagcactaccatttgaatttatgaaatgtcaaagcagcccagcgagtttgtacttgccacatttttttgtcgctgtatcagcagtctggctactctggcatcgagttcgtttccaagggtg

SEQ ID NO: 55552 - DNA, 1643 bp, Zea Mays
agatacggaggggcaaggtacgtggtgccttaccttggctaaggcactgaatctggatccctcctccacctccacgcgagcggacgacacgaagcggccatagccgcacgttgggatcccctccgctacgcctctcgatggtctccgccagcgcgccgccgccgcaggcccagtccgacgcggccgggtcgggggaggaagtgagcaagaaggtgcggaagccgtacacaatcaccaagtcccgggagagctggacggagcaggagcacgacaagttcctcgaggccctgcagctctttgatcgtgactggaagaagatagaggcttttgttggctccaagactgtcatccagattaggagccatgcacagaagtaccttttgaaggttcagaaaaatggaaccagcgaacatgtcccacctccacgaccaaagcgaaaagctgcccatccatatcctcagaaggcttccaagaatgattcatcttccatccataggaactctggcatgaacgtgcctgtttcttcatgggctcatagttccatcccacaagctgttgcttcatcaatggtgaaagatttaggtgctggaacaccaggttcaaacaatttttgctcaagtagtactgaaggccttccaagaacttggcaacctggtgaaacaaatgatccaataaatcaaattccgtcactccgccttatgccagattttgcgggagtgtacagcttcttaggtagtgttttcgatccaagtacaagtggtcatctgcagaaacttaaggagatgaatccaattgacgttgagacggcactgttgttgatgaggaatctctccatcaatttaaccagtcctgattttgaagatcaagtcttgccaattcgtgatgccagtactcagcagagcaggcctgaagtccgaaccactatcttatagcatagactcttatctcctgacacccacaaagggatgaaagtgaggaagttgttgtccttatacagcgcttctgatggacctgggctagggagctcaagaagttcagctctagcgacgagcgcgcctttcatgtaaggtctctcggcatataatttcagttcgacagacctcaggaggatagtgcctgccctggcgtagtagcaccgatgagtgatgaaggaggcgtttgcaccttttgtgcttctcgctagctccatgccttcggctgacgattgtgaagcgtgcacccttcctggcctttcctatccccaaaagctcggccatctaggctcgtgaaatgctgcttcagatcaaggctgtccttggaaatgggaagatgaaaggagaatctggcatgtgtgcaaagtttcatttgaggagttgaggcgatcatggcgctgtaaaatgcggcttatcttcccccttcagggctggtttggtggaccaaccctcaaacatttgcaattcctatgtacgtctgtagtgcatcaggtgttgttgcccacgtgtaaaaggaaaataaattcacaatgtaaaggagacttgtgcgttagcactaccatttgaatttatgaaatgtcaaagcagcccagcgagtttgtacttgccacatttttttgtcgctgtatcagcagtctggctactctggcatcgagttcgtttccaagggtg

SEQ ID NO: 55553 - DNA, 2019 bp, Zea Mays
agatacggaggggcaaggtacgtggtgccttaccttggctaaggcactgaatctggatccctcctccacctccacgcgagcggacgacacgaagcggccatagccgcacgttgggatcccctccgctacgcctctcgatggtctccgccagcgcgccgccgccgcaggcccagtccgacgcggccgggtcgggggaggaagtgagcaagaaggtgcggaagccgtacacaatcaccaagtcccgggagagctggacggagcaggagcacgacaagttcctcgaggccctgcagctctttgatcgtgactggaagaagatagaggcttttgttggctccaagactgtcatccagattaggagccatgcacagaagtaccttttgaaggttcagaaaaatggaaccagcgaacatgtcccacctccacgaccaaagcgaaaagctgcccatccatatcctcagaaggcttccaagaatgattcatcttccatccataggaactctggcatgaacgtgcctgtttcttcatgggctcatagttccatcccacaagctgttgcttcatcaatggtgaaagatttaggtgctggaacaccaggttcaaacaatttttgctcaagtagtactgaaggccttccaagaacttggcaacctggtgaaacaaatgatccaataaatcaaattccgtcactccgccgtcagtacctcatgatatttctgataatcatcttgtagtgcaaaatacttactccgattctgtccatctctactatttctaagaattatgtcttaaccatcctcctgtgcatcttttcttgtgaatttgtaagcttcaatctcaaatccgctggccccttcttttagaatgaaccgaacctccaatattctcttgatgatgcttaacatacagagaaacggtgtaacacaaaacagcacaatccatttctttgtactgtttctttttcaaatattttactgttttcaatattgaatctatgtcttgaatgaattgctagcttatctaattcatatttacattcttgacatttcaattatgtctttccaatgtttgatatagttatgccagattttgcgggagtgtacagcttcttaggtagtgttttcgatccaagtacaagtggtcatctgcagaaacttaaggagatgaatccaattgacgttgagacggcactgttgttgatgaggaatctctccatcaatttaaccagtcctgattttgaagatcaaaggaagttgttgtccttatacagcgcttctgatggacctgggctagggagctcaagaagttcagctctagcgacgagcgcgcctttcatgtaaggtctctcggcatataatttcagttcgacagacctcaggaggatagtgcctgccctggcgtagtagcaccgatgagtgatgaaggaggcgtttgcaccttttgtgcttctcgctagctccatgccttcggctgacgattgtgaagcgtgcacccttcctggcctttcctatccccaaaagctcggccatctaggctcgtgaaatgctgcttcagatcaaggctgtccttggaaatgggaagatgaaaggagaatctgggtaatgccggttgctccctttcccattctttgttgagttcagctttctgattggtttctggtggccctcttgatacggaacttgtgcgctccgtctgagaaagcatgtgtgcaaagtttcatttgaggagttgaggcgatcatggcgctgtaaaatgcggcttatcttcccccttcagggctggtttggtggaccaaccctcaaacatttgcaattcctatgtacgtctgtagtgcatcaggtgttgttgcccacgtgtaaaaggaaaataaattcacaatgtaaaggagacttgtgcgttagcactaccatttgaatttatgaaatgtcaaagcagcccagcgagtttgtacttgccacatttttttgtcgctgtatcagcagtctggctactctggcatcgagttcgtttccaagggtg

SEQ ID NO: 55554 - DNA, 2130 bp, Zea Mays
agatacggaggggcaaggtacgtggtgccttaccttggctaaggcactgaatctggatccctcctccacctccacgcgagcggacgacacgaagcggccatagccgcacgttgggatcccctccgctacgcctctcgatggtctccgccagcgcgccgccgccgcaggcccagtccgacgcggccgggtcgggggaggaagtgagcaagaaggtgcggaagccgtacacaatcaccaagtcccgggagagctggacggagcaggagcacgacaagttcctcgaggccctgcagctctttgatcgtgactggaagaagatagaggcttttgttggctccaagactgtcatccagattaggagccatgcacagaagtaccttttgaaggttcagaaaaatggaaccagcgaacatgtcccacctccacgaccaaagcgaaaagctgcccatccatatcctcagaaggcttccaagaatgattcatcttccatccataggaactctggcatgaacgtgcctgtttcttcatgggctcatagttccatcccacaagctgttgcttcatcaatggtgaaagaagatttaggtgctggaacaccaggttcaaacaatttttgctcaagtagtactgaaggccttccaagaacttggcaacctggtgaaacaaatgatccaataaatcaaattccgtcactccgccgtcagtacctcatgatatttctgataatcatcttgtagtgcaaaatacttactccgattctgtccatctctactatttctaagaattatgtcttaaccatcctcctgtgcatcttttcttgtgaatttgtaagcttcaatctcaaatccgctggccccttcttttagaatgaaccgaacctccaatattctcttgatgatgcttaacatacagagaaacggtgtaacacaaaacagcacaatccatttctttgtactgtttctttttcaaatattttactgttttcaatattgaatctatgtcttgaatgaattgctagcttatctaattcatatttacattcttgacatttcaattatgtctttccaatgtttgatatagttatgccagattttgcgggagtgtacagcttcttaggtagtgttttcgatccaagtacaagtggtcatctgcagaaacttaaggagatgaatccaattgacgttgagacggcactgttgttgatgaggaatctctccatcaatttaaccagtcctgattttgaagatcaagtcttgccaattcgtgatgccagtactcagcagagcaggcctgaagtccgaaccactatcttatagcatagactcttatctcctgacacccacaaagggatgaaagtgaggaagttgttgtccttatacagcgcttctgatggacctgggctagggagctcaagaagttcagctctagcgacgagcgcgcctttcatgtaaggtctctcggcatataatttcagttcgacagacctcaggaggatagtgcctgccctggcgtagtagcaccgatgagtgatgaaggaggcgtttgcaccttttgtgcttctcgctagctccatgccttcggctgacgattgtgaagcgtgcacccttcctggcctttcctatccccaaaagctcggccatctaggctcgtgaaatgctgcttcagatcaaggctgtccttggaaatgggaagatgaaaggagaatctgggtaatgccggttgctccctttcccattctttgttgagttcagctttctgattggtttctggtggccctcttgatacggaacttgtgcgctccgtctgagaaagcatgtgtgcaaagtttcatttgaggagttgaggcgatcatggcgctgtaaaatgcggcttatcttcccccttcagggctggtttggtggaccaaccctcaaacatttgcaattcctatgtacgtctgtagtgcatcaggtgttgttgcccacgtgtaaaaggaaaataaattcacaatgtaaaggagacttgtgcgttagcactaccatttgaatttatgaaatgtcaaagcagcccagcgagtttgtacttgccacatttttttgtcgctgtatcagcagtctggctactctggcatcgagttcgtttccaagggtg

SEQ ID NO: 55555 - DNA, 2108 bp, Zea Mays
agatacggaggggcaaggtacgtggtgccttaccttggctaaggcactgaatctggatccctcctccacctccacgcgagcggacgacacgaagcggccatagccgcacgttgggatcccctccgctacgcctctcgatggtctccgccagcgcgccgccgccgcaggcccagtccgacgcggccgggtcgggggaggaagtgagcaagaaggtgcggaagccgtacacaatcaccaagtcccgggagagctggacggagcaggagcacgacaagttcctcgaggccctgcagctctttgatcgtgactggaagaagatagaggcttttgttggctccaagactgtcatccagattaggagccatgcacagaagtaccttttgaaggttcagaaaaatggaaccagcgaacatgtcccacctccacgaccaaagcgaaaagctgcccatccatatcctcagaaggcttccaagaatggaactctggcatgaacgtgcctgtttcttcatgggctcatagttccatcccacaagctgttgcttcatcaatggtgaaagatttaggtgctggaacaccaggttcaaacaatttttgctcaagtagtactgaaggccttccaagaacttggcaacctggtgaaacaaatgatccaataaatcaaattccgtcactccgccgtcagtacctcatgatatttctgataatcatcttgtagtgcaaaatacttactccgattctgtccatctctactatttctaagaattatgtcttaaccatcctcctgtgcatcttttcttgtgaatttgtaagcttcaatctcaaatccgctggccccttcttttagaatgaaccgaacctccaatattctcttgatgatgcttaacatacagagaaacggtgtaacacaaaacagcacaatccatttctttgtactgtttctttttcaaatattttactgttttcaatattgaatctatgtcttgaatgaattgctagcttatctaattcatatttacattcttgacatttcaattatgtctttccaatgtttgatatagttatgccagattttgcgggagtgtacagcttcttaggtagtgttttcgatccaagtacaagtggtcatctgcagaaacttaaggagatgaatccaattgacgttgagacggcactgttgttgatgaggaatctctccatcaatttaaccagtcctgattttgaagatcaagtcttgccaattcgtgatgccagtactcagcagagcaggcctgaagtccgaaccactatcttatagcatagactcttatctcctgacacccacaaagggatgaaagtgaggaagttgttgtccttatacagcgcttctgatggacctgggctagggagctcaagaagttcagctctagcgacgagcgcgcctttcatgtaaggtctctcggcatataatttcagttcgacagacctcaggaggatagtgcctgccctggcgtagtagcaccgatgagtgatgaaggaggcgtttgcaccttttgtgcttctcgctagctccatgccttcggctgacgattgtgaagcgtgcacccttcctggcctttcctatccccaaaagctcggccatctaggctcgtgaaatgctgcttcagatcaaggctgtccttggaaatgggaagatgaaaggagaatctgggtaatgccggttgctccctttcccattctttgttgagttcagctttctgattggtttctggtggccctcttgatacggaacttgtgcgctccgtctgagaaagcatgtgtgcaaagtttcatttgaggagttgaggcgatcatggcgctgtaaaatgcggcttatcttcccccttcagggctggtttggtggaccaaccctcaaacatttgcaattcctatgtacgtctgtagtgcatcaggtgttgttgcccacgtgtaaaaggaaaataaattcacaatgtaaaggagacttgtgcgttagcactaccatttgaatttatgaaatgtcaaagcagcccagcgagtttgtacttgccacatttttttgtcgctgtatcagcagtctggctactctggcatcgagttcgtttccaagggtg

SEQ ID NO: 55556 - DNA, 1990 bp, Zea Mays
agatacggaggggcaaggtacgtggtgccttaccttggctaaggcactgaatctggatccctcctccacctccacgcgagcggacgacacgaagcggccatagccgcacgttgggatcccctccgctacgcctctcgatggtctccgccagcgcgccgccgccgcaggcccagtccgacgcggccgggtcgggggaggaagtgagcaagaaggtgcggaagccgtacacaatcaccaagtcccgggagagctggacggagcaggagcacgacaagttcctcgaggccctgcagctctttgatcgtgactggaagaagatagaggcttttgttggctccaagactgtcatccagattaggagccatgcacagaagtaccttttgaaggttcagaaaaatggaaccagcgaacatgtcccacctccacgaccaaagcgaaaagctgcccatccatatcctcagaaggcttccaagaatgattcatcttccatccataggaactctggcatgaacgtgcctgtttcttcatgggctcatagttccatcccacaagctgttgcttcatcaatggtgaaagaagatttaggtgctggaacaccaggttcaaacaatttttgctcaagtagtactgaaggccttccaagaacttggcaacctggtgaaacaaatgatccaataaatcaaattccgtcactccgccgtcagtacctcatgatatttctgataatcatcttgtagtgcaaaatacttactccgattctgtccatctctactatttctaagaattatgtcttaaccatcctcctgtgcatcttttcttgtgaatttgtaagcttcaatctcaaatccgctggccccttcttttagaatgaaccgaacctccaatattctcttgatgatgcttaacatacagagaaacggtgtaacacaaaacagcacaatccatttctttgtactgtttctttttcaaatattttactgttttcaatattgaatctatgtcttgaatgaattgctagcttatctaattcatatttacattcttgacatttcaattatgtctttccaatgtttgatatagttatgccagattttgcgggagtgtacagcttcttaggtagtgttttcgatccaagtacaagtggtcatctgcagaaacttaaggagatgaatccaattgacgttgagacggcactgttgttgatgaggaatctctccatcaatttaaccagtcctgattttgaagatcaagtcttgccaattcgtgatgccagtactcagcagagcaggcctgaagtccgaaccactatcttatagcatagactcttatctcctgacacccacaaagggatgaaagtgaggaagttgttgtccttatacagcgcttctgatggacctgggctagggagctcaagaagttcagctctagcgacgagcgcgcctttcatgtaaggaagcgtgcacccttcctggcctttcctatccccaaaagctcggccatctaggctcgtgaaatgctgcttcagatcaaggctgtccttggaaatgggaagatgaaaggagaatctgggtaatgccggttgctccctttcccattctttgttgagttcagctttctgattggtttctggtggccctcttgatacggaacttgtgcgctccgtctgagaaagcatgtgtgcaaagtttcatttgaggagttgaggcgatcatggcgctgtaaaatgcggcttatcttcccccttcagggctggtttggtggaccaaccctcaaacatttgcaattcctatgtacgtctgtagtgcatcaggtgttgttgcccacgtgtaaaaggaaaataaattcacaatgtaaaggagacttgtgcgttagcactaccatttgaatttatgaaatgtcaaagcagcccagcgagtttgtacttgccacatttttttgtcgctgtatcagcagtctggctactctggcatcgagttcgtttccaagggtg

SEQ ID NO: 55557 - DNA, 1606 bp, Zea Mays
agatacggaggggcaaggtacgtggtgccttaccttggctaaggcactgaatctggatccctcctccacctccacgcgagcggacgacacgaagcggccatagccgcacgttgggatcccctccgctacgcctctcgatggtctccgccagcgcgccgccgccgcaggcccagtccgacgcggccgggtcgggggaggaagtgagcaagaaggtgcggaagccgtacacaatcaccaagtcccgggagagctggacggagcaggagcacgacaagttcctcgaggccctgcagctctttgatcgtgactggaagaagatagaggcttttgttggctccaagactgtcatccagattaggagccatgcacagaagtaccttttgaaggttcagaaaaatggaaccagcgaacatgtcccacctccacgaccaaagcgaaaagctgcccatccatatcctcagaaggcttccaagaatgattcatcttccatccataggaactctggcatgaacgtgcctgtttcttcatgggctcatagttccatcccacaagctgttgcttcatcaatggtgaaagatttaggtgctggaacaccaggttcaaacaatttttgctcaagtagtactgaaggccttccaagaacttggcaacctggtgaaacaaatgatccaataaatcaaattccgtcactccgccttatgccagattttgcgggagtgtacagcttcttaggtagtgttttcgatccaagtacaagtggtcatctgcagaaacttaaggagatgaatccaattgacgttgagacggcactgttgttgatgaggaatctctccatcaatttaaccagtcctgattttgaagatcaagtcttgccaattcgtgatgccagtactcagcagagcaggcctgaagtccgaaccactatcttatagcatagactcttatctcctgacacccacaaagggatgaaagtgaggaagttgttgtccttatacagcgcttctgatggacctgggctagggagctcaagaagttcagctctagcgacgagcgcgcctttcatgtaaggaagcgtgcacccttcctggcctttcctatccccaaaagctcggccatctaggctcgtgaaatgctgcttcagatcaaggctgtccttggaaatgggaagatgaaaggagaatctgggtaatgccggttgctccctttcccattctttgttgagttcagctttctgattggtttctggtggccctcttgatacggaacttgtgcgctccgtctgagaaagcatgtgtgcaaagtttcatttgaggagttgaggcgatcatggcgctgtaaaatgcggcttatcttcccccttcagggctggtttggtggaccaaccctcaaacatttgcaattcctatgtacgtctgtagtgcatcaggtgttgttgcccacgtgtaaaaggaaaataaattcacaatgtaaaggagacttgtgcgttagcactaccatttgaatttatgaaatgtcaaagcagcccagcgagtttgtacttgccacatttttttgtcgctgtatcagcagtctggctactctggcatcgagttcgtttccaagggtg

SEQ ID NO: 55558 - DNA, 1498 bp, Zea Mays
agatacggaggggcaaggtacgtggtgccttaccttggctaaggcactgaatctggatccctcctccacctccacgcgagcggacgacacgaagcggccatagccgcacgttgggatcccctccgctacgcctctcgatggtctccgccagcgcgccgccgccgcaggcccagtccgacgcggccgggtcgggggaggaagtgagcaagaaggtgcggaagccgtacacaatcaccaagtcccgggagagctggacggagcaggagcacgacaagttcctcgaggccctgcagctctttgatcgtgactggaagaagatagaggcttttgttggctccaagactgtcatccagattaggagccatgcacagaagtaccttttgaaggttcagaaaaatggaaccagcgaacatgtcccacctccacgaccaaagcgaaaagctgcccatccatatcctcagaaggcttccaagaatgattcatcttccatccataggaactctggcatgaacgtgcctgtttcttcatgggctcatagttccatcccacaagctgttgcttcatcaatggtgaaagatttaggtgctggaacaccaggttcaaacaatttttgctcaagtagtactgaaggccttccaagaacttggcaacctggtgaaacaaatgatccaataaatcaaattccgtcactccgccttatgccagattttgcgggagtgtacagcttcttaggtagtgttttcgatccaagtacaagtggtcatctgcagaaacttaaggagatgaatccaattgacgttgagacggcactgttgttgatgaggaatctctccatcaatttaaccagtcctgattttgaagatcaaaggaagttgttgtccttatacagcgcttctgatggacctgggctagggagctcaagaagttcagctctagcgacgagcgcgcctttcatgtaaggaagcgtgcacccttcctggcctttcctatccccaaaagctcggccatctaggctcgtgaaatgctgcttcagatcaaggctgtccttggaaatgggaagatgaaaggagaatctgggtaatgccggttgctccctttcccattctttgttgagttcagctttctgattggtttctggtggccctcttgatacggaacttgtgcgctccgtctgagaaagcatgtgtgcaaagtttcatttgaggagttgaggcgatcatggcgctgtaaaatgcggcttatcttcccccttcagggctggtttggtggaccaaccctcaaacatttgcaattcctatgtacgtctgtagtgcatcaggtgttgttgcccacgtgtaaaaggaaaataaattcacaatgtaaaggagacttgtgcgttagcactaccatttgaatttatgaaatgtcaaagcagcccagcgagtttgtacttgccacatttttttgtcgctgtatcagcagtctggctactctggcatcgagttcgtttccaagggtg

SEQ ID NO: 55559 - DNA, 1785 bp, Zea Mays
agatacggaggggcaaggtacgtggtgccttaccttggctaaggcactgaatctggatccctcctccacctccacgcgagcggacgacacgaagcggccatagccgcacgttgggatcccctccgctacgcctctcgatggtctccgccagcgcgccgccgccgcaggcccagtccgacgcggccgggtcgggggaggaagtgagcaagaaggtgcggaagccgtacacaatcaccaagtcccgggagagctggacggagcaggagcacgacaagttcctcgaggccctgcagctctttgatcgtgactggaagaagatagaggcttttgttggctccaagactgtcatccagattaggagccatgcacagaagtaccttttgaaggttcagaaaaatggaaccagcgaacatgtcccacctccacgaccaaagcgaaaagctgcccatccatatcctcagaaggcttccaagaatgattcatcttccatccataggaactctggcatgaacgtgcctgtttcttcatgggctcatagttccatcccacaagctgttgcttcatcaatggtgaaagatttaggtgctggaacaccaggttcaaacaatttttgctcaagtagtactgaaggccttccaagaacttggcaacctggtgaaacaaatgatccaataaatcaaattccgtcactccgccgtcagtacctcatgatatttctgataatcatcttgtagtgcaaaatacttactccgattctgtccatctctactatttctaagaattatgtcttaaccatcctcctgtgcatcttttcttgtgaatttgtaagcttcaatctcaaatccgctggccccttcttttagaatgaaccgaacctccaatattctcttgatgatgcttaacatacagagaaacggtgtaacacaaaacagcacaatccatttctttgtactgtttctttttcaaatattttactgttttcaatattgaatctatgtcttgaatgaattgctagcttatctaattcatatttacattcttgacatttcaattatgtctttccaatgtttgatatagttatgccagattttgcgggagtgtacagcttcttaggtagtgttttcgatccaagtacaagtggtcatctgcagaaacttaaggagatgaatccaattgacgttgagacggcactgttgttgatgaggaatctctccatcaatttaaccagtcctgattttgaagatcaagaagcgtgcacccttcctggcctttcctatccccaaaagctcggccatctaggctcgtgaaatgctgcttcagatcaaggctgtccttggaaatgggaagatgaaaggagaatctgggtaatgccggttgctccctttcccattctttgttgagttcagctttctgattggtttctggtggccctcttgatacggaacttgtgcgctccgtctgagaaagcatgtgtgcaaagtttcatttgaggagttgaggcgatcatggcgctgtaaaatgcggcttatcttcccccttcagggctggtttggtggaccaaccctcaaacatttgcaattcctatgtacgtctgtagtgcatcaggtgttgttgcccacgtgtaaaaggaaaataaattcacaatgtaaaggagacttgtgcgttagcactaccatttgaatttatgaaatgtcaaagcagcccagcgagtttgtacttgccacatttttttgtcgctgtatcagcagtctggctactctggcatcgagttcgtttccaagggtg

SEQ ID NO: 55560 - DNA, 1730 bp, Zea Mays
agatacggaggggcaaggtacgtggtgccttaccttggctaaggcactgaatctggatccctcctccacctccacgcgagcggacgacacgaagcggccatagccgcacgttgggatcccctccgctacgcctctcgatggtctccgccagcgcgccgccgccgcaggcccagtccgacgcggccgggtcgggggaggaagtgagcaagaaggtgcggaagccgtacacaatcaccaagtcccgggagagctggacggagcaggagcacgacaagttcctcgaggccctgcagctctttgatcgtgactggaagaagatagaggcttttgttggctccaagactgtcatccagattaggagccatgcacagaagtaccttttgaaggttcagaaaaatggaaccagcgaacatgtcccacctccacgaccaaagcgaaaagctgcccatccatatcctcagaaggcttccaagaatggaactctggcatgaacgtgcctgtttcttcatgggctcatagttccatcccacaagctgttgcttcatcaatggtgaaagaagatttaggtgctggaacaccaggttcaaacaatttttgctcaagtagtactgaaggccttccaagaacttggcaacctggtgaaacaaatgatccaataaatcaaattccgtcactccgccttatgccagattttgcgggagtgtacagcttcttaggtagtgttttcgatccaagtacaagtggtcatctgcagaaacttaaggagatgaatccaattgacgttgagacggcactgttgttgatgaggaatctctccatcaatttaaccagtcctgattttgaagatcaagtcttgccaattcgtgatgccagtactcagcagagcaggcctgaagtccgaaccactatcttatagcatagactcttatctcctgacacccacaaagggatgaaagtgaggaagttgttgtccttatacagcgcttctgatggacctgggctagggagctcaagaagttcagctctagcgacgagcgcgcctttcatgtaaggtctctcggcatataatttcagttcgacagacctcaggaggatagtgcctgccctggcgtagtagcaccgatgagtgatgaaggaggcgtttgcaccttttgtgcttctcgctagctccatgccttcggctgacgattgtgaagcgtgcacccttcctggcctttcctatccccaaaagctcggccatctaggctcgtgaaatgctgcttcagatcaaggctgtccttggaaatgggaagatgaaaggagaatctgggtaatgccggttgctccctttcccattctttgttgagttcagctttctgattggtttctggtggccctcttgatacggaacttgtgcgctccgtctgagaaagcatgtgtgcaaagtttcatttgaggagttgaggcgatcatggcgctgtaaaatgcggcttatcttcccccttcagggctggtttggtggaccaaccctcaaacatttgcaattcctatgtacgtctgtagtgcatcaggtgttgttgcccacgtgtaaaaggaaaataaattcacaatgtaaaggagacttgtgcgttagcactaccatttgaatttatgaaatgtcaaagcagcccagcgagtttgtacttgccacatttttttgtcgctgtatcagcagtctggctactctggcatcgagttcgtttccaagggtg

SEQ ID NO: 55561 - DNA, 1301 bp, Zea Mays
agatacggaggggcaaggtacgtggtgccttaccttggctaaggcactgaatctggatccctcctccacctccacgcgagcggacgacacgaagcggccatagccgcacgttgggatcccctccgctacgcctctcgatggtctccgccagcgcgccgccgccgcaggcccagtccgacgcggccgggtcgggggaggaagtgagcaagaaggtgcggaagccgtacacaatcaccaagtcccgggagagctggacggagcaggagcacgacaagttcctcgaggccctgcagctctttgatcgtgactggaagaagatagaggcttttgttggctccaagactgtcatccagattaggagccatgcacagaagtaccttttgaaggttcagaaaaatggaaccagcgaacatgtcccacctccacgaccaaagcgaaaagctgcccatccatatcctcagaaggcttccaagaatgattcatcttccatccataggaactctggcatgaacgtgcctgtttcttcatgggctcatagttccatcccacaagctgttgcttcatcaatggtgaaagatttaggtgctggaacaccaggttcaaacaatttttgctcaagtagtactgaaggccttccaagaacttggcaacctggtgaaacaaatgatccaataaatcaaattccgtcactccgccttatgccagattttgcgggagtgtacagcttcttaggtagtgttttcgatccaagtacaagtggtcatctgcagaaacttaaggagatgaatccaattgacgttgagacggcactgttgttgatgaggaatctctccatcaatttaaccagtcctgattttgaagatcaagaagcgtgcacccttcctggcctttcctatccccaaaagctcggccatctaggctcgtgaaatgctgcttcagatcaaggctgtccttggaaatgggaagatgaaaggagaatctggcatgtgtgcaaagtttcatttgaggagttgaggcgatcatggcgctgtaaaatgcggcttatcttcccccttcagggctggtttggtggaccaaccctcaaacatttgcaattcctatgtacgtctgtagtgcatcaggtgttgttgcccacgtgtaaaaggaaaataaattcacaatgtaaaggagacttgtgcgttagcactaccatttgaatttatgaaatgtcaaagcagcccagcgagtttgtacttgccacatttttttgtcgctgtatcagcagtctggctactctggcatcgagttcgtttccaagggtg

SEQ ID NO: 55562 - DNA, 1564 bp, Zea Mays
agatacggaggggcaaggtacgtggtgccttaccttggctaaggcactgaatctggatccctcctccacctccacgcgagcggacgacacgaagcggccatagccgcacgttgggatcccctccgctacgcctctcgatggtctccgccagcgcgccgccgccgcaggcccagtccgacgcggccgggtcgggggaggaagtgagcaagaaggtgcggaagccgtacacaatcaccaagtcccgggagagctggacggagcaggagcacgacaagttcctcgaggccctgcagctctttgatcgtgactggaagaagatagaggcttttgttggctccaagactgtcatccagattaggagccatgcacagaagtaccttttgaaggttcagaaaaatggaaccagcgaacatgtcccacctccacgaccaaagcgaaaagctgcccatccatatcctcagaaggcttccaagaatggaactctggcatgaacgtgcctgtttcttcatgggctcatagttccatcccacaagctgttgcttcatcaatggtgaaagatttaggtgctggaacaccaggttcaaacaatttttgctcaagtagtactgaaggccttccaagaacttggcaacctggtgaaacaaatgatccaataaatcaaattccgtcactccgccttatgccagattttgcgggagtgtacagcttcttaggtagtgttttcgatccaagtacaagtggtcatctgcagaaacttaaggagatgaatccaattgacgttgagacggcactgttgttgatgaggaatctctccatcaatttaaccagtcctgattttgaagatcaagtcttgccaattcgtgatgccagtactcagcagagcaggcctgaagtccgaaccactatcttatagcatagactcttatctcctgacacccacaaagggatgaaagtgcgcttctgatggacctgggctagggagctcaagaagttcagctctagcgacgagcgcgcctttcatgtaaggaagcgtgcacccttcctggcctttcctatccccaaaagctcggccatctaggctcgtgaaatgctgcttcagatcaaggctgtccttggaaatgggaagatgaaaggagaatctgggtaatgccggttgctccctttcccattctttgttgagttcagctttctgattggtttctggtggccctcttgatacggaacttgtgcgctccgtctgagaaagcatgtgtgcaaagtttcatttgaggagttgaggcgatcatggcgctgtaaaatgcggcttatcttcccccttcagggctggtttggtggaccaaccctcaaacatttgcaattcctatgtacgtctgtagtgcatcaggtgttgttgcccacgtgtaaaaggaaaataaattcacaatgtaaaggagacttgtgcgttagcactaccatttgaatttatgaaatgtcaaagcagcccagcgagtttgtacttgccacatttttttgtcgctgtatcagcagtctggctactctggcatcgagttcgtttccaagggtg

SEQ ID NO: 55563 - DNA, 1641 bp, Zea Mays
agatacggaggggcaaggtacgtggtgccttaccttggctaaggcactgaatctggatccctcctccacctccacgcgagcggacgacacgaagcggccatagccgcacgttgggatcccctccgctacgcctctcgatggtctccgccagcgcgccgccgccgcaggcccagtccgacgcggccgggtcgggggaggaagtgagcaagaaggtgcggaagccgtacacaatcaccaagtcccgggagagctggacggagcaggagcacgacaagttcctcgaggccctgcagctctttgatcgtgactggaagaagatagaggcttttgttggctccaagactgtcatccagattaggagccatgcacagaagtaccttttgaaggttcagaaaaatggaaccagcgaacatgtcccacctccacgaccaaagcgaaaagctgcccatccatatcctcagaaggcttccaagaatgattcatcttccatccataggaactctggcatgaacgtgcctgtttcttcatgggctcatagttccatcccacaagctgttgcttcatcaatggtgaaagaagatttaggtgctggaacaccaggttcaaacaatttttgctcaagtagtactgaaggccttccaagaacttggcaacctggtgaaacaaatgatccaataaatcaaattccgtcactccgccttatgccagattttgcgggagtgtacagcttcttaggtagtgttttcgatccaagtacaagtggtcatctgcagaaacttaaggagatgaatccaattgacgttgagacggcactgttgttgatgaggaatctctccatcaatttaaccagtcctgattttgaagatcaaaggaagttgttgtccttatacagcgcttctgatggacctgggctagggagctcaagaagttcagctctagcgacgagcgcgcctttcatgtaaggtctctcggcatataatttcagttcgacagacctcaggaggatagtgcctgccctggcgtagtagcaccgatgagtgatgaaggaggcgtttgcaccttttgtgcttctcgctagctccatgccttcggctgacgattgtgaagcgtgcacccttcctggcctttcctatccccaaaagctcggccatctaggctcgtgaaatgctgcttcagatcaaggctgtccttggaaatgggaagatgaaaggagaatctgggtaatgccggttgctccctttcccattctttgttgagttcagctttctgattggtttctggtggccctcttgatacggaacttgtgcgctccgtctgagaaagcatgtgtgcaaagtttcatttgaggagttgaggcgatcatggcgctgtaaaatgcggcttatcttcccccttcagggctggtttggtggaccaaccctcaaacatttgcaattcctatgtacgtctgtagtgcatcaggtgttgttgcccacgtgtaaaaggaaaataaattcacaatgtaaaggagacttgtgcgttagcactaccatttgaatttatgaaatgtcaaagcagcccagcgagtttgtacttgccacatttttttgtcgctgtatcagcagtctggctactctggcatcgagttcgtttccaagggtg

SEQ ID NO: 55564 - DNA, 1749 bp, Zea Mays
agatacggaggggcaaggtacgtggtgccttaccttggctaaggcactgaatctggatccctcctccacctccacgcgagcggacgacacgaagcggccatagccgcacgttgggatcccctccgctacgcctctcgatggtctccgccagcgcgccgccgccgcaggcccagtccgacgcggccgggtcgggggaggaagtgagcaagaaggtgcggaagccgtacacaatcaccaagtcccgggagagctggacggagcaggagcacgacaagttcctcgaggccctgcagctctttgatcgtgactggaagaagatagaggcttttgttggctccaagactgtcatccagattaggagccatgcacagaagtaccttttgaaggttcagaaaaatggaaccagcgaacatgtcccacctccacgaccaaagcgaaaagctgcccatccatatcctcagaaggcttccaagaatgattcatcttccatccataggaactctggcatgaacgtgcctgtttcttcatgggctcatagttccatcccacaagctgttgcttcatcaatggtgaaagaagatttaggtgctggaacaccaggttcaaacaatttttgctcaagtagtactgaaggccttccaagaacttggcaacctggtgaaacaaatgatccaataaatcaaattccgtcactccgccttatgccagattttgcgggagtgtacagcttcttaggtagtgttttcgatccaagtacaagtggtcatctgcagaaacttaaggagatgaatccaattgacgttgagacggcactgttgttgatgaggaatctctccatcaatttaaccagtcctgattttgaagatcaagtcttgccaattcgtgatgccagtactcagcagagcaggcctgaagtccgaaccactatcttatagcatagactcttatctcctgacacccacaaagggatgaaagtgaggaagttgttgtccttatacagcgcttctgatggacctgggctagggagctcaagaagttcagctctagcgacgagcgcgcctttcatgtaaggtctctcggcatataatttcagttcgacagacctcaggaggatagtgcctgccctggcgtagtagcaccgatgagtgatgaaggaggcgtttgcaccttttgtgcttctcgctagctccatgccttcggctgacgattgtgaagcgtgcacccttcctggcctttcctatccccaaaagctcggccatctaggctcgtgaaatgctgcttcagatcaaggctgtccttggaaatgggaagatgaaaggagaatctgggtaatgccggttgctccctttcccattctttgttgagttcagctttctgattggtttctggtggccctcttgatacggaacttgtgcgctccgtctgagaaagcatgtgtgcaaagtttcatttgaggagttgaggcgatcatggcgctgtaaaatgcggcttatcttcccccttcagggctggtttggtggaccaaccctcaaacatttgcaattcctatgtacgtctgtagtgcatcaggtgttgttgcccacgtgtaaaaggaaaataaattcacaatgtaaaggagacttgtgcgttagcactaccatttgaatttatgaaatgtcaaagcagcccagcgagtttgtacttgccacatttttttgtcgctgtatcagcagtctggctactctggcatcgagttcgtttccaagggtg

SEQ ID NO: 55565 - DNA, 1972 bp, Zea Mays
agatacggaggggcaaggtacgtggtgccttaccttggctaaggcactgaatctggatccctcctccacctccacgcgagcggacgacacgaagcggccatagccgcacgttgggatcccctccgctacgcctctcgatggtctccgccagcgcgccgccgccgcaggcccagtccgacgcggccgggtcgggggaggaagtgagcaagaaggtgcggaagccgtacacaatcaccaagtcccgggagagctggacggagcaggagcacgacaagttcctcgaggccctgcagctctttgatcgtgactggaagaagatagaggcttttgttggctccaagactgtcatccagattaggagccatgcacagaagtaccttttgaaggttcagaaaaatggaaccagcgaacatgtcccacctccacgaccaaagcgaaaagctgcccatccatatcctcagaaggcttccaagaatggaactctggcatgaacgtgcctgtttcttcatgggctcatagttccatcccacaagctgttgcttcatcaatggtgaaagatttaggtgctggaacaccaggttcaaacaatttttgctcaagtagtactgaaggccttccaagaacttggcaacctggtgaaacaaatgatccaataaatcaaattccgtcactccgccgtcagtacctcatgatatttctgataatcatcttgtagtgcaaaatacttactccgattctgtccatctctactatttctaagaattatgtcttaaccatcctcctgtgcatcttttcttgtgaatttgtaagcttcaatctcaaatccgctggccccttcttttagaatgaaccgaacctccaatattctcttgatgatgcttaacatacagagaaacggtgtaacacaaaacagcacaatccatttctttgtactgtttctttttcaaatattttactgttttcaatattgaatctatgtcttgaatgaattgctagcttatctaattcatatttacattcttgacatttcaattatgtctttccaatgtttgatatagttatgccagattttgcgggagtgtacagcttcttaggtagtgttttcgatccaagtacaagtggtcatctgcagaaacttaaggagatgaatccaattgacgttgagacggcactgttgttgatgaggaatctctccatcaatttaaccagtcctgattttgaagatcaacgcttctgatggacctgggctagggagctcaagaagttcagctctagcgacgagcgcgcctttcatgtctctcggcatataatttcagttcgacagacctcaggaggatagtgcctgccctggcgtagtagcaccgatgagtgatgaaggaggcgtttgcaccttttgtgcttctcgctagctccatgccttcggctgacgattgtgaagcgtgcacccttcctggcctttcctatccccaaaagctcggccatctaggctcgtgaaatgctgcttcagatcaaggctgtccttggaaatgggaagatgaaaggagaatctgggtaatgccggttgctccctttcccattctttgttgagttcagctttctgattggtttctggtggccctcttgatacggaacttgtgcgctccgtctgagaaagcatgtgtgcaaagtttcatttgaggagttgaggcgatcatggcgctgtaaaatgcggcttatcttcccccttcagggctggtttggtggaccaaccctcaaacatttgcaattcctatgtacgtctgtagtgcatcaggtgttgttgcccacgtgtaaaaggaaaataaattcacaatgtaaaggagacttgtgcgttagcactaccatttgaatttatgaaatgtcaaagcagcccagcgagtttgtacttgccacatttttttgtcgctgtatcagcagtctggctactctggcatcgagttcgtttccaagggtg

SEQ ID NO: 55566 - DNA, 1574 bp, Zea Mays
agatacggaggggcaaggtacgtggtgccttaccttggctaaggcactgaatctggatccctcctccacctccacgcgagcggacgacacgaagcggccatagccgcacgttgggatcccctccgctacgcctctcgatggtctccgccagcgcgccgccgccgcaggcccagtccgacgcggccgggtcgggggaggaagtgagcaagaaggtgcggaagccgtacacaatcaccaagtcccgggagagctggacggagcaggagcacgacaagttcctcgaggccctgcagctctttgatcgtgactggaagaagatagaggcttttgttggctccaagactgtcatccagattcatcttccatccataggaactctggcatgaacgtgcctgtttcttcatgggctcatagttccatcccacaagctgttgcttcatcaatggtgaaagaagatttaggtgctggaacaccaggttcaaacaatttttgctcaagtagtactgaaggccttccaagaacttggcaacctggtgaaacaaatgatccaataaatcaaattccgtcactccgccttatgccagattttgcgggagtgtacagcttcttaggtagtgttttcgatccaagtacaagtggtcatctgcagaaacttaaggagatgaatccaattgacgttgagacggcactgttgttgatgaggaatctctccatcaatttaaccagtcctgattttgaagatcaagtgtctggtactctggttcatgtttcagtgttttgctgtttgcatcatttctctatgaggaagttgttgtccttatacagcgcttctgatggacctgggctagggagctcaagaagttcagctctagcgacgagcgcgcctttcatgtaaggtctctcggcatataatttcagttcgacagacctcaggaggatagtgcctgccctggcgtagtagcaccgatgagtgatgaaggaggcgtttgcaccttttgtgcttctcgctagctccatgccttcggctgacgattgtgaagcgtgcacccttcctggcctttcctatccccaaaagctcggccatctaggctcgtgaaatgctgcttcagatcaaggctgtccttggaaatgggaagatgaaaggagaatctgggtaatgccggttgctccctttcccattctttgttgagttcagctttctgattggtttctggtggccctcttgatacggaacttgtgcgctccgtctgagaaagcatgtgtgcaaagtttcatttgaggagttgaggcgatcatggcgctgtaaaatgcggcttatcttcccccttcagggctggtttggtggaccaaccctcaaacatttgcaattcctatgtacgtctgtagtgcatcaggtgttgttgcccacgtgtaaaaggaaaataaattcacaatgtaaaggagacttgtgcgttagcactaccatttgaatttatgaaatgtcaaagcagcccagcgagtttgtacttgccacatttttttgtcgctgtatcagcagtctggctactctggcatcgagttcgtttccaagggtg

SEQ ID NO: 55567 - DNA, 1638 bp, Zea Mays
agatacggaggggcaaggtacgtggtgccttaccttggctaaggcactgaatctggatccctcctccacctccacgcgagcggacgacacgaagcggccatagccgcacgttgggatcccctccgctacgcctctcgatggtctccgccagcgcgccgccgccgcaggcccagtccgacgcggccgggtcgggggaggaagtgagcaagaaggtgcggaagccgtacacaatcaccaagtcccgggagagctggacggagcaggagcacgacaagttcctcgaggccctgcagctctttgatcgtgactggaagaagatagaggcttttgttggctccaagactgtcatccagattaggagccatgcacagaagtaccttttgaaggttcagaaaaatggaaccagcgaacatgtcccacctccacgaccaaagcgaaaagctgcccatccatatcctcagaaggcttccaagaatgattcatcttccatccataggaactctggcatgaacgtgcctgtttcttcatgggctcatagttccatcccacaagctgttgcttcatcaatggtgaaagatttaggtgctggaacaccaggttcaaacaatttttgctcaagtagtactgaaggccttccaagaacttggcaacctggtgaaacaaatgatccaataaatcaaattccgtcactccgccttatgccagattttgcgggagtgtacagcttcttaggtagtgttttcgatccaagtacaagtggtcatctgcagaaacttaaggagatgaatccaattgacgttgagacggcactgttgttgatgaggaatctctccatcaatttaaccagtcctgattttgaagatcaaaggaagttgttgtccttatacagcgcttctgatggacctgggctagggagctcaagaagttcagctctagcgacgagcgcgcctttcatgtaaggtctctcggcatataatttcagttcgacagacctcaggaggatagtgcctgccctggcgtagtagcaccgatgagtgatgaaggaggcgtttgcaccttttgtgcttctcgctagctccatgccttcggctgacgattgtgaagcgtgcacccttcctggcctttcctatccccaaaagctcggccatctaggctcgtgaaatgctgcttcagatcaaggctgtccttggaaatgggaagatgaaaggagaatctgggtaatgccggttgctccctttcccattctttgttgagttcagctttctgattggtttctggtggccctcttgatacggaacttgtgcgctccgtctgagaaagcatgtgtgcaaagtttcatttgaggagttgaggcgatcatggcgctgtaaaatgcggcttatcttcccccttcagggctggtttggtggaccaaccctcaaacatttgcaattcctatgtacgtctgtagtgcatcaggtgttgttgcccacgtgtaaaaggaaaataaattcacaatgtaaaggagacttgtgcgttagcactaccatttgaatttatgaaatgtcaaagcagcccagcgagtttgtacttgccacatttttttgtcgctgtatcagcagtctggctactctggcatcgagttcgtttccaagggtg

SEQ ID NO: 55568 - DNA, 2014 bp, Zea Mays
agatacggaggggcaaggtacgtggtgccttaccttggctaaggcactgaatctggatccctcctccacctccacgcgagcggacgacacgaagcggccatagccgcacgttgggatcccctccgctacgcctctcgatggtctccgccagcgcgccgccgccgcaggcccagtccgacgcggccgggtcgggggaggaagtgagcaagaaggtgcggaagccgtacacaatcaccaagtcccgggagagctggacggagcaggagcacgacaagttcctcgaggccctgcagctctttgatcgtgactggaagaagatagaggcttttgttggctccaagactgtcatccagattaggagccatgcacagaagtaccttttgaaggttcagaaaaatggaaccagcgaacatgtcccacctccacgaccaaagcgaaaagctgcccatccatatcctcagaaggcttccaagaatgattcatcttccatccataggaactctggcatgaacgtgcctgtttcttcatgggctcatagttccatcccacaagctgttgcttcatcaatggtgaaagatttaggtgctggaacaccaggttcaaacaatttttgctcaagtagtactgaaggccttccaagaacttggcaacctggtgaaacaaatgatccaataaatcaaattccgtcactccgccgtcagtacctcatgatatttctgataatcatcttgtagtgcaaaatacttactccgattctgtccatctctactatttctaagaattatgtcttaaccatcctcctgtgcatcttttcttgtgaatttgtaagcttcaatctcaaatccgctggccccttcttttagaatgaaccgaacctccaatattctcttgatgatgcttaacatacagagaaacggtgtaacacaaaacagcacaatccatttctttgtactgtttctttttcaaatattttactgttttcaatattgaatctatgtcttgaatgaattgctagcttatctaattcatatttacattcttgacatttcaattatgtctttccaatgtttgatatagttatgccagattttgcgggagtgtacagcttcttaggtagtgttttcgatccaagtacaagtggtcatctgcagaaacttaaggagatgaatccaattgacgttgagacggcactgttgttgatgaggaatctctccatcaatttaaccagtcctgattttgaagatcaaaggaagttgttgtccttatacagcgcttctgatggacctgggctagggagctcaagaagttcagctctagcgacgagcgcgcctttcatgtctctcggcatataatttcagttcgacagacctcaggaggatagtgcctgccctggcgtagtagcaccgatgagtgatgaaggaggcgtttgcaccttttgtgcttctcgctagctccatgccttcggctgacgattgtgaagcgtgcacccttcctggcctttcctatccccaaaagctcggccatctaggctcgtgaaatgctgcttcagatcaaggctgtccttggaaatgggaagatgaaaggagaatctgggtaatgccggttgctccctttcccattctttgttgagttcagctttctgattggtttctggtggccctcttgatacggaacttgtgcgctccgtctgagaaagcatgtgtgcaaagtttcatttgaggagttgaggcgatcatggcgctgtaaaatgcggcttatcttcccccttcagggctggtttggtggaccaaccctcaaacatttgcaattcctatgtacgtctgtagtgcatcaggtgttgttgcccacgtgtaaaaggaaaataaattcacaatgtaaaggagacttgtgcgttagcactaccatttgaatttatgaaatgtcaaagcagcccagcgagtttgtacttgccacatttttttgtcgctgtatcagcagtctggctactctggcatcgagttcgtttccaagggtg

SEQ ID NO: 55569 - DNA, 1823 bp, Zea Mays
agatacggaggggcaaggtacgtggtgccttaccttggctaaggcactgaatctggatccctcctccacctccacgcgagcggacgacacgaagcggccatagccgcacgttgggatcccctccgctacgcctctcgatggtctccgccagcgcgccgccgccgcaggcccagtccgacgcggccgggtcgggggaggaagtgagcaagaaggtgcggaagccgtacacaatcaccaagtcccgggagagctggacggagcaggagcacgacaagttcctcgaggccctgcagctgaactctggcatgaacgtgcctgtttcttcatgggctcatagttccatcccacaagctgttgcttcatcaatggtgaaagatttaggtgctggaacaccaggttcaaacaatttttgctcaagtagtactgaaggccttccaagaacttggcaacctggtgaaacaaatgatccaataaatcaaattccgtcactccgccgtcagtacctcatgatatttctgataatcatcttgtagtgcaaaatacttactccgattctgtccatctctactatttctaagaattatgtcttaaccatcctcctgtgcatcttttcttgtgaatttgtaagcttcaatctcaaatccgctggccccttcttttagaatgaaccgaacctccaatattctcttgatgatgcttaacatacagagaaacggtgtaacacaaaacagcacaatccatttctttgtactgtttctttttcaaatattttactgttttcaatattgaatctatgtcttgaatgaattgctagcttatctaattcatatttacattcttgacatttcaattatgtctttccaatgtttgatatagttatgccagattttgcgggagtgtacagcttcttaggtagtgttttcgatccaagtacaagtggtcatctgcagaaacttaaggagatgaatccaattgacgttgagacggcactgttgttgatgaggaatctctccatcaatttaaccagtcctgattttgaagatcaagtcttgccaattcgtgatgccagtactcagcagagcaggcctgaagtccgaaccactatcttatagcatagactcttatctcctgacacccacaaagggatgaaagtgaggaagttgttgtccttatacagcgcttctgatggacctgggctagggagctcaagaagttcagctctagcgacgagcgcgcctttcatgtaaggtctctcggcatataatttcagttcgacagacctcaggaggatagtgcctgccctggcgtagtagcaccgatgagtgatgaaggaggcgtttgcaccttttgtgcttctcgctagctccatgccttcggctgacgattgtgaagcgtgcacccttcctggcctttcctatccccaaaagctcggccatctaggctcgtgaaatgctgcttcagatcaaggctgtccttggaaatgggaagatgaaaggagaatctggcatgtgtgcaaagtttcatttgaggagttgaggcgatcatggcgctgtaaaatgcggcttatcttcccccttcagggctggtttggtggaccaaccctcaaacatttgcaattcctatgtacgtctgtagtgcatcaggtgttgttgcccacgtgtaaaaggaaaataaattcacaatgtaaaggagacttgtgcgttagcactaccatttgaatttatgaaatgtcaaagcagcccagcgagtttgtacttgccacatttttttgtcgctgtatcagcagtctggctactctggcatcgagttcgtttccaagggtg

SEQ ID NO: 55570 - DNA, 1818 bp, Zea Mays
agatacggaggggcaaggtacgtggtgccttaccttggctaaggcactgaatctggatccctcctccacctccacgcgagcggacgacacgaagcggccatagccgcacgttgggatcccctccgctacgcctctcgatggtctccgccagcgcgccgccgccgcaggcccagtccgacgcggccgggtcgggggaggaagtgagcaagaaggtgcggaagccgtacacaatcaccaagtcccgggagagctggacggagcaggagcacgacaagttcctcgaggccctgcagctctttgatcgtgactggaagaagatagaggcttttgttggctccaagactgtcatccagattaggagccatgcacagaagtaccttttgaaggttcagaaaaatggaaccagcgaacatgtcccacctccacgaccaaagcgaaaagctgcccatccatatcctcagaaggcttccaagaatgattcatcttccatccataggaactctggcatgaacgtgcctgtttcttcatgggctcatagttccatcccacaagctgttgcttcatcaatggtgaaaggtttgtatttgtgcttcttctgtcaaaaggttttattggaatattcatctgttaattcttatctttcacccagaagatttaggtgctggaacaccaggttcaaacaatttttgctcaagtagtactgaaggccttccaagaacttggcaacctggtgaaacaaatgatccaataaatcaaattccgtcactccgccttatgccagattttgcgggagtgtacagcttcttaggtagtgttttcgatccaagtacaagtggtcatctgcagaaacttaaggagatgaatccaattgacgttgagacggcactgttgttgatgaggaatctctccatcaatttaaccagtcctgattttgaagatcaagtcttgccaattcgtgatgccagtactcagcagagcaggcctgaagtccgaaccactatcttatagcatagactcttatctcctgacacccacaaagggatgaaagtgaggaagttgttgtccttatacagcgcttctgatggacctgggctagggagctcaagaagttcagctctagcgacgagcgcgcctttcatgtaaggtctctcggcatataatttcagttcgacagacctcaggaggatagtgcctgccctggcgtagtagcaccgatgagtgatgaaggaggcgtttgcaccttttgtgcttctcgctagctccatgccttcggctgacgattgtcgtgcacccttcctggcctttcctatccccaaaagctcggccatctaggctcgtgaaatgctgcttcagatcaaggctgtccttggaaatgggaagatgaaaggagaatctgggtaatgccggttgctccctttcccattctttgttgagttcagctttctgattggtttctggtggccctcttgatacggaacttgtgcgctccgtctgagaaagcatgtgtgcaaagtttcatttgaggagttgaggcgatcatggcgctgtaaaatgcggcttatcttcccccttcagggctggtttggtggaccaaccctcaaacatttgcaattcctatgtacgtctgtagtgcatcaggtgttgttgcccacgtgtaaaaggaaaataaattcacaatgtaaaggagacttgtgcgttagcactaccatttgaatttatgaaatgtcaaagcagcccagcgagtttgtacttgccacatttttttgtcgctgtatcagcagtctggctactctggcatcgagttcgtttccaagggtg

SEQ ID NO: 55571 - DNA, 2010 bp, Zea Mays
gatcgttgttggagggcagatacggaggggcaaggtacgtggtgccttaccttggctaaggcactgaatctggatccctcctccacctccacgcgagcggacgacacgaagcggccatagccgcacgttgggatcccctccgctacgcctctcgatggtctccgccagcgcgccgccgccgcaggcccagtccgacgcggccgggtcgggggaggaagtgagcaagaaggtgcggaagccgtacacaatcaccaagtcccgggagagctggacggagcaggagcacgacaagttcctcgaggccctgcagctctttgatcgtgactggaagaagatagaggcttttgttggctccaagactgtcatccagattaggagccatgcacagaagtaccttttgaaggttcagaaaaatggaaccagcgaacatgtcccacctccacgaccaaagcgaaaagctgcccatccatatcctcagaaggcttccaagaatgattcatcttccatccataggaactctggcatgaacgtgcctgtttcttcatgggctcatagttccatcccacaagctgttgcttcatcaatggtgaaagaagatttaggtgctggaacaccaggttcaaacaatttttgctcaagtagtactgaaggccttccaagaacttggcaacctggtgaaacaaatgatccaataaatcaaattccgtcactccgccttatgccagattttgcgggagtgtacagcttcttaggtagtgttttcgatccaagtacaagtggtcatctgcagaaacttaaggagatgaatccaattgacgttgagacggcactgttgttgatgaggaatctctccatcaatttaaccagtcctgattttgaagatcaaaggaagttgttgtccttatacagcgcttctgatggacctgggctagggagctcaagaagttcagctctagcgacgagcgcgcctttcatgtaaggtctctcggcatataatttcagttcgacagacctcaggaggatagtgcctgccctggcgtagtagcaccgatgagtgatgaaggaggcgtttgcaccttttgtgcttctcgctagctccatgccttcggctgacgattgtgtaaggctatccgcactcattttaccttatttctctactctaaaaggaatattctgtcctggtcagcgagattctttaccctatactaaaatcatctgcagccatatttaccctatatctctactctataccaaccactacaatttttatttccaatttaatattcccccctctctcgtcccatggcgggagatggagccgttggccacgtgcacgaaagagaagaaaatagggtaggagagagaggacgctggatatgaggtaagagaagagcaaatttacggtagggatgactttcgagttcgcgagtgcagggcttcagtctactctaaatatttacggtaccttttcgcgtttgcgagtgcggccagcctaagggtgcagccgtgtgcagtaggcttctgaaaggtgatattggtctgcggcctgatgtgtgtacatataatttttgccaggaagcgtgcacccttcctggcctttcctatccccaaaagctcggccatctaggctcgtgaaatgctgcttcagatcaaggctgtccttggaaatgggaagatgaaaggagaatctggcatgtgtgcaaagtttcatttgaggagttgaggcgatcatggcgctgtaaaatgcggcttatcttcccccttcagggctggtttggtggaccaaccctcaaacatttgcaattcctatgtacgtctgtagtgcatcaggtgttgttgcccacgtgtaaaaggaaaataaattcacaatgtaaaggagacttgtgcgttagcactaccatttgaatttatgaaatgtcaaagcagcccagcgagtttgtacttgccacatttttttgtcgctgtatcagcagtctggctactctggcatcgagttcgtttccaagggtg

SEQ ID NO: 55572 - DNA, 4038 bp, Zea Mays
agatacggaggggcaaggtacgtggtgccttaccttggctaaggcactgaatctggatccctcctccacctccacgcgagcggacgacacgaagcggccatagccgcacgttgggatcccctccgctacgcctctcgatggtctccgccagcgcgccgccgccgcaggcccagtccgacgcggccgggtcgggggaggaagtgagcaagaaggtgcggaagccgtacacaatcaccaagtcccgggagagctggacggagcaggagcacgacaagttcctcgaggccctgcagctctttgatcgtgactggaagaagatagaggcttttgttggctccaagactgtcatccagattaggagccatgcacagaagtaccttttgaaggttcagaaaaatggaaccagcgaacatgtcccacctccacgaccaaagcgaaaagctgcccatccatatcctcagaaggcttccaagaatggacacattttcgtcatttccgaagagaagatgtctcaagacaagaaggcagttgctgagacgaagctaactgaagaggaaaagcttcttgaggagaagattgctgggtttgttgaatcaatcgcaaaaacaaatacagagaagatcactaaagagatactggaaggcttgtctgaagatactgatgatagcgacagctatgatatggagagtggaggcgaagactctgaagatcggccctggcgaccaagtcatacagtcttcgggaaatcaactatcaaacagagtcatctagataatatgagaggaaggtattttcgagatatgtctatcgtgagggctgacatagacagggccgctcctgctcccgaagaagacgaagttgtgatcttccgaagcttcttcaaagctggacttcggttcccgttgagtagatttgtggttgaagttttgagtacataccagatctaccttcatcagattactcccgaagcaattattagaatggggattttcgtctgggctgtgagaagtcaaggtctggagccaagcgcaagatgtttttgcagtatgcatgagctctcgtatgagacgaaggcctggggtaaagaacaatatcacaacaatttcggctgctacagctttgttgctcgctccggcgtaagctacccagtgccaacattccggaagaggtggcccggagactggatgaaagaatggttctatgtaaagaatgatttaaaggcgagagaagacattaaagagatcatcatgcgccccatttggtcccacttcggcctccggaagccgaaggttgaaattgacgaggcagtcgaagcatgccgaagggctttcagcacaatttgctcttttgttgggacaagggacttgcttcaagagcatatagcctacagaatatggccacttgtagacagctgggaaatgccgaaggacaccatcactaaccctagcgagggcggcctagttcgactgaagtacaccttcaggtttgaggacaaatttgtcgaaccagatgatgactggctgaagtgtattgaaaatactagtgatgaattacttggagcatattccaagtccgaagataatgcactatctgcagctttcgggagccgaaaaaagaaaagattaaatagggtttttgatgctattggatttgtgtaccctgactatcgctacccaccacgggggcagaaaagaaagggtgtatcctctgaaaaggttgctgcttcggctgctccgagcgagcctgcaccgaagggtaaaaaattgaaggtccttacccaccgaccacgctacattgaaccggccgtaatgcctgaatttggtggggagacatcttcagctactgagccgaaggaacctgcccctcccacacagaagattgaaaagccggctgcagtgccgaagggtccttcgagtaaggtgattttaacaaaggttgccgaagataagaccgaaaggtcaaaaactgaaagagcaacaaagatgtcgggggttctgagtccttcgacagaagcaacagtgctgacggcagaaaaaagttctgccacaacccctagaaggaaaaggatggtgaatgttttagatattttagacacactggattcaaaacgcccttcttccacgaagaaaactgccggagctgacaaaacgcaacacaaagctggttctgagcaaatagaagtcgaagctataaaaaaccaggatgaagccgaggcagggcccaaagtgcctgttgagacgaagcttgcaacaaccgaacaaggggccaaagaaatgattccagatactaatatagtttttgaaaaaagtgcggccaaagaagccgaatctcttacccccgaagcatcctccgaggatcttgattatatcattcgacatgctgcgggaaagaaattatccaaagaagaaatttttgaagccaaacactatgctcgggaactgaagtatccaaagggggccttagtgtttaacggtatggatgaagatgatttcttgtattgtctcccggacaacaaagaattacccgtctgccgggagatggcccgaagcatgggtttcccgaagcttgaagctggcctttgcgccatgacgaaagatgatcttgcagatagccttgcatataatagtctgaaggtataaaaagttgtaaattttgaaatttatatattctgtaatggagtcttttatatgttaattcatttattttttcttgtagggcctaatacttagcaacgctttaagagcgcaaaagaatgctgaagacgagagctgcactattgctctcaacaaccttcaaacagaggttatcaagctgaggaacgaagccacggaaaaagacaaaattctacttacattggtggacaaagtaaaggaggatgaagctaacttaaaggctcaaactgaaattcaaaagaatgagattgaagaccttcgaagacaactggctggagccaacttaaagtgtgctgtcgctgaagctgatcgagatgccagtgaatactggaagaattatttagaaaaaacagttgcagagcttcgctcctccaaagaaagatgttttgagaaatctgtggagtgtgtgaagaaaataaagactagctttgctaacgtgggcgcgtattcgagcgaagacaactttatacgaggcgaccccgaaggcgttatcgaatggatcagtaatgaagctgaatcttttgaagaaatcttaagtgatcgtggggatgtttgcgcattttctggcgcaagaggaattgcgaccgtcttggagaaggcggattgtgatcacattaaaaccttggcccaggccgaagctgccttctccgtggacgtcacgaaggacccctcgaccgaagcaagtctaataggcggaaaaattttcactgatatctgggaaaatggcggccgaaaaatggctcatgaaataataaagaaaagagaaaaagatcttcatgacgctcgagaagcagcaaaagaggcagaaagagcagcagcactcgaaaaacgaatagctaaactttctcctccaccagagccactcgacccactggccaacccagaaacaaagaaggaagaagaaattattaacatggccgaagctattatcgacgaagttgttgccaagctactaaacgaagctgctgaaaaagttttgaaggaagtgtagctgctattgtaaaaacatttctaaaatattaatgtaacatttgctgaactaagtttgtaatatttgttgtttataatttttgaatgtaatatgtaaattgtttgtagttcgattctttacgatgcatgaaactttacatacataacgtttttgagccttcggcgaaaaaacactttcccttcttttcatgcttcgtgaaaaaaaaatttatatctcgtgggaatacccatacttcgtaaagaacatccaagcttcgtaaaaatattaatgcttcgtaaacaatagatttcttcttccatatcagagctgatgaagttgtacttcttcaaaacttattttgtgccttagcacaattttacttcttcgaaacattct

SEQ ID NO: 55573 - DNA, 1002 bp, Zea Mays
ggttttgctccgctgctcccccgccgcccctgacaagtataaccagccgcgtctcggcaaaaagtcctccgcgacagagagcgtgcagccagccaccgaccacccgcgcagcgcaggacttggggagcaagcaaggcgaagcggcctgccatggattccttctcgtcctcgccgtcgtcgtcaggtcccggcgctaacccggacgttgttatggaacagatcaagacgcagctcgcacaggcttacgcgcaggagtttctcgagaccgtcgggaacaagtgctttgaaaagtgcgtgaccaagccaggatcaagcttgagtggaagcgagagcagctgcatatcacgttgtgttgaccgctacattgaggccactggcgccgaaataaaccaacttcagtgggcggccgcgcacccggactggatggccatcgcctttgagaacaaggtccagcttcttagggtctgacaagaaattttctgaagaaagctcgattgtgtggagccctgggactttggaaaccatctgcttgtaatcttgtgttggcaaacctcttgacttaagctccggcaagcaaggaatcatatctgttccaggttgctacctctttgtctagcgaatgaagtcttaaatctcagcaaatgctacatgtgctagcagatttatctctgaacttcctgtgaatgtagaaatatatagaggtactaactttgactcacttccgaactggcctaatattataacatcatctggccattcctgttgtttcggccttgttctgctctccagtagtccagtttgctccgttactttgtttctgaacttcaacttcctgtgaatggaactcgtcaaggtttaggccaagtgcactggttctcatgtaatgccatgtaatcttgatttaatagattattatcccttcgaaacgaactgtcatgtaccataggtttgatcttgtgacgatttaatgccaatgcatcataggcgatcttgaagctgttt

SEQ ID NO: 55574 - DNA, 956 bp, Zea Mays
ggcttaagcactcatatttctcatctatagaggtctctagttttagccaaggatccaacagttttgtttaaattaacgtaggtgctctataaagtgtttagcgtatgtgctctataaagttgatactccatttctataactctagaccccaaaaaattaaaaatcactcatggattagcgtagatgctctataaagtattttgattagttagtctgttatattattgcttgctctagattatacctagtgattaggagtgagaaatagacacatccaacccttgatacttgcatgtattatttgacacttacacacataattgtagttaaccatgagacacttataagtcttacgagatcacaataaccgtgtttatagtgtgattactattgtatactaaagtgaacgaacgaacgaggtcaaggttgaagcaacacttgtatgtcgtctcgtcccttggatttggatcccctcgcacacgtcaccaaaagaatgagacggcagtcccttggatttgaaccgggaactcggtggtagtgaagatgacgaagagtattcggagaattaagggccaagattgaagcaacacttgcatgtcgtctcgtcccttggatttggatcccctcgcacacgtcaccaaaagaatgagacggcagtcccacccgcagtcccttctcgccagcgacagcgattctgcggccagcgttagatcatggtccaacgcctggaagctagcatgggctgccacgtgtctgtccgaaatttccagacgcctgctaggctgctagctactcctgaccgtgacgccactggagaagagtaaactctagtcacatccagaaccaggtaggcagctgcgctgaagctatccaaactggcaaaatacggagaagaagaacaactccgaatcacctgctcattaatcactgctattatattactcggacaaactaag

SEQ ID NO: 55575 - DNA, 693 bp, Zea Mays
gttttcgactatcatttatttggttgagccacgggttgttttctttgaaacttctacacatgattaagatagacatatacctatctcgtctagctctctttgttacacgtattatacaatgaccagtgcttatctataataaaaaaatacaatgaccagtgggaacgtacgtacgatttcagaggacgattattctgcggaaagctccaagctaacgtacgtgcgtctcatatttcactcatgcatgatcactgcattaaagtttctagtctacggtggactgactttaccgtaatatatacaattataagtaaacacgcgcaagagtgcaggaccaggattgggactaagactagcactggcctggtatgacctagtacaagccaggaacaaatcttagggagagcatgcattcaactgcaggatagggtgttcaacattcttggcgagaacagctcagaactcgctggggataggccgcaggagcgttaccaggccaccacaagttcttaaggaacgaacaatgaagacaatttttgttaattttgtggatttgtgtaaaacgtaagtttcaacataattctgccagcatattactaattggcactccctcaacttcttaagtgctccctgtcgaggccctacaaggaaccataacaaggcaatacaattaaattacatatctagcctgca

SEQ ID NO: 55576 - DNA, 513 bp, Zea Mays
cggagaggagcgatcacgccaccttaacaaagttaagcttcccatcatccagaggagcttgagggtgcgcgactgtggcagtttgtgagcgcaacgcgcaggggcggctgccaccttacatccatggataccgggtcatgcaacaaagcggcagcgccaccaccaccacgcaatatcgagaagaaccagcaggtcgagaaggaaccgatcgaggagaagccgaacgcggcggcgcagctgcaggatagggtgttcaacattcttggcgagaacagctcagaactcgctggggataggccgcaggagcgttaccaggccaccacaagttcttaaggaacgaacaatgaagacaatttttgttaattttgtggatttgtgtaaaacgtaagtttcaacataattctgccagcatattactaattggcactccctcaacttcttaagtgctccctgtcgaggccctacaaggaaccataacaaggcaatacaattaaattacatatctagcctgca

SEQ ID NO: 55577 - DNA, 698 bp, Zea Mays
ggatgttgctaggggtgtatcagggtgtgaccggaatgtttctagtggtcgagccgtgagattcacgctgtaaaaatctgaagcgtcgtagttatccatggagacctcccctgcctgcatgtttcctgcctgtgcgacaccgaccaatgtttttcaatgagccatagcctgggttgtgcgtggagccttggcgtggaggccgcgtgtccaacccatgcagctgtcgaccgaaacacgaataacaatcacgtgtgaacatgctcgacgtgctcatgtttctttgtttccttgatactgccttgcttccctgctcggtggagtgctctggcgccttgctgttgcttgtagagttcgacgagagttctccgtgtccatgctctcgcgtctgcgtggaactgcgttacctcgttcaactcgcctgaggccggggctgttgccgttctctctgagcaggtgaccacgccggccgtagctccgcctcaccgtggccagcgtatcggaagcgtcacgacgccgctgccggcgcgcgcgaagagagcgcgggtgcgcgagtctagagctttgggccggctggcaccaattttctctcgtgctggaccaactgggccgatttcagccctagctctgtatatgagctcccaaaataaagagtgaagatttaagataaagtggttgctgaagaggagtctactccagtg

SEQ ID NO: 55578 - DNA, 2765 bp, Zea Mays
tggctggccgccccctccccctatggcagccatcctccattgcttcctcccccaagatctccccctacgcagcaaggatcgagaagaggaggagcacgttgaattgaagaggaagagaggatcaaggagatgttcttccccatctcttcttgcagaatttcttggggaaaccctaggtatggatgagatccttgttcctccctgtaattatatgcttttggaggttgtggatcatgggaattaaaggattagaggttggatttgatgtggggttaggttttgatctcgaatttagttttctgcagaatggcaaattcgacagtttctgtttatgccagttttccgtggtcttagtggcctcaaaaaaataaaaagtctatatatgagtcgtagataatttgtagatctttcggtggccgtgaagaacacctcaatcggacatcagaacagaaagttatggcagtttgattatagcagtttttcagtctcataattctgtgcagaatctgttctcttaagagttaggcaattttatcaacagaattaaactgtgagttggtaaaagaagttgtagataatttcataagctttccagattgttaaagagtgcattcatatggtttgtgaaactccagttatgtttgttttactgtggctgttcccgtttacctgacaaaaatgagtgggtctgttcactggtgggtttcatctagtaaatggccgaattggctcttccaactatggagacttttatagagggataaaagttcttacttccagcagaatttcataatttttggttcagtagtttgggagatatcgaattttaaagttaaccatactgctgtctaaaacagattcagtcagttaccttgtcagatgttttagaacttgtagatgacagaatttaactatctattgaacactgaagttgtagagtattttgtgtagatactcctagagtatttgtttgatatcaccgctgttttaattttaaagatacaaaattaacaaacagtgttgctgctgtatggcatgtggttcagggtgggagtctttccactaggtcttggtttcaagtgtaggagtgttttgttgattgatggcaaatgtttgtgaaatatttgtactaagttttatgcccgctagcaggtggctacactccagatcatgtctagtacatttcttcttcttcgatgaaggcaagtgaatgtagcggtggttgcttccgttctgacctgttatttctattgtctacactctaatattcaaaagtattggattctttcataattggacactatggtgatgctttacttgcttacattatactgatgctcaatcatatattgatgatgattatgattcgagtatgattcatgagattaattcacacccctgaaggtaaatgaagtattagttgaggttggtattgtatctgaaggtaaataaagtattatttgaggtttgtattgtatctgaaggaagtgaagtttattgataaatgcagcatgccatatacattgcatgactcatttgcatctgaagttttgtcgtgacctatggtccgaccgtaccggtacaacttagcatcgtacgttgcccgaggaggggtacgatgcggcttcatacccttagaggtatgaaggcagaggacatatgcattgcattcatatgcatacattgaagtgatatttgcagatgatgtggttttataccctcagaggtatgaagatagaggacctacacattgcattcctatgcatacattgaagtgatatttgcaggtattgttgatgcagggaagtgttatacaacctattgtggttgttcgaggaaatgagatgatattggttatattgggactactgagttctatatctacaagtatttttgatcttgacaaaatgttgattaattcaatttgtggtttaaatatctcgtcagaacaattagcttgctgagatgtttcatctcactcttgcattactcaatgcaggtgcttgttgctcatcaaggggagtgggaagtagcagcacatccaccttcactctcataataatgctgcccagacacagtcatgatttaattagaaacttcttgtgaaaggatgtttgttttttaactagtcgtgtgcactgattaattcagttcatgttgttatggtagtcttcccattgctagcagattattaatgtcttttatgttttcttatcatgatatctatttatactttgttgcttccccgtttatgcaattttcaaagaagatgctgtcgaaattttatatatgaatgttagatgtgtagtttagtagcattctggggtgtttgtggaccccggggtgttacagcagaagaacaagtctgtataatcaaggagaatttgagggtagctcagactagacaaaagagctatgcggataatagaaggagaccactggaatttgaggaaggagattatgtgtacctcaaggtgtcaccacttcgtggaatgaagagatttaaagtcaagggcaaattgtcccctcgttttattggaccattcagagtttttaggcgagttggagagatggcctatcaactcgagctacctgataatctatttgatgtgcataatgtattccacatgtctcaacttaagaagtgtctccgtgtccctgaggaacatttaccaatggaagagctcagtgttcagggtgatttgacttacatggagtatcccgtcaagattctttatatattgactcgagttacaagaaataag

SEQ ID NO: 55579 - DNA, 27802 bp, Zea Mays
gtctattcagaatttaaagcctgaaatcagtagtgatgcaaagtttagagccctattgtgaccaacccttgtggttttggactatgaactatgtggcaaagttggagtccatagtacagagaataagttttatgaagagggttggacttgattctacacaaatatttgattaaaggttactcaaattggactgtcaggtttaagggtcctcatcagataactctgttctgaatacctatctgtctgctccactttgtgggcttgcaaaggctgttccgtgtagctttgtgcccaagtatctacagcaaagtgggagaggtagtatctatgaacaatatttattaaaggaccatagcttaacactatacaaagttggaagattcaggcgtccaaagatgataagtcagctgcgcaagactgaaggatatagttcagactgatctactttaaatttctgtctgagcaactttgaggccttgctggtactgtcctatgcgacttggtgccaggttgatttaagcaaagctgaaaagcttgtattcatgagcgagtttgattaagaaactttggcctggtgttatggagatttaggagataagggcgcctaaaactatccctgtcaagaagaaggcaatggggcaaaaaactgaaactttggatcaggcaaacagaaatggtaactagattttgcagtcaacttttgaattccataacctctattctaggaggtttgggtccatgaaatctatagagacttgatagaccttggactaatgagcaagttctgttaatggtgatttccctgttcttaatcagaatatggagaaagggctgactgaagggggagaatcagttatctgctgaagattcagaaaagctaaaatatctacccttgatatttaccctccttgccgtgaccaacctgggatcagataaagatgaagtgctggcaggggtattcagattggtgcatcactgaaatatcaccagtacaaaaatctgctacagtgcgctccatccttatcccctcctttttgccctggataaacttcaccctatctgactaggctctgtgtaattgcgtggatcttctggagggagccacggctgcacctagtattcatagttatccttgttgcaagatcaaaaatccagccccttgatcctttcactgcctatataaagagcaaaccatggggggaaaggagcaggagcagaggagtaatccttgtctcagttcttgatcaccatgtgtagcttcagttagttgtattgtgttcccttcctccaaaatcataacctggacacgcccaaatccattaatcaaggcactgaacacctgcagatcctccacttcaccgtggccagaaaacggagaagagggtgaagtgactgaagaaaagacatcaccacctttggaatctcaggcagagacttggctctacttcgacatctgcgagtccgagcctgactcacctactaacaaaggcaagccccggtgcatgcaaccccttccttgtgtttttaaatacttttcgcacactttaagtctagtgaaatgtgcattaagtttataggagttgcttgaaaccctttgatgcattgccttccttgatatccatacctgttatagatacttctttggaagtatcaaaatttgatttacaaaaatgcttagccctgcttagatcttgtggatggaagttgtcttttgcgttaaggccttgctcaggggttatcctgaggaaagatgacttctacctgcaagaatatattttcattgggagcatggtgggatcttactgcaaagttccctgtgatgctcttttcatcctaaggaacagaaacaatcctaaggatggaaatacataaatcgagacttgggctaggaacaggtgatgttctacccaggttgattaaggattgaatgcgtatgtaggcttgatagagcaaggactatcttagctagccgcataccctggaaatgggacagggtaagctttgcctcgggcagactaaggccagaataagataacacgaaatgggcgtggagcggtggcgggagtagcgtgtaccctccgtggcaagaggctggacggtggtgtatctgtgctctcggtttgcgtgaacctgatctggtcttaagaaccctggggtcgagttgacatatgcaaggattaagtgctacatatgtcgtgtggttagagatcctcagctgagtaaatcgattcggatcgccgttatatccccggagagtggagacttgatcactgccctacaacctaagtcaggatgtgaacttcgtgaataaaaatgatgttgtattgatgaaatgatgaaattagactagaggcaaacagagtctattaatatttaatctggcgttaaaatgttgaaagtaaggactcactttagtaagctatttctgcaaaagtatataagttgattcttgctaaagcctctccttgattcctatttatccagcatacccttgtgtgggggatagatatcccctgggtccactaaagaagtaaaagacctcacgaaaggcccaagggcccaataattcgtaaggtcattctttcgtgggcctggggaaagacaaccaacaaagaagagaagacatgagactggattggtgcaaacccggacggcccacaacgtcgaacgaatgaatcgcaacagagacccgactttcccgcgctgaagcccccatgcaacggagccatgcgaggataagtcggcgagggttacgtagggataaactcaagaggttcactatcttttagctacttgttgttatcatatccacgtgtactgccccacggtcgagtatataaggcctagggggcaccccttcagaacgatcgaccctactttacttagccacccacgtaaactctctgtgccttcaacccagagagtcctcttgtaaccacactcgaacactcatcaggacgtagggtgttacgcatctctaagcggcccgaacctgcaaatcttgtccattgtccctcgtgcgatcggcacgaaccattttgctacagtcgtcgacaccgtcctactcctaaaaacaccttgaggggcaaccccgggtgtgcggtcggacccaaaacactgacagctggcgcgccaggtaggggtgtgtgtcgacgatccaagctagctcaatggccgtcatcttccacagcaagatcaccgtgcgtcccggatctgtattctgcttcgggacaatctcatctgtagcggatgaagggggaattctacaccgcatcgcagatctgccagaagagaagtttcctccaacaaactccgaaaatgctggaaagacgctacctccggctcttcggaaaaagatcgtctccgggaaggctggagctagaagctcgctgacccggaagactccgctgtctacttccccgacgaaagaatggacacgggtcgcgagaaagaaggagaccagggaaaggcaagtcgttcttcccgttcctccggcctcaaaggagaacggaaagaaagtcgccacgacagcagtaccattctaccccgacgtcctcttcatcgggagagtggagtcgcccgccgtctctgacgacgaaccgaccacgcctggagaagaaccacctcaacgagaatcccgccgacggaggaaccgacgcaggaacgttcgacgacatcacgaggccggggaacgggatccggagcagcctgtctcgcgagacgaggtctcggaggtaggagaaactccggaagaacgcgtcttcagggaacgaaggaactcccgacgacgtgaccgccgacggattcaggagcaagccgagcaagatgcaaggcaacgccgggagaatccgcttttcgggcgcaacctgaaccccgactttgcccgagctatgaacacgccgagcgaagtcggaggcgtactagctcggatagctgacggacttcctcggactcccgacgccgagggataccgacgcctgttcactcaggcggccaaccatcttctgtcgctcgctcacccgccgaacgatctgcgacacgccatcaacagtcgccgagacgcgcgaagctctatcaatgcttcgcgcgaacgacggcatgaaaacgaaattcgccgtcgggaggagtatgaccgagatcatgccttcccgactcaaagccaggccaccaggactgagtcggcaacagcttcaactggcggtaccacccggggacggtcgaggaatcaccaccaccactcccctccccgggacagacgacatccccgacgacaggaggacacgtgcggagtatccgctcttactccgcgccttagggccatccaatggcctcccaacttcaaggtatccaatgtcgacaaatatgaacctaagcaagatccagggggttggttagccgtctacaccaccgctgctcgggctgccggagcatccgaagacgtcatgactgcgtatctgcccatcgtccttgggcaagatgcgctgcagtggctacgacatctaccccgacactgcatcgacgactggggagacttcagtcgacgcttcatcgccaacttccagtccctctccgacaagccagcgcaaccatgggacctcaaatccatcaagcgccgaggggacgagactctccggtcatacctcaaaaggttccagaccatgagaaaccgcatccccgaggtcacggaggcggccgtgatcgaggacttctacagaggatccaatgactcggctttcgtccgagccatactacaaaaggcgccgactacctccgaggagctgttccgggaagccgacctctacatcaccgccgacgagcgggcccaggatctcatcggaggagcaaagcctgcaccggcagcaccacgacgcgacgcgaaccagccacccgacaaacgctgggagaagaggcctcgtgaagaagtacacgccgccggaccacccgcctctcgcgcccgaggagggcctcgtggaggcgagcgcacgctggacgacatcctcgacgcccagtgcccgtaccacaaggacatgcgccatactctccgtaactgccgggacttcaagcactccgtcgggcacggccgacccttccaacctctaccgcctcctccgccgagggggggaccagatgaaccacgacagccccatcagcaggaggaggggggaggaggagctttcccacgcgttgacagggaggtcaacgtcatcttcggtggacatgggtcgcaggagaacaaaagacaacaaaagctcaacgaccgccagatactggtggcgaccaccggccctcccgccccgtaccggtggtcggagcacccgatcactttcactcgggaggatcaatggctcaacttcgaccatccaggcagatacccgctcctcgtcgatccggtgatccgagagagccgggtaaagaaggtgctagtggacggggggagcagcatcaacgtcaccttcccccgtacgctccaaggcttgggagttcacctcaaagagctccacgagtcagacactcctttcttcggcatcgtgccgacggaaggggaatacccgctgggccacatctacatgccggtcaccttcgggactccggagaactacagaaccgagttcctgaggttcgaggtggcgaacttcgactgcgggtacaacgccatcatcgggaggccggggctggccaaattcatggccattccgcactatacatacatgatactgaagatgccaggaccgcaaggaatcataactgtgcgcgccgacttccaaggcgccgcagaatgtttccgagtggccatccaagcagccctcaccaccaagccgtcaacggttccttctacgccggcgaactctaagcctgaggaagacctcgccgtaccggcaaacgaagctcaggccgtgacctctatgcggccgactgaagaaaccaagcggatcaacctggggttcgctgatgagcgcaagacggccatcatcagctccagtttgaatgacaaataggaaaacgcgctcgtccagttcctgcaagataaccgagacgtattcacatggcaacctgcggatatgccgggagtcccaagagaactggccgagcacaaattgaaggtctatcctcaggcgaggccgatccggcaaaagctacgtcgtttcacgcccgacaagagagaggccattcgagccgagttagctcgcttggtcgcggctggatttattagagaagtattacaccccgagtggttagccaaccctgttcttgtactcaaaaagaataaagtggattggcgcatgtgcgtcgactatactgatctcaacaaacactgtctgaaggatcccttcgggctcccgaggatagatcaagtggtggattccaccgctggatgttctgtgctgtctttcttagattgctattccgggtatcatcagattagtttggcaaaggaagacgaggaaaaaatggcgttcatcaccccgtttggtgctttttgttatacctccatgccgttcggcctcaaaaacgctggagcgacttatcagagagccattcaaacatgcttagccgatcactggggcaagcgtgtggaggcttacgtagatgacgtggtgattaaaacagagaattaggaaaacttcatcgaagatttacagctggtttttcaacagcctgagaagatatagatggaagctcaatcctgaaaaatgtgttttcggggtaccagcaggaaagttgctcggatttatcgtcagccaccggggaattgaggctaatccagataagattgaagctatcatgaagatggaagctcctcggtcacaaaagaaggttcagcgactcactggatgtatggcagctttgagcagatttatatccaggctgggagaaaaaggtttgccattttacaaactactcaagaaggtggataagtttcagtggacttcagaagcacaagaagctctagacgcactgaagaaattcttgacaacaccaccagtattgaaaccaccccggcgagctacgccgactcaaccggctgaggatttgttgctgtatatctcttgcacgactcacgtggtaagcactgcgttggtagtcgagcgagtagaagaaggacatgcctatccagtacaacatcctgtttacttcatcagtgaagttctaggcccctcgaagaaaaagtatcctcaggttcagaagctattatatgcagtacttctaactgcccgcaagctgcgtcactactttgacgaccacaaagtcatagtagttactggttttccaataggggacattcttcacaacaaggaagccattggccgaatagccaagtgggcttgcgagttgggatcccacgatatcgagttccgacctcgcactgccatcaaaactcaagcactggttgacttcgtatcagaatggacagaacagcaagttccagacaatccagaaacggcagaagtatggcgaatgtattttgatggctcgctgaagctgcagggagcaggagcagggattctcttcactgcacctggaggcgaacacctcaagtatgctctccagctgctattcccggcctctaacaacgcagccgagtatgaagctttgatacacggattaaacatcgccatatcactgggcgtcaagagactgatggtatatggagattctctggtagtcatcagccagataaacaaggaatgggattgttcaagtgattcaatgggaaaatactgcgccgccgtccgaaagctggaagataaattcgagggtctggagtttcatcatatagaaagagatcggaacacggcgaccgatgtactgtccaagctcggatccggtcggactcaggtcctgcccggggtcttcgtgcaagaaattctccagccgagtatctcgatggatcaaacagaagagtgcaacatcatagatcaacccgagtcagactctgatgactggagacggccgattattaagtatataaagaatgaagaagaaccagatgacaagaactcggcagagcgcattgctagacaatcagctcactatacactcattggggaggtattatacaggaggggcgcgtcaggcgtcctcatgaagtgcgttctcccgtctaccgggaagcaacttctggaggaagtccatgcagggcagtgtggagtacatgcagcatccagaacactagtcgggaaggtttttaggtcaggattctattggccgacggcgaagaacgatgcagccgagttagttcagagatgcgaagcttgccaatacctgtcaaagcaacagcacatgccagcacagcagctacagaccataccagtaacttggcctttcgcatgctggggactggatatgattggacctttcaagaaagctcaaggaggatatacccatgtattggtggcaattgacaaattcactaaatggatagagttctagcccattgcttctttaacctctgctaaagccgtggaattcatacaaagcataatattcagattcgggataccaaacagtatcatcactgacttgggatccaacttcaccagttcagaattctttgacttctgcgagcaaaagagcattcagatcaagtacgtgtctgtagcacatccaagagccaacgggcaggttgagcgagccaacggaatgatattggaggcactcaggaaaagggtcttcgataagaatgaaaaattcgcaggaaaatggataagggagctgccttatgttgtttggagcctgagaacccaacctagccgagccctgcatggaaacactcctttcttcatggtctatgggtcggaggcagtgctacctactgatctcaagtttggggcgccaagattgatcttcgaaagcatagcagaagccgaggccaccaggctggaggatattgatgtacttgaggaagaacgactgaatgcagtaatccaatcagcacggtaccagcagactctaaggcgctatcacgacaaggctgtgcggcaacgtttcttttcgataggagacctcgtcctccgccgaattctaacgggggagggacggcacaagttatcacccttatgggaagggcctttcatagtggcagaggtcactcggcccggatcgtatcgcctcacccagatggatggcacagaagttgggaactcctggaacatagagcacctcagaaagttttacccctagctgtatttcaaaacagctggggcgaccatgtattctgtaaaatggaaatacgtcatcaataaagagagatttcaaagatactcggctcgtttatgattgacttgcattcttacttaactcggggtgaccactatgccctacaaacggagcaatcgacttaagtcggcaacgacttaaggcggtgcaacatgctcacgcttacttaatttggggtggccactatgccctacaaacggagcaatcgacttaagtcggcaacgacttaaggcggtgcgacatgctcacgcttacttaatttggggtgaccactatgccctacaaacggagcaatcgacttaagtcggcaatgactcaaggcggtgcgacatgctcacgcttacttaatttagggtgaccactatgccctacaaacggagcaattgacttaagtcggcaacgacttaaggcggtgcaacatgctcacgcttacttaatttggggtgaccactatgcccgacaaacggagcaatcgacttaagtcggcaacgacttaaggcggtgcaacatgctcacgcttacttaattcggggtgaacactatgccctacaaacggagcaatcgacttaagtcagcgatggcttaagccagtgcaacatactcacgcttatgcaattcaggggatgacttccatatcccgaaaacaaacttcataatcatcatgcagcgttaccacaaacttgcgaattaattctgatacaataagagagtgatcatatcattcgaatgataagctgataacccctaacgagtacttgatcatgctaaccgcgcgctcatagcacgcgaaatgtttctctattttccaatgtctttctcaggagcgactgacgaagaagggcgattcgaagaatcgggggcagcattcacatcggctcttatgtcgtcagggacaaccacgccgggtcttctcatcaagattcgtcccgcccgaatagccttgtccatggctttatcacgctgagctttaagagtgacagcagtttcctcggcaactttagcagccagctgagtagtttctaactcctgagtaatggatttcttagaagctcggagtcccttgatggtggcatccttcgctgatatcagttgcttgaggcgggtcacttcgtccgcagattcttgcagccggcgacgctgattgtccagttcttccatcgtaaaacggtggctcctctccaagatggttagcgagttgctagagtctcgatacaatctgtccagattgtcgcgagaagcagcaaggatgcgtttttcttcctataaacaaaaatcaactcattcagaattcaagcatgtaataaggcgaagcacggttttgtaagttaccttttcggagtcaagccgagcgtgaagagaagaactcagagcgttggcgtcatccaaagcagcggagacctgatttagttcagtctgactctgagaatacttatcctcgaagtcagcacaccgttgagccatttcagcttgatctcgggaatgtttttcctcaaggactgcaatctgccgagtcattcctatcaagaggtaatcaaacgaaatgaggtcagaaggtaaaacagtccacgaacaaaggcaaagaagaagaagaagggcactaaccagcattagttgcctccaactcggatacacaacgatgaagtgacaccggattccaacgctcaagagatgaagccacttctgggacggaagcaccctgcgatctcagctggctggccatcccatccaccaaagcctgatgagaagaacggatgaacataatgacgaaaattcatgcagcgtaaagatcaagctaaaagtatagcacagtacctggagattggaaaagaacgaagggatccccaaatcaggagaaatcagctgataatcagatgccagaccaccacccggaacagcttgcaacggaccagtagaaacgagctcagtgccttcaacagaaccaaacgccagaccagtggggacgctgccctctaaagcaactccctgatccagagtttgggccaccaccatgccgccagagtgtggaggtgaacccgcatgaacatccatggaagtgcaggaaggagaccttgctcggacaccctcgggggctgggtcacagttggcactgcccacttgagccggatcatccccggcaacaccctcgggggctgggcagtggcttatactcctcacccgagctaagtcttccccagcgacatcctcgggggctgggcacgtgtcggcactattcaaggggtccaagctctctgccgtaaccacctctaaggttgacgggcctttagctacttccatgggaccaggacaatccaagccagcatcccgaccctcgagatcatgctctaaggttgacgaggcacgggatgacctcaacccagcatcgggcgcggctgcacaagtctctgttgcatcaacatccacaggctctgacaacaagttctccgggaccatatcctctagagtttgatcaaagttggccatggacagttcttgcagaccaataagggtagacaaagcaggagaaggaactccactacttccaccgctggcgacgaactgccgactgtttttccgagttaatggagcttcattttcttcctcctcatcttccacagtaacagcgcaagtcgcatcctcattggggtcagcaacaggtggagcacacccattgggatcaatgtcagcaaggccagttgcagtcatttcttcagcagcaggagctaaggtactgcgtcctcatcaaaactggatactcgccggaggcgtcttctcttcttcttttgctcatcagcagaaggctcgggctgactagttcggctagggcgcctcgggcgagcactaacaggtttcgggacatccaaagttgtatcaacctctggaaggggcaccactgccaatgtaccatcaggagcagcatcagatgaatcctcagctaacagatcaagcatgtcatttatgtctgcatcactagggttcaggggcacttcaaaataaacctgccgttcatcatcaggaatctccccgagcgaagcaaccaaagtacagacttcttcagcagagggtcgcactctaagacccaaattgctatcagtcatgggcggattggacacaaaaagggtgaaagctttgggaggaggtaggttccaagccgagtatgccactggagcaccaacatttgaaactttacccctgaggatcatttcaagacggcttaccaagtcaacagaaggaattctcctattggtaacccgagttgagtcggccagccctcgatacagatatgccggataggccctgtctttcagtggctgaatgttcttgaaaacaaaatcagtgaccacagcttcggcagtcagacctctctctttcagtaatccgacttcagtaagcaacacacctgccttggccacttcctgatctgtgggagactcagtccaactcggagtacgaacgtctggctgtcttcctgaccgggaagggagagaatttccataattatcaactataaaccactccagacgccaacctttaatgctatctttgaggggaatctcaagatactcggtcttccgcccacggcgcatctccaaactggcacctccgaccagctgatgttgccccccagccattccaggacggcaatgatacagatacttccataaaccgaaatgcggcagcacaccgaggtaggcttcgcataggtgaacgaaaatggagatttggagaatggaattagggttcaaatgagtcaagttgatatgataaaaatcaaggaggccacagaaaaaaggagagatgggaaggccgaggccgcggagaaggaaaggagcgtaaactactgactcgtgggtatcttcggttgggtcagtagtcccgtggcaaatccgccaagaatagagttcccgcggaggaagaaccccgatggagacaagacggagaagctcagcttcggaaataacagacatatggttacctgcgaagggtaactgactgttggggtcgattgcggggatcactgcagcagacgagttcacagttttcctcttgggcgccatcttgcttctcactggcgaacagagtaggaggcgagtggcagagaagattcagatgcggaaatgcaagaactagggcacggaaagcaaaggcggctaaaagcgcaactcttatgggatattcttgagccagataccgcttcaaaaagtgcccagtcatcacccggcggttatttccgaaacctcagcatgccacgtggacatctggctgttatttccgaaaaagccgacgctaaccttcaatcactcggcgtggcctctaacacgccgatctcgtgttcaatcgctcgacattacttctaaaacgccgacgccgacctccaatcactcggcgttgcctccaaaacgctgaacttgcattctatcgctcggcattacttctaaaatgccgacgccgaccttcagtcactcggcgttgcctctaaaacgctgatcctgtgttctatcgctcgacattacttctaaaacgccgacgctaaccttcaatcacttggcgtggcctctaacacgccgatctcgtgttcaatcgctcgacgttacttctaaaacgccgacgccgacctccaatcactcggcgttgcctccaaaacgctgaacttgtattctattgctcggcattacttctaaaatgccgacgccgaccttcagtcactcggcgtggcctttaaaacgccgatcgcgtgtttgatcgctcggcgtcacttctaaaatgccgatgtcgaccttcactgactcggcgctgcctctaaaacgatggtttcgtgttcgattgctcggtgttactcctaaaacgctgatgtcaaccttcaatcgctcggcgttgcttctaaaacgccgatgccgactacaatattactcagcagctacttctggaagcgtcaacgtgatgcgcaagttattcatctactatatcaaaaaaaaccagttcaacaatcagagaaagtgaatcatcgagatggggccaacgacagttcttcattaaggggaagttaataagtttacaaaccaactcttcgcgagttggtgcttccctacttctactctacattactactactactaaactacactatactactctacattactactacattattctaactacgctatactaatatctaaaaaccagtggcgtttagccactggccttgctgctgctgcccctgccaccgccgcccctggtgctgcccttgctactgccgcctctggtgctgcccgtactgccgccgcctctggtgctgcccttgctgctgctgcccctgccaccgccgcccctggtgctgcccttgctactgccgcctctggtgctgcccgtactgccgccgcctctggtgctgcccttgccgccgctgcccccgccgccgttgctgccgtcaccgtcgccgttgccaccgtcgtcgtcgtcgtcgccgtcgtcgtcgtcgtcatcttcgtcctcgccgccgtccgagtcctcctcgtccgaggagaactcagactcatccgagccctcgagcccggagcgctcgacggcccggatgtacgtccagacctccgcggcaatcccctgggagtcgtctaaatcatcagacgacgccgggggagagacgggagccggagatccctcggactcggaggagaactcctcctccgagtattccgagtcaccgaaatcatccgacggaggagtcggctcgcgcttgcgcttggtacccttgcccatggtggaagcagacagaagggaggagaagaaggcagtaaagaacagcgaagagatgtgaaaaaaccagagaagcaaaggcgttatttatagaagggaaaggcaaccgctcacttccaaccgcggtcactgaacagtcacaaagcattcaataagcactcccacccatctgaagacacgtcagacgacggacgccgtttcatgcagcaccacacccattgggactccagtcaacagcacaaaggatatgattacacaagccgtcccatcacattactactcagaagcagccggctaaaacactcagcgtaccaagccgtcccttgcccacacccattgggggggggacgcccaggaattatcagtatatttttcaaaacggtcacatccgtgcagggcacgcagtaaaatacttcaagacaaaaatgagatatcagtaaggatcagaggaaagccaaatatagccagcaaagtacaagagacggccgacagaagcgatgtgaggactagacagagaacgtccatcaaacgtccaatcaagtcgcagaagcaaataaattgcattacctagcaagatatggatggattgcaaactcggctgctagagacaaaatatatgctgacctcggcagcaaaatccggatgacataatgctgacctccaaagcataatgcgaatagcttcacgccaacttttacaagcaaaaggaagaccttcgaacggattatccttaaaaaatccatttgaaggtcgggggctacacccattgggtgcacctttggtgcaccccatggattatcattctaaaccgatatagtgccgacttctaaggcgtgggacaagattgaaaagaccaatcctcaaccgagatgcaggagcgcgaatggagataatctttggggaagaccttcgagtagattatcttctaaaatctactcaaaggtcggggtctacacccattgggtgcacctccggtgcacccaatgaagtccagaatcctacaattcaaaatgccgacctctaaggcacaagcacaaaactaaactttggtcgaacgagtgatcagagcaagagaagacagcaggaagtcattttttggaccttggatctttgagttgattacctctaaatcaacccaaagatcgggggcttgtgggggatagatatcccctgggtccactaaagaagtaaaagacctcacgaaaggcccaagggcccaataattcgtaaggtcattctttcgtgggcctggggaaagacaaccaacaaagaagagaagacatgagactggattggtgcaaacccggacggcccacaacgtcgaacgaatgaatcgcaacagagacccgactttcccgcgctgaagcccccatgcaacggagccatgcgaggataagtcggcgagggttacgtagggataaactcaagaggttcactatcttttagctacttgttgttatcatatccacgtgtactgccccacggtcgagtatataaggcctagggggcaccccttcagaacgatcgaccctactttacttagccacccacgtaaactctctgtgccttcaacccagagagtcctcttgtaaccacactcgaacactcatcaggacgtagggtgttacgcatctctaagcggcccgaacctgcaaatcttgtccattgtccctcgtgcgatcggcacggaccattttgctacagtcgtcgacaccgtcctactcctaaaaacaccttgaggggcaaccccgggtgtgcggtcggacccaaaacaccgacaccttgagagtcttttctttagtcgggtaagacttgctgagtaattccatactcagggtttatccctttgttgtttttaggtgaggaagcgacaaatttttgttgcttttgctccaaggtggtatcaaatgaagaaaaacaagagtgaagatgcgggaggacgtggtcctccatataggactttttgtttaaagctatcgggaggagtttttgcctcccttgatatgtgtactactcagcactcgtttatagctctggtctgtaataagtaacttgatcttactttctaaataaatgtaagttaatgtaatagcttccgcatttctttatctccaatgttctgtaatgtctacaagacgggtgaaacgttcctggtaaggtaaggaaagataccgaacttgtcaagtgacttaggaacatctacagggtgtctgatgtctgttagacaaggacaactgtaggtgggcctaattacttgggaggttccgtcacactgctgcaccggacactgtccggtggcacaccggacagcccggtgcaccagaccagggtgcctttgggttgtcctttgctctctttgtttgaaccctttcttggtctttttattggctttgttgtgaacctttggcacctgtaaaacttatagactagagcaaactagttagtccaattatttgtgttgggcaattcaaccaccaaaatcaattaggaaaaaggtgtaagcctaattccctttcaatctccccccttttggtgattgatgacaacacaaaccaaagcaagtatagaagtgcataattgaactagtttgcataatttaagtgcaaaggttacttagaattgagccaataaatattttcttagaatatgcatggattgtttctttatatttaacattttggaccacgtttgaaccacatgttttgtttttgcaaatccttttgtaaatttatttcaaagtctttttgcaaatagtcaaaggtgaataaataagattttgagaagcattatcaagatttgaaatttactccccctgtttcaaatgcttttcctttgactaaataaaactccccttcaataaaattctcctcttagtgttcaagagggttttaagatactaattttgaaaatactactttctcccccttttgaacacaataagataccaattttgaaaatcttaaaattaggtggtggtgctgtccttttgctttgggctaatactttctccccctttggcatgaatcgccaaaaacggatacttgagtgaaatataagccctttcagactactttctccccctttggcgaacataatatgagtgaagattataccaaagttggagagttgctcggagcgacgacgaaggatgagtgatggagtggagtggaagcctttgtctttgccgaagactccaattccctttcaatacacctatgacttggtttgaaattcacttgaaaacacattagtcatagtatataaaagagatattatcaaaggtatattcatgagctatgtgtgcaagatatcaaaagaaattccgagaatcaagaatatttagctcatgcctaagtttgttaaaagtttgttcatctagtggcttggtaaagatatcagctaattgttccttggtgttaatgtaagcaatctcgatatcccctttttgttggtgatcccttagaaaatgataccgaatggctatgtgtttagtgcggctatgctcaacgggattatccgccatgcggattgcactctcattatcacatagaagaggcactttggttaatttgtaaccatagtccctaagggtttgcctcatccaaagcaattgcgcgtaacaatggcctgcggcaatgtactcggcttcggcggtagaaagagctacggaattttgcttctttgaagcccaagacaccaaggatcttcccatgaactggcaagtccccgatgtgctctttctattaattttacaccccgcccaatctgcatccgaataaccaattaaatcaaatgtggatccccgagggtaccaaagcccaaacttaggagtatgaactaagtatctcaagattcgttttacggccgtaaggtgagcttccttagggtcggcttggaatcttgcacacatgcatacagaaagaattatgtccggtcgagatgcacataaatagagtaaagagcctatcatcgaccggtataccttttgatcgacggatttacctcctgtgtcgaggtcgagatgcccattggttaccatgggtgtcttgatgggcttggcatcctttcattccaaacttgttgagaatgtcttgaatatacttcgtttggctaatgaaggtgccctcttggagttgcttcacttgaaatcccaagaagtacttcaactcccccatcatcgacatctcgaatttctgtgtcatgatcctactaaattcctcacatgtagattcgttagtagacccaaatataatatcatcaacataaatttggtatacaaacaaatcattgtcaagagttttagtaaataaagtaggatcggcctttccgactttgaagccattagtgataagaaaatctcttaggcattcataccatgctcttggggattgcttgagcccataaagcgccttacagagtttatacacatgattaggatactcactatcttcaaagccgggaggttgctcaacatagacctcttccttgattggtccgttgaggaaggcacttttcacgtccatttgataaagcttaaagccatggtaagtagcataggcaagtaatatgcaaattgactcaagcctagctacgggtgcataggttttcaccgaaatccaacctttcgacttgtgaatatcccttggccacaagtcgggccttgttccttgtcaccacaccatgctcatcttgcttgttgcggaagacccacttggttcctacaacattttgattaggacgtggaactaaatgccatacctcattcctagtgaagttgttgagctcctcttgcatcgccaccacccaatccgaatcttgaagtgcttcctctaccctgtgtggctcaatagaggaaacaaaagagtaatgctcacaaaaatgtgcaacacgagatctagtggttacccccttgtgaatgtcgtcgaggatggtgtcgacggggtgatctcgttggattgcttggtggactcttgggtgtggcggccttggaacttgttcatcttcctcatcttgatcatgggcatctcccccttgatcattgctctcctcttgaggtggctcaacttcttgattttcttcttcatcattttgagcctcatcctcatcttgagttggtggagatgcttgtgtggaggaagatggttgatcttgtgcatgtggtggcactttggattccttgggacacacatccccaatggacatgttccttagtgcgacgcacggagcctcttcatcacctatctcatcaagatcaacttgctctacttgagagctgttagtctcatcaaacacaatgtcacaagagacttcgactaatccagaggacttgttaaagactctatatgcccttgtgtttgaatcataacctagtaaaaagccttctacagacttaggagcaaatttggatattctacctcttttaacaagaataaaacatttgctaccaaagactctaaaatatgaaacattgggctttttaccggttaggagttcgtatgatatattcttgaggattcggtgtagatataatcggttgatggcgtagcaggcggtgttaaccgcctcagcccaaaaccgatccgaagtcttgtactcatcaagcatggttcttgccatgtccaacagagtttgattcttcctctccactacaccattttgttgtggagtgtagggagaagagaactcatgcttgatgccctcctcctcaaggaagccttcaatttgagagttcttgaactccgtcccattgtcgcttcttattttcttgatccttaagccgaactcgttttgagcccgtctcaagaatccctttaaggtctcttgggtatgagatttttcctgcaaaaagaacacccaagtgaagtgagaatagtcatccacaataactagacagtacttactcccgtcgatgcttatgtaagcaattgggccgaataggtccatgtgtaggagctcgagtggcctgtcagtcgtcataatgttcttatgtggatgatgaacaccaacttgcttccctgcctgacatgcactgcaaatcatgtctttctcaaaatgaacatttgttagtcccaaaatgtgttctccctttagaagcttgtgaagattcttcatcccaacatgtgctagtcggcgatgccagagccaacccatgttagtcttagcaattaagcaagtgtcgagttcagctctatcaaaatctactaagtatagctgaccctccaacactcccttaaatgctattgaatcatcacttcttctaaagacagtgacacctacatccgtaaaaagacagttgtagcccattttacacaattgtgaaacagaaagcaagttgtaatataaagaatctacaagaaaaacattggaaatggagtggtcaggtgatatagctattttacccaatcctttgaccaaaccttgatttccatccccgaatgtgaggatatagctcgttggggatcttggtttttctcgtatgaggagaacatcttcttctccccggtcatgtggtttgtgcacccgctatcaatgatccaacttgagccctcatatgcataaacctacaaaacaagtttagttcttgattttaggtacccaaatggttttgggtcctttgacattagatacaagaactttgggtacccaaacacaagtctttgatcccttgtgcttgcccccaacatatttggcaactatcttgccggatttgttagttaaaacatatgatgcatcaaaggttttaaatgaaattttagaatcatttgatgcagttggagttttcttcttaggcaattttgcacgggttaattgcctagaactagatgtctcacccttatacataaaagcatgattagggccagagtgagacttcctagaatgaattctccttattttgctctcgggataaccgacagggtataaaatgtaaccctcgttatcctgaggcatgggagccttgcccttaacaaaattagacaatcttctaggaggggcactaagtttgacattgtcccccttttggaagccaatgccatccttgatgccaaggcgtctcccactatagagcatgcttctagcaaatttaaatttttcattttctaagtcatgctcggcaattttagcatctaattttgctatatgatcattttgttgtttaattaaagccatatgatcatgaatagcatcaatgttgatatctctacatctagtgcaaatagtaacatgctcaatggtagatgtagagggtttgcaagaattaagttcaacaatcttagcacgtaaaatatcattcttatctctaagatcggataaggaagcattgcaaacatctaattctttagccttagcaactaatttttcattttcaatccataaggctagcaagagaatcattcaatttttcaatcttagcaagtaagttagcattatcattactaagattgggaattgaaagcatcacaaacatttgaatcaaccttagcaattaaactagcactctcatttctaaggttggtgataataccaaggcacgtgcttagctcactagatagtttttcacatttttctacttctagagcataagcattcttaaccttaacatgctttttattctccttaattaggaagtcctcttgggtgtccaagagatcatccttctcatgaatagcgctaattaattcattcaatttttctttttgttgcatgtttaggttggcaaaaagggtacgcaaattgtcctcctcatcactagcattatcttcatcactagaggatgcatatttagtggaggattttgatttcaccttcttctttttttgctgtcctttgccatgaggcatttgtggccgacgttggggaagaggaggcccttggtgacggcgatgttggcggcgtcctcgtcgtcggaggagtcggaggagctctctttggagtcccactcacggcacacatgggcatcgccgcccctcttcttgtggtacctcttcttttctctcctcttgcccttcttgtcgtcgcccctgtcactatcactagataatggacatttagcaatgaaatgaccgggcttaccacacttgtagcaaactttcttggagcggggcttgtaatccttccccctcctttgcctgaggatttggcggaagctcttgatgatgagcgccatctcctcattgtcgagcttggaggcatcgatgggttgtctacttgatgtagactcctctttcttctcctccgtcgccttgaatgcaaccggttgtgcttcgggcatggaggggccatctagctcgatgatcttctttgaccctttgatcatcaactcaaagctcacaaaattacctattacttcctcgggagacattagtgtatatctaggattaccacgaattaattgaacttgtgtagggttaaggaaaacaagtgatctaagaataaccttaaccatctcatggtcatcccatttcttactcccgaggttgcgtacttggttcaccaaggtcttgagccggttgtacatttcttgtggctcttcaccttggcgaagccagaagcgaccgagctccccctcgatcgtctcccgcttggtgattttggtcacctcgtctcctttgtgcgcggtcttgagcacgtcccaaatctccttggcgctcttcaatccttgcaccttgttatactcctctcgacttagagaggtgaggagtatagtggtggcttggaagttgaagtgcacgatttgggccacttcgtcctcatcataatcttcatcccctacggatggtacctgcacaacaaactcaacaacatcccatatacttttgtggagtgaggttaggtgatatcgcatcatatcactccacctagcataatcttcaccatcaaatgttggtggtttgcccaatgggacggaaagtaatggcgtatgtttagaaatgcgaggatagcgtagggggatcttactaaacttcttgcgctcatggcgcttagaagttacggacggcgtgtcggagccagaggtggatggcgatgaggagtcggtctcgtagtagaccaccttcctcatcttcttctttttgtcaccactccgacgtgacttgtgtgaaggggattccttttccttccccttgttgcgggattctcccgatggagctttcccgtggcttgtagcgggcttctcgccggtcaccatctccttcttggcgtgatctcccgacatcacttcgagcggttaggctctaatgaagcaccgactctgataccaattgaatgtcgcctagagggggggggggtgaatagggcgaatctgaaatttataaacttaagcacaactacaagtcgggttagcgttagaaatagaaacgagtccgagagagaggacgcaaaacaaatcgtgagcaaataaagagcgagacacgatgatttgttttaccgaggttcggttcttgcgaacctactccccgttgaggtggtcacaaagaccgggtctctttcaaccctttccctgtctcaaacggtcacttagaccgagtgagcttctcttctcaatcaaacggaacacaaagttcccgcaaggaccaccacacaattggtgtctcttgcctcagttacaattgagttgatcacgaaagaatgagaaacaaaagaagcaatccaagcgcaagagctcaaatgaacacaacaaatctctctctctaatcactaaagctttgtgtggagttgggagaggatttgatctctttggtgtgtcttgtattgaatgctatagctcttgtaaggtgtagaagtgtagaaacttggatgccattgaatgtggggtggttggggtatttatagctccaaccaccaaaaatggccgttggaagtgtgctgtcgcatggcgcaccggacagtccggtgcgccgccggacactgtccgatgcgccagccatgtcagcagaccgttggggttcgaccgttggagctctgacttgtggggcctccgggctgtccggtggtgcaccggacaggtcctgtagactgtccggtgcgccaactgcgcgtgctctgtcctctgcgcgcgcaggcgcgcattaaatgcgttgcagtcgaccgttgcgcgcgaggtagccgttgctcagctggcacaccggacagtccggtgtggcaccggacactgtccggtgactcaccggacagtccggtgaattatagcggagcgccctctgaatttcccgaaggtagctagttcagcttcaggtgccctggtgcaccggacactgtccggtggtgcatcggacagtctggtgcgccagaccagggtgcctttgggttgtcctttgctctctttgtttgaaccctttcttggtctttttattggctttgttgtgaacctttggcacctgtaaaacttatagactagagcaaactagttagtccaattatttgtgttgggcaattcaaccaccaaaatcaattaggaaaaaggtgtaagcctaattccctttcatccacaactcgggacatatcatcagagtggggctgaagcagcccgatatacgcaacgaagcaaatcaacggtccaacagccacaagcaaggttgggaacaggcgtaactcttacccaatcagcgatgtccttctctgaaaaacaacaaataagcaagggtgagtactaacgtactcagcagcccaccttcacccgcggaatggggaaatcagatataatgcatggaatatgtggagcttaggatattttgcagaaatagcaatatttgatgtagggtcgttttgtaaaacattttgtatttttcaaagcacatcctctcccaaaggagcaggaagtttttcaatatagaacaaaatcccctggactaaaccatccaggtatctcagcagtttcccactggttttcattttcaaaaatagctactggacttcccgtccaccatagctcacggctcaatcgccggaccttttaaaaccacttttcaaaagcatttttggaaaacaaaaacactaattgtcataccacaccagactcgtccattccagtggacacagactattcgaataggtttgaactctgcgcagaggggtacactttacccactatccggctctgcggtctcatggccaataagacccgaatccgaatctctttctttcctcgcacgtcctgaccttaacggttataccggaaggagtcaggccaccgccatgtccaaaccggacaaaacattccctctccttatcctcccagtgctccccagccatcgtaactctagggtttggaccgtacgagttcagattgagtgactgcccatacagtctcgagtggttgtactattcatcatcgaactattcatcgttactattcgtcgacactattcactatcgttactattcaccaacactattcatcatcgttactattcaccgatgatatctataataactttttgttgtcactattcatcattactattcatctatcatccgatcaccccaaatttcaactactcatccatcatgctgtctagtccacctaagaccagccagacccatattccagtcatacgaactctggtgactgtgattttccttccagtagggaacttcccatccagtcacccatcctaggtttctccaagttgagcatgcttaactttgagattccttcgaaccaggcttccaaacgcatattccaataattctcatttctaaattcttatcaaactattccctatctaaccatgtcatccgttaagcatggttcatattccagaaaactcctaaaatactcttctcccatattctgcctgtaatctccctgttcagactaagtcagtcgattcattcatcactattctcactaatagtgaacttcactgtgctacaccacatacacccagctataaatacagccagctaccctctccctctccacacacactcaacaccctcagccaaggaaaacaccccacccactcagttactccgctctaccggctacacgcatagtgtcgcttcgcctccagtccaccctcctggtaagcacctccgctccaccactagtagtatctcaacaccacatgtcacagattctactcaagactctacacatccatgtatcgctattctgaccactatactaaatatctgttgatatacttgcaggtttgtatgtttgcctattcatgttgcatagttatcgaagcgttcgtgccgtcttgtggaggccagatctgcaagtctatgccaggcagtggagccagaagctagttccgtgagctctccctccctttcgccggataagcacggcaagctcactggatccctttgatgcataaattacctatgatttttcaaccacaaccctcaacctgttattttatgcatgatataattttgagacaagttattatggccacccatctacttgccgcaatcaatccttgatatatttgttacaaacgatttgagaaaaggtgtgagttttcaaaagaaaatgcttttcaaaatgtgtatgatgaagggttttcacccttatcaccttgtgagtgggatgattagggactccctagtttaggggagggcctaaggtgatggctcagctggtttaggcatgagcagaaggattgtcccctcatataaggaccggtttgtcatccttcactacctatactcatgacaagtacaaccactcaagactgtactgttagaaatatgccctagagataatcatagagatgagcatatttttttgtatccatgatatatatattgcttaattgaatatccatggaaggcaccttgtattgattagcaattatgtgaattgtttgtgagattcttt

SEQ ID NO: 55580 - DNA, 915 bp, Zea Mays
ccctcatctacacatttgcatctatttaagtttgaaaaaaaagaccaagaataaaagattttctgctccacaaccagccagcgttccattgttctttttctgtctcaccccaaggccccaagtgataagaacactccatctctactatgtaaaacatgtcgttccgagtcacccttccccccgcataaagtaaaattgtgcatcactggttaaagctgttcaactagcatatcatcagctactatctcactggttggagaagcatcacaactagcatatcatcaaggttttcaactcctcatcagctgcattggccttctcctccgtgaggtgtgcgatgttgtcctctacatgggcggacccacgttaggctgagtgggaagcacgggcctcacttaattttctggttcttgcgaagtttgtattattcactgtagctgtaaaggtccattaataattatgcttctatttaagcccccactcaaacttttggctgggtccgttcctggtcctctacctgggcatcattgacatattgcaatagtacaatatgacaaagaaaatcgatcgtgaattccatgcaatatgactcggactcgatctcggttgtggacccccagttctactcggagcgtttcttgaagttcattcgggccgtcttccctaagaattcatagctcatcaaccaatacttgcttcaaagatgcccacctgctgccgttttgttactgacgttggccaagcacgcgaaacctcatccacacgacagttcatgtcttcaaaactaaagaataatgatatgtatcaggggacagatatgtataagatgttgaatgtgtgccagacaagcagcaagtcaagaatgcagattctatcaagacaagaatagtcgcaaaacaactacacagcctggag

SEQ ID NO: 55581 - DNA, 1550 bp, Zea Mays
cctgctccactcctctggtcgtggatgcagaggtcctccactcgaagcccccggccattgcaggtaggtagctacaaaggactaagcggacggaaaggcggcagcaccttgaggcttgagcgaagcccaagcccgaacctcctttgatcaacagcgggatggagctaaagatggcagtgaagtgacggaaagagcgctgcaaggaaagaatggaagagagcaggaggtaaagagagagagagagagagggtagcttgaggacggttgagctgaggcgagctgcgcggttcaagggagccggaacgggaaatcgcagcgatctctttccacattccagtttgaagtctggtctgtggcggctaccgttgtgctttggcgttccttttgcgacagtttttgccctggtgcaggctggtgcttggtgcccttttggttaataaactgcgctgcaacgaaatgtggtatattacttcagttgaagaccggggcttatatgtcccttgaactctaccgagagagagagagatgcagtcacgcagagggttgacatgcacgcagcacacacaggcagaggacatctccgtgcgcggcagaagcacaggtgcacaactgtggttcccaccctctcctttattaatactagactagtagtttttttttctggcatggcattggccattgcagcatccatgccatgtagtgggtacggtacgagtacgaccgaccccctcactgctgtacgaggcgtttctgaaacgttggatttcatctcagtatatgtcgaagttgcaaacaaagccccgagaaaatcggcccttcttggcgagcatctgacagtactctgcctaccttaattagcggaagatgaggcacaaatggtatcccgattcatggtaccctcgacatgactctgggcatttggcaagctacggagcagtaacaggatagcaggtgttgcaaccagacgcttagctaggattctcttctgggacagctaatgatgggtgaacagtactgtggtacgaggtactctccatttacttcccgttcatggtccatcaatgtgtaccaatagcgatcgacgcgtgagcgtgaccgtggccgtgtgcgtcgccaaaaaaaaggactgacggcgaccaaactgagcagtagccactggattctggtaaagcacacatgttttactggagcaattaattgtgctgccgtatcgaattgtaagatgctccgatcgacacctgctaacatcagtgtcctgaatcttcgctactgttttggtgaaggaagaaaaagaaaaagaaaagatgatgcatgatgtgatttacccaaattttatagatagttacattttgggggacggatggagcatatggtaaagacatagacaggcagtagtatctagctgttgatctgttgtcaacaaggtacctaaaaaatgtgagggattcacggctgggctgtgagtgggcccggcccggacatgtgaagcatggccagccaccagcctagtctcctaggtgaaacaacgtatcactgacactgactctgac

SEQ ID NO: 55582 - DNA, 1582 bp, Zea Mays
cacagaccgacagacggctacggcgaggacgttccggtaaggaagaaagaacaaatcctgtgatatggatggcatgcagcgataaactacaagaagctccagaagaaggccagcaggaggatgaaaactgcggcgcatatgttatgcgtagatctgctcgaggtaccacaattctctggagggaatgcgcaagaagagctgcatacctgctccactcctctggtcgtggatgcagaggtcctccactcgaagcccccggccattgcaggtaggtagctacaaaggactaagcggacggaaaggcggcagcaccttgaggcttgagcgaagcccaagcccgaacctcctttgatcaacagcgggatggagctaaagatggcagtgaagtgacggaaagagcgctgcaaggaaagaatggaagagagcaggaggtaaagagagagagagagagagggtagcttgaggacggttgagctgaggcgagctgcgcggttcaagggagccggaacgggaaatcgcagcgatctctttccacattccagtttgaagtctggtctgtggcggctaccgttgtgctttggcgttccttttgcgacagtttttgccctggtgcaggctggtgcttggtgcccttttggttaataaactgcgctgcaacgaaatgtggtatattacttcagttgaagaccggggcttatatgtcccttgaactctaccgagagagagagagatgcagtcacgcagagggttgacatgcacgcagcacacacaggcagaggacatctccgtgcgcggcagaagcacagtatatgtcgaagttgcaaacaaagccccgagaaaatcggcccttcttggcgagcatctgacagtactctgcctaccttaattagcggaagatgaggcacaaatggtatcccgattcatggtaccctcgacatgactctgggcatttggcaagctacggagcagtaacaggatagcaggtgttgcaaccagacgcttagctaggattctcttctgggacagctaatgatgggtgaacagtactgtggtacgaggtactctccatttacttcccgttcatggtccatcaatgtgtaccaatagcgatcgacgcgtgagcgtgaccgtggccgtgtgcgtcgccaaaaaaaaggactgacggcgaccaaactgagcagtagccactggattctggtaaagcacacatgttttactggagcaattaattgtgctgccgtatcgaattgtaagatgctccgatcgacacctgctaacatcagtgtcctgaatcttcgctactgttttggtgaaggaagaaaaagaaaaagaaaagatgatgcatgatgtgatttacccaaattttatagatagttacattttgggggacggatggagcatatggtaaagacatagacaggcagtagtatctagctgttgatctgttgtcaacaaggtacctaaaaaatgtgagggattcacggctgggctgtgagtgggcccggcccggacatgtgaagcatggccagccaccagcctagtctcctaggtgaaacaacgtatcactgacactgactctgac

SEQ ID NO: 55583 - DNA, 1693 bp, Zea Mays
cacgcgcctcgggaggaggcgtcaccggtcgcgccaagggaagcaggcttcacaggggcagggagcgggggtgcacagaccgacagacggctacggcgaggacgttccgggtatttattggctccccctggggaaggagatgtgcaggtaaggaagaaagaacaaatcctgtgatatggatggcatgcagcgataaactacaagaagctccagaagaaggccagcaggaggatgaaaactgcggcgcatatgttatgcgtagatctgctcgaggtaccacaattctctggagggaatgcgcaagaagagctgcatacctgctccactcctctggtcgtggatgcagaggtcctccactcgaagcccccggccattgcaggtaggtagctacaaaggactaagcggacggaaaggcggcagcaccttgaggcttgagcgaagcccaagcccgaacctcctttgatcaacagcgggatggagctaaagatggcagtgaagtgacggaaagagcgctgcaaggaaagaatggaagagagcaggaggtaaagagagagagagagagagggtagcttgaggacggttgagctgaggcgagctgcgcggttcaagggagccggaacgggaaatcgcagcgatctctttccacattccagtttgaagtctggtctgtggcggctaccgttgtgctttggcgttccttttgcgacagtttttgccctggtgcaggctggtgcttggtgcccttttggttaataaactgcgctgcaacgaaatgtggtatattacttcagttgaagaccggggcttatatgtcccttgaactctaccgagagagagagagatgcagtcacgcagagggttgacatgcacgcagcacacacaggcagaggacatctccgtgcgcggcagaagcacagtatatgtcgaagttgcaaacaaagccccgagaaaatcggcccttcttggcgagcatctgacagtactctgcctaccttaattagcggaagatgaggcacaaatggtatcccgattcatggtaccctcgacatgactctgggcatttggcaagctacggagcagtaacaggatagcaggtgttgcaaccagacgcttagctaggattctcttctgggacagctaatgatgggtgaacagtactgtggtacgaggtactctccatttacttcccgttcatggtccatcaatgtgtaccaatagcgatcgacgcgtgagcgtgaccgtggccgtgtgcgtcgccaaaaaaaaggactgacggcgaccaaactgagcagtagccactggattctggtaaagcacacatgttttactggagcaattaattgtgctgccgtatcgaattgtaagatgctccgatcgacacctgctaacatcagtgtcctgaatcttcgctactgttttggtgaaggaagaaaaagaaaaagaaaagatgatgcatgatgtgatttacccaaattttatagatagttacattttgggggacggatggagcatatggtaaagacatagacaggcagtagtatctagctgttgatctgttgtcaacaaggtacctaaaaaatgtgagggattcacggctgggctgtgagtgggcccggcccggacatgtgaagcatggccagccaccagcctagtctcctaggtgaaacaacgtatcactgacactgactctgac

SEQ ID NO: 55584 - DNA, 1072 bp, Zea Mays
attcaattcacttgcaataatgatgatgatgattttttggacttgctcaggaaaatggaacaatatctgaggatgttgttcggagtgcgttttctgccaccgaggaaggcttcttgacactcgtgcggagaacacgttttataaagcctttgattgctgcgggctgttattggcgttctaggtagatcaaacaagatcgtggctgagccactcacaagagatcataatgcaagtagggaggaggtcaggcaggagcttatatcccgtcatccagatgattctcaaattgtcgttctcaagcatggtgtttggcgcatcaagggcataattcaggtttcaagaacaattggagatgcttacttgaagaggcgggaatttgctcttgatccatctatcactcgtttccgcctttcggagcctctccgccagcctattctcacagcagagccatctatctatacaagggtgcttaacccacaagataaatttattatttttgcatctgatggtctttgggagcacttgacaaatcaacaggccgttgaaattgtccacagcaatccacgatcaggaattgcaaagaggctggtaagggcagcgttgaaacaagctgcacggaagagggaaatgaggtatgatgacctcaggaaagttgagaagggaattcgccgcttcttccacgatgacattacagtagttgttgtttacatagatcacggattactgcaagagagggatacttccgtgccagagctctcagtccgtggctttgttgactccgttggcccctcaagtttctcagggataaccgccatatcatgactcactactaatcgatcagcacaattttggtgtacggcattcaagtagcatgtgactatctgagtgttatgctttaccaggcgtttgcttttagtattgcctttatattgagtactactacaatacttcatgtcgctttgttttcaaaaatactttgtcaattttgcaagtctgatttgctcgaaataagaggctcatgctgttgtgcggtgcttaataatatgagtattgatggtgcaggaaatgcttt

SEQ ID NO: 55585 - DNA, 1243 bp, Zea Mays
cataattcaattcacttgcaataatgatgatgatgattttttgaacaatggacaacgcaatactctttccagtgactgagtggattctgatcattggacaagctatcagtatttgcggtcctttgcaatagcagattaggacttgctcaggaaaatggaacaatatctgaggatgttgttcggagtgcgttttctgccaccgaggaaggcttcttgacactcgtgcggagaacacgttttataaagcctttgattgctgcggttggatcctgctgtctagttggtgtcatatggagagggacactatatgtggctaatctaggcgattccagggctgttattggcgttctaggtagatcaaacaagatcgtggctgagccactcacaagagatcataatgcaagtagggaggaggtcaggcaggagcttatatcccgtcatccagatgattctcaaattgtcgttctcaagcatggtgtttggcgcatcaagggcataattcaggtttcaagaacaattggagatgcttacttgaagaggcgggaatttgctcttgatccatctatcactcgtttccgcctttcggagcctctccgccagcctattctcacagcagagccatctatctatacaagggtgcttaacccacaagataaatttattatttttgcatctgatggtctttgggagcacttgacaaatcaacaggccgttgaaattgtccacagcaatccacgatcaggaattgcaaagaggctggtaagggcagcgttgaaacaagctgcacggaagagggaaatgaggtatgatgacctcaggaaagttgagaagggaattcgccgcttcttccacgatgacattacagtagttgttgtttacatagatcacggattactgcaagagagggatacttccgtgccagagctctcagtccgtggctttgttgactccgttggcccctcaagtttctcagggataaccgccatatcatgactcactactaatcgatcagcacaattttggtgtacggcattcaagtagcatgtgactatctgagtgttatgctttaccaggcgtttgcttttagtattgcctttatattgagtactactacaatacttcatgtcgctttgttttcaaaaatactttgtcaattttgcaagtctgatttgctcgaaataagaggctcatgctgttgtgcggtgcttaataatatgagtattgatggtgcaggaaatgcttt

SEQ ID NO: 55586 - DNA, 1709 bp, Zea Mays
aaaattcacgctgagccgccgcctgttccacggttccacctctccaaaccaaaaactcctaggttttctaaacgtgaattccaatcactgcacacgcggttgtttcgcccttgcaggatgttgtgtttaattttataagcaaggacggggagatcggtcttcaaagtctattttcgtcatgttgcaggtgtgatttgccaggaagacggggcgaattcgtggtgctacctaaaagagaccccatctggtgcggttctggggttcgaggagcggcgaggcaggtgggaaatgagggatgtggtcgtggttgacgaagattgcgtccgcgtgcttgggcccggtccggaggtgcgcgcgtacgaggaaggatgaggacgacagcgataatggccgcggcgtcgccgacgacctgctgtggtcgcgggacctcgggcgccacgcggcgggtcagttctcgtttgccgtcgtgcaggccaacgaggcgttggaggaccacagccaagtggagacaggctctgccgcaactttcgtaggcgtctacgacggtcatggcggcgctgaggctgcccgcttcatatctgaccacctcttcgcacacctcattcgacttgctcaggaaaatggaacaatatctgaggatgttgttcggagtgcgttttctgccaccgaggaaggcttcttgacactcgtgcggagaacacgttttataaagcctttgattgctgcggttggatcctgctgtctagttggtgtcatatggagagggacactatatgtggctaatctaggcgattccagggctgttattggcgttctaggtagatcaaacaagatcgtggctgagccactcacaagagatcataatgcaagtagggaggaggtcaggcaggagcttatatcccgtcatccagatgattctcaaattgtcgttctcaagcatggtgtttggcgcatcaagggcataattcaggtttcaagaacaattggagatgcttacttgaagaggcgggaatttgctcttgatccatctatcactcgtttccgcctttcggagcctctccgccagcctattctcacagcagagccatctatctatacaagggtgcttaacccacaagataaatttattatttttgcatctgatggtctttgggagcacttgacaaatcaacaggccgttgaaattgtccacagcaatccacgatcaggaattgcaaagaggctggtaagggcagcgttgaaacaagctgcacggaagagggaaatgaggtatgatgacctcaggaaagttgagaagggaattcgccgcttcttccacgatgacattacagtagttgttgtttacatagatcacggattactgcaagagagggatacttccgtgccagagctctcagtccgtggctttgttgactccgttggcccctcaagtttctcagggataaccgccatatcatgactcactactaatcgatcagcacaattttggtgtacggcattcaagtagcatgtgactatctgagtgttatgctttaccaggcgtttgcttttagtattgcctttatattgagtactactacaatacttcatgtcgctttgttttcaaaaatactttgtcaattttgcaagtctgatttgctcgaaataagaggctcatgctgttgtgcggtgcttaataatatgagtattgatggtgcaggaaatgcttt

SEQ ID NO: 55587 - DNA, 1558 bp, Zea Mays
aaaattcacgctgagccgccgcctgttccacggttccacctctccaaaccaaaaactcctaggttttctaaacgtgaattccaatcactgcacacgcggttgtttcggtgtgatttgccaggaagacggggcgaattcgtggtgctacctaaaagagaccccatctggtgcggttctggggttcgaggagcggcgaggcaggtgggaaatgagggatgtggtcgtggttgacgaagattgcgtccgcgtgcttgggcccggtccggaggtgcgcgcgtacgaggaaggatgaggacgacagcgataatggccgcggcgtcgccgacgacctgctgtggtcgcgggacctcgggcgccacgcggcgggtcagttctcgtttgccgtcgtgcaggccaacgaggcgttggaggaccacagccaagtggagacaggctctgccgcaactttcgtaggcgtctacgacggtcatggcggcgctgaggctgcccgcttcatatctgaccacctcttcgcacacctcattcgacttgctcaggaaaatggaacaatatctgaggatgttgttcggagtgcgttttctgccaccgaggaaggcttcttgacactcgtgcggagaacacgttttataaagcctttgattgctgcgggctgttattggcgttctaggtagatcaaacaagatcgtggctgagccactcacaagagatcataatgcaagtagggaggaggtcaggcaggagcttatatcccgtcatccagatgattctcaaattgtcgttctcaagcatggtgtttggcgcatcaagggcataattcaggtttcaagaacaattggagatgcttacttgaagaggcgggaatttgctcttgatccatctatcactcgtttccgcctttcggagcctctccgccagcctattctcacagcagagccatctatctatacaagggtgcttaacccacaagataaatttattatttttgcatctgatggtctttgggagcacttgacaaatcaacaggccgttgaaattgtccacagcaatccacgatcaggaattgcaaagaggctggtaagggcagcgttgaaacaagctgcacggaagagggaaatgaggtatgatgacctcaggaaagttgagaagggaattcgccgcttcttccacgatgacattacagtagttgttgtttacatagatcacggattactgcaagagagggatacttccgtgccagagctctcagtccgtggctttgttgactccgttggcccctcaagtttctcagggataaccgccatatcatgactcactactaatcgatcagcacaattttggtgtacggcattcaagtagcatgtgactatctgagtgttatgctttaccaggcgtttgcttttagtattgcctttatattgagtactactacaatacttcatgtcgctttgttttcaaaaatactttgtcaattttgcaagtctgatttgctcgaaataagaggctcatgctgttgtgcggtgcttaataatatgagtattgatggtgcaggaaatgcttt

SEQ ID NO: 55588 - DNA, 1725 bp, Zea Mays
aaaattcacgctgagccgccgcctgttccacggttccacctctccaaaccaaaaactcctaggttttctaaacgtgaattccaatcactgcacacgcggttgtttcggtgtgatttgccaggaagacggggcgaattcgtggtgctacctaaaagagaccccatctggtgcggttctggggttcgaggagcggcgaggcaggtgggaaatgagggatgtggtcgtggttgacgaagattgcgtccgcgtgcttgggcccggtccggaggtgcgcgcgtacgaggaaggatgaggacgacagcgataatggccgcggcgtcgccgacgacctgctgtggtcgcgggacctcgggcgccacgcggcgggtcagttctcgtttgccgtcgtgcaggccaacgaggcgttggaggaccacagccaagtggagacaggctctgccgcaactttcgtaggcgtctacgacggtcatggcggcgctgaggctgcccgcttcatatctgaccacctcttcgcacacctcattcaacaatggacaacgcaatactctttccagtgactgagtggattctgatcattggacaagctatcagtatttgcggtcctttgcaatagcagattaggacttgctcaggaaaatggaacaatatctgaggatgttgttcggagtgcgttttctgccaccgaggaaggcttcttgacactcgtgcggagaacacgttttataaagcctttgattgctgcggttggatcctgctgtctagttggtgtcatatggagagggacactatatgtggctaatctaggcgattccagggctgttattggcgttctaggtagatcaaacaagatcgtggctgagccactcacaagagatcataatgcaagtagggaggaggtcaggcaggagcttatatcccgtcatccagatgattctcaaattgtcgttctcaagcatggtgtttggcgcatcaagggcataattcaggtttcaagaacaattggagatgcttacttgaagaggcgggaatttgctcttgatccatctatcactcgtttccgcctttcggagcctctccgccagcctattctcacagcagagccatctatctatacaagggtgcttaacccacaagataaatttattatttttgcatctgatggtctttgggagcacttgacaaatcaacaggccgttgaaattgtccacagcaatccacgatcaggaattgcaaagaggctggtaagggcagcgttgaaacaagctgcacggaagagggaaatgaggtatgatgacctcaggaaagttgagaagggaattcgccgcttcttccacgatgacattacagtagttgttgtttacatagatcacggattactgcaagagagggatacttccgtgccagagctctcagtccgtggctttgttgactccgttggcccctcaagtttctcagggataaccgccatatcatgactcactactaatcgatcagcacaattttggtgtacggcattcaagtagcatgtgactatctgagtgttatgctttaccaggcgtttgcttttagtattgcctttatattgagtactactacaatacttcatgtcgctttgttttcaaaaatactttgtcaattttgcaagtctgatttgctcgaaataagaggctcatgctgttgtgcggtgcttaataatatgagtattgatggtgcaggaaatgcttt

SEQ ID NO: 55589 - DNA, 1853 bp, Zea Mays
cgtaacaattgtcttgtagccctgttttatttgctgcactgcttttgctttacccccactgcgtgaagtgggctctgtgggatcaaatccggcgtactcccccaatgtgccaaataacaattggtttgcagtgatgttttcaggaggaataccaagctcacaaacaggctgtaagaagtgcaaaataacacaaataggctgtaagaagtactccctaaactcacaaataacacagttattaaacggaccaaaatattaaggaaatccaaaatgatcagaattccattccttctagggctgtaagaagtgcactcttgatgagttccaggaactcttcggaaccgaaaggcattaagagatggaaatcatcaagtcccgaactaattaatagcacatcacacaagatcaatgagctatcttgacatccaaaagaaaattttgttgtgcgtatgattatcattgaatggactagacttacatgcgagatccactacggccacataaacaggctgctcctgcacactgtctcctccactttctgactcatccacttcacttattcaacctacaggtcaaaattcatcccacatcacgttgcgagaaggtagctgtgtgtcatagtacctgggatctcgaggtcgacgaaagaggagttgaactcgggtcacacattgggacactggaattgtcgctcagcctcgtcgttacgtagttctctgatgctaccatgcaatgctcgaacagtaatatacacaccaggatcatcctcttctactcatccccgctcttggtcaattgtgttgttaacagaggctgaaagttgacctaatacaaagtagtaaactaagttatgaaagcagaaatataattgaggtaattatcatcctcttcaacccactcattcacatgtttactaccttttctaggtgaccaattcatggaaggagtcaacactcaacagaattgttaaactaacaggaggggcaactaaagcagtcaaagatcggctgttgagtgtggacagtactataacagagtaggtagacctgacggtgaaatattgtggccaattttgggcatttagggccttcctttactattttcctacagttggtgcatatatttagttatcagatatgtcgttgataccttcttgcggcctttcagagtcttctgtatcctagaactgatagttgatgtctgaaaatcgagcttcttaaaatagatgcccatcatattagttcatccttggcctcaatgcttgatgtttcttgttatcctctaccagaatttcttttatacttacacaaaacatattaggtacctttgatagttctacacccaatatgccttggtacatttcatactgatgatttgacttgccaattttatggatttgactcacttatctctaggcttaaactttctctattctggcattttctttagtttgtaggggttcaagtttaccatggatttattctaacctatgaccactgtagcagccttgacagtattaagcttttgcatatgaggggtttctgaaaacacacagacatatatcagttaggtacagaatcaacctgaagatgaataactaacactacaaataacatctcatcgtaaatgattaaataaacactgatccatacttcatcgcgtcttagctatagtactttcacatatgccactcaagaatttagtattggaaaaactattatgcttcataaactatttttgctttggttggaaatatgaactttaaattataacataatgcactcaagacgccaatcttgtagtcatacaatattttaccgctacccgatttattatgaccccttgcaacatac

SEQ ID NO: 55590 - DNA, 553 bp, Zea Mays
actcgatgcagaagccagatgttattgagatggggaaaagagcggcacgcatgaagcgcgggttgatacaagcagattttctgttacttatataaactgacattaattacatcataacacggtcacacatctctaaaaatttcttgcacacagacaatgacttcgacagctaaaaagaaaatgctgtgcccagacatgactgtgttggccgctgcatcggtccaggcagcattgtcatcgcgattagcctcaacccaagaaaggcaagagaatgcttccactgatgaccggtaatcaaatcatgtgtgtcggactatatgtacaagctgccacacccaggagtacatcattccaaggccacaatagaatgacaccattataagaggtaggaaggggagcctatcgccgaatacatgatggtgaaatacttgagaccataattctatgcctgcaattcccaaaagatagcttaaaccaatccatccaatgatgccattcttcttcactgtgctgcctgaccgacttattttctttccttccaggtcagactttg

SEQ ID NO: 55591 - DNA, 1742 bp, Zea Mays
atttactgcaggtagacatatgttggtatctacctttccgttgcaattaatctgtgctttttagccttttacaagatttacaaaatgtcgatgtatagttgacatttgttgaaaaagtatttttcctatagccttcttttatttgtctcatcatgtgaaaaaataaaataaaatcctcagacatcttccatagcttgaattttattggtggtaatgtaattcctcttacgcttatcaatgcaagacacagtttgatttttgtggctgtagattttctagcagccatgctcatccgagcgactgggcatgaactcgaaatggcacggaacagaagtttgaagtcacttgacctcacaaaggcagtaaaggatacagttaatgtaagcgctggagatgttgcttctctcatatatttgtggaacccttgggcaatagtcacttgtgtgggatcatgtacatcaccaatcgagaatctaatggttgtaataatgatctacggatcctgttcacgtctggctcctcttgctgcttttggatatgttatggccacacacctctctctttatcctgcaattctcatagtaccggtcattctgttgctgggttatggtctagatgctcctcctccaaaagtatttgttataaaagggtcaattgccagaaaaagtgatgtgtcagacaatgataaaacaagcagacagagagttgttcagcagttttcatggaaaccagtacttcactttatattttggctgttcatctggtcgtgccatgtgttgttattgagcagcgtgattttgaagaaagttggtggcctccacgagatgtttgaaaagacgtatggttttatacttacagtgaaagacctatcaccaaatattggtgttttgtggtacttctttgctgaagttttcgacttctttagaaatttctttcttatggtattcaatatgaacatcatttttatggtcttaccattggccatccgattgaaacatcgtccgtgctttcttgcatttgtttacacggcaattgtggcaatattgaaatcttatccatcggctggagattcagccctgtatcttggtcttctgggcttatttgtcaacgaattagcagaaatgcagttcacattcttcttgttttttggatatattggagtctccctacttagccctgtcatgcataatctgtggatctggaggggcactggtaatgcaaatttctacttcgccactggtttggcttatacttgccttcagactgtgttgctggtagagagtgtaagttcaatgataaagcacgacagaaagttaaggctacttgttacaagctaatttggtcctcataatcagaagctcaagtggtggacagctccgatgcttgcaattccctacatggtgctcttgattcttgaacacaaacagctcctcatcttggagttcgtagatgtaggtcatattcgatgtagcatgttgtactgtagaccccacacttgtacaatactaggaccgcaactctttcaacaaagacaaggaacacggtagggctcgtccttggtgactagtacgtagttgtgttcgctaccgagaattgttgtggatcctggctgtgatgttcagtgatccagcttggttgaactgccctcacgtacatttaattccgtcagtctgatggatcaacaaggaaaccaacatttgaacgtttaaccaaactgatatctaattttcgtttcttcgggc

SEQ ID NO: 55592 - DNA, 1853 bp, Zea Mays
cttgatcggtccaaattgaaaaaacagactccggccacagccgagacgagactagcagcagccgcttgctcagatcggcagcttcggcggcggcggagatggcgattcggtactggccgatggccggagcagccgttgggttccgcctcgtcctggttctcttcggcggggatctccaccttgcctctcgccctgaggtctccacccccctcacctcccttcgccgcctggcggaaggctactggctgaagcaagcgtccgtgtcaccgtactccggttctatgtatcacggttccccattgctcctgtctgttcttggtccattaactagtagcaggcctgacggacatcatgctcatatttactgcagattttctagcagccatgctcatccgagcgactgggcatgaactcgaaatggcacggaacagaagtttgaagtcacttgacctcacaaaggcagtaaaggatacagttaatgtaagcgctggagatgttgcttctctcatatatttgtggaacccttgggcaatagtcacttgtgtgggatcatgtacatcaccaatcgagaatctaatggttgtaataatgatctacggatcctgttcacgtctggctcctcttgctgcttttggatatgttatggccacacacctctctctttatcctgcaattctcatagtaccggtcattctgttgctgggttatggtctagatgctcctcctccaaaagtatttgttataaaagggtcaattgccagaaaaagtgatgtgtcagacaatgataaaacaagcagacagagagttgttcagcagttttcatggaaaccagtacttcactttatattttggctgttcatctggtcgtgccatgtgttgttattgagcagcgtgattttgaagaaagttggtggcctccacgagatgtttgaaaagacgtatggttttatacttacagtgaaagacctatcaccaaatattggtgttttgtgaatgactgcaggtacttctttgctgaagttttcgacttctttagaaatttctttcttatggtattcaatatgaacatcatttttatggtcttaccattggccatccgattgaaacatcgtccgtgctttcttgcatttgtttacacggcaattgtggcaatattgaaatcttatccatcggctggagattcagccctgtatcttggtcttctgggcttatttgtcaacgaattagcagaaatgcagttcacattcttcttgttttttggatatattggagtctccctacttagccctgtcatgcataatctgtggatctggaggggcactggtaatgcaaatttctacttcgccactggtttggcttatacttgccttcagactgtgttgctggtagagagtgtaagttcaatgataaagcacgacagaaagttaaggctacttgttacaagctaatttggtcctcataatcagaagctcaagtggtggacagctccgatgcttgcaattccctacatggtgctcttgattcttgaacacaaacagctcctcatcttggagttcgtagatgtaggtcatattcgatgtagcatgttgtactgtagaccccacacttgtacaatactaggaccgcaactctttcaacaaagacaaggaacacggtagggctcgtccttggtgactagtacgtagttgtgttcgctaccgagaattgttgtggatcctggctgtgatgttcagtgatccagcttggttgaactgccctcacgtacatttaattccgtcagtctgatggatcaacaaggaaaccaacatttgaacgtttaaccaaactgatatctaattttcgtttcttcgggc

SEQ ID NO: 55593 - DNA, 2050 bp, Zea Mays
cctgggtccagtccagccaagataatcttgatcggtccaaattgaaaaaacagactccggccacagccgagacgagactagcagcagccgcttgctcagatcggcagcttcggcggcggcggagatggcgattcggtactggccgatggccggagcagccgttgggttccgcctcgtcctggttctcttcggcggggatctccaccttgcctctcgccctgaggtctccacccccctcacctcccttcgccgcctggcggaaggctactggctgaagcaagcgtccgtgtcaccgtactccggttctatgtatcacggttccccattgctcctgtctgttcttggtccattaactagtagcaggcctgacggacatcatgctcatatttactgcaggtagacatatgttggtatctacctttccgttgcaattaatctgtgctttttagccttttacaagatttacaaaatgtcgatgtatagttgacatttgttgaaaaagtatttttcctatagccttcttttatttgtctcatcatgtgaaaaaataaaataaaatcctcagacatcttccatagcttgaattttattggtggtaatgtaattcctcttacgcttatcaatgcaagacacagtttgatttttgtggctgtagattttctagcagccatgctcatccgagcgactgggcatgaactcgaaatggcacggaacagaagtttgaagtcacttgacctcacaaaggcagtaaaggatacagttaatgtaagcgctggagatgttgcttctctcatatatttgtggaacccttgggcaatagtcacttgtgtgggatcatgtacatcaccaatcgagaatctaatggttgtaataatgatctacggatcctgttcacgtcattctgttgctgggttatggtctagatgctcctcctccaaaagtatttgttataaaagggtcaattgccagaaaaagtgatgtgtcagacaatgataaaacaagcagacagagagttgttcagcagttttcatggaaaccagtacttcactttatattttggctgttcatctggtcgtgccatgtgttgttattgagcagcgtgattttgaagaaagttggtggcctccacgagatgtttgaaaagacgtatggttttatacttacagtgaaagacctatcaccaaatattggtgttttgtggtacttctttgctgaagttttcgacttctttagaaatttctttcttatggtattcaatatgaacatcatttttatggtcttaccattggccatccgattgaaacatcgtccgtgctttcttgcatttgtttacacggcaattgtggcaatattgaaatcttatccatcggctggagattcagccctgtatcttggtcttctgggcttatttgtcaacgaattagcagaaatgcagttcacattcttcttgttttttggatatattggagtctccctacttagccctgtcatgcataatctgtggatctggaggggcactggtaatgcaaatttctacttcgccactggtttggcttatacttgccttcagactgtgttgctggtagagagtgtaagttcaatgataaagcacgacagaaagttaaggctacttgttacaagctaatttggtcctcataatcagaagctcaagtggtggacagctccgatgcttgcaattccctacatggtgctcttgattcttgaacacaaacagctcctcatcttggagttcgtagatgtaggtcatattcgatgtagcatgttgtactgtagaccccacacttgtacaatactaggaccgcaactctttcaacaaagacaaggaacacggtagggctcgtccttggtgactagtacgtagttgtgttcgctaccgagaattgttgtggatcctggctgtgatgttcagtgatccagcttggttgaactgccctcacgtacatttaattccgtcagtctgatggatcaacaaggaaaccaacatttgaacgtttaaccaaactgatatctaattttcgtttcttcgggc

SEQ ID NO: 55594 - DNA, 1743 bp, Zea Mays
gccgatgacgatgcctgggtccagtccagccaagataatcttgatcggtccaaattgaaaaaacagactccggccacagccgagacgagactagcagcagccgcttgctcagatcggcagcttcggcggcggcggagatggcgattcggtactggccgatggccggagcagccgttgggttccgcctcgtcctggttctcttcggcggggatctccaccttgcctctcgccctgaggtctccacccccctcacctcccttcgccgcctggcggaaggctactggctgaagcaagcgtccgtgtcaccgtactccggttctatgtatcacggttccccattgctcctgtctgttcttggtccattaactagtagcaggcctgacggacatcatgctcatatttactgcagtttgatttttgtggctgtagattttctagcagccatgctcatccgagcgactgggcatgaactcgaaatggcacggaacagaagtttgaagtcacttgacctcacaaaggcagtaaaggatacagttaatgtaagcgctggagatgttgcttctctcatatatttgtggaacccttgggcaatagtcacttgtgtgggatcatgtacatcaccaatcgagaatctaatggttgtaataatgatctacggatcctgttcacgtctggctcctcttgctgcttttggatatgttatggccacacacctctctctttatcctgcaattctcatagtaccggtcattctgttgctgggttatggtctagatgctcctcctccaaaagtatttgttataaaagggtcaattgccagaaaaagtgatgtgtcagacaatgataaaacaagcagacagagagttgttcagcagttttcatggaaaccagtacttcactttatattttggctgttcatctggtcgtgccatgtgttgttattgagcagcgtgattttgaagaaagttggtggcctccacgagatgtttgaaaagacgtatggttttatacttacagtgaaagacctatcaccaaatattggtgttttgtggtacttctttgctgaagttttcgacttctttagaaatttctttcttatggtattcaatatgaacatcatttttatggtcttaccattggccatccgattgaaacatcgtccgtgctttcttgcatttgtttacacggcaattgtggcaatattgaaatcttatccatcggctggagattcagccctgtatcttggtcttctgggcttatttgtcaacgaattagcagggcactggtaatgcaaatttctacttcgccactggtttggcttatacttgccttcagactgtgttgctggtagagagtaagctcaagtggtggacagctccgatgcttgcaattccctacatggtgctcttgattcttgaacacaaacagctcctcatcttggagttcgtagatgtaggtcatattcgatgtagcatgttgtactgtagaccccacacttgtacaatactaggaccgcaactctttcaacaaagacaaggaacacggtagggctcgtccttggtgactagtacgtagttgtgttcgctaccgagaattgttgtggatcctggctgtgatgttcagtgatccagcttggttgaactgccctcacgtacatttaattccgtcagtctgatggatcaacaaggaaaccaacatttgaacgtttaaccaaactgatatctaattttcgtttcttcgggc

SEQ ID NO: 55595 - DNA, 1876 bp, Zea Mays
aaacggcaagccaagtctggtggaaaagctcagtgatcataggatgggccgatgacgatgcctgggtccagtccagccaagataatcttgatcggtccaaattgaaaaaacagactccggccacagccgagacgagactagcagcagccgcttgctcagatcggcagcttcggcggcggcggagatggcgattcggtactggccgatggccggagcagccgttgggttccgcctcgtcctggttctcttcggcggggatctccaccttgcctctcgccctgaggtctccacccccctcacctcccttcgccgcctggcggaaggctactggctgaagcaagcgtccgtgtcaccgtactccggttctatgtatcacggttccccattgctcctgtctgttcttggtccattaactagtagcaggcctgacggacatcatgctcatatttactgcagtttgatttttgtggctgtagattttctagcagccatgctcatccgagcgactgggcatgaactcgaaatggcacggaacagaagtttgaagtcacttgacctcacaaaggcagtaaaggatacagttaatgtaagcgctggagatgttgcttctctcatatatttgtggaacccttgggcaatagtcacttgtgtgggatcatgtacatcaccaatcgagaatctaatggttgtaataatgatctacggatcctgttcacgtctggctcctcttgctgcttttggatatgttatggccacacacctctctctttatcctgcaattctcatagtaccggtcattctgttgctgggttatggtctagatgctcctcctccaaaagtatttgttataaaagggtcaattgccagaaaaagtgatgtgtcagacaatgataaaacaagcagacagagagttgttcagcagttttcatggaaaccagtacttcactttatattttggctgttcatctggtcgtgccatgtgttgttattgagcagcgtgattttgaagaaagttggtggcctccacgagatgtttgaaaagacgtatggttttatacttacagtgaaagacctatcaccaaatattggtgttttgtggtacttctttgctgaagttttcgacttctttagaaatttctttcttatggtattcaatatgaacatcatttttatggtcttaccattggccatccgattgaaacatcgtccgtgctttcttgcatttgtttacacggcaattgtggcaatattgaaatcttatccatcggctggagattcagccctgtatcttggtcttctgggcttatttgtcaacgaattagcagaaatgcagttcacattcttcttgttttttggatatattggagtctccctacttagccctgtcatgcataatctgtggatctggaggggcactggtaatgcaaatttctacttcgccactggtttggcttatacttgccttcagactgtgttgctggtagagagtaagctcaagtggtggacagctccgatgcttgcaattccctacatggtgctcttgattcttgaacacaaacagctcctcatcttggagttcgtagatgtaggtcatattcgatgtagcatgttgtactgtagaccccacacttgtacaatactaggaccgcaactctttcaacaaagacaaggaacacggtagggctcgtccttggtgactagtacgtagttgtgttcgctaccgagaattgttgtggatcctggctgtgatgttcagtgatccagcttggttgaactgccctcacgtacatttaattccgtcagtctgatggatcaacaaggaaaccaacatttgaacgtttaaccaaactgatatctaattttcgtttcttcgggc

SEQ ID NO: 55596 - DNA, 1960 bp, Zea Mays
gttgaaggtagggcatcagaaataaaaaaagaaaacggcaagccaagtctggtggaaaagctcagtgatcataggatgggccgatgacgatgcctgggtccagtccagccaagataatcttgatcggtccaaattgaaaaaacagactccggccacagccgagacgagactagcagcagccgcttgctcagatcggcagcttcggcggcggcggagatggcgattcggtactggccgatggccggagcagccgttgggttccgcctcgtcctggttctcttcggcggggatctccaccttgcctctcgccctgaggtctccacccccctcacctcccttcgccgcctggcggaaggctactggctgaagcaagcgtccgtgtcaccgtactccggttctatgtatcacggttccccattgctcctgtctgttcttggtccattaactagtagcaggcctgacggacatcatgctcatatttactgcagattttctagcagccatgctcatccgagcgactgggcatgaactcgaaatggcacggaacagaagtttgaagtcacttgacctcacaaaggcagtaaaggatacagttaatgtaagcgctggagatgttgcttctctcatatatttgtggaacccttgggcaatagtcacttgtgtgggatcatgtacatcaccaatcgagaatctaatggttgtaataatgatctacggatcctgttcacgtctggctcctcttgctgcttttggatatgttatggccacacacctctctctttatcctgcaattctcatagtaccggtcattctgttgctgggttatggtctagatgctcctcctccaaaagtatttgttataaaagggtcaattgccagaaaaagtgatgtgtcagacaatgataaaacaagcagacagagagttgttcagcagttttcatggaaaccagtacttcactttatattttggctgttcatctggtcgtgccatgtgttgttattgagcagcgtgattttgaagaaagttggtggcctccacgagatgtttgaaaagacgtatggttttatacttacagtgaaagacctatcaccaaatattggtgttttgtggtacttctttgctgaagttttcgacttctttagaaatttctttcttatggtattcaatatgaacatcatttttatggtcttaccattggccatccgattgaaacatcgtccgtgctttcttgcatttgtttacacggcaattgtggcaatattgaaatcttatccatcggctggagattcagccctgtatcttggtcttctgggcttatttgtcaacgaattagcagaaatgcagttcacattcttcttgttttttggatatattggagtctccctacttagccctgtcatgcataatctgtggatctggaggggcactggtaatgcaaatttctacttcgccactggtttggcttatacttgccttcagactgtgttgctggtagagagtgtaagttcaatgataaagcacgacagaaagttaaggctacttgttacaagctaatttggtcctcataatcagaagctcaagtggtggacagctccgatgcttgcaattccctacatggtgctcttgattcttgaacacaaacagctcctcatcttggagttcgtagatgtaggtcatattcgatgtagcatgttgtactgtagaccccacacttgtacaatactaggaccgcaactctttcaacaaagacaaggaacacggtagggctcgtccttggtgactagtacgtagttgtgttcgctaccgagaattgttgtggatcctggctgtgatgttcagtgatccagcttggttgaactgccctcacgtacatttaattccgtcagtctgatggatcaacaaggaaaccaacatttgaacgtttaaccaaactgatatctaattttcgtttcttcgggc

SEQ ID NO: 55597 - DNA, 1330 bp, Zea Mays
aagactaaaacaagacacaatcctagagccaacggggtatataatcgaaagtaagggaggcaggtgcatctgcctagtcgctattttgcttggctccgcacccgcgcccggctcgtcgtcaatccacccatccatctactgcgccgaaggaacgccccgccgctccggcggcgtacgcggggagaggagaggagatgagacgaagtgcgacggggtgggcatgaggtgcaagaagcacccgtaccaggtcggcggcggtggcgtctgtgccacgtgcctccgcgaccgcctgatcgcgctggaggccgcgcagaacggcgacgcgtcgtcgtcgccgccgccgcccgccgcggcgcccgcgttcccgaggtcggtgtccccgtacgtgtcccgcaggaagtcggacacgtcgggcgggggcggcgcgctcaggcaccacccgagcctgctcttcttccggacgccgcaggtagggcccgcctacggcggcggcgcgttggaggaaggcgacataggctacgagtacaagaggcggcgcgccggcaagttctccgtgctcgccacgctcttcggccaccaccacggtcacagatcggaagagacgcaccaggaaggcgccacggagcggaagaaacattcttggttcgccgcgatcatgccgcgccgccgcaagaagcaggcggcgccggcctcgatcacctcgccacggtcagccccgccgaggcgctcctgccgcgtggtcagcaaccgggggctgtcgccggagcgggacagccacggcagcggcgacgagagcagctcgcccgccgcggatcccccgtggcggccgtccccgtcccccatgcggaggacccgctgccggcgccgccagacgaacagcatgccgtcgggtttcgccgtctgcctcagcccgctcgtgcggcccagcccggggcgccgccgccacgtccagccgccggacccgggctccttctcctccgagttccggccgtcgccgctccacagtctctcgtctgctgcctccgttacgcgctgtcgctccaggaagctcgccgacgtcggccgcttccgaagagtatgcaagactggcacacacaccccaaaccaagtccaaaacacccccgttgacatatatactactgcgtagtttagtactgcttgtcggcccaacattttgtggcgatgtaacgagctgcttgtactgcttccaagtaactacatattcatgtttgtacagctacttgtgtaatttcgatttcatcttctgcaaagtttgaactactctgacccatgcatattggatttactaataagaaagattagacttgaa

SEQ ID NO: 55598 - DNA, 8788 bp, Zea Mays
cgcccgtcgcgttgcttcgatgccccccctcgcagtcgcgactcgcctcctccgcgccgttccccattcatcctaaaggcctaaaccctagcctccttgctcctgcgctccggtcgccggtgcgtcccctcctccgctggccgccggcgccggtgcaatcacccgccgccgccagtgcatccgtccagggctgcacggccacctgtgcccactgggttgtgcggtcctaacgcaagttcggcgccgaccaccgccgaactgaagccgtctgcccacacccactcgcggcagcaccgccggacggctcccggcactgcgccagtgcgtgctgcctccggtatagcggctgccggatcccgccgcggcacctgcagcaatctgaaggcatactgcactgtctgctcttcaacacattgggcacatatttctctgggtcattgatttttttgtttaacccaaaactatggggctacaaccttccagcgtgatcaatttttacaactgcaataggattttcatgtacaagcagactacaaagaacttggggggacacagaaactgaaatggctacgtcagttccttttccttgctactcactacatattgctagatttctgcaggcactaatcactaacagttactgcactgttggtatgcgagtcctagtttgctgctcatgctctaagatatgaggtagttctgtgtgagggatttgaaagatggcgtcaaaaggtccccggtcaaggctagaccatgacacaagagctaggcgtcagaaggctcttgaagctccaagggagcctcgacggccaaaagttcactgggaccatgtccttgctgagatgttgtggctggcaaaggagtttgattctgagagaaaatggaagttgtccatggccaaaaagattgctcaaagagcaaataagagcatagttgatcaagcagcaaagggcgagagaaaacagaaggaggaagaacatagaatgcgaaaagttgccgttaatatttcaaaggatgtgaagaagttctggatcaaaatagaaaagctggttgtctataagcatcaactggagcttgaggagagaaagaagaaggcacttgataagcaacttgatttccttttaggtcagactgaaaggtattcaacaatgttggcggaaaaccttgtagatatgccctattctcaaaacctagaaaccgagacttcgcagataaaccaaccatcccatcaagaggtagtagcagaagagaacttaaacgcaaccattccggatgatcttgataatatggaagtcgatgatgattatgggagctccttggatgaagagccagaagatgatgagcacactatcgatgaggatgaagctcagattaccgaagctgagcgcaatgaagaactagctgctttagaggcagaagctgacctaccactggatgttattctcaagatgtatacaaaaaccaaagttactccgaaccaggctaatgggtgtgatcatgaacttgctcactcttcaagtgacgaaggcaattcttctgaggaagtggatgatggtcattcttatgctgagtttgtgaagaagaatcatggtaaaagtaatggaaatatttcttctatcaatgatcaggaggacgaagattacattgctgctgaagaagtaaaggatgacgaagcaactttgtccgaagaggaacaattggcaaagaaagaagatcctgatcatctggaagagattaagttactgcagaaggagagcgagataccactagaagaacttcttgcgaggtaccgagagatcatgaaacagctgagttggagaattcaccccattttgttgaagagggatgtgctggaaactgagcacacgactctacaatcagaaattgcatcagagccttgtgctcaacaaaattttgtggaagagaataatctcactgatgttaagacagtcaatgaagataagagtgatgatgtaattgctgatgctgcagctgctgcaagatcagcacaaccaactggcaacaccttcttgactacaaaagtgcgcacaaaattcccattccttcttaagcattctcttcgtgaataccagcatatagggctggattggttagttgctatgtatgagaagaggcttaatggaattctagcagatgaaatgggtttaggcaagacaatcatgactatctccttgcttgcgcaccttgcgtgtgagaaggggatatggggtcctcatcttattgtcgtgccgactagtgttatgctaaattgggagactgaatttcttaagtggtgtcctgcttttaaaatactgacttatttcggaagtgcaaaggaaagaaagcagaagcgtcagggctggatgaaaccaaattacttccatgtttgcatcacaacatataggcttgtcattcaggattctaaagtgtttaagcgaaaaaagtggaagtatcttattcttgatgaggctcatctgataaagaactggaaatcacagcgttggcagacattgctcaacttcaattcaaagagacgtattcttctgactggaactccactgcaaaatgaccttatggaactttggtccctcatgcattttttgatgcctcatgtatttcagtctcatcaagagttcaaggattggttctgcaatccaatttccgggatggtggaaggtcaagataaagtaaacaaagaagttatagatcgattgcacaatgtccttcggccatttatactgcgtcgactgaaaagagatgttgagaaacagttaccaaagaagcatgagcatgtcatatattgccgactttctagaaggcaaaggaacttgtatgaagaatttgtcgctagctcagagacacaagcaaccctggcgagtgggaattattttggcatgataagcatcatcatgcaacttagaaaggtctgtaaccatccagatctttttgaaggtcggccaataataagctcatttgacatggctggtattaacatgcagctcagctattcagtctgcatgctccttgataagagtccattttctcaggtggacctgtctgatatgaattttgtgtttactcaaaatgaatttagcatgagttcctgggaagctgacgaggtcatctccgcctttccttcaagtatcacctccagggactgtgacctggatattttttgctctaataaggatcatcagggaagtaatttgacaaacatttttgaagatattcagaaagccctacaggaggagagaataaaggaatccagagaaagggcagcttctgttgcatggtggaatagagttagatgccaaaagagacctgtctatggcacaaacatgagacatgttttgactgtaaagcatcctgtatcaaatattcttaataagaggaacaatccattgtgccacatggactattcatcacgccttgcagatcttgttcttccatctgtggaacgctttcagaaaatgctttattttgttgaatcatttacattcgcaattccagctgctcgagctcctccccctgtttgctggtgcagcaaaggaaagtctcctgtttttattgatccagcatatagagaaaaatgcatgtacaagttttctcccattctgtctcctataaggtctgctatcgttcgtcgtcaagtctactttcctgataggcgtttgatccagtttgactgtgggaagttgcaggaacttgctattctgttaaggcgtttgaaatcagaaggccacagggccttgatatttactcagatgactaagatgcttgacgtcttggaagagttcataaatttatatgggtatacatatttgcgattagatggttctactcccccagaagagaggcagactctaatgcagaggttcaacacaaatccaaagtttttccttttcattttgtccacacgtagtggtggtgtgggaatcaaccttgtaggtgcagacactgttatcttctatgacagtgactggaaccctgcaatggaccaacaagcacaggacagatgccacaggattggtcagactcgtgaagttcacatatatagactcatcagtgaaagcactatagaggagaacattctcaagaaagcaaatcagaaacgagctcttgatgatttagtgatacaacgtggtagctacaatacggaattcttcaagaaacttgatcctatggagttcttttccgggcacacatctcttcgtgtggaaggtcaggagaagaattgctctacatccgtgggagcttcaaatgatgtggatctggctctgtcaattgcagatgttgaagcagctattagacaggcagaagatgaagctgactatatggctctcaagaagttggaggaggaagaagctgtggacaatcaagaattcagtgaggaggttgcgggcagaccagaggaggatgaattggttaatgaggaggatggaaaacctgatgagcacattaatgaagatcacaaatactactcttctgatgtagagaaggagaagcacattactttgtctaccaatcgattaaacaatgaaaaggctcttacattggctgttggtgatgaagatactgacatgcttgctgatgtgaaacagatggcagcagcagctgctgcagcagggcaagcatgttcatcttttgagaaccagctccggccaattgatagatatgcaatgcgctttatggaactctgggatccagtaattgacaaagctgctgtcaatcatcaagtaaatgttgaggaggaagaatgggagcttgatcgcattgaaaaactcaaagaggatttagaagcggaaattgatgaagaccaagaaccactatcgtatcaatcatgggatgttgattttgctacgacagcctatcggcaacatgttgaggctttaactcaaaagcagttgttggaagaacaggaaagacaggctcaggaagcagcaaaagagttggaagagaataatgataatatgagcagtcaccgcagaaagtcaaacaagaataaaaagaagactggcaaattcaagtcccagaaaagaccgcgtttgtcttctgaatcagaagtcattctggaggaaacctctgtagatacaatgagcattgatgacaatgcaccctcacctgagcttataagtgatgaatcgccacaccattattctaacaagcgtaagaagattatgtctgctactgaggaagatagtaacagcagaagtttaaaaaagtttaagaaaactaaatcaagttttatttctgagttgtcacctaggccgaaggaggaccttaatgattcagatccaaaatcagtggctagaactaaaagtgatggcagactttccatcccttgcatgccagtaaagcgtgttattgtgataaagcctgagagattgaaaaagaagggaatatggtctcgagattgtgcttcagactcatggacatctgaggaagatgcagttctttgtggaactgtgcatgagtatggtcctctttgggaactggcaagtgattttcttcactccttgccaggcgggtcctcctataggggaagatatcatcatcctttgcattgctgtgagagatacagagaacttttctgcaaatatgcaatatcagcaacagataattctaacagtgaaaaggctccttctgggactggaaaggctgtacttagagtatctgaggatcaagctcagatgttggtgaatgtgaccagtgaacttcccaacaatgaattgcttctccagaaacacttcatggctgtaatttcatctgtatggagatcaaaatgttgccgtcatccctgctgttttaggaataagcctggtggatcaagtgagaactggcccatggtaaactttagaccaagcgtcaatctagttagggaagcccttgcagctggtcaggctaagtttacgctaactgtgattccaccaccgtcaagaaaccaggaatactcacggaattatttagaattagagttagatttcttgaaagatcaacatgcctatgaggaagacttcccgtctgtactaaatgtatccatactggaaccagaatcatccaaacaggctccagagccagtggaacaatcattgttatctgaactttcatgtagacaggctgagaaccgactcaggtcagtgttgatgcaagtcttcattgctgttatgatggtggcggcggttgccgttatattagtttaaataaaacagtcattctttggatttcatgattttcctaatatttagctcacctctgctacacaaaatactgctaagcatcattttcacttttctttgcaggatagcgtcagaagcttgttatgatggtgaaagttttcattgggcatcatcatctttccacataaatgatgctgcccgccacaaatctggtttgaagtctatagggaagcacaaagcagcatcggaatctggtagacctcccaaatccaaagtccagaagattactgaattgcatcaggaagggccaattgccatgagtaattttctctgtatgcctgctcaactattgccaagtacagctgacttccacattagtgactccctatctgactttggtatcaacgattatgaattcaactactctgaggatctcttgcaagagtttgacgccctcgagttcttcccagatcagggtgactctggtctccttggtattgaagagttagaacctctttcggatttcacagatatcggatgaacatagatgagcaaattatggttgatgggatgctgtcctataccaagaggagacaagatcgcctctggcaggagcccaaggatataggttgagttgctcaaccatgcacagatgtgctgcaagctttatcatggctggctggagcaaagctgctggcttggtgaggtcacattgatctgacaagcttgaggatgggtttgcactaatggcggcattgggtaccaacagagaaggtaaaagaggaggccctcagcaccacccatttgttgctgtatatcgtgttcattctctgtttaatccaatgttgtttggctattttgccactgaaaacatctcacatgtcaagttggtggatgccatctctatcagaaatttaggatgtggcgccaatgtccaaagaatgatcagtcaagtgcagcttatcggcgcattatatttggtcaggaatcaatgcatgacatcaatatgatcagaactgctgttccagtttcatttgaggaatgcaatttctggtgattcgggatgcaagtttttcataggaggtaaagagcgtgggcatagttgtacatgtaataaaatgaataaggttctgtgaactctcggtctcggttatgccaattaatagccataatttgttgttagaggccagggggctttttgatcagcgggctgctgctgtgagccggtaacaatgtagctgattgtgcgcctccatattgttttcttggtaagtggactttgcatcactgccaagcaacgatgagatagagtaattggtctgtttcgcgcaaaaatactacgagcttgtattcagtcttgacctccagtaacctgaacgctgagaatgtttggccaaccacataatacgtaggctgactagctgagaatatctagctaatcccgtaatctgtaagctgagaatgtatggtgaatcccataatctgtaagctgagattgtttggccaatcaaggtcacaatgctgcctacaagctgagaatgtttggccaattaaggtctagctgatgtccttagcagaaaacaaaattttctaaacgcaaactgttttaataatagtaagaaaacagggctccacttatttgtaaaatactctgcaagcgcgatcaacgtcagctattactacagtgtagcttttacactgctacagtgttttatctcaacgaacagctagttgaaaacgctgctactggagaaatctctgctgccgcgcagcgtctggaattctggataagacggtctgaaacccccttcctctccccgtcccgttcgcccacatcccccacctcccccatccccaacgctgccatggcctcgctccaccccacgacagcaatgctggcccagcgccattcccctgccccctctctcagcgcatcgtcgctctcatggtccgcctccatcgccgtctcccgcatcccgccagcccctggcctcgcgctccacccactagtgaatcctcccgcctccggcaaccgccagagcccggtggtgtgtgcggcgtggacgcggcggtcgcgcggggaggcggagcagcggcccaaccgcaagtcgtggaagcagcgcacggacatgtacatgcgccccttcctgctcaatgtttttttctccaagcgcttcgtgcacgcaaaggtcatgcacaggggcaccagcaaggtcattgccgtcgccaccaccaactccaaggacctccggctcaccctcccatctcttgtcgacgacaacgcctgccggaccatagggaggctcatcgccgagaggtccatggacgccgacgtctttgctatggcctatgagcccaagaagaacgagaggatcgagggcaagctcgggatcgtgattgacaccattaaggagcacggcatcatcttcgtataggcaggtttcagggtaggagtagggctgttatgttttagtttcgactcctgtagcctggaaactgttaccttattgagataaaaacaaatacaaaaagtatcaatctagaggtcttagaccaatgttgctgacaattggtcttgtcagtttgaagtttgatgaaattgcaaaagtttg

SEQ ID NO: 55599 - DNA, 7560 bp, Zea Mays
ctaaaggcctaaaccctagcctccttgctcctgcgctccggtcgccggtgcgtcccctcctccgctggccgccggcgccggtgcaatcacccgccgccgccagtgcatccgtccagggctgcacggccacctgtgcccactgggttgtgcggtcctaacgcaagttcggcgccgaccaccgccgaactgaagccgtctgcccacacccactcgcggcagcaccgccggacggctcccggcactgcgccagtgcgtgctgcctccggtatagcggctgccggatcccgccgcggcacctgcaggcactaatcactaacagttactgcactgttggtatgcgagtcctagtttgctgctcatgctctaagatatgaggtagttctgtgtgagggatttgaaagatggcgtcaaaaggtccccggtcaaggctagaccatgacacaagagctaggcgtcagaaggctcttgaagctccaagggagcctcgacggccaaaagttcactgggaccatgtccttgctgagatgttgtggctggcaaaggagtttgattctgagagaaaatggaagttgtccatggccaaaaagattgctcaaagagcaaataagagcatagttgatcaagcagcaaagggcgagagaaaacagaaggaggaagaacatagaatgcgaaaagttgccgttaatatttcaaaggatgtgaagaagttctggatcaaaatagaaaagctggttgtctataagcatcaactggagcttgaggagagaaagaagaaggcacttgataagcaacttgatttccttttaggtcagactgaaaggtattcaacaatgttggcggaaaaccttgtagatatgccctattctcaaaacctagaaaccgagacttcgcagataaaccaaccatcccatcaagaggtagtagcagaagagaacttaaacgcaaccattccggatgatcttgataatatggaagtcgatgatgattatgggagctccttggatgaagagccagaagatgatgagcacactatcgatgaggatgaagctcagattaccgaagctgagcgcaatgaagaactagctgctttagaggcagaagctgacctaccactggatgttattctcaagatgtatacaaaaaccaaagttactccgaaccaggctaatgggtgtgatcatgaacttgctcactcttcaagtgacgaaggcaattcttctgaggaagtggatgatggtcattcttatgctgagtttgtgaagaagaatcatggtaaaagtaatggaaatatttcttctatcaatgatcaggaggacgaagattacattgctgctgaagaagtaaaggatgacgaagcaactttgtccgaagaggaacaattggcaaagaaagaagatcctgatcatctggaagagattaagttactgcagaaggagagcgagataccactagaagaacttcttgcgaggtaccgagaggtacagttagattttccatttatttcttcgaacaacttactgtggtccatttgtaatacctttttttatatttaggatggctgtgcagatcatgaaacagctgagttggagaattcaccccattttgttgaagaggtcaataccgacaagtctttgaatgatcaatctgtgaacattttggaagcgaaaagtgatatttttgtggatcaccaatccagggatgtgctggaaactgagcacacgactctacaatcagaaattgcatcagagccttgtgctcaacaaaattttgtggaagagaataatctcactgatgttaagacagtcaatgaagataagagtgatgatgtaattgctgatgctgcagctgctgcaagatcagcacaaccaactggcaacaccttcttgactacaaaagtgcgcacaaaattcccattccttcttaagcattctcttcgtgaataccagcatatagggctggattggttagttgctatgtatgagaagaggcttaatggaattctagcagatgaaatgggtttaggcaagacaatcatgactatctccttgcttgcgcaccttgcgtgtgagaaggggatatggggtcctcatcttattgtcgtgccgactagtgttatgctaaattgggagactgaatttcttaagtggtgtcctgcttttaaaatactgacttatttcggaagtgcaaaggaaagaaagcagaagcgtcagggctggatgaaaccaaattacttccatgtttgcatcacaacatataggcttgtcattcaggattctaaagtgtttaagcgaaaaaagtggaagtatcttattcttgatgaggctcatctgataaagaactggaaatcacagcgttggcagacattgctcaacttcaattcaaagagacgtattcttctgactggaactccactgcaaaatgaccttatggaactttggtccctcatgcattttttgatgcctcatgtatttcagtctcatcaagagttcaaggattggttctgcaatccaatttccgggatggtggaaggtcaagataaagtaaacaaagaagttatagatcgattgcacaatgtccttcggccatttatactgcgtcgactgaaaagagatgttgagaaacagttaccaaagaagcatgagcatgtcatatattgccgactttctagaaggcaaaggaacttgtatgaagaatttgtcgctagctcagagacacaagcaaccctggcgagtgggaattattttggcatgataagcatcatcatgcaacttagaaaggtctgtaaccatccagatctttttgaaggtcggccaataataagctcatttgacatggctggtattaacatgcagctcagctattcagtctgcatgctccttgataagagtccattttctcaggtggacctgtctgatatgaattttgtgtttactcaaaatgaatttagcatgagttcctgggaagctgacgaggtcatctccgcctttccttcaagtatcacctccagggactgtgacctggatattttttgctctaataaggatcatcagggaagtaatttgacaaacatttttgaagatattcagaaagccctacaggaggagagaataaaggaatccagagaaagggcagcttctgttgcatggtggaatagagttagatgccaaaagagacctgtctatggcacaaacatgagacatgttttgactgtaaagcatcctgtatcaaatattcttaataagaggaacaatccattgtgccacatggactattcatcacgccttgcagatcttgttcttccatctgtggaacgctttcagaaaatgctttattttgttgaatcatttacattcgcaattccagctgctcgagctcctccccctgtttgctggtgcagcaaaggaaagtctcctgtttttattgatccagcatatagagaaaaatgcatgtacaagttttctcccattctgtctcctataaggtctgctatcgttcgtcgtcaagtctactttcctgataggcgtttgatccagtttgactgtgggaagttgcaggaacttgctattctgttaaggcgtttgaaatcagaaggccacagggccttgatatttactcagatgactaagatgcttgacgtcttggaagagttcataaatttatatgggtatacatatttgcgattagatggttctactcccccagaagagaggcagactctaatgcagaggttcaacacaaatccaaagtttttccttttcattttgtccacacgtagtggtggtgtgggaatcaaccttgtaggtgcagacactgttatcttctatgacagtgactggaaccctgcaatggaccaacaagcacaggacagatgccacaggattggtcagactcgtgaagttcacatatatagactcatcagtgaaagcactatagaggagaacattctcaagaaagcaaatcagaaacgagctcttgatgatttagtgatacaacgtggtagctacaatacggaattcttcaagaaacttgatcctatggagttcttttccgggcacacatctcttcgtgtggaaggtcaggagaagaattgctctacatccgtgggagcttcaaatgatgtggatctggctctgtcaattgcagatgttgaagcagctattagacaggcagaagatgaagctgactatatggctctcaagaagttggaggaggaagaagctgtggacaatcaagaattcagtgaggaggttgcgggcagaccagaggaggatgaattggttaatgaggaggatggaaaacctgatgagcacattaatgaagatcacaaatactactcttctgatgtagagaaggagaagcacattactttgtctaccaatcgattaaacaatgaaaaggctcttacattggctgttggtgatgaagatactgacatgcttgctgatgtgaaacagatggcagcagcagctgctgcagcagggcaagcatgttcatcttttgagaaccagctccggccaattgatagatatgcaatgcgctttatggaactctgggatccagtaattgacaaagctgctgtcaatcatcaagtaaatgttgaggaggaagaatgggagcttgatcgcattgaaaaactcaaagaggatttagaagcggaaattgatgaagaccaagaaccactatcgtatcaatcatgggatgttgattttgctacgacagcctatcggcaacatgttgaggctttaactcaaaagcagttgttggaagaacaggaaagacaggctcaggaagcagcaaaagagttggaagagaataatgataatatgagtcaccgcagaaagtcaaacaagaataaaaagaagactggcaaattcaagtcccagaaaagaccgcgtttgtcttctgaatcagaagtcattctggaggaaacctctgtagatacaatgagcattgatgacaatgcaccctcacctgagcttataagtgatgaatcgccacaccattattctaacaagcgtaagaagattatgtctgctactgaggaagatagtaacagcagaagtttaaaaaagtttaagaaaactaaatcaagttttatttctgagttgtcacctaggccgaaggaggaccttaatgattcagatccaaaatcagtggctagaactaaaagtgatggcagactttccatcccttgcatgccagtaaagcgtgttattgtgataaagcctgagagattgaaaaagaagggaatatggtctcgagattgtgcttcagactcatggacatctgaggaagatgcagttctttgtggaactgtgcatgagtatggtcctctttgggaactggcaagtgattttcttcactccttgccaggcgggtcctcctataggggaagatatcatcatcctttgcattgctgtgagagatacagagaacttttctgcaaatatgcaatatcagcaacagataattctaacagtgaaaaggctccttctgggactggaaaggctgtacttagagtatctgaggatcaagctcagatgttggtgaatgtgaccagtgaacttcccaacaatgaattgcttctccagaaacacttcatggctgtaatttcatctgtatggagatcaaaatgttgccgtcatccctgctgttttaggaataagcctggtggatcaagtgagaactggcccatggtaaactttagaccaagcgtcaatctagttagggaagcccttgcagctggtcaggctaagtttacgctaactgtgattccaccaccgtcaagaaaccaggaatactcacggaattatttagaattagagttagatttcttgaaagatcaacatgcctatgaggaagacttcccgtctgtactaaatgtatccatactggaaccagaatcatccaaacaggctccagagccagtggaacaatcattgttatctgaactttcatgtagacaggctgagaaccgactcaggatagcgtcagaagcttgttatgatggtgaaagttttcattgggcatcatcatctttccacataaatgatgctgcccgccacaaatctggtttgaagtctatagggaagcacaaagcagcatcggaatctggtagacctcccaaatccaaagtccagaagattactgaattgcatcaggaagggccaattgccatgagtaattttctctgtatgcctgctcaactattgccaagtacagctgacttccacattagtgactccctatctgactttggtatcaacgattatgaattcaactactctgaggatctcttgcaagagtttgacgccctcgagttcttcccagatcagggtgactctggtctccttggtattgaagagttagaacctctttcggatttcacagatatcggatgaacatagatgagcaaattatggttgatgggatgctgtcctataccaagaggagacaagatcgcctctggcaggagcccaaggatataggttgagttgctcaaccatgcacagatgtgctgcaagctttatcatggctggctggagcaaagctgctggcttggtgaggtcacattgatctgacaagcttgaggatgggtttgcactaatggcggcattgggtaatttccatacatgtaccaacagagaaggtaaaagaggaggccctcagcaccacccatttgttgctgtatatcgtgttcattctctgtttaatccaatgttgtttggctattttgccactgaaaacatctcacatgtcaagttggtggatgccatctctatcagaaatttaggatgtggcgccaatgtccaaagaatgatcagtcaagtgcagcttatcggcgcattatatttggtcaggaatcaatgcatgacatcaatatgatcagaactgctgttccagtttcatttgaggaatgcaatttctggtgattcgggatgcaagtttttcataggaggtaaagagcgtgggcatagttgtacatgtaataaaatgaataaggttctgtgaactctcggtctcggttatgccaattaatagccataatttgttgttagaggccagggggctttttgatcagcgggctgctgctgtgagccggtaacaatgtagctgattgtgcgcctccatattgttttcttggtaagtggactttgcatcactgccaagcaacgatgagatagagtaattggtctgtttcgcgcaaaaatactacgagcttgtattcagtcttgacctccagtaacctgaacgctgagaatgtttggccaaccacataatacgtaggctgactagctgagaatatctagctaatcccgtaatctgtaagctgagaatgtatggtgaatcccataatctgtaagctgagattgtttggccaatcaaggtcacaatgctgcctacaagctgagaatgtttggccaattaaggtctagctgatgtccttagcagaaaacaaaattttctaaacgcaaactgttttaataatagtaagaaaacagggctccacttatttgtaaaatactctgcaagcgcgatcaacgtcagctattactacag

SEQ ID NO: 55600 - DNA, 7415 bp, Zea Mays
ctaaaggcctaaaccctagcctccttgctcctgcgctccggtcgccggtgcgtcccctcctccgctggccgccggcgccggtgcaatcacccgccgccgccagtgcatccgtccagggctgcacggccacctgtgcccactgggttgtgcggtcctaacgcaagttcggcgccgaccaccgccgaactgaagccgtctgcccacacccactcgcggcagcaccgccggacggctcccggcactgcgccagtgcgtgctgcctccggtatagcggctgccggatcccgccgcggcacctgcagaggcactaatcactaacagttactgcactgttggtatgcgagtcctagtttgctgctcatgctctaagatatgaggtagttctgtgtgagggatttgaaagatggcgtcaaaaggtccccggtcaaggctagaccatgacacaagagctaggcgtcagaaggctcttgaagctccaagggagcctcgacggccaaaagttcactgggaccatgtccttgctgagatgttgtggctggcaaaggagtttgattctgagagaaaatggaagttgtccatggccaaaaagattgctcaaagagcaaataagagcatagttgatcaagcagcaaagggcgagagaaaacagaagggaaagcaggttgtctataagcatcaactggagcttgaggagagaaagaagaaggcacttgataagcaacttgatttccttttaggtcagactgaaaggtattcaacaatgttggcggaaaaccttgtagatatgccctattctcaaaacctagaaaccgagacttcgcagataaaccaaccatcccatcaagaggtagtagcagaagagaacttaaacgcaaccattccggatgatcttgataatatggaagtcgatgatgattatgggagctccttggatgaagagccagaagatgatgagcacactatcgatgaggatgaagctcagattaccgaagctgagcgcaatgaagaactagctgctttagaggcagaagctgacctaccactggatgttattctcaagatgtatacaaaaaccaaagttactccgaaccaggctaatgggtgtgatcatgaacttgctcactcttcaagtgacgaaggcaattcttctgaggaagtggatgatggtcattcttatgctgagtttgtgaagaagaatcatggtaaaagtaatggaaatatttcttctatcaatgatcaggaggacgaagattacattgctgctgaagaagtaaaggatgacgaagcaactttgtccgaagaggaacaattggcaaagaaagaagatcctgatcatctggaagagattaagttactgcagaaggagagcgagataccactagaagaacttcttgcgaggtaccgagaggatggctgtgcagatcatgaaacagctgagttggagaattcaccccattttgttgaagaggtcaataccgacaagtctttgaatgatcaatctgtgaacattttggaagcgaaaagtgatatttttgtggatcaccaatccagggatgtgctggaaactgagcacacgactctacaatcagaaattgcatcagagccttgtgctcaacaaaattttgtggaagagaataatctcactgatgttaagacagtcaatgaagataagagtgatgatgtaattgctgatgctgcagctgctgcaagatcagcacaaccaactggcaacaccttcttgactacaaaagtgcgcacaaaattcccattccttcttaagcattctcttcgtgaataccagcatatagggctggattggttagttgctatgtatgagaagaggcttaatggaattctagcagatgaaatgggtttaggcaagacaatcatgactatctccttgcttgcgcaccttgcgtgtgagaaggggatatggggtcctcatcttattgtcgtgccgactagtgttatgctaaattgggagactgaatttcttaagtggtgtcctgcttttaaaatactgacttatttcggaagtgcaaaggaaagaaagcagaagcgtcagggctggatgaaaccaaattacttccatgtttgcatcacaacatataggcttgtcattcaggattctaaagtgtttaagcgaaaaaagtggaagtatcttattcttgatgaggctcatctgataaagaactggaaatcacagcgttggcagacattgctcaacttcaattcaaagagacgtattcttctgactggaactccactgcaaaatgaccttatggaactttggtccctcatgcattttttgatgcctcatgtatttcagtctcatcaagagttcaaggattggttctgcaatccaatttccgggatggtggaaggtcaagataaagtaaacaaagaagttatagatcgattgcacaatgtccttcggccatttatactgcgtcgactgaaaagagatgttgagaaacagttaccaaagaagcatgagcatgtcatatattgccgactttctagaaggcaaaggaacttgtatgaagaatttgtcgctagctcagagacacaagcaaccctggcgagtgggaattattttggcatgataagcatcatcatgcaacttagaaaggtctgtaaccatccagatctttttgaaggtcggccaataataagctcatttgacatggctggtattaacatgcagctcagctattcagtctgcatgctccttgataagagtccattttctcaggtggacctgtctgatatgaattttgtgtttactcaaaatgaatttagcatgagttcctgggaagctgacgaggtcatctccgcctttccttcaagtatcacctccagggactgtgacctggatattttttgctctaataaggatcatcagggaagtaatttgacaaacatttttgaagatattcagaaagccctacaggaggagagaataaaggaatccagagaaagggcagcttctgttgcatggtggaatagagttagatgccaaaagagacctgtctatggcacaaacatgagacatgttttgactgtaaagcatcctgtatcaaatattcttaataagaggaacaatccattgtgccacatggactattcatcacgccttgcagatcttgttcttccatctgtggaacgctttcagaaaatgctttattttgttgaatcatttacattcgcaattccagctgctcgagctcctccccctgtttgctggtgcagcaaaggaaagtctcctgtttttattgatccagcatatagagaaaaatgcatgtacaagttttctcccattctgtctcctataaggtctgctatcgttcgtcgtcaagtctactttcctgataggcgtttgatccagtttgactgtgggaagttgcaggaacttgctattctgttaaggcgtttgaaatcagaaggccacagggccttgatatttactcagatgactaagatgcttgacgtcttggaagagttcataaatttatatgggtatacatatttgcgattagatggttctactcccccagaagagaggcagactctaatgcagaggttcaacacaaatccaaagtttttccttttcattttgtccacacgtagtggtggtgtgggaatcaaccttgtaggtgcagacactgttatcttctatgacagtgactggaaccctgcaatggaccaacaagcacaggacagatgccacaggattggtcagactcgtgaagttcacatatatagactcatcagtgaaagcactatagaggagaacattctcaagaaagcaaatcagaaacgagctcttgatgatttagtgatacaacgtggtagctacaatacggaattcttcaagaaacttgatcctatggagttcttttccgggcacacatctcttcgtgtggaaggtcaggagaagaattgctctacatccgtgggagcttcaaatgatgtggatctggctctgtcaattgcagatgttgaagcagctattagacaggcagaagatgaagctgactatatggctctcaagaagttggaggaggaagaagctgtggacaatcaagaattcagtgaggaggttgcgggcagaccagaggaggatgaattggttaatgaggaggatggaaaacctgatgagcacattaatgaagatcacaaatactactcttctgatgtagagaaggagaagcacattactttgtctaccaatcgattaaacaatgaaaaggctcttacattggctgttggtgatgaagatactgacatgcttgctgatgtgaaacagatggcagcagcagctgctgcagcagggcaagcatgttcatcttttgagaaccagctccggccaattgatagatatgcaatgcgctttatggaactctgggatccagtaattgacaaagctgctgtcaatcatcaagtaaatgttgaggaggaagaatgggagcttgatcgcattgaaaaactcaaagaggatttagaagcggaaattgatgaagaccaagaaccactatcgtatcaatcatgggatgttgattttgctacgacagcctatcggcaacatgttgaggctttaactcaaaagcagttgttggaagaacaggaaagacaggctcaggaagcagcaaaagagttggaagagaataatgataatatgagtcaccgcagaaagtcaaacaagaataaaaagaagactggcaaattcaagtcccagaaaagaccgcgtttgtcttctgaatcagaagtcattctggaggaaacctctgtagatacaatgagcattgatgacaatgcaccctcacctgagcttataagtgatgaatcgccacaccattattctaacaagcgtaagaagattatgtctgctactgaggaagatagtaacagcagaagtttaaaaaagtttaagaaaactaaatcaagttttatttctgagttgtcacctaggccgaaggaggaccttaatgattcagatccaaaatcagtggctagaactaaaagtgatggcagactttccatcccttgcatgccagtaaagcgtgttattgtgataaagcctgagagattgaaaaagaagggaatatggtctcgagattgtgcttcagactcatggacatctgaggaagatgcagttctttgtggaactgtgcatgagtatggtcctctttgggaactggcaagtgattttcttcactccttgccaggcgggtcctcctataggggaagatatcatcatcctttgcattgctgtgagagatacagagaacttttctgcaaatatgcaatatcagcaacagataattctaacagtgaaaaggctccttctgggactggaaaggctgtacttagagtatctgaggatcaagctcagatgttggtgaatgtgaccagtgaacttcccaacaatgaattgcttctccagaaacacttcatggctgtaatttcatctgtatggagatcaaaatgttgccgtcatccctgctgttttaggaataagcctggtggatcaagtgagaactggcccatggtaaactttagaccaagcgtcaatctagttagggaagcccttgcagctggtcaggctaagtttacgctaactgtgattccaccaccgtcaagaaaccaggaatactcacggaattatttagaattagagttagatttcttgaaagatcaacatgcctatgaggaagacttcccgtctgtactaaatgtatccatactggaaccagaatcatccaaacaggctccagagccagtggaacaatcattgttatctgaactttcatgtagacaggctgagaaccgactcaggatagcgtcagaagcttgttatgatggtgaaagttttcattgggcatcatcatctttccacataaatgatgctgcccgccacaaatctggtttgaagtctatagggaagcacaaagcagcatcggaatctggtagacctcccaaatccaaagtccagaagattactgaattgcatcaggaagggccaattgccatgagtaattttctctgtatgcctgctcaactattgccaagtacagctgacttccacattagtgactccctatctgactttggtatcaacgattatgaattcaactactctgaggatctcttgcaagagtttgacgccctcgagttcttcccagatcagggtgactctggtctccttggtattgaagagttagaacctctttcggatttcacagatatcggatgaacatagatgagcaaattatggttgatgggatgctgtcctataccaagaggagacaagatcgcctctggcaggagcccaaggatataggttgagttgctcaaccatgcacagatgtgctgcaagctttatcatggctggctggagcaaagctgctggcttggtgaggtcacattgatctgacaagcttgaggatgggtttgcactaatggcggcattgggtaatttccatacatgtaccaacagagaaggtaaaagaggaggccctcagcaccacccatttgttgctgtatatcgtgttcattctctgtttaatccaatgttgtttggctattttgccactgaaaacatctcacatgtcaagttggtggatgccatctctatcagaaatttaggatgtggcgccaatgtccaaagaatgatcagtcaagtgcagcttatcggcgcattatatttggtcaggaatcaatgcatgacatcaatatgatcagaactgctgttccagtttcatttgaggaatgcaatttctggtgattcgggatgcaagtttttcataggaggtaaagagcgtgggcatagttgtacatgtaataaaatgaataaggttctgtgaactctcggtctcggttatgccaattaatagccataatttgttgttagaggccagggggctttttgatcagcgggctgctgctgtgagccggtaacaatgtagctgattgtgcgcctccatattgttttcttggtaagtggactttgcatcactgccaagcaacgatgagatagagtaattggtctgtttcgcgcaaaaatactacgagcttgtattcagtcttgacctccagtaacctgaacgctgagaatgtttggccaaccacataatacgtaggctgactagctgagaatatctagctaatcccgtaatctgtaagctgagaatgtatggtgaatcccataatctgtaagctgagattgtttggccaatcaaggtcacaatgctgcctacaagctgagaatgtttggccaattaaggtctagctgatgtccttagcagaaaacaaaattttctaaacgcaaactgttttaataatagtaagaaaacagggctccacttatttgtaaaatactctgcaagcgcgatcaacgtcagctattactacag

SEQ ID NO: 55601 - DNA, 7413 bp, Zea Mays
ctaaaggcctaaaccctagcctccttgctcctgcgctccggtcgccggtgcgtcccctcctccgctggccgccggcgccggtgcaatcacccgccgccgccagtgcatccgtccagggctgcacggccacctgtgcccactgggttgtgcggtcctaacgcaagttcggcgccgaccaccgccgaactgaagccgtctgcccacacccactcgcggcagcaccgccggacggctcccggcactgcgccagtgcgtgctgcctccggtatagcggctgccggatcccgccgcggcacctgcaggcactaatcactaacagttactgcactgttggtatgcgagtcctagtttgctgctcatgctctaagatatgaggtagttctgtgtgagggatttgaaagatggcgtcaaaaggtccccggtcaaggctagaccatgacacaagagctaggcgtcagaaggctcttgaagctccaagggagcctcgacggccaaaagttcactgggaccatgtccttgctgagatgttgtggctggcaaaggagtttgattctgagagaaaatggaagttgtccatggccaaaaagattgctcaaagagcaaataagagcatagttgatcaagcagcaaagggcgagagaaaacagaagggaaagcaggttgtctataagcatcaactggagcttgaggagagaaagaagaaggcacttgataagcaacttgatttccttttaggtcagactgaaaggtattcaacaatgttggcggaaaaccttgtagatatgccctattctcaaaacctagaaaccgagacttcgcagataaaccaaccatcccatcaagaggtagtagcagaagagaacttaaacgcaaccattccggatgatcttgataatatggaagtcgatgatgattatgggagctccttggatgaagagccagaagatgatgagcacactatcgatgaggatgaagctcagattaccgaagctgagcgcaatgaagaactagctgctttagaggcagaagctgacctaccactggatgttattctcaagatgtatacaaaaaccaaagttactccgaaccaggctaatgggtgtgatcatgaacttgctcactcttcaagtgacgaaggcaattcttctgaggaagtggatgatggtcattcttatgctgagtttgtgaagaagaatcatggtaaaagtaatggaaatatttcttctatcaatgatcaggaggacgaagattacattgctgctgaagaagtaaaggatgacgaagcaactttgtccgaagaggaacaattggcaaagaaagaagatcctgatcatctggaagagattaagttactgcagaaggagagcgagataccactagaagaacttcttgcgaggtaccgagaggatggctgtgcagatcatgaaacagctgagttggagaattcaccccattttgttgaagaggtcaataccgacaagtctttgaatgatcaatctgtgaacattttggaagcgaaaagtgatatttttgtggatcaccaatccagggatgtgctggaaactgagcacacgactctacaatcagaaattgcatcagagccttgtgctcaacaaaattttgtggaagagaataatctcactgatgttaagacagtcaatgaagataagagtgatgatgtaattgctgatgctgcagctgctgcaagatcagcacaaccaactggcaacaccttcttgactacaaaagtgcgcacaaaattcccattccttcttaagcattctcttcgtgaataccagcatatagggctggattggttagttgctatgtatgagaagaggcttaatggaattctagcagatgaaatgggtttaggcaagacaatcatgactatctccttgcttgcgcaccttgcgtgtgagaaggggatatggggtcctcatcttattgtcgtgccgactagtgttatgctaaattgggagactgaatttcttaagtggtgtcctgcttttaaaatactgacttatttcggaagtgcaaaggaaagaaagcagaagcgtcagggctggatgaaaccaaattacttccatgtttgcatcacaacatataggcttgtcattcaggattctaaagtgtttaagcgaaaaaagtggaagtatcttattcttgatgaggctcatctgataaagaactggaaatcacagcgttggcagacattgctcaacttcaattcaaagagacgtattcttctgactggaactccactgcaaaatgaccttatggaactttggtccctcatgcattttttgatgcctcatgtatttcagtctcatcaagagttcaaggattggttctgcaatccaatttccgggatggtggaaggtcaagataaagtaaacaaagaagttatagatcgattgcacaatgtccttcggccatttatactgcgtcgactgaaaagagatgttgagaaacagttaccaaagaagcatgagcatgtcatatattgccgactttctagaaggcaaaggaacttgtatgaagaatttgtcgctagctcagagacacaagcaaccctggcgagtgggaattattttggcatgataagcatcatcatgcaacttagaaaggtctgtaaccatccagatctttttgaaggtcggccaataataagctcatttgacatggctggtattaacatgcagctcagctattcagtctgcatgctccttgataagagtccattttctcaggtggacctgtctgatatgaattttgtgtttactcaaaatgaatttagcatgagttcctgggaagctgacgaggtcatctccgcctttccttcaagtatcacctccagggactgtgacctggatattttttgctctaataaggatcatcagggaagtaatttgacaaacatttttgaagatattcagaaagccctacaggaggagagaataaaggaatccagagaaagggcagcttctgttgcatggtggaatagagttagatgccaaaagagacctgtctatggcacaaacatgagacatgttttgactgtaaagcatcctgtatcaaatattcttaataagaggaacaatccattgtgccacatggactattcatcacgccttgcagatcttgttcttccatctgtggaacgctttcagaaaatgctttattttgttgaatcatttacattcgcaattccagctgctcgagctcctccccctgtttgctggtgcagcaaaggaaagtctcctgtttttattgatccagcatatagagaaaaatgcatgtacaagttttctcccattctgtctcctataaggtctgctatcgttcgtcgtcaagtctactttcctgataggcgtttgatccagtttgactgtgggaagttgcaggaacttgctattctgttaaggcgtttgaaatcagaaggccacagggccttgatatttactcagatgactaagatgcttgacgtcttggaagagttcataaatttatatgggtatacatatttgcgattagatggttctactcccccagaagagaggcagactctaatgcagaggttcaacacaaatccaaagtttttccttttcattttgtccacacgtagtggtggtgtgggaatcaaccttgtaggtgcagacactgttatcttctatgacagtgactggaaccctgcaatggaccaacaagcacaggacagatgccacaggattggtcagactcgtgaagttcacatatatagactcatcagtgaaagcactatagaggagaacattctcaagaaagcaaatcagaaacgagctcttgatgatttagtgatacaacgtggtagctacaatacggaattcttcaagaaacttgatcctatggagttcttttccgggcacacatctcttcgtgtggaaggtcaggagaagaattgctctacatccgtgggagcttcaaatgatgtggatctggctctgtcaattgcagatgttgaagcagctattagacaggcagaagatgaagctgactatatggctctcaagaagttggaggaggaagaagctgtggacaatcaagaattcagtgaggaggttgcgggcagaccagaggaggatgaattggttaatgaggaggatggaaaacctgatgagcacattaatgaagatcacaaatactactcttctgatgtagagaaggagaagcacattactttgtctaccaatcgattaaacaatgaaaaggctcttacattggctgttggtgatgaagatactgacatgcttgctgatgtgaaacagatggcagcagcagctgctgcagcagggcaagcatgttcatcttttgagaaccagctccggccaattgatagatatgcaatgcgctttatggaactctgggatccagtaattgacaaagctgctgtcaatcatcaagtaaatgttgaggaggaagaatgggagcttgatcgcattgaaaaactcaaagaggatttagaagcggaaattgatgaagaccaagaaccactatcgtatcaatcatgggatgttgattttgctacgacagcctatcggcaacatgttgaggctttaactcaaaagcagttgttggaagaacaggaaagacaggctcaggaagcagcaaaagagttggaagagaataatgataatatgagtcaccgcagaaagtcaaacaagaataaaaagaagactggcaaattcaagtcccagaaaagaccgcgtttgtcttctgaatcagaagtcattctggaggaaacctctgtagatacaatgagcattgatgacaatgcaccctcacctgagcttataagtgatgaatcgccacaccattattctaacaagcgtaagaagattatgtctgctactgaggaagatagtaacagcagaagtttaaaaaagtttaagaaaactaaatcaagttttatttctgagttgtcacctaggccgaaggaggaccttaatgattcagatccaaaatcagtggctagaactaaaagtgatggcagactttccatcccttgcatgccagtaaagcgtgttattgtgataaagcctgagagattgaaaaagaagggaatatggtctcgagattgtgcttcagactcatggacatctgaggaagatgcagttctttgtggaactgtgcatgagtatggtcctctttgggaactggcaagtgattttcttcactccttgccaggcgggtcctcctataggggaagatatcatcatcctttgcattgctgtgagagatacagagaacttttctgcaaatatgcaatatcagcaacagataattctaacagtgaaaaggctccttctgggactggaaaggctgtacttagagtatctgaggatcaagctcagatgttggtgaatgtgaccagtgaacttcccaacaatgaattgcttctccagaaacacttcatggctgtaatttcatctgtatggagatcaaaatgttgccgtcatccctgctgttttaggaataagcctggtggatcaagtgagaactggcccatggtaaactttagaccaagcgtcaatctagttagggaagcccttgcagctggtcaggctaagtttacgctaactgtgattccaccaccgtcaagaaaccaggaatactcacggaattatttagaattagagttagatttcttgaaagatcaacatgcctatgaggaagacttcccgtctgtactaaatgtatccatactggaaccagaatcatccaaacaggctccagagccagtggaacaatcattgttatctgaactttcatgtagacaggctgagaaccgactcaggatagcgtcagaagcttgttatgatggtgaaagttttcattgggcatcatcatctttccacataaatgatgctgcccgccacaaatctggtttgaagtctatagggaagcacaaagcagcatcggaatctggtagacctcccaaatccaaagtccagaagattactgaattgcatcaggaagggccaattgccatgagtaattttctctgtatgcctgctcaactattgccaagtacagctgacttccacattagtgactccctatctgactttggtatcaacgattatgaattcaactactctgaggatctcttgcaagagtttgacgccctcgagttcttcccagatcagggtgactctggtctccttggtattgaagagttagaacctctttcggatttcacagatatcggatgaacatagatgagcaaattatggttgatgggatgctgtcctataccaagaggagacaagatcgcctctggcaggagcccaaggatataggttgagttgctcaaccatgcacagatgtgctgcaagctttatcatggctggctggagcaaagctgctggcttggtgaggtcacattgatctgacaagcttgaggatgggtttgcactaatggcggcattgggtaatttccatacatgtaccaacagagaaggtaaaagaggaggccctcagcaccacccatttgttgctgtatatcgtgttcattctctgtttaatccaatgttgtttggctattttgccactgaaaacatctcacatgtcaagttggtggatgccatctctatcagaaatttaggatgtggcgccaatgtccaaagaatgatcagtcaagtgcagcttatcggcgcattatatttggtcaggaatcaatgcatgacatcaatatgatcagaactgctgttccagtttcatttgaggaatgcaatttctggtgattcgggatgcaagtttttcataggaggtaaagagcgtgggcatagttgtacatgtaataaaatgaataaggttctgtgaactctcggtctcggttatgccaattaatagccataatttgttgttagaggccagggggctttttgatcagcgggctgctgctgtgagccggtaacaatgtagctgattgtgcgcctccatattgttttcttggtaagtggactttgcatcactgccaagcaacgatgagatagagtaattggtctgtttcgcgcaaaaatactacgagcttgtattcagtcttgacctccagtaacctgaacgctgagaatgtttggccaaccacataatacgtaggctgactagctgagaatatctagctaatcccgtaatctgtaagctgagaatgtatggtgaatcccataatctgtaagctgagattgtttggccaatcaaggtcacaatgctgcctacaagctgagaatgtttggccaattaaggtctagctgatgtccttagcagaaaacaaaattttctaaacgcaaactgttttaataatagtaagaaaacagggctccacttatttgtaaaatactctgcaagcgcgatcaacgtcagctattactacag

SEQ ID NO: 55602 - DNA, 7680 bp, Zea Mays
ctcgcagtcgcgactcgcctcctccgcgccgttccccattcatcctaaaggcctaaaccctagcctccttgctcctgcgctccggtcgccggtgcgtcccctcctccgctggccgccggcgccggtgcaatcacccgccgccgccagtgcatccgtccagggctgcacggccacctgtgcccactgggttgtgcggtcctaacgcaagttcggcgccgaccaccgccgaactgaagccgtctgcccacacccactcgcggcagcaccgccggacggctcccggcactgcgccagtgcgtgctgcctccggtatagcggctgccggatcccgccgcggcacctgcaggcactaatcactaacagttactgcactgttggtatgcgagtcctagtttgctgctcatgctctaagatatgaggtagttctgtgtgagggatttgaaagatggcgtcaaaaggtccccggtcaaggctagaccatgacacaagagctaggcgtcagaaggctcttgaagctccaagggagcctcgacggccaaaagttcactgggaccatgtccttgctgagatgttgtggctggcaaaggagtttgattctgagagaaaatggaagttgtccatggccaaaaagattgctcaaagagcaaataagagcatagttgatcaagcagcaaagggcgagagaaaacagaaggaggaagaacatagaatgcgaaaagttgccgttaatatttcaaaggatgtgaagaagttctggatcaaaatagaaaagctggcaagttcatttttatcttctaatgtcattgttaactgtgacactactttggatatttcttttttgaagaaaactgagctatattttgcaacttcatttttatcttctaatgtcatgggaaagcaggttgtctataagcatcaactggagcttgaggagagaaagaagaaggcacttgataagcaacttgatttccttttaggtcagactgaaaggtattcaacaatgttggcggaaaaccttgtagatatgccctattctcaaaacctagaaaccgagacttcgcagataaaccaaccatcccatcaagaggtagtagcagaagagaacttaaacgcaaccattccggatgatcttgataatatggaagtcgatgatgattatgggagctccttggatgaagagccagaagatgatgagcacactatcgatgaggatgaagctcagattaccgaagctgagcgcaatgaagaactagctgctttagaggcagaagctgacctaccactggatgttattctcaagatgtatacaaaaaccaaagttactccgaaccaggctaatgggtgtgatcatgaacttgctcactcttcaagtgacgaaggcaattcttctgaggaagtggatgatggtcattcttatgctgagtttgtgaagaagaatcatggtaaaagtaatggaaatatttcttctatcaatgatcaggaggacgaagattacattgctgctgaagaagtaaaggatgacgaagcaactttgtccgaagaggaacaattggcaaagaaagaagatcctgatcatctggaagagattaagttactgcagaaggagagcgagataccactagaagaacttcttgcgaggtaccgagaggatggctgtgcagatcatgaaacagctgagttggagaattcaccccattttgttgaagagggatgtgctggaaactgagcacacgactctacaatcagaaattgcatcagagccttgtgctcaacaaaattttgtggaagagaataatctcactgatgttaagacagtcaatgaagataagagtgatgatgtaattgctgatgctgcagctgctgcaagatcagcacaaccaactggcaacaccttcttgactacaaaagtgcgcacaaaattcccattccttcttaagcattctcttcgtgaataccagcatatagggctggattggttagttgctatgtatgagaagaggcttaatggaattctagcagatgaaatgggtttaggcaagacaatcatgactatctccttgcttgcgcaccttgcgtgtgagaaggggatatggggtcctcatcttattgtcgtgccgactagtgttatgctaaattgggagactgaatttcttaagtggtgtcctgcttttaaaatactgacttatttcggaagtgcaaaggaaagaaagcagaagcgtcagggctggatgaaaccaaattacttccatgtttgcatcacaacatataggcttgtcattcaggattctaaagtgtttaagcgaaaaaagtggaagtatcttattcttgatgaggctcatctgataaagaactggaaatcacagcgttggcagacattgctcaacttcaattcaaagagacgtattcttctgactggaactccactgcaaaatgaccttatggaactttggtccctcatgcattttttgatgcctcatgtatttcagtctcatcaagagttcaaggattggttctgcaatccaatttccgggatggtggaaggtcaagataaagtaaacaaagaagttatagatcgattgcacaatgtccttcggccatttatactgcgtcgactgaaaagagatgttgagaaacagttaccaaagaagcatgagcatgtcatatattgccgactttctagaaggcaaaggaacttgtatgaagaatttgtcgctagctcagagacacaagcaaccctggcgagtgggaattattttggcatgataagcatcatcatgcaacttagaaaggtctgtaaccatccagatctttttgaaggtcggccaataataagctcatttgacatggctggtattaacatgcagctcagctattcagtctgcatgctccttgataagagtccattttctcaggtggacctgtctgatatgaattttgtgtttactcaaaatgaatttagcatgagttcctgggaagctgacgaggtcatctccgcctttccttcaagtatcacctccagggactgtgacctggatattttttgctctaataaggatcatcagggaagtaatttgacaaacatttttgaagatattcagaaagccctacaggaggagagaataaaggaatccagagaaagggcagcttctgttgcatggtggaatagagttagatgccaaaagagacctgtctatggcacaaacatgagacatgttttgactgtaaagcatcctgtatcaaatattcttaataagaggaacaatccattgtgccacatggactattcatcacgccttgcagatcttgttcttccatctgtggaacgctttcagaaaatgctttattttgttgaatcatttacattcgcaattccagctgctcgagctcctccccctgtttgctggtgcagcaaaggaaagtctcctgtttttattgatccagcatatagagaaaaatgcatgtacaagttttctcccattctgtctcctataaggtctgctatcgttcgtcgtcaagtctactttcctgataggcgtttgatccagtttgactgtgggaagttgcaggaacttgctattctgttaaggcgtttgaaatcagaaggccacagggccttgatatttactcagatgactaagatgcttgacgtcttggaagagttcataaatttatatgggtatacatatttgcgattagatggttctactcccccagaagagaggcagactctaatgcagaggttcaacacaaatccaaagtttttccttttcattttgtccacacgtagtggtggtgtgggaatcaaccttgtaggtgcagacactgttatcttctatgacagtgactggaaccctgcaatggaccaacaagcacaggacagatgccacaggattggtcagactcgtgaagttcacatatatagactcatcagtgaaagcactatagaggagaacattctcaagaaagcaaatcagaaacgagctcttgatgatttagtgatacaacgtggtagctacaatacggaattcttcaagaaacttgatcctatggagttcttttccgggcacacatctcttcgtgtggaaggtcaggagaagaattgctctacatccgtgggagcttcaaatgatgtggatctggctctgtcaattgcagatgttgaagcagctattagacaggcagaagatgaagctgactatatggctctcaagaagttggaggaggaagaagctgtggacaatcaagaattcagtgaggaggttgcgggcagaccagaggaggatgaattggttaatgaggaggatggaaaacctgatgagcacattaatgaagatcacaaatactactcttctgatgtagagaaggagaagcacattactttgtctaccaatcgattaaacaatgaaaaggctcttacattggctgttggtgatgaagatactgacatgcttgctgatgtgaaacagatggcagcagcagctgctgcagcagggcaagcatgttcatcttttgagaaccagctccggccaattgatagatatgcaatgcgctttatggaactctgggatccagtaattgacaaagctgctgtcaatcatcaagtaaatgttgaggaggaagaatgggagcttgatcgcattgaaaaactcaaagaggatttagaagcggaaattgatgaagaccaagaaccactatcgtatcaatcatgggatgttgattttgctacgacagcctatcggcaacatgttgaggctttaactcaaaagcagttgttggaagaacaggaaagacaggctcaggaagcagcaaaagagttggaagagaataatgataatatgagcagtcaccgcagaaagtcaaacaagaataaaaagaagactggcaaattcaagtcccagaaaagaccgcgtttgtcttctgaatcagaagtcattctggaggaaacctctgtagatacaatgagcattgatgacaatgcaccctcacctgagcttataagtgatgaatcgccacaccattattctaacaagcgtaagaagattatgtctgctactgaggaagatagtaacagcagaagtttaaaaaagtttaagaaaactaaatcaagttttatttctgagttgtcacctaggccgaaggaggaccttaatgattcagatccaaaatcagtggctagaactaaaagtgatggcagactttccatcccttgcatgccagtaaagcgtgttattgtgataaagcctgagagattgaaaaagaagggaatatggtctcgagattgtgcttcagactcatggacatctgaggaagatgcagttctttgtggaactgtgcatgagtatggtcctctttgggaactggcaagtgattttcttcactccttgccaggcgggtcctcctataggggaagatatcatcatcctttgcattgctgtgagagatacagagaacttttctgcaaatatgcaatatcagcaacagataattctaacagtgaaaaggctccttctgggactggaaaggctgtacttagagtatctgaggatcaagctcagatgttggtgaatgtgaccagtgaacttcccaacaatgaattgcttctccagaaacacttcatggctgtaatttcatctgtatggagatcaaaatgttgccgtcatccctgctgttttaggaataagcctggtggatcaagtgagaactggcccatggtaaactttagaccaagcgtcaatctagttagggaagcccttgcagctggtcaggctaagtttacgctaactgtgattccaccaccgtcaagaaaccaggaatactcacggaattatttagaattagagttagatttcttgaaagatcaacatgcctatgaggaagacttcccgtctgtactaaatgtatccatactggaaccagaatcatccaaacaggctccagagccagtggaacaatcattgttatctgaactttcatgtagacaggctgagaaccgactcaggatagcgtcagaagcttgttatgatggtgaaagttttcattgggcatcatcatctttccacataaatgatgctgcccgccacaaatctggtttgaagtctatagggaagcacaaagcagcatcggaatctggtagacctcccaaatccaaagtccagaagattactgaattgcatcaggaagggccaattgccatgagtaattttctctgtatgcctgctcaactattgccaagtacagctgacttccacattagtgactccctatctgactttggtatcaacgattatgaattcaactactctgaggatctcttgcaagagtttgacgccctcgagttcttcccagatcagggtgactctggtctccttggtattgaagagttagaacctctttcggatttcacagatatcggatgaacatagatgagcaaattatggttgatgggatgctgtcctataccaagaggagacaagatcgcctctggcaggagcccaaggatataggttgagttgctcaaccatgcacagatgtgctgcaagctttatcatggctggctggagcaaagctgctggcttggtgaggtcacattgatctgacaagcttgaggatgggtttgcactaatggcggcattgggtaatttccatacatgtatgtatattggtagtctagaattgtaggatgtagaaatgcttccctcatttgtgtttgagggtagaccttgtaactcgaccacattgaaattttgttgagcaggtaccaacagagaaggtaaaagaggaggccctcagcaccacccatttgttgctgtatatcgtgttcattctctgtttaatccaatgttgtttggctattttgccactgaaaacatctcacatgtcaagttggtggatgccatctctatcagaaatttaggatgtggcgccaatgtccaaagaatgatcagtcaagtgcagcttatcggcgcattatatttggtcaggaatcaatgcatgacatcaatatgatcagaactgctgttccagtttcatttgaggaatgcaatttctggtgattcgggatgcaagtttttcataggaggtaaagagcgtgggcatagttgtacatgtaataaaatgaataaggttctgtgaactctcggtctcggttatgccaattaatagccataatttgttgttagaggccagggggctttttgatcagcgggctgctgctgtgagccggtaacaatgtagctgattgtgcgcctccatattgttttcttggtaagtggactttgcatcactgccaagcaacgatgagatagagtaattggtctgtttcgcgcaaaaatactacgagcttgtattcagtcttgacctccagtaacctgaacgctgagaatgtttggccaaccacataatacgtaggctgactagctgagaatatctagctaatcccgtaatctgtaagctgagaatgtatggtgaatcccataatctgtaagctgagattgtttggccaatcaaggtcacaatgctgcctacaagctgagaatgtttggccaattaaggtctagctgatgtccttagcagaaaacaaaattttctaaacgcaaactgttttaataatagtaagaaaacagggctccacttatttgtaaaatactctgcaagcgcgatcaacgtcagctattactacag

SEQ ID NO: 55603 - DNA, 7709 bp, Zea Mays
cttcgatgccccccctcgcagtcgcgactcgcctcctccgcgccgttccccattcatcctaaaggcctaaaccctagcctccttgctcctgcgctccggtcgccggtgcgtcccctcctccgctggccgccggcgccggtgcaatcacccgccgccgccagtgcatccgtccagggctgcacggccacctgtgcccactgggttgtgcggtcctaacgcaagttcggcgccgaccaccgccgaactgaagccgtctgcccacacccactcgcggcagcaccgccggacggctcccggcactgcgccagtgcgtgctgcctccggtatagcggctgccggatcccgccgcggcacctgcagcaatctgaaggcatactgcactgtctgctcttcaacacattgggcacatatttctctgggtcattgatttttttgtttaacccaaaactatggggctacaaccttccagcgtgatcaatttttacaactgcaataggattttcatgtacaagcagactacaaagaacttggggggacacagaaactgaaatggctacgtcagttccttttccttgctactcactacatattgctagatttctgcaggcactaatcactaacagttactgcactgttggtatgcgagtcctagtttgctgctcatgctctaagatatgaggtagttctgtgtgagggatttgaaagatggcgtcaaaaggtccccggtcaaggctagaccatgacacaagagctaggcgtcagaaggctcttgaagctccaagggagcctcgacggccaaaagttcactgggaccatgtccttgctgagatgttgtggctggcaaaggagtttgattctgagagaaaatggaagttgtccatggccaaaaagattgctcaaagagcaaataagagcatagttgatcaagcagcaaagggcgagagaaaacagaaggaggaagaacatagaatgcgaaaagttgccgttaatatttcaaaggatgtgaagaagttctggatcaaaatagaaaagctggttgtctataagcatcaactggagcttgaggagagaaagaagaaggcacttgataagcaacttgatttccttttaggtcagactgaaaggtattcaacaatgttggcggaaaaccttgtagatatgccctattctcaaaacctagaaaccgagacttcgcagataaaccaaccatcccatcaagaggtagtagcagaagagaacttaaacgcaaccattccggatgatcttgataatatggaagtcgatgatgattatgggagctccttggatgaagagccagaagatgatgagcacactatcgatgaggatgaagctcagattaccgaagctgagcgcaatgaagaactagctgctttagaggcagaagctgacctaccactggatgttattctcaagatgtatacaaaaaccaaagttactccgaaccaggctaatgggtgtgatcatgaacttgctcactcttcaagtgacgaaggcaattcttctgaggaagtggatgatggtcattcttatgctgagtttgtgaagaagaatcatggtaaaagtaatggaaatatttcttctatcaatgatcaggaggacgaagattacattgctgctgaagaagtaaaggatgacgaagcaactttgtccgaagaggaacaattggcaaagaaagaagatcctgatcatctggaagagattaagttactgcagaaggagagcgagataccactagaagaacttcttgcgaggtaccgagaggatggctgtgcagatcatgaaacagctgagttggagaattcaccccattttgttgaagagggatgtgctggaaactgagcacacgactctacaatcagaaattgcatcagagccttgtgctcaacaaaattttgtggaagagaataatctcactgatgttaagacagtcaatgaagataagagtgatgatgtaattgctgatgctgcagctgctgcaagatcagcacaaccaactggcaacaccttcttgactacaaaagtgcgcacaaaattcccattccttcttaagcattctcttcgtgaataccagcatatagggctggattggttagttgctatgtatgagaagaggcttaatggaattctagcagatgaaatgggtttaggcaagacaatcatgactatctccttgcttgcgcaccttgcgtgtgagaaggggatatggggtcctcatcttattgtcgtgccgactagtgttatgctaaattgggagactgaatttcttaagtggtgtcctgcttttaaaatactgacttatttcggaagtgcaaaggaaagaaagcagaagcgtcagggctggatgaaaccaaattacttccatgtttgcatcacaacatataggcttgtcattcaggattctaaagtgtttaagcgaaaaaagtggaagtatcttattcttgatgaggctcatctgataaagaactggaaatcacagcgttggcagacattgctcaacttcaattcaaagagacgtattcttctgactggaactccactgcaaaatgaccttatggaactttggtccctcatgcattttttgatgcctcatgtatttcagtctcatcaagagttcaaggattggttctgcaatccaatttccgggatggtggaaggtcaagataaagtaaacaaagaagttatagatcgattgcacaatgtccttcggccatttatactgcgtcgactgaaaagagatgttgagaaacagttaccaaagaagcatgagcatgtcatatattgccgactttctagaaggcaaaggaacttgtatgaagaatttgtcgctagctcagagacacaagcaaccctggcgagtgggaattattttggcatgataagcatcatcatgcaacttagaaaggtctgtaaccatccagatctttttgaaggtcggccaataataagctcatttgacatggctggtattaacatgcagctcagctattcagtctgcatgctccttgataagagtccattttctcaggtggacctgtctgatatgaattttgtgtttactcaaaatgaatttagcatgagttcctgggaagctgacgaggtcatctccgcctttccttcaagtatcacctccagggactgtgacctggatattttttgctctaataaggatcatcagggaagtaatttgacaaacatttttgaagatattcagaaagccctacaggaggagagaataaaggaatccagagaaagggcagcttctgttgcatggtggaatagagttagatgccaaaagagacctgtctatggcacaaacatgagacatgttttgactgtaaagcatcctgtatcaaatattcttaataagaggaacaatccattgtgccacatggactattcatcacgccttgcagatcttgttcttccatctgtggaacgctttcagaaaatgctttattttgttgaatcatttacattcgcaattccagctgctcgagctcctccccctgtttgctggtgcagcaaaggaaagtctcctgtttttattgatccagcatatagagaaaaatgcatgtacaagttttctcccattctgtctcctataaggtctgctatcgttcgtcgtcaagtctactttcctgataggcgtttgatccagtttgactgtgggaagttgcaggaacttgctattctgttaaggcgtttgaaatcagaaggccacagggccttgatatttactcagatgactaagatgcttgacgtcttggaagagttcataaatttatatgggtatacatatttgcgattagatggttctactcccccagaagagaggcagactctaatgcagaggttcaacacaaatccaaagtttttccttttcattttgtccacacgtagtggtggtgtgggaatcaaccttgtaggtgcagacactgttatcttctatgacagtgactggaaccctgcaatggaccaacaagcacaggacagatgccacaggattggtcagactcgtgaagttcacatatatagactcatcagtgaaagcactatagaggagaacattctcaagaaagcaaatcagaaacgagctcttgatgatttagtgatacaacgtggtagctacaatacggaattcttcaagaaacttgatcctatggagttcttttccgggcacacatctcttcgtgtggaaggtcaggagaagaattgctctacatccgtgggagcttcaaatgatgtggatctggctctgtcaattgcagatgttgaagcagctattagacaggcagaagatgaagctgactatatggctctcaagaagttggaggaggaagaagctgtggacaatcaagaattcagtgaggaggttgcgggcagaccagaggaggatgaattggttaatgaggaggatggaaaacctgatgagcacattaatgaagatcacaaatactactcttctgatgtagagaaggagaagcacattactttgtctaccaatcgattaaacaatgaaaaggctcttacattggctgttggtgatgaagatactgacatgcttgctgatgtgaaacagatggcagcagcagctgctgcagcagggcaagcatgttcatcttttgagaaccagctccggccaattgatagatatgcaatgcgctttatggaactctgggatccagtaattgacaaagctgctgtcaatcatcaagtaaatgttgaggaggaagaatgggagcttgatcgcattgaaaaactcaaagaggatttagaagcggaaattgatgaagaccaagaaccactatcgtatcaatcatgggatgttgattttgctacgacagcctatcggcaacatgttgaggctttaactcaaaagcagttgttggaagaacaggaaagacaggctcaggaagcagcaaaagagttggaagagaataatgataatatgagcagtcaccgcagaaagtcaaacaagaataaaaagaagactggcaaattcaagtcccagaaaagaccgcgtttgtcttctgaatcagaagtcattctggaggaaacctctgtagatacaatgagcattgatgacaatgcaccctcacctgagcttataagtgatgaatcgccacaccattattctaacaagcgtaagaagattatgtctgctactgaggaagatagtaacagcagaagtttaaaaaagtttaagaaaactaaatcaagttttatttctgagttgtcacctaggccgaaggaggaccttaatgattcagatccaaaatcagtggctagaactaaaagtgatggcagactttccatcccttgcatgccagtaaagcgtgttattgtgataaagcctgagagattgaaaaagaagggaatatggtctcgagattgtgcttcagactcatggacatctgaggaagatgcagttctttgtggaactgtgcatgagtatggtcctctttgggaactggcaagtgattttcttcactccttgccaggcgggtcctcctataggggaagatatcatcatcctttgcattgctgtgagagatacagagaacttttctgcaaatatgcaatatcagcaacagataattctaacagtgaaaaggctccttctgggactggaaaggctgtacttagagtatctgaggatcaagctcagatgttggtgaatgtgaccagtgaacttcccaacaatgaattgcttctccagaaacacttcatggctgtaatttcatctgtatggagatcaaaatgttgccgtcatccctgctgttttaggaataagcctggtggatcaagtgagaactggcccatggtaaactttagaccaagcgtcaatctagttagggaagcccttgcagctggtcaggctaagtttacgctaactgtgattccaccaccgtcaagaaaccaggaatactcacggaattatttagaattagagttagatttcttgaaagatcaacatgcctatgaggaagacttcccgtctgtactaaatgtatccatactggaaccagaatcatccaaacaggctccagagccagtggaacaatcattgttatctgaactttcatgtagacaggctgagaaccgactcaggatagcgtcagaagcttgttatgatggtgaaagttttcattgggcatcatcatctttccacataaatgatgctgcccgccacaaatctggtttgaagtctatagggaagcacaaagcagcatcggaatctggtagacctcccaaatccaaagtccagaagattactgaattgcatcaggaagggccaattgccatgagtaattttctctgtatgcctgctcaactattgccaagtacagctgacttccacattagtgactccctatctgactttggtatcaacgattatgaattcaactactctgaggatctcttgcaagagtttgacgccctcgagttcttcccagatcagggtgactctggtctccttggtattgaagagttagaacctctttcggatttcacagatatcggatgaacatagatgagcaaattatggttgatgggatgctgtcctataccaagaggagacaagatcgcctctggcaggagcccaaggatataggttgagttgctcaaccatgcacagatgtgctgcaagctttatcatggctggctggagcaaagctgctggcttggtgaggtcacattgatctgacaagcttgaggatgggtttgcactaatggcggcattgggtaatttccatacatgtaccaacagagaaggtaaaagaggaggccctcagcaccacccatttgttgctgtatatcgtgttcattctctgtttaatccaatgttgtttggctattttgccactgaaaacatctcacatgtcaagttggtggatgccatctctatcagaaatttaggatgtggcgccaatgtccaaagaatgatcagtcaagtgcagcttatcggcgcattatatttggtcaggaatcaatgcatgacatcaatatgatcagaactgctgttccagtttcatttgaggaatgcaatttctggtgattcgggatgcaagtttttcataggaggtaaagagcgtgggcatagttgtacatgtaataaaatgaataaggttctgtgaactctcggtctcggttatgccaattaatagccataatttgttgttagaggccagggggctttttgatcagcgggctgctgctgtgagccggtaacaatgtagctgattgtgcgcctccatattgttttcttggtaagtggactttgcatcactgccaagcaacgatgagatagagtaattggtctgtttcgcgcaaaaatactacgagcttgtattcagtcttgacctccagtaacctgaacgctgagaatgtttggccaaccacataatacgtaggctgactagctgagaatatctagctaatcccgtaatctgtaagctgagaatgtatggtgaatcccataatctgtaagctgagattgtttggccaatcaaggtcacaatgctgcctacaagctgagaatgtttggccaattaaggtctagctgatgtccttagcagaaaacaaaattttctaaacgcaaactgttttaataatagtaagaaaacagggctccacttatttgtaaaatactctgcaagcgcgatcaacgtcagctattactacag

SEQ ID NO: 55604 - DNA, 7774 bp, Zea Mays
cttcgatgccccccctcgcagtcgcgactcgcctcctccgcgccgttccccattcatcctaaaggcctaaaccctagcctccttgctcctgcgctccggtcgccggtgcgtcccctcctccgctggccgccggcgccggtgcaatcacccgccgccgccagtgcatccgtccagggctgcacggccacctgtgcccactgggttgtgcggtcctaacgcaagttcggcgccgaccaccgccgaactgaagccgtctgcccacacccactcgcggcagcaccgccggacggctcccggcactgcgccagtgcgtgctgcctccggtatagcggctgccggatcccgccgcggcacctgcagcaatctgaaggcatactgcactgtctgctcttcaacacattgggcacatatttctctgggtcattgatttttttgtttaacccaaaactatggggctacaaccttccagcgtgatcaatttttacaactgcaataggattttcatgtacaagcagactacaaagaacttggggggacacagaaactgaaatggctacgtcagttccttttccttgctactcactacatattgctagatttctgcaggcactaatcactaacagttactgcactgttggtatgcgagtcctagtttgctgctcatgctctaagatatgaggtagttctgtgtgagggatttgaaagatggcgtcaaaaggtccccggtcaaggctagaccatgacacaagagctaggcgtcagaaggctcttgaagctccaagggagcctcgacggccaaaagttcactgggaccatgtccttgctgagatgttgtggctggcaaaggagtttgattctgagagaaaatggaagttgtccatggccaaaaagattgctcaaagagcaaataagagcatagttgatcaagcagcaaagggcgagagaaaacagaaggaggaagaacatagaatgcgaaaagttgccgttaatatttcaaaggatgtgaagaagttctggatcaaaatagaaaagctggttgtctataagcatcaactggagcttgaggagagaaagaagaaggcacttgataagcaacttgatttccttttaggtcagactgaaaggtattcaacaatgttggcggaaaaccttgtagatatgccctattctcaaaacctagaaaccgagacttcgcagataaaccaaccatcccatcaagaggtagtagcagaagagaacttaaacgcaaccattccggatgatcttgataatatggaagtcgatgatgattatgggagctccttggatgaagagccagaagatgatgagcacactatcgatgaggatgaagctcagattaccgaagctgagcgcaatgaagaactagctgctttagaggcagaagctgacctaccactggatgttattctcaagatgtatacaaaaaccaaagttactccgaaccaggctaatgggtgtgatcatgaacttgctcactcttcaagtgacgaaggcaattcttctgaggaagtggatgatggtcattcttatgctgagtttgtgaagaagaatcatggtaaaagtaatggaaatatttcttctatcaatgatcaggaggacgaagattacattgctgctgaagaagtaaaggatgacgaagcaactttgtccgaagaggaacaattggcaaagaaagaagatcctgatcatctggaagagattaagttactgcagaaggagagcgagataccactagaagaacttcttgcgaggtaccgagaggatggctgtgcagatcatgaaacagctgagttggagaattcaccccattttgttgaagaggtcaataccgacaagtctttgaatgatcaatctgtgaacattttggaagcgaaaagtgatatttttgtggatcaccaatccagggatgtgctggaaactgagcacacgactctacaatcagaaattgcatcagagccttgtgctcaacaaaattttgtggaagagaataatctcactgatgttaagacagtcaatgaagataagagtgatgatgtaattgctgatgctgcagctgctgcaagatcagcacaaccaactggcaacaccttcttgactacaaaagtgcgcacaaaattcccattccttcttaagcattctcttcgtgaataccagcatatagggctggattggttagttgctatgtatgagaagaggcttaatggaattctagcagatgaaatgggtttaggcaagacaatcatgactatctccttgcttgcgcaccttgcgtgtgagaaggggatatggggtcctcatcttattgtcgtgccgactagtgttatgctaaattgggagactgaatttcttaagtggtgtcctgcttttaaaatactgacttatttcggaagtgcaaaggaaagaaagcagaagcgtcagggctggatgaaaccaaattacttccatgtttgcatcacaacatataggcttgtcattcaggattctaaagtgtttaagcgaaaaaagtggaagtatcttattcttgatgaggctcatctgataaagaactggaaatcacagcgttggcagacattgctcaacttcaattcaaagagacgtattcttctgactggaactccactgcaaaatgaccttatggaactttggtccctcatgcattttttgatgcctcatgtatttcagtctcatcaagagttcaaggattggttctgcaatccaatttccgggatggtggaaggtcaagataaagtaaacaaagaagttatagatcgattgcacaatgtccttcggccatttatactgcgtcgactgaaaagagatgttgagaaacagttaccaaagaagcatgagcatgtcatatattgccgactttctagaaggcaaaggaacttgtatgaagaatttgtcgctagctcagagacacaagcaaccctggcgagtgggaattattttggcatgataagcatcatcatgcaacttagaaaggtctgtaaccatccagatctttttgaaggtcggccaataataagctcatttgacatggctggtattaacatgcagctcagctattcagtctgcatgctccttgataagagtccattttctcaggtggacctgtctgatatgaattttgtgtttactcaaaatgaatttagcatgagttcctgggaagctgacgaggtcatctccgcctttccttcaagtatcacctccagggactgtgacctggatattttttgctctaataaggatcatcagggaagtaatttgacaaacatttttgaagatattcagaaagccctacaggaggagagaataaaggaatccagagaaagggcagcttctgttgcatggtggaatagagttagatgccaaaagagacctgtctatggcacaaacatgagacatgttttgactgtaaagcatcctgtatcaaatattcttaataagaggaacaatccattgtgccacatggactattcatcacgccttgcagatcttgttcttccatctgtggaacgctttcagaaaatgctttattttgttgaatcatttacattcgcaattccagctgctcgagctcctccccctgtttgctggtgcagcaaaggaaagtctcctgtttttattgatccagcatatagagaaaaatgcatgtacaagttttctcccattctgtctcctataaggtctgctatcgttcgtcgtcaagtctactttcctgataggcgtttgatccagtttgactgtgggaagttgcaggaacttgctattctgttaaggcgtttgaaatcagaaggccacagggccttgatatttactcagatgactaagatgcttgacgtcttggaagagttcataaatttatatgggtatacatatttgcgattagatggttctactcccccagaagagaggcagactctaatgcagaggttcaacacaaatccaaagtttttccttttcattttgtccacacgtagtggtggtgtgggaatcaaccttgtaggtgcagacactgttatcttctatgacagtgactggaaccctgcaatggaccaacaagcacaggacagatgccacaggattggtcagactcgtgaagttcacatatatagactcatcagtgaaagcactatagaggagaacattctcaagaaagcaaatcagaaacgagctcttgatgatttagtgatacaacgtggtagctacaatacggaattcttcaagaaacttgatcctatggagttcttttccgggcacacatctcttcgtgtggaaggtcaggagaagaattgctctacatccgtgggagcttcaaatgatgtggatctggctctgtcaattgcagatgttgaagcagctattagacaggcagaagatgaagctgactatatggctctcaagaagttggaggaggaagaagctgtggacaatcaagaattcagtgaggaggttgcgggcagaccagaggaggatgaattggttaatgaggaggatggaaaacctgatgagcacattaatgaagatcacaaatactactcttctgatgtagagaaggagaagcacattactttgtctaccaatcgattaaacaatgaaaaggctcttacattggctgttggtgatgaagatactgacatgcttgctgatgtgaaacagatggcagcagcagctgctgcagcagggcaagcatgttcatcttttgagaaccagctccggccaattgatagatatgcaatgcgctttatggaactctgggatccagtaattgacaaagctgctgtcaatcatcaagtaaatgttgaggaggaagaatgggagcttgatcgcattgaaaaactcaaagaggatttagaagcggaaattgatgaagaccaagaaccactatcgtatcaatcatgggatgttgattttgctacgacagcctatcggcaacatgttgaggctttaactcaaaagcagttgttggaagaacaggaaagacaggctcaggaagcagcaaaagagttggaagagaataatgataatatgagtcaccgcagaaagtcaaacaagaataaaaagaagactggcaaattcaagtcccagaaaagaccgcgtttgtcttctgaatcagaagtcattctggaggaaacctctgtagatacaatgagcattgatgacaatgcaccctcacctgagcttataagtgatgaatcgccacaccattattctaacaagcgtaagaagattatgtctgctactgaggaagatagtaacagcagaagtttaaaaaagtttaagaaaactaaatcaagttttatttctgagttgtcacctaggccgaaggaggaccttaatgattcagatccaaaatcagtggctagaactaaaagtgatggcagactttccatcccttgcatgccagtaaagcgtgttattgtgataaagcctgagagattgaaaaagaagggaatatggtctcgagattgtgcttcagactcatggacatctgaggaagatgcagttctttgtggaactgtgcatgagtatggtcctctttgggaactggcaagtgattttcttcactccttgccaggcgggtcctcctataggggaagatatcatcatcctttgcattgctgtgagagatacagagaacttttctgcaaatatgcaatatcagcaacagataattctaacagtgaaaaggctccttctgggactggaaaggctgtacttagagtatctgaggatcaagctcagatgttggtgaatgtgaccagtgaacttcccaacaatgaattgcttctccagaaacacttcatggctgtaatttcatctgtatggagatcaaaatgttgccgtcatccctgctgttttaggaataagcctggtggatcaagtgagaactggcccatggtaaactttagaccaagcgtcaatctagttagggaagcccttgcagctggtcaggctaagtttacgctaactgtgattccaccaccgtcaagaaaccaggaatactcacggaattatttagaattagagttagatttcttgaaagatcaacatgcctatgaggaagacttcccgtctgtactaaatgtatccatactggaaccagaatcatccaaacaggctccagagccagtggaacaatcattgttatctgaactttcatgtagacaggctgagaaccgactcaggatagcgtcagaagcttgttatgatggtgaaagttttcattgggcatcatcatctttccacataaatgatgctgcccgccacaaatctggtttgaagtctatagggaagcacaaagcagcatcggaatctggtagacctcccaaatccaaagtccagaagattactgaattgcatcaggaagggccaattgccatgagtaattttctctgtatgcctgctcaactattgccaagtacagctgacttccacattagtgactccctatctgactttggtatcaacgattatgaattcaactactctgaggatctcttgcaagagtttgacgccctcgagttcttcccagatcagggtgactctggtctccttggtattgaagagttagaacctctttcggatttcacagatatcggatgaacatagatgagcaaattatggttgatgggatgctgtcctataccaagaggagacaagatcgcctctggcaggagcccaaggatataggttgagttgctcaaccatgcacagatgtgctgcaagctttatcatggctggctggagcaaagctgctggcttggtgaggtcacattgatctgacaagcttgaggatgggtttgcactaatggcggcattgggtaccaacagagaaggtaaaagaggaggccctcagcaccacccatttgttgctgtatatcgtgttcattctctgtttaatccaatgttgtttggctattttgccactgaaaacatctcacatgtcaagttggtggatgccatctctatcagaaatttaggatgtggcgccaatgtccaaagaatgatcagtcaagtgcagcttatcggcgcattatatttggtcaggaatcaatgcatgacatcaatatgatcagaactgctgttccagtttcatttgaggaatgcaatttctggtgattcgggatgcaagtttttcataggaggtaaagagcgtgggcatagttgtacatgtaataaaatgaataaggttctgtgaactctcggtctcggttatgccaattaatagccataatttgttgttagaggccagggggctttttgatcagcgggctgctgctgtgagccggtaacaatgtagctgattgtgcgcctccatattgttttcttggtaagtggactttgcatcactgccaagcaacgatgagatagagtaattggtctgtttcgcgcaaaaatactacgagcttgtattcagtcttgacctccagtaacctgaacgctgagaatgtttggccaaccacataatacgtaggctgactagctgagaatatctagctaatcccgtaatctgtaagctgagaatgtatggtgaatcccataatctgtaagctgagattgtttggccaatcaaggtcacaatgctgcctacaagctgagaatgtttggccaattaaggtctagctgatgtccttagcagaaaacaaaattttctaaacgcaaactgttttaataatagtaagaaaacagggctccacttatttgtaaaatactctgcaagcgcgatcaacgtcagctattactacag

SEQ ID NO: 55605 - DNA, 7670 bp, Zea Mays
gactctgtctcccaaggccccgacgcccgtccgcccgtcgcgttgcttcgatgccccccctcgcagtcgcgactcgcctcctccgcgccgttccccattcatcctaaaggcctaaaccctagcctccttgctcctgcgctccggtcgccggtgcgtcccctcctccgctggccgccggcgccggtgcaatcacccgccgccgccagtgcatccgtccagggctgcacggccacctgtgcccactgggttgtgcggtcctaacgcaagttcggcgccgaccaccgccgaactgaagccgtctgcccacacccactcgcggcagcaccgccggacggctcccggcactgcgccagtgcgtgctgcctccggtatagcggctgccggatcccgccgcggcacctgcagatttctgcaggcactaatcactaacagttactgcactgttggtatgcgagtcctagtttgctgctcatgctctaagatatgaggtagttctgtgtgagggatttgaaagatggcgtcaaaaggtccccggtcaaggctagaccatgacacaagagctaggcgtcagaaggctcttgaagctccaagggagcctcgacggccaaaagttcactgggaccatgtccttgctgagatgttgtggctggcaaaggagtttgattctgagagaaaatggaagttgtccatggccaaaaagattgctcaaagagcaaataagagcatagttgatcaagcagcaaagggcgagagaaaacagaagggaaagcaggttgtctataagcatcaactggagcttgaggagagaaagaagaaggcacttgataagcaacttgatttccttttaggtcagactgaaaggtattcaacaatgttggcggaaaaccttgtagatatgccctattctcaaaacctagaaaccgagacttcgcagataaaccaaccatcccatcaagaggtagtagcagaagagaacttaaacgcaaccattccggatgatcttgataatatggaagtcgatgatgattatgggagctccttggatgaagagccagaagatgatgagcacactatcgatgaggatgaagctcagattaccgaagctgagcgcaatgaagaactagctgctttagaggcagaagctgacctaccactggatgttattctcaagatgtatacaaaaaccaaagttactccgaaccaggctaatgggtgtgatcatgaacttgctcactcttcaagtgacgaaggcaattcttctgaggaagtggatgatggtcattcttatgctgagtttgtgaagaagaatcatgaggacgaagattacattgctgctgaagaagtaaaggatgacgaagcaactttgtccgaagaggaacaattggcaaagaaagaagatcctgatcatctggaagagattaagttactgcagaaggagagcgagataccactagaagaacttcttgcgaggtaccgagaggtacagttagattttccatttatttcttcgaacaacttactgtggtccatttgtaatacctttttttatatttaggatggctgtgcagatcatgaaacagctgagttggagaattcaccccattttgttgaagaggtcaataccgacaagtctttgaatgatcaatctgtgaacattttggaagcgaaaagtgatatttttgtggatcaccaatccagggatgtgctggaaactgagcacacgactctacaatcagaaattgcatcagagccttgtgctcaacaaaattttgtggaagagaataatctcactgatgttaagacagtcaatgaagataagagtgatgatgtaattgctgatgctgcagctgctgcaagatcagcacaaccaactggcaacaccttcttgactacaaaagtgcgcacaaaattcccattccttcttaagcattctcttcgtgaataccagcatatagggctggattggttagttgctatgtatgagaagaggcttaatggaattctagcagatgaaatgggtttaggcaagacaatcatgactatctccttgcttgcgcaccttgcgtgtgagaaggggatatggggtcctcatcttattgtcgtgccgactagtgttatgctaaattgggagactgaatttcttaagtggtgtcctgcttttaaaatactgacttatttcggaagtgcaaaggaaagaaagcagaagcgtcagggctggatgaaaccaaattacttccatgtttgcatcacaacatataggcttgtcattcaggattctaaagtgtttaagcgaaaaaagtggaagtatcttattcttgatgaggctcatctgataaagaactggaaatcacagcgttggcagacattgctcaacttcaattcaaagagacgtattcttctgactggaactccactgcaaaatgaccttatggaactttggtccctcatgcattttttgatgcctcatgtatttcagtctcatcaagagttcaaggattggttctgcaatccaatttccgggatggtggaaggtcaagataaagtaaacaaagaagttatagatcgattgcacaatgtccttcggccatttatactgcgtcgactgaaaagagatgttgagaaacagttaccaaagaagcatgagcatgtcatatattgccgactttctagaaggcaaaggaacttgtatgaagaatttgtcgctagctcagagacacaagcaaccctggcgagtgggaattattttggcatgataagcatcatcatgcaacttagaaaggtctgtaaccatccagatctttttgaaggtcggccaataataagctcatttgacatggctggtattaacatgcagctcagctattcagtctgcatgctccttgataagagtccattttctcaggtggacctgtctgatatgaattttgtgtttactcaaaatgaatttagcatgagttcctgggaagctgacgaggtcatctccgcctttccttcaagtatcacctccagggactgtgacctggatattttttgctctaataaggatcatcagggaagtaatttgacaaacatttttgaagatattcagaaagccctacaggaggagagaataaaggaatccagagaaagggcagcttctgttgcatggtggaatagagttagatgccaaaagagacctgtctatggcacaaacatgagacatgttttgactgtaaagcatcctgtatcaaatattcttaataagaggaacaatccattgtgccacatggactattcatcacgccttgcagatcttgttcttccatctgtggaacgctttcagaaaatgctttattttgttgaatcatttacattcgcaattccagctgctcgagctcctccccctgtttgctggtgcagcaaaggaaagtctcctgtttttattgatccagcatatagagaaaaatgcatgtacaagttttctcccattctgtctcctataaggtctgctatcgttcgtcgtcaagtctactttcctgataggcgtttgatccagtttgactgtgggaagttgcaggaacttgctattctgttaaggcgtttgaaatcagaaggccacagggccttgatatttactcagatgactaagatgcttgacgtcttggaagagttcataaatttatatgggtatacatatttgcgattagatggttctactcccccagaagagaggcagactctaatgcagaggttcaacacaaatccaaagtttttccttttcattttgtccacacgtagtggtggtgtgggaatcaaccttgtaggtgcagacactgttatcttctatgacagtgactggaaccctgcaatggaccaacaagcacaggacagatgccacaggattggtcagactcgtgaagttcacatatatagactcatcagtgaaagcactatagaggagaacattctcaagaaagcaaatcagaaacgagctcttgatgatttagtgatacaacgtggtagctacaatacggaattcttcaagaaacttgatcctatggagttcttttccgggcacacatctcttcgtgtggaaggtcaggagaagaattgctctacatccgtgggagcttcaaatgatgtggatctggctctgtcaattgcagatgttgaagcagctattagacaggcagaagatgaagctgactatatggctctcaagaagttggaggaggaagaagctgtggacaatcaagaattcagtgaggaggttgcgggcagaccagaggaggatgaattggttaatgaggaggatggaaaacctgatgagcacattaatgaagatcacaaatactactcttctgatgtagagaaggagaagcacattactttgtctaccaatcgattaaacaatgaaaaggctcttacattggctgttggtgatgaagatactgacatgcttgctgatgtgaaacagatggcagcagcagctgctgcagcagggcaagcatgttcatcttttgagaaccagctccggccaattgatagatatgcaatgcgctttatggaactctgggatccagtaattgacaaagctgctgtcaatcatcaagtaaatgttgaggaggaagaatgggagcttgatcgcattgaaaaactcaaagaggatttagaagcggaaattgatgaagaccaagaaccactatcgtatcaatcatgggatgttgattttgctacgacagcctatcggcaacatgttgaggctttaactcaaaagcagttgttggaagaacaggaaagacaggctcaggaagcagcaaaagagttggaagagaataatgataatatgagcagtcaccgcagaaagtcaaacaagaataaaaagaagactggcaaattcaagtcccagaaaagaccgcgtttgtcttctgaatcagaagtcattctggaggaaacctctgtagatacaatgagcattgatgacaatgcaccctcacctgagcttataagtgatgaatcgccacaccattattctaacaagcgtaagaagattatgtctgctactgaggaagatagtaacagcagaagtttaaaaaagtttaagaaaactaaatcaagttttatttctgagttgtcacctaggccgaaggaggaccttaatgattcagatccaaaatcagtggctagaactaaaagtgatggcagactttccatcccttgcatgccagtaaagcgtgttattgtgataaagcctgagagattgaaaaagaagggaatatggtctcgagattgtgcttcagactcatggacatctgaggaagatgcagttctttgtggaactgtgcatgagtatggtcctctttgggaactggcaagtgattttcttcactccttgccaggcgggtcctcctataggggaagatatcatcatcctttgcattgctgtgagagatacagagaacttttctgcaaatatgcaatatcagcaacagataattctaacagtgaaaaggctccttctgggactggaaaggctgtacttagagtatctgaggatcaagctcagatgttggtgaatgtgaccagtgaacttcccaacaatgaattgcttctccagaaacacttcatggctgtaatttcatctgtatggagatcaaaatgttgccgtcatccctgctgttttaggaataagcctggtggatcaagtgagaactggcccatggtaaactttagaccaagcgtcaatctagttagggaagcccttgcagctggtcaggctaagtttacgctaactgtgattccaccaccgtcaagaaaccaggaatactcacggaattatttagaattagagttagatttcttgaaagatcaacatgcctatgaggaagacttcccgtctgtactaaatgtatccatactggaaccagaatcatccaaacaggctccagagccagtggaacaatcattgttatctgaactttcatgtagacaggctgagaaccgactcaggatagcgtcagaagcttgttatgatggtgaaagttttcattgggcatcatcatctttccacataaatgatgctgcccgccacaaatctggtttgaagtctatagggaagcacaaagcagcatcggaatctggtagacctcccaaatccaaagtccagaagattactgaattgcatcaggaagggccaattgccatgagtaattttctctgtatgcctgctcaactattgccaagtacagctgacttccacattagtgactccctatctgactttggtatcaacgattatgaattcaactactctgaggatctcttgcaagagtttgacgccctcgagttcttcccagatcagggtgactctggtctccttggtattgaagagttagaacctctttcggatttcacagatatcggatgaacatagatgagcaaattatggttgatgggatgctgtcctataccaagaggagacaagatcgcctctggcaggagcccaaggatataggttgagttgctcaaccatgcacagatgtgctgcaagctttatcatggctggctggagcaaagctgctggcttggtgaggtcacattgatctgacaagcttgaggatgggtttgcactaatggcggcattgggtaatttccatacatgtatgtatattggtagtctagaattgtaggatgtagaaatgcttccctcatttgtgtttgagggtagaccttgtaactcgaccacattgaaattttgttgagcaggtaccaacagagaaggtaaaagaggaggccctcagcaccacccatttgttgctgtatatcgtgttcattctctgtttaatccaatgttgtttggctattttgccactgaaaacatctcacatgtcaagttggtggatgccatctctatcagaaatttaggatgtggcgccaatgtccaaagaatgatcagtcaagtgcagcttatcggcgcattatatttggtcaggaatcaatgcatgacatcaatatgatcagaactgctgttccagtttcatttgaggaatgcaatttctggtgattcgggatgcaagtttttcataggaggtaaagagcgtgggcatagttgtacatgtaataaaatgaataaggttctgtgaactctcggtctcggttatgccaattaatagccataatttgttgttagaggccagggggctttttgatcagcgggctgctgctgtgagccggtaacaatgtagctgattgtgcgcctccatattgttttcttggtaagtggactttgcatcactgccaagcaacgatgagatagagtaattggtctgtttcgcgcaaaaatactacgagcttgtattcagtcttgacctccagtaacctgaacgctgagaatgtttggccaaccacataatacgtaggctgactagctgagaatatctagctaatcccgtaatctgtaagctgagaatgtatggtgaatcccataatctgtaagctgagattgtttggccaatcaaggtcacaatgctgcctacaagctgagaatgtttggccaattaaggtctagctgatgtccttagcagaaaacaaaattttctaaacgcaaactgttttaataatagtaagaaaacagggctccacttatttgtaaaatactctgcaagcgcgatcaacgtcagctattactacag

SEQ ID NO: 55606 - DNA, 7695 bp, Zea Mays
ctcgatgcgtcatgcctcatgcgactctgtctcccaaggccccgacgcccgtccgcccgtcgcgttgcttcgatgccccccctcgcagtcgcgactcgcctcctccgcgccgttccccattcatcctaaaggcctaaaccctagcctccttgctcctgcgctccggtcgccggtgcgtcccctcctccgctggccgccggcgccggtgcaatcacccgccgccgccagtgcatccgtccagggctgcacggccacctgtgcccactgggttgtgcggtcctaacgcaagttcggcgccgaccaccgccgaactgaagccgtctgcccacacccactcgcggcagcaccgccggacggctcccggcactgcgccagtgcgtgctgcctccggtatagcggctgccggatcccgccgcggcacctgcagatttctgcaggcactaatcactaacagttactgcactgttggtatgcgagtcctagtttgctgctcatgctctaagatatgaggtagttctgtgtgagggatttgaaagatggcgtcaaaaggtccccggtcaaggctagaccatgacacaagagctaggcgtcagaaggctcttgaagctccaagggagcctcgacggccaaaagttcactgggaccatgtccttgctgagatgttgtggctggcaaaggagtttgattctgagagaaaatggaagttgtccatggccaaaaagattgctcaaagagcaaataagagcatagttgatcaagcagcaaagggcgagagaaaacagaaggaggaagaacatagaatgcgaaaagttgccgttaatatttcaaaggatgtgaagaagttctggatcaaaatagaaaagctggttgtctataagcatcaactggagcttgaggagagaaagaagaaggcacttgataagcaacttgatttccttttaggtcagactgaaaggtattcaacaatgttggcggaaaaccttgtagatatgccctattctcaaaacctagaaaccgagacttcgcagataaaccaaccatcccatcaagaggtagtagcagaagagaacttaaacgcaaccattccggatgatcttgataatatggaagtcgatgatgattatgggagctccttggatgaagagccagaagatgatgagcacactatcgatgaggatgaagctcagattaccgaagctgagcgcaatgaagaactagctgctttagaggcagaagctgacctaccactggatgttattctcaagatgtatacaaaaaccaaagttactccgaaccaggctaatgggtgtgatcatgaacttgctcactcttcaagtgacgaaggcaattcttctgaggaagtggatgatggtcattcttatgctgagtttgtgaagaagaatcatggtaaaagtaatggaaatatttcttctatcaatgatcaggaggacgaagattacattgctgctgaagaagtaaaggatgacgaagcaactttgtccgaagaggaacaattggcaaagaaagaagatcctgatcatctggaagagattaagttactgcagaaggagagcgagataccactagaagaacttcttgcgaggtaccgagaggtacagttagattttccatttatttcttcgaacaacttactgtggtccatttgtaatacctttttttatatttaggatggctgtgcagatcatgaaacagctgagttggagaattcaccccattttgttgaagaggtcaataccgacaagtctttgaatgatcaatctgtgaacattttggaagcgaaaagtgatatttttgtggatcaccaatccagggatgtgctggaaactgagcacacgactctacaatcagaaattgcatcagagccttgtgctcaacaaaattttgtggaagagaataatctcactgatgttaagacagtcaatgaagataagagtgatgatgtaattgctgatgctgcagctgctgcaagatcagcacaaccaactggcaacaccttcttgactacaaaagtgcgcacaaaattcccattccttcttaagcattctcttcgtgaataccagcatatagggctggattggttagttgctatgtatgagaagaggcttaatggaattctagcagatgaaatgggtttaggcaagacaatcatgactatctccttgcttgcgcaccttgcgtgtgagaaggggatatggggtcctcatcttattgtcgtgccgactagtgttatgctaaattgggagactgaatttcttaagtggtgtcctgcttttaaaatactgacttatttcggaagtgcaaaggaaagaaagcagaagcgtcagggctggatgaaaccaaattacttccatgtttgcatcacaacatataggcttgtcattcaggattctaaagtgtttaagcgaaaaaagtggaagtatcttattcttgatgaggctcatctgataaagaactggaaatcacagcgttggcagacattgctcaacttcaattcaaagagacgtattcttctgactggaactccactgcaaaatgaccttatggaactttggtccctcatgcattttttgatgcctcatgtatttcagtctcatcaagagttcaaggattggttctgcaatccaatttccgggatggtggaaggtcaagataaagtaaacaaagaagttatagatcgattgcacaatgtccttcggccatttatactgcgtcgactgaaaagagatgttgagaaacagttaccaaagaagcatgagcatgtcatatattgccgactttctagaaggcaaaggaacttgtatgaagaatttgtcgctagctcagagacacaagcaaccctggcgagtgggaattattttggcatgataagcatcatcatgcaacttagaaaggtctgtaaccatccagatctttttgaaggtcggccaataataagctcatttgacatggctggtattaacatgcagctcagctattcagtctgcatgctccttgataagagtccattttctcaggtggacctgtctgatatgaattttgtgtttactcaaaatgaatttagcatgagttcctgggaagctgacgaggtcatctccgcctttccttcaagtatcacctccagggactgtgacctggatattttttgctctaataaggatcatcagggaagtaatttgacaaacatttttgaagatattcagaaagccctacaggaggagagaataaaggaatccagagaaagggcagcttctgttgcatggtggaatagagttagatgccaaaagagacctgtctatggcacaaacatgagacatgttttgactgtaaagcatcctgtatcaaatattcttaataagaggaacaatccattgtgccacatggactattcatcacgccttgcagatcttgttcttccatctgtggaacgctttcagaaaatgctttattttgttgaatcatttacattcgcaattccagctgctcgagctcctccccctgtttgctggtgcagcaaaggaaagtctcctgtttttattgatccagcatatagagaaaaatgcatgtacaagttttctcccattctgtctcctataaggtctgctatcgttcgtcgtcaagtctactttcctgataggcgtttgatccagtttgactgtgggaagttgcaggaacttgctattctgttaaggcgtttgaaatcagaaggccacagggccttgatatttactcagatgactaagatgcttgacgtcttggaagagttcataaatttatatgggtatacatatttgcgattagatggttctactcccccagaagagaggcagactctaatgcagaggttcaacacaaatccaaagtttttccttttcattttgtccacacgtagtggtggtgtgggaatcaaccttgtaggtgcagacactgttatcttctatgacagtgactggaaccctgcaatggaccaacaagcacaggacagatgccacaggattggtcagactcgtgaagttcacatatatagactcatcagtgaaagcactatagaggagaacattctcaagaaagcaaatcagaaacgagctcttgatgatttagtgatacaacgtggtagctacaatacggaattcttcaagaaacttgatcctatggagttcttttccgggcacacatctcttcgtgtggaaggtcaggagaagaattgctctacatccgtgggagcttcaaatgatgtggatctggctctgtcaattgcagatgttgaagcagctattagacaggcagaagatgaagctgactatatggctctcaagaagttggaggaggaagaagctgtggacaatcaagaattcagtgaggaggttgcgggcagaccagaggaggatgaattggttaatgaggaggatggaaaacctgatgagcacattaatgaagatcacaaatactactcttctgatgtagagaaggagaagcacattactttgtctaccaatcgattaaacaatgaaaaggctcttacattggctgttggtgatgaagatactgacatgcttgctgatgtgaaacagatggcagcagcagctgctgcagcagggcaagcatgttcatcttttgagaaccagctccggccaattgatagatatgcaatgcgctttatggaactctgggatccagtaattgacaaagctgctgtcaatcatcaagtaaatgttgaggaggaagaatgggagcttgatcgcattgaaaaactcaaagaggatttagaagcggaaattgatgaagaccaagaaccactatcgtatcaatcatgggatgttgattttgctacgacagcctatcggcaacatgttgaggctttaactcaaaagcagttgttggaagaacaggaaagacaggctcaggaagcagcaaaagagttggaagagaataatgataatatgagtcaccgcagaaagtcaaacaagaataaaaagaagactggcaaattcaagtcccagaaaagaccgcgtttgtcttctgaatcagaagtcattctggaggaaacctctgtagatacaatgagcattgatgacaatgcaccctcacctgagcttataagtgatgaatcgccacaccattattctaacaagcgtaagaagattatgtctgctactgaggaagatagtaacagcagaagtttaaaaaagtttaagaaaactaaatcaagttttatttctgagttgtcacctaggccgaaggaggaccttaatgattcagatccaaaatcagtggctagaactaaaagtgatggcagactttccatcccttgcatgccagtaaagcgtgttattgtgataaagcctgagagattgaaaaagaagggaatatggtctcgagattgtgcttcagactcatggacatctgaggaagatgcagttctttgtggaactgtgcatgagtatggtcctctttgggaactggcaagtgattttcttcactccttgccaggcgggtcctcctataggggaagatatcatcatcctttgcattgctgtgagagatacagagaacttttctgcaaatatgcaatatcagcaacagataattctaacagtgaaaaggctccttctgggactggaaaggctgtacttagagtatctgaggatcaagctcagatgttggtgaatgtgaccagtgaacttcccaacaatgaattgcttctccagaaacacttcatggctgtaatttcatctgtatggagatcaaaatgttgccgtcatccctgctgttttaggaataagcctggtggatcaagtgagaactggcccatggtaaactttagaccaagcgtcaatctagttagggaagcccttgcagctggtcaggctaagtttacgctaactgtgattccaccaccgtcaagaaaccaggaatactcacggaattatttagaattagagttagatttcttgaaagatcaacatgcctatgaggaagacttcccgtctgtactaaatgtatccatactggaaccagaatcatccaaacaggctccagagccagtggaacaatcattgttatctgaactttcatgtagacaggctgagaaccgactcaggatagcgtcagaagcttgttatgatggtgaaagttttcattgggcatcatcatctttccacataaatgatgctgcccgccacaaatctggtttgaagtctatagggaagcacaaagcagcatcggaatctggtagacctcccaaatccaaagtccagaagattactgaattgcatcaggaagggccaattgccatgagtaattttctctgtatgcctgctcaactattgccaagtacagctgacttccacattagtgactccctatctgactttggtatcaacgattatgaattcaactactctgaggatctcttgcaagagtttgacgccctcgagttcttcccagatcagggtgactctggtctccttggtattgaagagttagaacctctttcggatttcacagatatcggatgaacatagatgagcaaattatggttgatgggatgctgtcctataccaagaggagacaagatcgcctctggcaggagcccaaggatataggttgagttgctcaaccatgcacagatgtgctgcaagctttatcatggctggctggagcaaagctgctggcttggtgaggtcacattgatctgacaagcttgaggatgggtttgcactaatggcggcattgggtaatttccatacatgtaccaacagagaaggtaaaagaggaggccctcagcaccacccatttgttgctgtatatcgtgttcattctctgtttaatccaatgttgtttggctattttgccactgaaaacatctcacatgtcaagttggtggatgccatctctatcagaaatttaggatgtggcgccaatgtccaaagaatgatcagtcaagtgcagcttatcggcgcattatatttggtcaggaatcaatgcatgacatcaatatgatcagaactgctgttccagtttcatttgaggaatgcaatttctggtgattcgggatgcaagtttttcataggaggtaaagagcgtgggcatagttgtacatgtaataaaatgaataaggttctgtgaactctcggtctcggttatgccaattaatagccataatttgttgttagaggccagggggctttttgatcagcgggctgctgctgtgagccggtaacaatgtagctgattgtgcgcctccatattgttttcttggtaagtggactttgcatcactgccaagcaacgatgagatagagtaattggtctgtttcgcgcaaaaatactacgagcttgtattcagtcttgacctccagtaacctgaacgctgagaatgtttggccaaccacataatacgtaggctgactagctgagaatatctagctaatcccgtaatctgtaagctgagaatgtatggtgaatcccataatctgtaagctgagattgtttggccaatcaaggtcacaatgctgcctacaagctgagaatgtttggccaattaaggtctagctgatgtccttagcagaaaacaaaattttctaaacgcaaactgttttaataatagtaagaaaacagggctccacttatttgtaaaatactctgcaagcgcgatcaacgtcagctattactacag

SEQ ID NO: 55607 - DNA, 7913 bp, Zea Mays
gtcaatacacggcccatccgccctggtcctcagcccaatctcccatcgtctcgatgactcgatgcgtcatgcctcatgcgactctgtctcccaaggccccgacgcccgtccgcccgtcgcgttgcttcgatgccccccctcgcagtcgcgactcgcctcctccgcgccgttccccattcatcctaaaggcctaaaccctagcctccttgctcctgcgctccggtcgccggtgcgtcccctcctccgctggccgccggcgccggtgcaatcacccgccgccgccagtgcatccgtccagggctgcacggccacctgtgcccactgggttgtgcggtcctaacgcaagttcggcgccgaccaccgccgaactgaagccgtctgcccacacccactcgcggcagcaccgccggacggctcccggcactgcgccagtgcgtgctgcctccggtatagcggctgccggatcccgccgcggcacctgcagcaatctgaaggcatactgcactgtctgctcttcaacacattgggcacatatttctctgggtcattgatttttttgtttaacccaaaactatggggctacaaccttccagcgtgatcaatttttacaactgcaataggattttcatgtacaagcagactacaaagaacttggggggacacagaaactgaaatggctacgtcagttccttttccttgctactcactacatattgctagatttctgcaggcactaatcactaacagttactgcactgttggtatgcgagtcctagtttgctgctcatgctctaagatatgaggtagttctgtgtgagggatttgaaagatggcgtcaaaaggtccccggtcaaggctagaccatgacacaagagctaggcgtcagaaggctcttgaagctccaagggagcctcgacggccaaaagttcactgggaccatgtccttgctgagatgttgtggctggcaaaggagtttgattctgagagaaaatggaagttgtccatggccaaaaagattgctcaaagagcaaataagagcatagttgatcaagcagcaaagggcgagagaaaacagaaggaggaagaacatagaatgcgaaaagttgccgttaatatttcaaaggatgtgaagaagttctggatcaaaatagaaaagctggttgtctataagcatcaactggagcttgaggagagaaagaagaaggcacttgataagcaacttgatttccttttaggtcagactgaaaggtattcaacaatgttggcggaaaaccttgtagatatgccctattctcaaaacctagaaaccgagacttcgcagataaaccaaccatcccatcaagaggtagtagcagaagagaacttaaacgcaaccattccggatgatcttgataatatggaagtcgatgatgattatgggagctccttggatgaagagccagaagatgatgagcacactatcgatgaggatgaagctcagattaccgaagctgagcgcaatgaagaactagctgctttagaggcagaagctgacctaccactggatgttattctcaagatgtatacaaaaaccaaagttactccgaaccaggctaatgggtgtgatcatgaacttgctcactcttcaagtgacgaaggcaattcttctgaggaagtggatgatggtcattcttatgctgagtttgtgaagaagaatcatggtaaaagtaatggaaatatttcttctatcaatgatcaggaggacgaagattacattgctgctgaagaagtaaaggatgacgaagcaactttgtccgaagaggaacaattggcaaagaaagaagatcctgatcatctggaagagattaagttactgcagaaggagagcgagataccactagaagaacttcttgcgaggtaccgagaggatggctgtgcagatcatgaaacagctgagttggagaattcaccccattttgttgaagaggtcaataccgacaagtctttgaatgatcaatctgtgaacattttggaagcgaaaagtgatatttttgtggatcaccaatccagggatgtgctggaaactgagcacacgactctacaatcagaaattgcatcagagccttgtgctcaacaaaattttgtggaagagaataatctcactgatgttaagacagtcaatgaagataagagtgatgatgtaattgctgatgctgcagctgctgcaagatcagcacaaccaactggcaacaccttcttgactacaaaagtgcgcacaaaattcccattccttcttaagcattctcttcgtgaataccagcatatagggctggattggttagttgctatgtatgagaagaggcttaatggaattctagcagatgaaatgggtttaggcaagacaatcatgactatctccttgcttgcgcaccttgcgtgtgagaaggggatatggggtcctcatcttattgtcgtgccgactagtgttatgctaaattgggagactgaatttcttaagtggtgtcctgcttttaaaatactgacttatttcggaagtgcaaaggaaagaaagcagaagcgtcagggctggatgaaaccaaattacttccatgtttgcatcacaacatataggcttgtcattcaggattctaaagtgtttaagcgaaaaaagtggaagtatcttattcttgatgaggctcatctgataaagaactggaaatcacagcgttggcagacattgctcaacttcaattcaaagagacgtattcttctgactggaactccactgcaaaatgaccttatggaactttggtccctcatgcattttttgatgcctcatgtatttcagtctcatcaagagttcaaggattggttctgcaatccaatttccgggatggtggaaggtcaagataaagtaaacaaagaagttatagatcgattgcacaatgtccttcggccatttatactgcgtcgactgaaaagagatgttgagaaacagttaccaaagaagcatgagcatgtcatatattgccgactttctagaaggcaaaggaacttgtatgaagaatttgtcgctagctcagagacacaagcaaccctggcgagtgggaattattttggcatgataagcatcatcatgcaacttagaaaggtctgtaaccatccagatctttttgaaggtcggccaataataagctcatttgacatggctggtattaacatgcagctcagctattcagtctgcatgctccttgataagagtccattttctcaggtggacctgtctgatatgaattttgtgtttactcaaaatgaatttagcatgagttcctgggaagctgacgaggtcatctccgcctttccttcaagtatcacctccagggactgtgacctggatattttttgctctaataaggatcatcagggaagtaatttgacaaacatttttgaagatattcagaaagccctacaggaggagagaataaaggaatccagagaaagggcagcttctgttgcatggtggaatagagttagatgccaaaagagacctgtctatggcacaaacatgagacatgttttgactgtaaagcatcctgtatcaaatattcttaataagaggaacaatccattgtgccacatggactattcatcacgccttgcagatcttgttcttccatctgtggaacgctttcagaaaatgctttattttgttgaatcatttacattcgcaattccagctgctcgagctcctccccctgtttgctggtgcagcaaaggaaagtctcctgtttttattgatccagcatatagagaaaaatgcatgtacaagttttctcccattctgtctcctataaggtctgctatcgttcgtcgtcaagtctactttcctgataggcgtttgatccagtttgactgtgggaagttgcaggaacttgctattctgttaaggcgtttgaaatcagaaggccacagggccttgatatttactcagatgactaagatgcttgacgtcttggaagagttcataaatttatatgggtatacatatttgcgattagatggttctactcccccagaagagaggcagactctaatgcagaggttcaacacaaatccaaagtttttccttttcattttgtccacacgtagtggtggtgtgggaatcaaccttgtaggtgcagacactgttatcttctatgacagtgactggaaccctgcaatggaccaacaagcacaggacagatgccacaggattggtcagactcgtgaagttcacatatatagactcatcagtgaaagcactatagaggagaacattctcaagaaagcaaatcagaaacgagctcttgatgatttagtgatacaacgtggtagctacaatacggaattcttcaagaaacttgatcctatggagttcttttccgggcacacatctcttcgtgtggaaggtcaggagaagaattgctctacatccgtgggagcttcaaatgatgtggatctggctctgtcaattgcagatgttgaagcagctattagacaggcagaagatgaagctgactatatggctctcaagaagttggaggaggaagaagctgtggacaatcaagaattcagtgaggaggttgcgggcagaccagaggaggatgaattggttaatgaggaggatggaaaacctgatgagcacattaatgaagatcacaaatactactcttctgatgtagagaaggagaagcacattactttgtctaccaatcgattaaacaatgaaaaggctcttacattggctgttggtgatgaagatactgacatgcttgctgatgtgaaacagatggcagcagcagctgctgcagcagggcaagcatgttcatcttttgagaaccagctccggccaattgatagatatgcaatgcgctttatggaactctgggatccagtaattgacaaagctgctgtcaatcatcaagtaaatgttgaggaggaagaatgggagcttgatcgcattgaaaaactcaaagaggatttagaagcggaaattgatgaagaccaagaaccactatcgtatcaatcatgggatgttgattttgctacgacagcctatcggcaacatgttgaggctttaactcaaaagcagttgttggaagaacaggaaagacaggctcaggaagcagcaaaagagttggaagagaataatgataatatgagtcaccgcagaaagtcaaacaagaataaaaagaagactggcaaattcaagtcccagaaaagaccgcgtttgtcttctgaatcagaagtcattctggaggaaacctctgtagatacaatgagcattgatgacaatgcaccctcacctgagcttataagtgatgaatcgccacaccattattctaacaagcgtaagaagattatgtctgctactgaggaagatagtaacagcagaagtttaaaaaagtttaagaaaactaaatcaagttttatttctgagttgtcacctaggccgaaggaggaccttaatgattcagatccaaaatcagtggctagaactaaaagtgatggcagactttccatcccttgcatgccagtaaagcgtgttattgtgataaagcctgagagattgaaaaagaagggaatatggtctcgagattgtgcttcagactcatggacatctgaggaagatgcagttctttgtggaactgtgcatgagtatggtcctctttgggaactggcaagtgattttcttcactccttgccaggcgggtcctcctataggggaagatatcatcatcctttgcattgctgtgagagatacagagaacttttctgcaaatatgcaatatcagcaacagataattctaacagtgaaaaggctccttctgggactggaaaggctgtacttagagtatctgaggatcaagctcagatgttggtgaatgtgaccagtgaacttcccaacaatgaattgcttctccagaaacacttcatggctgtaatttcatctgtatggagatcaaaatgttgccgtcatccctgctgttttaggaataagcctggtggatcaagtgagaactggcccatggtaaactttagaccaagcgtcaatctagttagggaagcccttgcagctggtcaggctaagtttacgctaactgtgattccaccaccgtcaagaaaccaggaatactcacggaattatttagaattagagttagatttcttgaaagatcaacatgcctatgaggaagacttcccgtctgtactaaatgtatccatactggaaccagaatcatccaaacaggctccagagccagtggaacaatcattgttatctgaactttcatgtagacaggctgagaaccgactcaggatagcgtcagaagcttgttatgatggtgaaagttttcattgggcatcatcatctttccacataaatgatgctgcccgccacaaatctggtttgaagtctatagggaagcacaaagcagcatcggaatctggtagacctcccaaatccaaagtccagaagattactgaattgcatcaggaagggccaattgccatgagtaattttctctgtatgcctgctcaactattgccaagtacagctgacttccacattagtgactccctatctgactttggtatcaacgattatgaattcaactactctgaggatctcttgcaagagtttgacgccctcgagttcttcccagatcagggtgactctggtctccttggtattgaagagttagaacctctttcggatttcacagatatcggatgaacatagatgagcaaattatggttgatgggatgctgtcctataccaagaggagacaagatcgcctctggcaggagcccaaggatataggttgagttgctcaaccatgcacagatgtgctgcaagctttatcatggctggctggagcaaagctgctggcttggtgaggtcacattgatctgacaagcttgaggatgggtttgcactaatggcggcattgggtaatttccatacatgtaccaacagagaaggtaaaagaggaggccctcagcaccacccatttgttgctgtatatcgtgttcattctctgtttaatccaatgttgtttggctattttgccactgaaaacatctcacatgtcaagttggtggatgccatctctatcagaaatttaggatgtggcgccaatgtccaaagaatgatcagtcaagtgcagcttatcggcgcattatatttggtcaggaatcaatgcatgacatcaatatgatcagaactgctgttccagtttcatttgaggaatgcaatttctggtgattcgggatgcaagtttttcataggaggtaaagagcgtgggcatagttgtacatgtaataaaatgaataaggttctgtgaactctcggtctcggttatgccaattaatagccataatttgttgttagaggccagggggctttttgatcagcgggctgctgctgtgagccggtaacaatgtagctgattgtgcgcctccatattgttttcttggtaagtggactttgcatcactgccaagcaacgatgagatagagtaattggtctgtttcgcgcaaaaatactacgagcttgtattcagtcttgacctccagtaacctgaacgctgagaatgtttggccaaccacataatacgtaggctgactagctgagaatatctagctaatcccgtaatctgtaagctgagaatgtatggtgaatcccataatctgtaagctgagattgtttggccaatcaaggtcacaatgctgcctacaagctgagaatgtttggccaattaaggtctagctgatgtccttagcagaaaacaaaattttctaaacgcaaactgttttaataatagtaagaaaacagggctccacttatttgtaaaatactctgcaagcgcgatcaacgtcagctattactacag

SEQ ID NO: 55608 - DNA, 1565 bp, Zea Mays
aacaaagaggttttccgggcatgagtgtatgactggatgttcagattaagtggttccttatcaacggtaaggaaacttgcacaatatatttccaccggtttccctgaatattttaacaaagaaaaacgactagtaacacaaggacttcagtttaatgcacgacagttaaatgcccagagcatcagcaagcactgatacattatgtccgcaagtcgagcaggaaaatcacacgatcaagcagcaatatcctcgggagggcactgcgcaggttgggcatcagaagacaggtctgtgatggacatcagctttgatctgaacttatccgccccatcgcccagcttcccgttttctgcaatggagatcggtgccttcacagtctcgggtgaaggtgtctccggaatggtctgggagattgcgatgagagactgacgagctgcttccctactgaactcggttggtgaaggtgaggccatcaatcgtaggctgcatttcaagtgttgattgaagaccatcaaaaattcaaaactatgagactcgtaattagggatgaaattggtaatccaaactgttaggataaatttaatattttaaaatagatatgtataaaatttgatgttgattttttttatgttatcaaacacattattacaattaagaataaaatattacataaattgttttatttattatttgctccctacaacaacaaaaatgaaacaaataccgaatttgttttcgaatccatacgaaattttatatctattatttggaaaatatatgataaatttgagggtttaccttttatgaatctttacaaactcaatgttaaaaacaaaaatacaaatttgtatagtagattctatatctatttattcgcaatcaaagaaaaatgacaaaaaaactgattaccaaaataaatactgttttcgaccgttttcatctctactcgtaaaataaccaattactccaaagggcatatataatgcatacacggcattgcaaaaaggcatccaaagaacagaggggaaaaaactgtgatatttctgcagtaacaggggtccttgaaggccagaaagaaaactttggaaatgggaaaatcatcatttggcgagtaagttgatcgctgaaagccctggtctggatatgctgcagctgactaattgattctcgtagagaaagatcccagctatcatgtctcagttcactacttccaagttccaagggaacaagaaaatgcaatagtcctaaattagatgcacctaagcttaatagctaaatcaactagtcaactaaattaagacttcaaaatagctatgtagaagtgcatcacggtcaattgctgaattgctagaatgaagaaacaaaatgcaaggtattaaccaacgagatccatactacttactacctcagcagtcagcacatcgggcaacaatacttcaaatagctatagtagcaggaatttgtatctttcacaaacaacgaaggttttaagtgaaattattgctgcatttacttagtgtggtaccaataaaggatatgatagtgcggtaccaataaaggatata

SEQ ID NO: 55609 - DNA, 2489 bp, Zea Mays
attttacgcctgccattcactacctacctttaagcctttaattctcttcactgttggatttctttgttcagtcttggcgggggcaccaacaaaccatgcattaatggcgaccaagcttccatcgtcggaggggcaatcgagttcgtgaaggagctggagcagcaggtccagtgcctcgaggcgcagaagcggaagctgctggttcaccagcgcgtggcggcggcgaagcctgcagacgcgacgccaatgcgcgccagcagcagcggcgccagggcctgctgcgcggattcggcggcggcggcggcgacgacgagcaactgcagcagcggcttgacgacggaggacgcggcggcggaccacgcgctgccgccgcccccgttcgcgcagttcttcacgtacccgcagtacgtgtggtgccactcggcggcgcgcgaccccgcggaggaggaggacgggcggcggtcaggggtggccgacgtcgaggtgaccctggtggagacgcacgccagcgtccgagtgatgacggcgcggcggcccgggcagctgctcagcctggtcaccgggctgcaggcgctccgcctcgccgtgctccacctcagcgtcgtcaccgcgctggacgccctggtcctctacaccaccagtgtcaaggtacataactgtactaaaaaagtaagttttgattcattcctgcgctttttttttgttgttgatggagtaggacaaggattttgcattgaacacaaaccgatgcacaagcacaagtttcctccctataaactgcagggatcttgcacgacgaatcaagcgattcttttctagcagcaaagtttgcgcgcgtctctttctctccacgaacatcatttagggaccatgaggcggcaatggcatccatctttaccagcagtaggactggaactaaagcgtgtcagatattctcctgctgctggatgtgtagacaaaacatccaggggtcatgactcatcacatcgctgcggtccagcgggcaggagaggtcgtttcctgcaacaagctcgaaccgctgcatgtattattgttgcctttgccttgttggagtcgaatcggtcatttatttttttgcccccggaatctactacgcagtagctctgatgacaattcgatggacgacctgacacgaacgctggacgcctgggtcttttctacgcagcggcgttggtggtgcttgcttttgaccggagagcagcgcccagggaggcagggatgcgccggggcctgcctgccgtgctagagagcccacagagccaccgccatgccatgcgttggtgagctctgagctcgcattgcattgcattgcacgcagggctacgtacgctatgctctggattgtcaatagatagagttattgccatgcatgtgctcatgtcggctcctgtccacgtctgtgcgccgcgccgcaccgcactcgtgcagtagtaggctccgtagagcctcgtagttgttgtgaggggtggcaaggcgagcttcgttcatggacatggatgtacagtagtcagtagtacaaagagaaagaaagacactttcagccttcagggcgaatcttttggctgaactggtgctcgttcctgctcgagctatagagttggcatcgagaaatgggcggaaaaaggctgggcgcctaggcggcagggagacagcgtacgtgttgctgccgtcctcgccttgtgttatttttggccacggcagtacgacactgtgctgtgccgtagtttatgaccacgggcagtggttgtggttggtggtctcgtctcttcaggtacccgcagattcccacccctccttgttcctgatgcatgcagcagccatccgggctccggccatggcccatgggccattgcgcatgtgcaccgttccctcgcctcgtccgtgcagctgcagcctgcaggcgctttaaccacggcgtgcttgctgttgctgtgctgctgcaggtggaggaagggtgcggcctggcgacggcggacgacatcgccgccgctgtgcaccacgtgctctgcatcatcgacgccgaggccaccgagcagcagctgctcgcggcagcggggccgcaaccgcaatagggcccgcccgcgcccgcgagccgacctaccggcgatcgagaggaggccagcgtagaagcgacgtacgtgactccaagtcatgtgtacaagcataggcgttttgcagggtccggtgaaacgccttgtgtagtttgatctttgtatttttggctgctttttttttcatatcttttcagtagatgtgtaagcgtgcgtgtgttcagcatgttgtcacgatgtttgattcagcgttcgatctgtgacgattagctcaccagcagtccatttccacattgttcttcaaggatgtgcaggcggccgccacaatttttttttacgctgcttcgtgtgttcccaacgttcgaattctattcagactcttccggctaatatgttttctttttcaattagttaaac

SEQ ID NO: 55610 - DNA, 1096 bp, Zea Mays
tgcaatgcaatgcctcccctttttctagggcgaccaagcttccatcgtcggaggggcaatcgagttcgtgaaggagctggagcagcaggtccagtgcctcgaggcgcagaagcggaagctgctggttcaccagcgcgtggcggcggcgaagcctgcagacgcgacgccaatgcgcgccagcagcagcggcgccagggcctgctgcgcggattcggcggcggcggcggcgacgacgagcaactgcagcagcggcttgacgacggaggacgcggcggcggaccacgcgctgccgccgcccccgttcgcgcagttcttcacgtacccgcagtacgtgtggtgccactcggcggcgcgcgaccccgcggaggaggaggacgggcggcggtcaggggtggccgacgtcgaggtgaccctggtggagacgcacgccagcgtccgagtgatgacggcgcggcggcccgggcagctgctcagcctggtcaccgggctgcaggcgctccgcctcgccgtgctccacctcagcgtcgtcaccgcgctggacgccctggtcctctacaccaccagtgtcaaggtggaggaagggtgcggcctggcgacggcggacgacatcgccgccgctgtgcaccacgtgctctgcatcatcgacgccgaggccaccgagcagcagctgctcgcggcagcggggccgcaaccgcaatagggcccgcccgcgcccgcgagccgacctaccggcgatcgagaggaggccagcgtagaagcgacgtacgtgactccaagtcatgtgtacaagcataggcgttttgcagggtccggtgaaacgccttgtgtagtttgatctttgtatttttggctgctttttttttcatatcttttcagtagatgtgtaagcgtgcgtgtgttcagcatgttgtcacgatgtttgattcagcgttcgatctgtgacgattagctcaccagcagtccatttccacattgttcttcaaggatgtgcaggcggccgccacaatttttttttacgctgcttcgtgtgttcccaacgttcgaattctattcagactcttccggctaatatgttttctttttcaattagttaaac

SEQ ID NO: 55611 - DNA, 3047 bp, Zea Mays
aaagaacgcagcttttggccacatttgatgcccatgagtcactgttggcgctgccgatttgccgaagccacggctagtagctcctccacctacatgcatccactgttcgtcttcgtcgcctcaaaccttatccttccccccggcccgtatactcagcccaccactagggagagaaagaaacatacgcatgccaccaacgcaaggacctcagatcctcagatacgcatcagttggcaccagcggcaaagctgcggcggcgaagagcgataagtagtagaccggggggcggtgcggcgtgcagcgcgctaataggcgaaccccgcacgcagacgcaggcgcagctagcttcgcaacaagtaaacgatacctcgcgtcgccaagagcttaccgacaccgagaagcagccacgcgctcgcggagctagagctagagcctagagctagagcgcgagagcgaccgtcggccactcgccatgtcggcgctagtggacgcgctgtgcgcgccgcccagcgacaccgcgctcgtctacgacaccttcaacgcggccaacttcctcttcgacgccgccgcgttctgtgacggcgccggcattgtcgccgccccggcgtccgcgcaccaggcgcccgtggaggcgcaggcagcgacgacgtcggcggcgccgacgacgacggctagggccaggaagcggcggcggcggccgaggagctgcaagtccagggaggagaccgagacccagcggatgacgcacatcgccgtcgagcgcaaccgccgccgccagatgaacgagtacctcgccgcgctccgctccatcatgccggaggcctacgtccagaggggcgaccaagcttccatcgtcggaggggcaatcgagttcgtgaaggagctggagcagcaggtccagtgcctcgaggcgcagaagcggaagctgctggttcaccagcgcgtggcggcggcgaagcctgcagacgcgacgccaatgcgcgccagcagcagcggcgccagggcctgctgcgcggattcggcggcggcggcggcgacgacgagcaactgcagcagcggcttgacgacggaggacgcggcggcggaccacgcgctgccgccgcccccgttcgcgcagttcttcacgtacccgcagtacgtgtggtgccactcggcggcgcgcgaccccgcggaggaggaggacgggcggcggtcaggggtggccgacgtcgaggtgaccctggtggagacgcacgccagcgtccgagtgatgacggcgcggcggcccgggcagctgctcagcctggtcaccgggctgcaggcgctccgcctcgccgtgctccacctcagcgtcgtcaccgcgctggacgccctggtcctctacaccaccagtgtcaaggtacataactgtactaaaaaagtaagttttgattcattcctgcgctttttttttgttgttgatggagtaggacaaggattttgcattgaacacaaaccgatgcacaagcacaagtttcctccctataaactgcagggatcttgcacgacgaatcaagcgattcttttctagcagcaaagtttgcgcgcgtctctttctctccacgaacatcatttagggaccatgaggcggcaatggcatccatctttaccagcagtaggactggaactaaagcgtgtcagatattctcctgctgctggatgtgtagacaaaacatccaggggtcatgactcatcacatcgctgcggtccagcgggcaggagaggtcgtttcctgcaacaagctcgaaccgctgcatgtattattgttgcctttgccttgttggagtcgaatcggtcatttatttttttgcccccggaatctactacgcagtagctctgatgacaattcgatggacgacctgacacgaacgctggacgcctgggtcttttctacgcagcggcgttggtggtgcttgcttttgaccggagagcagcgcccagggaggcagggatgcgccggggcctgcctgccgtgctagagagcccacagagccaccgccatgccatgcgttggtgagctctgagctcgcattgcattgcattgcacgcagggctacgtacgctatgctctggattgtcaatagatagagttattgccatgcatgtgctcatgtcggctcctgtccacgtctgtgcgccgcgccgcaccgcactcgtgcagtagtaggctccgtagagcctcgtagttgttgtgaggggtggcaaggcgagcttcgttcatggacatggatgtacagtagtcagtagtacaaagagaaagaaagacactttcagccttcagggcgaatcttttggctgaactggtgctcgttcctgctcgagctatagagttggcatcgagaaatgggcggaaaaaggctgggcgcctaggcggcagggagacagcgtacgtgttgctgccgtcctcgccttgtgttatttttggccacggcagtacgacactgtgctgtgccgtagtttatgaccacgggcagtggttgtggttggtggtctcgtctcttcaggtggaggaagggtgcggcctggcgacggcggacgacatcgccgccgctgtgcaccacgtgctctgcatcatcgacgccgaggccaccgagcagcagctgctcgcggcagcggggccgcaaccgcaatagggcccgcccgcgcccgcgagccgacctaccggcgatcgagaggaggccagcgtagaagcgacgtacgtgactccaagtcatgtgtacaagcataggcgttttgcagggtccggtgaaacgccttgtgtagtttgatctttgtatttttggctgctttttttttcatatcttttcagtagatgtgtaagcgtgcgtgtgttcagcatgttgtcacgatgtttgattcagcgttcgatctgtgacgattagctcaccagcagtccatttccacattgttcttcaaggatgtgcaggcggccgccacaatttttttttacgctgcttcgtgtgttcccaacgttcgaattctattcagactcttccggctaatatgttttctttttcaattagttaaac

SEQ ID NO: 55612 - DNA, 1444 bp, Zea Mays
cacccctcctccccccgagtatattagtttactcgctgcctgtgttccaaaacctttcgtcttttcccccgtctacaaaggcttgacaggcactcgcagccccaggcagagagactccttccctgcgaaggcttctcctctcccctatcccccccccccccccccccccccaactcgtcgcattctcctcggttcagcagcgacgggatggcgatagaccacgcggcgcgtctcggactgacgagcagagggaggcggcgggtgcggagacgacgtcgacgccgagaaccggcggtggccgccgtggctgaagccgctgctgtgcacgagcttcttcgtccaatgcaggatccacgccgacgcgcacaagagcgagtgcaacatgtactgcctcgactgcatggacggcgcgctctgctccctctgcctcgcgcgccaccgcgaccaccactccatccagatacggaggtcgtcgtaccacgacgtgatccgggtgtcggagatacacaaggtgctggacatcgccggcgtgcagacgtacatcatcaacagcgcgcgcgtggtgttcctcaacgagcgcccgcagcctcgcccgggcaagggcgtcaccaacacctgcgaggtctgcgagcgcagcctcctcgactgcttccgcttctgctccctcgggtgcaagtgggcacggcgcgtggttaccgtcccaagaagaagcacggcggcggaggcggcggcggtaacaagaggaagagagcggcgcttaaggacgtgcgctctgactcggaggagtcgtgcaccagcaccagcggcgccagcagcgacaagagcagcgtcgtgcagagcttctcgccgtcgaccccgccgccggcctccgctagctaccgccgcccagggaacaagcgccggaagggcgtcccgcaccggtcgcccttcggtagcctcatcgtcgagttctaggactccttcgtcagcgcctaggcaatgcgctctctactgtacaggacatgacaaagcccggaagggaagggaataacaggacgcgcttctggacgtggaggccggccggcggcgcaaatgccagcgacgggcgagagcggtaagcacacaccagcggtgcagcccgtgctgctatagttttgcttctttttcgcgctttgttacttcagttggtactaagttttgcagccttgtacattgtaatatactagtactactctccaatgctagatgtacatatacatacacagtgttggcagtatcataatgtgggggtagcagtaggcagcgaggtgtgttcgtatgcgcatcatcagctgtgtaataaaaataaagaaatgcttgctccaaatcatgccggaatggcaccgttggtcgcgctcccccggcattcgctgctgctggactgctactactgctactgcagcaggataagattggtttgatagag

SEQ ID NO: 55613 - DNA, 851 bp, Zea Mays
atcttctgtggttgaagagcaacaacataaaccgtcctactcctgcagtttaactttggtgtacggtgtacccgctcggtggcgtcaagctatgacaacaccagcgcttctttcggcggccgcgcgcggcatgcatgcgtgcaccgtgcccgcacgtcccgtgcaaatccgtgcacacgtccgtagggagtactacgagtagctgcgtttttttggggaagatatcttttgcccggccggtgcacgaacagattggctctaaaaaccacactggctaatgccaagttagacagcctagaacagattccgtggtgcgcggtgcgatacaaatcatcatcagggtcagggggcgctctccccgtgtccagccaagcaagtccacgtacagacatgcctttcgagtcacgcaagatcttttgggaggggtccaaatctcatgtcgaatgaagcaccaacgtgctcgtcatgattattgggtcatgcctccgacgaaattatccaatttgttcttcaaaagataccaccaatgcaagctaacgcctccctcctcctacgagtccagtccatcaaatattcctcatcaagatgcccttctttgatgacgttgaaagttcggtcagtagctactgaacttgttaaaaaaagggaaggtaaaaaaaacagcaacgttcctgctgtgtttttcctcaaaatgtattgctacccaaaagaaaaacacacacatatacaagattctcttcgttcattcctggttcgtagctcaaaaaggaggcacaaaacgacgggcacatcagcacacagtatcactcgcaggcgcgcgcaaccaccaagcacagacaaaaatcacacag

SEQ ID NO: 55614 - DNA, 1212 bp, Zea Mays
gcggcggacggcgcgttaacctcgccggactgtcgttcgtcagtgaaactttaagcgtccgttgcccgctgagatgaccgggaaagcaacgggacgtgacgctccccgctcggagacgacaagggcgctgttgggggtgatgggagactggctgtctggcgcttcgccgcggcccgcgggcgcgggagaggatcccagccagctcggtgccgtgcctgccgacccgacgactcggcacatcacgatattcttcgcgggggctcggccgcacctgcgtagcccgagacggcgggacgaggacgtgccgcctaccgcgcggcaccccaccccacccggacgacccgagcggtggacgcgggttctttctgatctcgcactcggcctccacctccagagtgatccgaaccccggacgcttgtacagttgtacgtccctcgatggctgtgggcagtggccatatctttcccagcggatattgggcgtgcttgtatcacaagctaccggtcgatcaatgatggacaggcagtgaccctggcgggcggagtgagcgcctgtcccgcgtgcgtctccgaggattcgacacaacagaagcctgcctgtgcagtggtggattcaacgagtacggcaccagcgcgagggaacagtgaccgcgaagcgtcaagcaatgaatctgcggtgacctgcgctgcgcctgctgtggaggcagggcagacggagcggcgggagacaggccaggcgtagccgcgtcgagggctccacagtactttacgctgcactcgcgatgtggatccatcttgtcggtggccaaagtgcagcgttgcttaaccatcctacccgtctcagtccagagcacgccgtgtacccttccagtattatgtgtctgggtatttcagtgtctgaattgatcctacgtttccttttcttgagagcgctaatgatgctctcgtgtcagcagtgctacaacagagagcgatatgccagccgtcttgcagaagcagcatcagggaaacacaagcagtgggccgcctgttgatcctgcgagtgggccgaggcgcagtatgagacaacgcgtcaagagcacaagggtccatgggcctgagtgggtggcatgactggcgttcggagagtatacttcttccactggcgtcgcgtgggaagggcaggaaatgacagagagagctgattctcctattgtagttccttagaactcct

SEQ ID NO: 55615 - DNA, 2311 bp, Zea Mays
gttccggccacgaaaggacagatgttccgctcggttccacgtcatcacctatctccgtttgcatatccatcacgcaaaatgaataaaaaattaaaacaaaggaaaacagaaaagctgcggaagttgtcaagaactccgacgatcccacatatccgtcaatcgatcgactcccgttcccctcggaatcgaaatggccccgagaattccaacgcacaagaaggggaacaagggaaccaggcatcgcgaagagagcccggggtgatgaattgttacggttcatggacggagcaagcaaggagcctctccgcaaggactactacaaagttctggaggttgactatgacgcatctgatgacaccatcaaattgagttatagaagattagctttgatgtggcatccggacaagcataagggcaatagcaatgccacaactaaatttcaggagattaatgaagcatacaaagttttgagtgacccagctaagcgactagaatacgatgtttccggttgctacgagatcgaccaatatactttgcgtgagtaccttacaaaatttaagggtatgatacttacctgtaatggccttggcatagaccattcttctaagtgggcccgacatttgagggaactgaaaccccattgatcaacgggtatggatttactactctatgtaagacacaatgtgctgtatcacaattcacaaacaatggccccctactccccttagccactttctgccaaaaagatgcatgtatgtttactaattccagatggaggatggtctgggctccattctcaatgtttagtgagttgtgctggaaattaggtcgggtcgggctagctcggcccaacccaagcgcatcatggttcgagccaagaaagactacaaacttttgggtcgtgtcataccagcccaaagggtagaaacagtggctcagctcgatcctaaaccacgttatgttttcgttgggccgtgacgatcagtccgacccattacccatatatttgaacaatataaaatctaaatattacaactaaataaagtccatagcttactaaattaaagatattaaacaatactaacatcatttaaccacataaagtgcaaatattacaacaatgtaaagtatatagcttactaaattaaaaaattaaacaattactagttagatgcccgtgcgttgcaacggcaatacaaaatatttttacacaataattacataaaaatgaacaccacatatataatcgaacccaatatctcaaaaaaaaattggcaacaatcaatacagaaataaactgatacaaattaaattatacaatacaaatatcacaaaacaaagttttagaagcatgttatttaagaatctcacaaattacatgtccgttgtcgtctcgccaccgaagtacagcacacctcaatgagaacttattctataagataagtgataatctagttaatttagctaagctggacataatcgtttaagtcgttactccctcccgaccgtggcgcccactcgatgctcgtcgataagtcgctccgccaactcattctacgccttgaacaacctcaaagtgggcctgcgttcacttgctctcaacgtcgggtaggatagaaatgaaatccaataagggactaaaataaacaaacaaaacatgacacaaaaattgactgtttcttggattgcagataaactacgcctctgctcatgacaatgaaacactatttgatattattagtgtaaaggtatggaacttatcaggatatctaggaaatttactgcaatttatgtattttggtatcaattatcaatctgccaatcaatcattttcttttgctttcttcaataaacatttattggcaagacagattagcatgaatgttttgttacacttttttttactgcttgcagtattttctaccttttgaaattatgctttatagttataaactaaacatgtatttatgtaacaatttagttttccagaaacagttttccaatctatttcagaacatgatctggtactttgtgaagttttttgtttgtttgcttgtgcagactctgatgaacctctcaattgacgagcgatgcaggaaaaataatttgtccacaagcatgattgcattatcccaggtttgaacttagaagatggccctgcacactctgcctcgacgtcatcttcaccagagcagactactgatgttgatggaagtaccaccggtgatgtcaccttctaagtataacttggtgctacaacagagagcgatatgccagccgtcttgcagaagcagcatcagggaaacacaag

SEQ ID NO: 55616 - DNA, 2697 bp, Zea Mays
gttccggccacgaaaggacagatgttccgctcggttccacgtcatcacctatctccgtttgcatatccatcacgcaaaatgaataaaaaattaaaacaaaggaaaacagaaaagctgcggaagttgtcaagaactccgacgatcccacatatccgtcaatcgatcgactcccgttcccctcggaatcgaaatggccccgagaattccaacgcacaagaaggggaacaagggaaccaggcatcgcgaagagagcccggggtgatgaattgttacggttcatggacggagcaagcaaggagcctctccgcaaggactactacaaagttctggaggttgactatgacgcatctgatgacaccatcaaattgagttatagaagattagctttgatgtggcatccggacaagcataagggcaatagcaatgccacaactaaatttcaggagattaatgaagcatacaaagttttgagtgacccagctaagcgactagaatacgatgtttccggttgctacgagatcgaccaatatactttgcgtgagtaccttacaaaatttaagggtatgatacttacctgtaatggccttggcatagaccattcttctaagtgggcccgacatttgagggaactgaaaccccattgatcaacgggtatggatttactactctatgtaagacacaatgtgctgtatcacaattcacaaacaatggccccctactccccttagccactttctgccaaaaagatgcatgtatgtttactaattccagatggaggatggtctgggctccattctcaatgtttagtgagttgtgctggaaattaggtcgggtcgggctagctcggcccaacccaagcgcatcatggttcgagccaagaaagactacaaacttttgggtcgtgtcataccagcccaaagggtagaaacagtggctcagctcgatcctaaaccacgttatgttttcgttgggccgtgacgatcagtccgacccattacccatatatttgaacaatataaaatctaaatattacaactaaataaagtccatagcttactaaattaaagatattaaacaatactaacatcatttaaccacataaagtgcaaatattacaacaatgtaaagtatatagcttactaaattaaaaaattaaacaattactagttagatgcccgtgcgttgcaacggcaatacaaaatatttttacacaataattacataaaaatgaacaccacatatataatcgaacccaatatctcaaaaaaaaattggcaacaatcaatacagaaataaactgatacaaattaaattatacaatacaaatatcacaaaacaaagttttagaagcatgttatttaagaatctcacaaattacatgtccgttgtcgtctcgccaccgaagtacagcacacctcaatgagaacttattctataagataagtgataatctagttaatttagctaagctggacataatcgtttaagtcgttactccctcccgaccgtggcgcccactcgatgctcgtcgataagtcgctccgccaactcattctacgccttgaacaacctcaaagtgggcctgcgttcacttgctctcaacgtcgggtaggatagaaatgaaatccaataagggactaaaataaacaaacaaaacatgacacaaaaattgactgtttcttggattgcagataaactacgcctctgctcatgacaatgaaacactatttgatattattagtgtaaaggtatggaacttatcaggatatctaggaaatttactgcaatttatgtattttggtatcaattatcaatctgccaatcaatcattttcttttgctttcttcaataaacatttattggcaagacagattagcatgaatgttttgttacacttttttttactgcttgcagtattttctaccttttgaaattatgctttatagttataaactaaacatgtatttatgtaacaatttagttttccagaaacagttttccaatctatttcagaacatgatctggtactttgtgaagttttttgtttgtttgcttgtgcagactctgatgaacctctcaattgacgagcgatgcaggaaaaataatttgtccacaagcatgattgcattatcccaggtttgaacttagaagatggccctgcacactctgcctcgacgtcatcttcaccagagcagactactgatgttgatggaagtaccaccggtgatgtcaccttctaagtataacttgggtaaccttattacctcttctcttactccaaatgctggttcggtgttatccatgttctcatcattaacctcttaaagttctgaaaagacaaggatgaatgcacactgcacttcctactgcacttcttttgaacctatcatgcaatgtccttctgcttgggtgtgagcttcaaaaacacactgaaatctactaagctagtagttcatctaaaagaaaagcatccaccttccctctgaatgcagttttggctaatcatgctggaacacaattcccatccaatgtgatctgagtctgccacctctagacatgatgattgaagccaggacaaacttcggtgatttaatttaaagagaaataaatattaaaggagcttagcttggtgcgtcgaagcgaatcagagtagaagagatcccctcaccctttggagagacactactcttgtatctt

SEQ ID NO: 55617 - DNA, 1600 bp, Zea Mays
gttccggccacgaaaggacagatgttccgctcggttccacgtcatcacctatctccgtttgcatatccatcacgcaaaatgaataaaaaattaaaacaaaggaaaacagaaaagctgcggaagttgtcaagaactccgacgatcccacatatccgtcaatcgatcgactcccgttcccctcggaatcgaaatggccccgagaattccaacgcacaagaaggggaacaagggaaccaggcatcgcgaagagagcccggggtgatgaattgttacggttcatggacggagcaagcaaggagcctctccgcaaggactactacaaagttctggaggttgactatgacgcatctgatgacaccatcaaattgagttatagaagattagctttgatgtggcatccggacaagcataagggcaatagcaatgccacaactaaatttcaggagattaatgaagcatacaaagttttgagtgacccagctaagcgactagaatacgatgtttccggttgctacgagatcgaccaatatactttgcgtgagtaccttacaaaatttaagggtatgatacttacctgtaatggccttggcatagaccattcttctaagtgggcccgacatttgagggaactgaaaccccattgatcaacggataaactacgcctctgctcatgacaatgaaacactatttgatattattagtgtaaagttttttgtttgtttgcttgtgcagactctgatgaacctctcaattgacgagcgatgcaggaaaaataatttgtccacaagcatgattgcattatcccaggtttgaacttagaagatggccctgcacactctgcctcgacgtcatcttcaccagagcagactactgatgttgatggaagtaccaccggtgatgtcaccttctaagtataacttgggtaaccttattacctcttctcttactccaaatgctggttcggtgttatccatgttctcatcattaacctcttaaagttctgaaaagacaaggatgaatgcacactgcacttcctactgcacttcttttgaacctatcatgcaatgtccttctgcttgggtgtgagcttcaaaaacacactgaaatctactaagctagtagttcatctaaaagaaaaggtgtgtgctctgttctttctatccagcataattggcttctaattagagataaactccaatactaagaaccttctgaggaagaaaaacaaggcattgaatggttacagttatgttctgtgtaataatggttgtgtgggaaccagcatccaccttccctctgaatgcagttttggctaatcatgctggaacacaattcccatccaatgtgatctgagtctgccacctctagacatgatgattgaagccaggacaaacttcggtgatttaatttaaagagaaataaatattaaaggtggtttgattatttggactactctcaattaatagcattatctttaacaatgctacctgtaacttcaatatttggaaaagacgaaacaggagcttagcttggtgcgtcgaagcgaatcagagtagaagagatcccctcaccctttggagagacactactcttgtatctt

SEQ ID NO: 55618 - DNA, 1809 bp, Zea Mays
gttccggccacgaaaggacagatgttccgctcggttccacgtcatcacctatctccgtttgcatatccatcacgcaaaatgaataaaaaattaaaacaaaggaaaacagaaaagctgcggaagttgtcaagaactccgacgatcccacatatccgtcaatcgatcgactcccgttcccctcggaatcgaaatggccccgagaattccaacgcacaagaaggggaacaagggaaccaggcatcgcgaagagagcccggggtgatgaattgttacggttcatggacggagcaagcaaggagcctctccgcaaggactactacaaagttctggaggttgactatgacgcatctgatgacaccatcaaattgagttatagaagattagctttgatgtggcatccggacaagcataagggcaatagcaatgccacaactaaatttcaggagattaatgaagcatacaaagttttgagtgacccagctaagcgactagaatacgatgtttccggttgctacgagatcgaccaatatactttgcgtgagtaccttacaaaatttaagggtatgatacttacctgtaatggccttggcatagaccattcttctaagtgggcccgacatttgagggaactgaaaccccattgatcaacggataaactacgcctctgctcatgacaatgaaacactatttgatattattagtgtaaaggtatggaacttatcaggatatctaggaaatttactgcaatttatgtattttggtatcaattatcaatctgccaatcaatcattttcttttgctttcttcaataaacatttattggcaagacagattagcatgaatgttttgttacacttttttttactgcttgcagtattttctaccttttgaaattatgctttatagttataaactaaacatgtatttatgtaacaatttagttttccagaaacagttttccaatctatttcagaacatgatctggtactttgtgaagttttttgtttgtttgcttgtgcagactctgatgaacctctcaattgacgagcgatgcaggaaaaataatttgtccacaagcatgattgcattatcccaggtttgaacttagaagatggccctgcacactctgcctcgacgtcatcttcaccagagcagactactgatgttgatggaagtaccaccggtgatgtcaccttctaagtataacttgggtaaccttattacctcttctcttactccaaatgctggttcggtgttatccatgttctcatcattaacctcttaaagttctgaaaagacaaggatgaatgcacactgcacttcctactgcacttcttttgaacctatcatgcaatgtccttctgcttgggtgtgagcttcaaaaacacactgaaatctactaagctagtagttcatctaaaagaaaaggtgtgtgctctgttctttctatccagcataattggcttctaattagagataaactccaatactaagaaccttctgaggaagaaaaacaaggcattgaatggttacagttatgttctgtgtaataatggttgtgtgggaaccagcatccaccttccctctgaatgcagttttggctaatcatgctggaacacaattcccatccaatgtgatctgagtctgccacctctagacatgatgattgaagccaggacaaacttcggtgatttaatttaaagagaaataaatattaaagacgaaacaggagcttagcttggtgcgtcgaagcgaatcagagtagaagagatcccctcaccctttggagagacactactcttgtatctt

SEQ ID NO: 55619 - DNA, 1543 bp, Zea Mays
gttccggccacgaaaggacagatgttccgctcggttccacgtcatcacctatctccgtttgcatatccatcacgcaaaatgaataaaaaattaaaacaaaggaaaacagaaaagctgcggaagttgtcaagaactccgacgatcccacatatccgtcaatcgatcgactcccgttcccctcggaatcgaaatggccccgagaattccaacgcacaagaaggggaacaagggaaccaggcatcgcgaagagagcccggggtgatgaattgttacggttcatggacggagcaagcaaggagcctctccgcaaggactactacaaagttctggaggttgactatgacgcatctgatgacaccatcaaattgagttatagaagattagctttgatgtggcatccggacaagcataagggcaatagcaatgccacaactaaatttcaggagattaatgaagcatacaaagttttgagtgacccagctaagcgactagaatacgatgtttccggttgctacgagatcgaccaatatactttgcgtgagtaccttacaaaatttaagggtatgatacttacctgtaatggccttggcatagaccattcttctaagtgggcccgacatttgagggaactgaaaccccattgatcaacggttttttgtttgtttgcttgtgcagactctgatgaacctctcaattgacgagcgatgcaggaaaaataatttgtccacaagcatgattgcattatcccaggtttgaacttagaagatggccctgcacactctgcctcgacgtcatcttcaccagagcagactactgatgttgatggaagtaccaccggtgatgtcaccttctaagtataacttgggtaaccttattacctcttctcttactccaaatgctggttcggtgttatccatgttctcatcattaacctcttaaagttctgaaaagacaaggatgaatgcacactgcacttcctactgcacttcttttgaacctatcatgcaatgtccttctgcttgggtgtgagcttcaaaaacacactgaaatctactaagctagtagttcatctaaaagaaaaggtgtgtgctctgttctttctatccagcataattggcttctaattagagataaactccaatactaagaaccttctgaggaagaaaaacaaggcattgaatggttacagttatgttctgtgtaataatggttgtgtgggaaccagcatccaccttccctctgaatgcagttttggctaatcatgctggaacacaattcccatccaatgtgatctgagtctgccacctctagacatgatgattgaagccaggacaaacttcggtgatttaatttaaagagaaataaatattaaaggtggtttgattatttggactactctcaattaatagcattatctttaacaatgctacctgtaacttcaatatttggaaaagacgaaacaggagcttagcttggtgcgtcgaagcgaatcagagtagaagagatcccctcaccctttggagagacactactcttgtatctt

SEQ ID NO: 55620 - DNA, 1445 bp, Zea Mays
gttccggccacgaaaggacagatgttccgctcggttccacgtcatcacctatctccgtttgcatatccatcacgcaaaatgaataaaaaattaaaacaaaggaaaacagaaaagctgcggaagttgtcaagaactccgacgatcccacatatccgtcaatcgatcgactcccgttcccctcggaatcgaaatggccccgagaattccaacgcacaagaaggggaacaagggaaccaggcatcgcgaagagagcccggggtgatgaattgttacggttcatggacggagcaagcaaggagcctctccgcaaggactactacaaagttctggaggttgactatgacgcatctgatgacaccatcaaattgagttatagaagattagctttgatgtggcatccggacaagcataagggcaatagcaatgccacaactaaatttcaggagattaatgaagcatacaaaggagtaccttacaaaatttaagggtatgatacttacctgtaatggccttggcatagaccattcttctaagtgggcccgacatttgagggaactgaaaccccattgatcaacggactctgatgaacctctcaattgacgagcgatgcaggaaaaataatttgtccacaagcatgattgcattatcccaggtttgaacttagaagatggccctgcacactctgcctcgacgtcatcttcaccagagcagactactgatgttgatggaagtaccaccggtgatgtcaccttctaagtataacttgggtaaccttattacctcttctcttactccaaatgctggttcggtgttatccatgttctcatcattaacctcttaaagttctgaaaagacaaggatgaatgcacactgcacttcctactgcacttcttttgaacctatcatgcaatgtccttctgcttgggtgtgagcttcaaaaacacactgaaatctactaagctagtagttcatctaaaagaaaaggtgtgtgctctgttctttctatccagcataattggcttctaattagagataaactccaatactaagaaccttctgaggaagaaaaacaaggcattgaatggttacagttatgttctgtgtaataatggttgtgtgggaaccagcatccaccttccctctgaatgcagttttggctaatcatgctggaacacaattcccatccaatgtgatctgagtctgccacctctagacatgatgattgaagccaggacaaacttcggtgatttaatttaaagagaaataaatattaaaggtggtttgattatttggactactctcaattaatagcattatctttaacaatgctacctgtaacttcaatatttggaaaagacgaaacaggagcttagcttggtgcgtcgaagcgaatcagagtagaagagatcccctcaccctttggagagacactactcttgtatctt

SEQ ID NO: 55621 - DNA, 1519 bp, Zea Mays
gttccggccacgaaaggacagatgttccgctcggttccacgtcatcacctatctccgtttgcatatccatcacgcaaaatgaataaaaaattaaaacaaaggaaaacagaaaagctgcggaagttgtcaagaactccgacgatcccacatatccgtcaatcgatcgactcccgttcccctcggaatcgaaatggccccgagaattccaacgcacaagaaggggaacaagggaaccaggcatcgcgaagagagcccggggtgatgaattgttacggttcatggacggagcaagcaaggagcctctccgcaaggactactacaaagttctggaggttgactatgacgcatctgatgacaccatcaaattgagttatagaagattagctttgatgtggcatccggacaagcataagggcaatagcaatgccacaactaaatttcaggagattaatgaagcatacaaagttttgagtgacccagctaagcgactagaatacgatgtttccggttgctacgagatcgaccaatatactttgcgtgagtaccttacaaaatttaagggtatgatacttacctgtaatggccttggcatagaccattcttctaagtgggcccgacatttgagggaactgaaaccccattgatcaacggactctgatgaacctctcaattgacgagcgatgcaggaaaaataatttgtccacaagcatgattgcattatcccaggtttgaacttagaagatggccctgcacactctgcctcgacgtcatcttcaccagagcagactactgatgttgatggaagtaccaccggtgatgtcaccttctaagtataacttgggtaaccttattacctcttctcttactccaaatgctggttcggtgttatccatgttctcatcattaacctcttaaagttctgaaaagacaaggatgaatgcacactgcacttcctactgcacttcttttgaacctatcatgcaatgtccttctgcttgggtgtgagcttcaaaaacacactgaaatctactaagctagtagttcatctaaaagaaaaggtgtgtgctctgttctttctatccagcataattggcttctaattagagataaactccaatactaagaaccttctgaggaagaaaaacaaggcattgaatggttacagttatgttctgtgtaataatggttgtgtgggaaccagcatccaccttccctctgaatgcagttttggctaatcatgctggaacacaattcccatccaatgtgatctgagtctgccacctctagacatgatgattgaagccaggacaaacttcggtgatttaatttaaagagaaataaatattaaaggtggtttgattatttggactactctcaattaatagcattatctttaacaatgctacctgtaacttcaatatttggaaaagacgaaacaggagcttagcttggtgcgtcgaagcgaatcagagtagaagagatcccctcaccctttggagagacactactcttgtatctt

SEQ ID NO: 55622 - DNA, 2533 bp, Zea Mays
gttccggccacgaaaggacagatgttccgctcggttccacgtcatcacctatctccgtttgcatatccatcacgcaaaatgaataaaaaattaaaacaaaggaaaacagaaaagctgcggaagttgtcaagaactccgacgatcccacatatccgtcaatcgatcgactcccgttcccctcggaatcgaaatggccccgagaattccaacgcacaagaaggggaacaagggaaccaggcatcgcgaagagagcccggggtgatgaattgttacggttcatggacggagcaagcaaggagcctctccgcaaggactactacaaagttctggaggttgactatgacgcatctgatgacaccatcaaattgagttatagaagattagctttgatgtggcatccggacaagcataagggcaatagcaatgccacaactaaatttcaggagattaatgaagcatacaaagttttgagtgacccagctaagcgactagaatacgatgtttccggttgctacgagatcgaccaatatactttgcgtgagtaccttacaaaatttaagggtatgatacttacctgtaatggccttggcatagaccattcttctaagtgggcccgacatttgagggaactgaaaccccattgatcaacgggtatggatttactactctatgtaagacacaatgtgctgtatcacaattcacaaacaatggccccctactccccttagccactttctgccaaaaagatgcatgtatgtttactaattccagatggaggatggtctgggctccattctcaatgtttagtgagttgtgctggaaattaggtcgggtcgggctagctcggcccaacccaagcgcatcatggttcgagccaagaaagactacaaacttttgggtcgtgtcataccagcccaaagggtagaaacagtggctcagctcgatcctaaaccacgttatgttttcgttgggccgtgacgatcagtccgacccattacccatatatttgaacaatataaaatctaaatattacaactaaataaagtccatagcttactaaattaaagatattaaacaatactaacatcatttaaccacataaagtgcaaatattacaacaatgtaaagtatatagcttactaaattaaaaaattaaacaattactagttagatgcccgtgcgttgcaacggcaatacaaaatatttttacacaataattacataaaaatgaacaccacatatataatcgaacccaatatctcaaaaaaaaattggcaacaatcaatacagaaataaactgatacaaattaaattatacaatacaaatatcacaaaacaaagttttagaagcatgttatttaagaatctcacaaattacatgtccgttgtcgtctcgccaccgaagtacagcacacctcaatgagaacttattctataagataagtgataatctagttaatttagctaagctggacataatcgtttaagtcgttactccctcccgaccgtggcgcccactcgatgctcgtcgataagtcgctccgccaactcattctacgccttgaacaacctcaaagtgggcctgcgttcacttgctctcaacgtcggataaactacgcctctgctcatgacaatgaaacactatttgatattattagtgtaaagactctgatgaacctctcaattgacgagcgatgcaggaaaaataatttgtccacaagcatgattgcattatcccaggtttgaacttagaagatggccctgcacactctgcctcgacgtcatcttcaccagagcagactactgatgttgatggaagtaccaccggtgatgtcaccttctaagtataacttgggtaaccttattacctcttctcttactccaaatgctggttcggtgttatccatgttctcatcattaacctcttaaagttctgaaaagacaaggatgaatgcacactgcacttcctactgcacttcttttgaacctatcatgcaatgtccttctgcttgggtgtgagcttcaaaaacacactgaaatctactaagctagtagttcatctaaaagaaaaggtgtgtgctctgttctttctatccagcataattggcttctaattagagataaactccaatactaagaaccttctgaggaagaaaaacaaggcattgaatggttacagttatgttctgtgtaataatggttgtgtgggaaccagcatccaccttccctctgaatgcagttttggctaatcatgctggaacacaattcccatccaatgtgatctgagtctgccacctctagacatgatgattgaagccaggacaaacttcggtgatttaatttaaagagaaataaatattaaaggtggtttgattatttggactactctcaattaatagcattatctttaacaatgctacctgtaacttcaatatttggaaaagacgaaacaggagcttagcttggtgcgtcgaagcgaatcagagtagaagagatcccctcaccctttggagagacactactcttgtatctt

SEQ ID NO: 55623 - DNA, 1596 bp, Zea Mays
gttccggccacgaaaggacagatgttccgctcggttccacgtcatcacctatctccgtttgcatatccatcacgcaaaatgaataaaaaattaaaacaaaggaaaacagaaaagctgcggaagttgtcaagaactccgacgatcccacatatccgtcaatcgatcgactcccgttcccctcggaatcgaaatggccccgagaattccaacgcacaagaaggggaacaagggaaccaggcatcgcgaagagagcccggggtgatgaattgttacggttcatggacggagcaagcaaggagcctctccgcaaggactactacaaagttctggaggttgactatgacgcatctgatgacaccatcaaattgagttatagaagattagctttgatgtggcatccggacaagcataagggcaatagcaatgccacaactaaatttcaggagattaatgaagcatacaaagttttgagtgacccagctaagcgactagaatacgatgtttccggttgctacgagatcgaccaatatactttgcgtgagtaccttacaaaatttaagggtatgatacttacctgtaatggccttggcatagaccattcttctaagtgggcccgacatttgagggaactgaaaccccattgatcaacgggtatggatttactactctatataaactacgcctctgctcatgacaatgaaacactatttgatattattagtgtaaagactctgatgaacctctcaattgacgagcgatgcaggaaaaataatttgtccacaagcatgattgcattatcccaggtttgaacttagaagatggccctgcacactctgcctcgacgtcatcttcaccagagcagactactgatgttgatggaagtaccaccggtgatgtcaccttctaagtataacttgggtaaccttattacctcttctcttactccaaatgctggttcggtgttatccatgttctcatcattaacctcttaaagttctgaaaagacaaggatgaatgcacactgcacttcctactgcacttcttttgaacctatcatgcaatgtccttctgcttgggtgtgagcttcaaaaacacactgaaatctactaagctagtagttcatctaaaagaaaaggtgtgtgctctgttctttctatccagcataattggcttctaattagagataaactccaatactaagaaccttctgaggaagaaaaacaaggcattgaatggttacagttatgttctgtgtaataatggttgtgtgggaaccagcatccaccttccctctgaatgcagttttggctaatcatgctggaacacaattcccatccaatgtgatctgagtctgccacctctagacatgatgattgaagccaggacaaacttcggtgatttaatttaaagagaaataaatattaaaggtggtttgattatttggactactctcaattaatagcattatctttaacaatgctacctgtaacttcaatatttggaaaagacgaaacaggagcttagcttggtgcgtcgaagcgaatcagagtagaagagatcccctcaccctttggagagacactactcttgtatctt

SEQ ID NO: 55624 - DNA, 1484 bp, Zea Mays
gttccggccacgaaaggacagatgttccgctcggttccacgtcatcacctatctccgtttgcatatccatcacgcaaaatgaataaaaaattaaaacaaaggaaaacagaaaagctgcggaagttgtcaagaactccgacgatcccacatatccgtcaatcgatcgactcccgttcccctcggaatcgaaatggccccgagaattccaacgcacaagaaggggaacaagggaaccaggcatcgcgaagagagcccggggtgatgaattgttacggttcatggacggagcaagcaaggagcctctccgcaaggactactacaaagttctggaggttgactatgacgcatctgatgacaccatcaaattgagttatagaagattagctttgatgtggcatccggacaagcataagggcaatagcaatgccacaactaaatttcaggagattaatgaagcatacaaagttttgagtgacccagctaagcgactagaatacgatgtttccggttgctacgagatcgaccaatatactttgcgtgagtaccttacaaaatttaagggtatgatacttacctgtaatggccttggcatagaccattcttctaagtgggcccgacatttgagggaactgaaaccccattgatcaacgggaaaaataatttgtccacaagcatgattgcattatcccaggtttgaacttagaagatggccctgcacactctgcctcgacgtcatcttcaccagagcagactactgatgttgatggaagtaccaccggtgatgtcaccttctaagtataacttgggtaaccttattacctcttctcttactccaaatgctggttcggtgttatccatgttctcatcattaacctcttaaagttctgaaaagacaaggatgaatgcacactgcacttcctactgcacttcttttgaacctatcatgcaatgtccttctgcttgggtgtgagcttcaaaaacacactgaaatctactaagctagtagttcatctaaaagaaaaggtgtgtgctctgttctttctatccagcataattggcttctaattagagataaactccaatactaagaaccttctgaggaagaaaaacaaggcattgaatggttacagttatgttctgtgtaataatggttgtgtgggaaccagcatccaccttccctctgaatgcagttttggctaatcatgctggaacacaattcccatccaatgtgatctgagtctgccacctctagacatgatgattgaagccaggacaaacttcggtgatttaatttaaagagaaataaatattaaaggtggtttgattatttggactactctcaattaatagcattatctttaacaatgctacctgtaacttcaatatttggaaaagacgaaacaggagcttagcttggtgcgtcgaagcgaatcagagtagaagagatcccctcaccctttggagagacactactcttgtatctt

SEQ ID NO: 55625 - DNA, 1700 bp, Zea Mays
gcaaatagggggaacaccatggtttccgggaatgcaactcttcagtgtatcactcacactgtaccactttttctcaagctttgctcaaatgatcatttcactccatgctcatataatgaggatgggttctgttctttctgtgcccttaaagaacatgttgacgaatcaattcgaaggtccggatctgttatagcgccaacaaagttcagagatagtttaagaaagttatctttggattttacaccaggacagcaagaagatgcacatgaattcctacgttgcttgctcgataacttgcatgagtgtactcttgatcccaagtcaaagagcaagggctcatcctttgaagaagaaagtatagtcaaggagatttttggaggccaactgaaaagccatttatcttgttgcgagtgcggtcacagctcagagacatttgagcccttcctggatctaagtttggagattgatcaggttgatcacctggtagatgctttgcaatcttttaccaaggtagagcaggttggggactctgaaaacaagctcacctgtgaaagttgcaatgctcgagtttgtaagaataagcagcttacactttatagagcaccagatgttattgcatttcatctcaagcgttttacaacccttgacaattctgttaagaagattgacaaatatgtggcataccctcttgaggttgatttgaagccatttcacagcaacccagagactgtgggggaactgaaatatgatctttatggtgttgttgagcattctggattacccaactatggccattatgtctgcaccattcgttcttcaccaagtacatggtacttgatgaatgactccaacgttgattctattactgattcaagtgcattaaaccaggaagcatatattctgttctatgttaggcagggcaaatttccatggttctcgagtttgttagaaggcaaggttgtcctacaagctgagaatacctgtggaacatctcctgtgtcagttttggaaaatatagatgtaaactgttcaacttcttcaggaggaggcagtagcagtagttctggtgataagttagagaaaaatgaagccagccaattagaagagacaaagaaagatgaaacgagtcagtacaaaacgtcattccttcccgacgagccatctaagagttcttttggtgcttctaacagcaataatgcaatggatgaagataatccacccagggtttctttccaaaattctgtggctagttgttcccgcagtgtagaaaccaccaatctcgagaagccttctactccacggtgctcccagcgactggcctctcatgatgagtttagtgtgtttgagtttgaggactttgatgaggaaaaggagactttacttccaaaattgaaatttccatcgaaggtgaagaaagctaactctgcatctagagctatgaagggtcgttgcattgatcagaatgcagtccgtttgatgaggagcatgacatccacacgaagaaaaggtttaatagactgcatagcacagcaaactgcaaagcatgagtctaatagatgccctgcaagtgatcctctggacaaaaagaaaaggaagctggttcttcagtactagcttgatattgctcgtaaagaggtctcgctctactcatggcatgacagccagggttgacaatggcatagcagaaccgcacgaggtct

SEQ ID NO: 55626 - DNA, 846 bp, Zea Mays
catcagttaaccaagacgcgcagctcccgcctccgtttcaaacccgaaattttccgccgtcccccaaattctttccctcgccttgcatccgctcaaccaacaaaatcgccttccgttttggttgtctcgccaatcccccaaccaaaacaaaccttcctcttccctgaaatcccatgactccgcgcccgcaccaaccggccggccacctactccgtgggcgcgaaaccctaactggcgcccgcatccctctctattccatggcggagcaggatggcgacgcggggcagatgccacccgactccgttccggtggttggtgtaggggatcaaaatactaatcagcatcaaccatttttttcgatgtgccaaccacttcgcactgttagctactcgaattcgtgggatgggacttgtgttgctgctgccaatgaaaatgaccacactggcatatctggtacattggacagggaagacgattcatgttcacgacattcaatcaataaggaagtcagtttggtgcaaggtgttatgaaaatggaacaatcaatggtacaaagcattcagtttgtcagtttttatctgcaaaatcatctcaggaacttcatgtatatatacctgttccgttctcttttacaacaacaacaacaacaacaacaacaacaacaacaaagccttttgtcccaagcacgttggggtaggctagagatgaaaccccgtatgaaaacctcagagctcaacccccaaagaaaaaaaggggaaacaaaggcaaaggagaaccgaaaacgacgaaacgggggaacacataaaagagataaaacccacaagaatcagcaaggtctaaatgggc

SEQ ID NO: 55627 - DNA, 471 bp, Zea Mays
aaccaagacgcgcagctcccgcctccgtttcaaacccgaaattttccgccgtcccccaaattctttccctcgccttgcatccgctcaaccaacaaaatcgccttccgttttggttgtctcgccaatcccccaaccaaaacaaaccttcctcttccctgaaatcccatgactccgcgcccgcaccaaccggccggccacctactccgtgggcgcgaaaccctaactggcgcccgcatccctctctattccatggcggagcaggatggcgacgcggggcagatgccacccgactccgttccggtggttggtgtaggggatcaaaatactaatcagcatcaaccatttttttcgatgtgccaaccacttcgcactgttagctactcgaattcgtgggatgggacttgtgttgctgctgccaatgaaaatgaccacactcttgtaatcgttgggcatacctgttctcagatatag

SEQ ID NO: 55628 - DNA, 4179 bp, Zea Mays
taactcaccatcaccatgctcaaagcctcaaaatccctcaatataaaccctcaagacgcgcgcgcgagctcagacctcagagtgcgcctctctttacaaattacaaccaaaggaaagcacgcgcaggcgccgcgagtacaggttggcattattgaatccgcccacgaacaatgggtgagataggcacggaccagctgggtctggccgaggccgaggccgccgccgccgctgtgaaggaggagggcatcctcgacgacgacgaggagacgtcgccgatagagcaggtgcggctgacggtgccgacgacggacgactcgtcgctgccggtgtggacgttccggatgtggagcatcgggctgctgtcgtgcgcgctcatgagcttcctcaaccagttcttctcgtaccggacggagccgctggtggtgacgcagatcacggtgcaggtggcgtcgctgcccgtgggccacttcatggcccgggcgctgccgcgcaccaggttccgggcgcccgcgctgctgggcggcggggcgtggagcctcaacccggggcccttcaacatcaaggagcacgtgctcatctgcatcttcgccaacgccggcttcgccttcggtgggggcagcgcctacgccgtcggcatcatcaacatcatccgcgccttctacggccgccacatctccttcctcaccgcctggctcctcgtcgtcaccacgcaggtgctcgggtacgggtgggcagggctgatgcgcaagtacgtggtgcagccggcgcacatgtggtggccgggcacgctcgtgcaggtctccctcttccaggcattgcacgagaagaaggacgaatccgcgaaagcctcacgccagatctcccgctccaagttcttcgtggtggtgctcgcgtgcagcttcgcatggtacgccgtgccaggctacctgttcccgacgctgacgtccatctcatggctgtgctgggtcttctccaagtccgtgacggcgcagcagctggggtcaggcatgaagggccttggtcttttcgccttcacgctcgactggtccaccgtctcctccttcctcttcagccccctcatctcgcccttcttcgccaccgccaacatcttcgtcggctacgtcgtctttgtctacgtgatcatgcctatggcgtactgggggttcgacctgtacagcgccaagacattccccatcttctcctcgcacctgttcatgtcgaatggcaccgaatacgacgtcaaatcgattgtgaacaaccaattcgagcttgaccggcaagcttatgacaggaatggcaaagtgaacctcagcgtgttctttgcactcacttatgggttcagcttcgccaccattgcgtcgaccatcactcatgtcgggctcttctatgggaaggaaatctaccaccgtttcaaatcgtcgcagagggagaagcctgacatccacacgaggctgatgagcaagtacagcgagatcccagcatggtggttttactctttgatggcgctgtcaattgcagtgtccctgatcctctgcactgtactcaagcgtgaggtacaactcccatggtggggcctcattttcgcatgtggcatggcattcctcttcacacttcccatcagcatcatcaccgcgaccaccaaccagtcgcctggcctgaatgtgatcaccgagtatgccatgggtctgattatgccgggctctcctatcgccgtcgtctgcttcaaagtctatggctacatgagcatgtcgcaggctgttgccttcctctcggacttcaaacttggccactatatgaagatccctcccaagtccatgttccttgttcagtttgttggtaccattgtggctggcacgatcaacatcgggacagcgtggtggctgcttggctccatccacggcatctgctcggattcactcccgccagacagcccctggacatgccctaacgaccgtgtgttcttcgacgcgtcagtcatctggggcctcgtcggtccaatgcgcatctttgggccaggtgggaactacggcgccgtcaactggttcttcctcatcggcgcggcaggcccggtcatcgtatacgctctccacagggtgttccccagccagagctggataccgctgatcaaccttccggtgctctttggtgcaacggctagcatgcccccagcgacggcggtcaactacaactcgtggctgcttgtcggcaccatctttaacttcttcgtgttccggtaccgcaagaggtggtggactcggtacaactacatcctctccgccgggcttgacgccggagttgcgttcatgggggtgctgctgtacttctcgctgaccatgcagaacaagagcatcgattggtggggtactgcaggagagcactgccctcttgccaagtgtcctactgccaaaggggtggacttgggtgatggcgtctgcccagtcttctaagcctggagtttgatgccacaacatgctgctgtcagttccaagttatgttcataccatagatttgtggtatatacgtcgagtataatgcgacttctcttatgtgtaaatgatcatattctcatgtactacttggtagtcgattgtgcgtccataccgacaaaaatacttcatttggtttgcagatcgcaattagaatacatatgtttcagtagtttacatggagaaacaatgggaaattgtacggattagtttatttcctaacagttacaatataataatagcatatcggttctgccgtatgcatagagaaacaattcagacacagagtactagaacagacgacaccaattcagtcattgtcaacatgcagcaggcctaaatattacaatcgggcatagcaaggaagctgaggtatgaaacagagacaccaatgaagattcggtagcagctaggctcgggagactctgcgtacctctgtcttctcactacgggaggcggccgcggttgaggaggccaagcgtgtggcgcgcagcctcgacgaggtcccggatgttgtggagcgacctctcctcggcaccgaagacgaagatggctcggcattccgccttctttgccagccgcgccgcgtgccccagcggcagcgccggcgagtttagcgcccgaaggacctgccgatacagggacagaaccaccggccggcgccgcgcaagatcctccgccgtcgcccagatcatcccgctgccagcaccgcccttcgccatcattccgccgccgtgctcgcctcgcccactgccacgagcgggtttcgaagccgccggggaccggggtccaaagcgaaaggatgagaggggaggccactgggcttctatgagaaaatgggctgaccgaccatgattaggttacggcccaggagcatgtgttcccatttcccacttcccagacatagccatgtcactccttgctccgaccacctacgaaaacctaaccgggagcaaaatgcgcgcgaggcggttcgaattctgccaccccatttcgatcgcgttctcagacacagggcgaggttgttgggatcgcatccgtggagggagcgactatagaagatatggttgtcatcaattcatcacaccagccattaattacaagttaccggcgtccgttttagctgatctaaagtcacaaaatgctggtggcatggaatccgctcgttagaaagctgaggacattgtaggttctatgctagccaaagagtttgttcttggtatagacgtcgttgaaaaaccaaaggcttttgatgaaaagcatcagctcaaatcaactgcaactgccaaagtcgcttcccttgataggagtataggacaatgggattaagccagaagttcagcaccgggagtggtgaatgggaaaatgaaggaaatggatggttgcagagaagaccaagtccgcattagctgcggctgaacagactgtctctactgctaattctgccatcatgaggaacacatatatcctcacaggtgcagcacgggtaactgatacctaggttgcaaccactgcaaccgatgttaacacgaagacaaggaaaggatgatggctgagggggagggagcccatcagagaccagagtggttaacccaccaaggttggtatggttgtgtgaaatcgtgtgtgatgaaacattgatttaatattgacattggctttgtaaagtgaattatgtgatattgaatgtaac

SEQ ID NO: 55629 - DNA, 2786 bp, Zea Mays
agacctcagagtgcgcctctctttacaaattacaaccaaaggaaagcacgcgcaggcgccgcgagtacaggttggcattattgaatccgcccacgaacaatgggtgagataggcacggaccagctgggtctggccgaggccgaggccgccgccgccgctgtgaaggaggagggcatcctcgacgacgacgaggagacgtcgccgatagagcaggtgcggctgacggtgccgacgacggacgactcgtcgctgccggtgtggacgttccggatgtggagcatcgggctgctgtcgtgcgcgctcatgagcttcctcaaccagttcttctcgtaccggacggagccgctggtggtgacgcagatcacggtgcaggtggcgtcgctgcccgtgggccacttcatggcccgggcgctgccgcgcaccaggttccgggcgcccgcgctgctgggcggcggggcgtggagcctcaacccggggcccttcaacatcaaggagcacgtgctcatctgcatcttcgccaacgccggcttcgccttcggtgggggcagcgcctacgccgtcggcatcatcaacatcatccgcgccttctacggccgccacatctccttcctcaccgcctggctcctcgtcgtcaccacgcaggtgctcgggtacgggtgggcagggctgatgcgcaagtacgtggtgcagccggcgcacatgtggtggccgggcacgctcgtgcaggtctccctcttccaggcattgcacgagaagaaggacgaatccgcgaaagcctcacgccagatctcccgctccaagttcttcgtggtggtgctcgcgtgcagcttcgcatggtacgccgtgccaggctacctgttcccgacgctgacgtccatctcatggctgtgctgggtcttctccaagtccgtgacggcgcagcagctggggtcaggcatgaagggccttggtcttttcgccttcacgctcgactggtccaccgtctcctccttcctcttcagccccctcatctcgcccttcttcgccaccgccaacatcttcgtcggctacgtcgtctttgtctacgtgatcatgcctatggcgtactgggggttcgacctgtacagcgccaagacattccccatcttctcctcgcacctgttcatgtcgaatggcaccgaatacgacgtcaaatcgattgtgaacaaccaattcgagcttgaccggcaagcttatgacaggaatggcaaagtgaacctcagcgtgttctttgcactcacttatgggttcagcttcgccaccattgcgtcgaccatcactcatgtcgggctcttctatgggaaggaaatctaccaccgtttcaaatcgtcgcagagggagaagcctgacatccacacgaggctgatgagcaagtacagcgagatcccagcatggtggttttactctttgatggcgctgtcaattgcagtgtccctgatcctctgcactgtactcaagcgtgaggtacaactcccatggtggggcctcattttcgcatgtggcatggcattcctcttcacacttcccatcagcatcatcaccgcgaccaccaaccagtcgcctggcctgaatgtgatcaccgagtatgccatgggtctgattatgccgggctctcctatcgccgtcgtctgcttcaaagtctatggctacatgagcatgtcgcaggctgttgccttcctctcggacttcaaacttggccactatatgaagatccctcccaagtccatgttccttgttcagtttgttggtaccattgtggctggcacgatcaacatcgggacagcgtggtggctgcttggctccatccacggcatctgctcggattcactcccgccagacagcccctggacatgccctaacgaccgtgtgttcttcgacgcgtcagtcatctggggcctcgtcggtccaatgcgcatctttgggccaggtgggaactacggcgccgtcaactggttcttcctcatcggcgcggcaggcccggtcatcgtatacgctctccacagggtgttccccagccagagctggataccgctgatcaaccttccggtgctctttggtgcaacggctagcatgcccccagcgacggcggtcaactacaactcgtggctgcttgtcggcaccatctttaacttcttcgtgttccggtaccgcaagaggtggtggactcggtacaactacatcctctccgccgggcttgacgccggagttgcgttcatgggggtgctgctgtacttctcgctgaccatgcagaacaagagcatcgattggtggggtactgcaggagagcactgccctcttgccaagtgtcctactgccaaaggggtggacttgggtgatggcgtctgcccagtcttctaagcctctgtcttctcactacgggaggcggccgcggttgaggaggccaagcgtgtggcgcgcagcctcgacgaggtcccggatgttgtggagcgacctctcctcggcaccgaagacgaagatggctcggcattccgccttctttgccagccgcgccgcgtgccccagcggcagcgccggcgagtttagcgcccgaaggacctgccgatacagggacagaaccaccggccggcgccgcgcaagatcctccgccgtcgcccagatcatcccgctgccagcaccgcccttcgccatcattccgccgccgtgctcgcctcgcccactgccacgagcgggtttcgaagccgccggggaccggggtccaaagcgaaaggatgagaggggaggccactgggcttctatgagaaaatggg

SEQ ID NO: 55630 - DNA, 2485 bp, Zea Mays
caacaacaagccaacaagctagcctcgcctcgcccccgctctctccgcctcagcccctcccttccctcaactcctgctagctctctctctctcacacacacactagctggagtagcaagctagctaggctcctcgcttccaagcgagaattgcggcggccctcctcgatttccatactcgttcccccaaccgaaccacaggcacacacctacgacgcggccacaccctcctccgccgatcccttctatatacgacgacgacgacgacgagaagatagacaccaagcagccggctttctcgtcatacagaccgagagaatggagctgttccctgcgcacccagacttgcagctgcagatcagccctcctcccccagccaccaagccaatggagctagggttttggaagagggctctagtcgacaccaccacctcgcctgcgactgcaacagccgtggcggcagccacgacggccaccacggccacctcccacgccttcgcctcctcggcgccgacatccgccgtgggataccaccacgcggcggtcggcgcgcaccaccatcaggtgccggtgccggtgccggcgggctcccactcccactcccacctgggcctcccgctcttgcaccacacccatcccatcctcccggcggcggagtctggcggcgtcctccgccggccggacctgggctccacgaggcccatccggggcatccccgtgtacagcacctcgcagcagccgctcccgttcctgcagagccacccgcattattgctgcgacgcgatcgccggcgcgggccacccgaggtcccccaaggccgcgctccgcctcgcgggggcgccggccaagcggggcgcgcgcgccccccggatgcggtggaccacgtcgctgcacgcgcgcttcgtccacgccgtcgagctgctcgggggccacgagagagctacacccaagtcggttcttgagctaatggacgtgaaggatctgacgttggcccatgtcaagtcgcacttgcagatgtatcggaccatcaagactactgaccacaggccagcctctgcttcatcctacgggcaagcgggtggtgcgaagacgatcatcgacatccccgacgacgacagcagcctgttcgacctcaccaataccaccaccaccaccagcgggtccgagtcgtccgcccagcactccaatccgcctgacggcagcgagcataatggcgccagcacgtgtgctctctggtgcaacgcctcgataagaggggccgcctgctggttcgtccgtgacaaatcaagagatgccactccgggcgacatcaaatccttcgaggtacgtagacgcagcctccctcctctctttttttttctctctcttcccactcgtctaaaccaattagtccatccatcattatctccaatacgtacctcgccgacgccgatggccggccgggcggccatgatgccgtgctaggtagctaagttttagagcaacagcgatcattcgtttccatgcgcttttcgacgtacggcggcgtgccctctgttgaactttcatcaatgcattttgtcggcagcacacgtttcattttggagccgtgagttatagcacatcattatttccagcaactttaattttaacatccaccaccactttaatttgtttgtttttttattattattttccgctaatatttgcaggacgtgcaatcacagagccttgatgacgatgtctctgacctgaacttgtcggcgccgttccaagtagctgctgcgacgatgtttggcggaggcaacaaaccgaacctcgacttcaccctaggacggatataataatccgccgcgcgcgcgccatctacatatggatgagttgatcgatgaagctggaccatgcatgcggataagagatcgacaggctagatcgagctagctagctgcatatatagattgatttgcttgcattgtaacgaccagccatatttaattatgatctgatggtgcatatatatacgcatgcatgtatatatggtcgtagggacggagagggagttgagcaaatgaaaagagagaggctagaagtaaagaataataagagataagactagcgtcgatccaggaacaaagctagcgcaaaaggagacgggcgggagagacattggggcgtgcgtgcgtgtgctcgctgttgtgcagtgtagtagacacgatagatagctcgataggctttatcaaaggcagcaagcaagggcaagagggtagcttgcttgcttgcctctctgcctgcctctgctgcccatcaaagggcatatgcatgtatgcatatatgctcattgctggcttctggttctggatgtggtgtacacatgcgcgagagggagagaggtgcatgtgcagcatgtgtgtgtgtaccagcagacgcatcaggtactacctagtttgtagctaggggccggttggctggacaaggtttaacaaaaggttgcttcatttatctcttat

SEQ ID NO: 55631 - DNA, 2238 bp, Zea Mays
ggtcgtcgtggtcgtgggagggagaaaaagaaagcggaaagcaaaggaaaaggagatgcatggtgtgggagaaaagaccaatctaggagtatatatcttcctccctgctagtgctaggccacctccctcccaacaacaagccaacaagctagcctcgcctcgcccccgctctctccgcctcagcccctcccttccctcaactcctgctagctctctctctctcacacacacactagctggagtagcaagctagctaggctcctcgcttccaagcgagaattgcggcggccctcctcgatttccatactcgttcccccaaccgaaccacaggcacacacctacgacgcggccacaccctcctccgccgatcccttctatatacgacgacgacgacgacgagaagatagacaccaagcagccggctttctcgtcatacagaccgagagaatggagctgttccctgcgcacccagacttgcagctgcagatcagccctcctcccccagccaccaagccaatggagctagggttttggaagagggctctagtcgacaccaccacctcgcctgcgactgcaacagccgtggcggcagccacgacggccaccacggccacctcccacgccttcgcctcctcggcgccgacatccgccgtgggataccaccacgcggcggtcggcgcgcaccaccatcaggtgccggtgccggtgccggcgggctcccactcccactcccacctgggcctcccgctcttgcaccacacccatcccatcctcccggcggcggagtctggcggcgtcctccgccggccggacctgggctccacgaggcccatccggggcatccccgtgtacagcacctcgcagcagccgctcccgttcctgcagagccacccgcattattgctgcgacgcgatcgccggcgcgggccacccgaggtcccccaaggccgcgctccgcctcgcgggggcgccggccaagcggggcgcgcgcgccccccggatgcggtggaccacgtcgctgcacgcgcgcttcgtccacgccgtcgagctgctcgggggccacgagagagctacacccaagtcggttcttgagctaatggacgtgaaggatctgacgttggcccatgtcaagtcgcacttgcagatgtatcggaccatcaagactactgaccacaggccagcctctgcttcatcctacgggcaagcgggtggtgcgaagacgatcatcgacatccccgacgacgacagcagcctgttcgacctcaccaataccaccaccaccaccagcgggtccgagtcgtccgcccagcactccaatccgcctgacggcagcgagcataatggcgccagcacgtgtgctctctggtgcaacgcctcgataagcggcagaggggccgcctgctggttcgtccgtgacaaatcaagagatgccactccgggcgacatcaaatccttcgagagccttgatgacgatgtctctgacctgaacttgtcggcgccgttccaagtagctgctgcgacgatgtttggcggaggcaacaaaccgaacctcgacttcaccctaggacggatataataatccgccgcgcgcgcgccatctacatatggatgagttgatcgatgaagctggaccatgcatgcggataagagatcgacaggctagatcgagctagctagctgcatatatagattgatttgcttgcattgtaacgaccagccatatttaattatgatctgatggtgcatatatatacgcatgcatgtatatatggtcgtagggacggagagggagttgagcaaatgaaaagagagaggctagaagtaaagaataataagagataagactagcgtcgatccaggaacaaagctagcgcaaaaggagacgggcgggagagacattggggcgtgcgtgcgtgtgctcgctgttgtgcagtgtagtagacacgatagatagctcgataggctttatcaaaggcagcaagcaagggcaagagggtagcttgcttgcttgcctctctgcctgcctctgctgcccatcaaagggcatatgcatgtatgcatatatgctcattgctggcttctggttctggatgtggtgtacacatgcgcgagagggagagaggtgcatgtgcagcatgtgtgtgtgtaccagcagacgcatcaggtactacctagtttgtagctaggggccggttggctggacaaggtttaacaaaaggttgcttcatttatctcttat

SEQ ID NO: 55632 - DNA, 2620 bp, Zea Mays
cctggatggcattcaacagctcaagaaaatcccagcgctcctccccagccacaaatcgcttgcacgtggggcccaataacgcggtgtccactgcaaccgccaacgctgcacacagtgggggcgagcaaggcgaccacggtggcgatagagacgcgcgatttttactcttcgcggtaaccgattcttgtaaacgcaagagctccatgcggccaccggccacggttcggcaatggtagtttcgtcacacttcctctgacctctgctccaccgctcgcccatggtgctagcatggtaggaggtctagttctgtcccaggcgcagacgcaccaggccgccacgccaagaaccgccgcaccggcgccggcgccggctcaggcgttggagaagaggccgagggaccaggcgcagccatgcggcacagtggcggcggctgcggccgtctcggtctcggcgccgagtttggacgaggtcaggaaggtgcacgcgcggcacatcaagctgggcctcgaccggtgcccgcggtatgcgcggccgctgctcgcggcgtgcgcggtctcgggctggccgggcggcatggagctcgcggcgtccatcttcgagtcgctcgtcgagccggaggccttcgattacaacaccctgatgcgcggccacgtcagcggcggcggtggcgaccgcgatccggcggccgcgctgcgcctgtacattgacgggctggaggcgggcgtcagccctgacagctacacgttcccgttcgtgctcaaggcgtgcgcgcagttggcggcattgcaagaagggaggcagttgcaggcgcacatcgtgaagctcgggttccagcacgacgagcacgtgcagaacagcctgatcagcttctacggcaagtgcggcgcgccggcgatggctcgtctggcgtttgaccgggtggaggccgaggagcgaacgacggtttcctggagcgcactcctcgcggcgtacacgaaggcagggctgtggggcgaatgtctcgcgtcgttcggctcgatgatgctcgatgggtggaggcccgacgagagctccatggtcagcgcgctctcggcgtgcgcgcacctaggatccttcgacgccgggcggagcgtccactgcgcgctgctgaggaacaccgcgaggctgaacaccatcatgctgacgtccctgctggacatgtacgccaagtgcggcagcatcgagaaggccgcggcggcgttcgacgcgatggatgacaagagcgcgtgggcgtacagcgccatgctatccggcctggcgctgcacggggacgggcggaaggcgctgcaggtgttcgacgcgatggtccgggagggccacgcgcccgacgcggccgcgtacgtcggcgtgctgaacgcctgcagccgcgccgggctgctcgaggacggcctgaggtgcttcgaccgcatgcggctggagcacaaggtcgcgcccaacgcgctgcactacggctgcatggtggacctgatggcccgcgccgggaggctggacgacgcgcgcgcgctcatcgggaccatgcccacggggccgacggacacggcctggcgaagcctgctgaacgcgtgccggatccacggcgacctggatctcgcctggcacgcccttcaggagctcaggcgcctcggcgccgccaacgccggcgactacgttatcgtcgcggacatgcacgccagggccaagaattggaccgctgccgccgcgctccggacagaggcggtggactcgggcctcgcgcagtccctcgggttcagcgccgtggaggtgcgcggggagctgcaccggttcgtgtcgcaggacatggcgcacccgcggacgcgcgacatctacgagatgctccaccagatggagtggcagctgcggttcgatggctacaaacctgacacgtcggaggtggcgctggacgcgggcgaagaggagaaggggcgcgtggtcgcggcgcacagccagaagctggccatggcgttcggcctgctcagcacgccggagggggcgccggtgagggtcgtgaccaacctccggatgagcaaggaatgccacgcgtacagcgccctgatctcggagatcttcgggcgggacatcgtcatcagggacaggaaccggctccaccggttcagtaggcctcaggtcgaaccaccaccaagcagcccaacccggacgaaaccaaggcgaaaccaaggcgacgccatcgacgagctcagcgacgccggcgccgtagcgaaagcacccgcgcttcgtcgagaaatggaaggtgttgctatctgaagatgaccaaagcatgctagagaagaaggtagaagaggtgcagtcttggatcttcagcttcaagagtgttgatggagggggaagcgacatagtagtgatttgaagtattagaaaaactttgttagagatttctcaacgctttctggagtgtttcagagtgttctactcttagctggtggttcaactttgctgggaggaaaaattctggaggtttttctttttctttttggaggagttcatggctcctgtgtgctgtcaatattacttctagctgatcggttcactgattgaatcttggctatgctagtctataggtttctttagttctggtggttggtgg

SEQ ID NO: 55633 - DNA, 2495 bp, Zea Mays
cctggatggcattcaacagctcaagaaaatcccagcgctcctccccagccacaaatcgcttgcacgtggggcccaataacgcggtgtccactgcaaccgccaacgctgcacacagtgggggcgagcaaggcgaccacggtggcgatagagacgcgcgatttttactcttcgcggtaaccgattcttgtaaacgcaagagctccatgcggccaccggccacggttcggcaatggtagtttcgtcacacttcctctgacctctgctccaccgctcgcccatggtgctagcatggtaggaggtctagttctgtcccaggcgcagacgcaccaggccgccacgccaagaaccgccgcaccggcgccggcgccggctcaggcgttggagaagaggccgagggaccaggcgcagccatgcggcacagtggcggcggctgcggccgtctcggtctcggcgccgagtttggacgaggtcaggaaggtgcacgcgcggcacatcaagctgggcctcgaccggtgcccgcggtatgcgcggccgctgctcgcggcgtgcgcggtctcgggctggccgggcggcatggagctcgcggcgtccatcttcgagtcgctcgtcgagccggaggccttcgattacaacaccctgatgcgcggccacgtcagcggcggcggtggcgaccgcgatccggcggccgcgctgcgcctgtacattgacgggctggaggcgggcgtcagccctgacagctacacgttcccgttcgtgctcaaggcgtgcgcgcagttggcggcattgcaagaagggaggcagttgcaggcgcacatcgtgaagctcgggttccagcacgacgagcacgtgcagaacagcctgatcagcttctacggcaagtgcggcgcgccggcgatggctcgtctggcgtttgaccgggtggaggccgaggagcgaacgacggtttcctggagcgcactcctcgcggcgtacacgaaggcagggctgtggggcgaatgtctcgcgtcgttcggctcgatgatgctcgatgggtggaggcccgacgagagctccatggtcagcgcgctctcggcgtgcgcgcacctaggatccttcgacgccgggcggagcgtccactgcgcgctgctgaggaacaccgcgaggctgaacaccatcatgctgacgtccctgctggacatgtacgccaagtgcggcagcatcgagaaggccgcggcggcgttcgacgcgatggatgacaagagcgcgtgggcgtacagcgccatgctatccggcctggcgctgcacggggacgggcggaaggcgctgcaggtgttcgacgcgatggtccgggagggccacgcgcccgacgcggccgcgtacgtcggcgtgctgaacgcctgcagccgcgccgggctgctcgaggacggcctgaggtgcttcgaccgcatgcggctggagcacaaggtcgcgcccaacgcgctgcactacggctgcatggtggacctgatggcccgcgccgggaggctggacgacgcgcgcgcgctcatcgggaccatgcccacggggccgacggacacggcctggcgaagcctgctgaacgcgtgccggatccacggcgacctggatctcgcctggcacgcccttcaggagctcaggcgcctcggcgccgccaacgccggcgactacgttatcgtcgcggacatgcacgccagggccaagaattggaccgctgccgccgcgctccggacagaggcggtggactcgggcctcgcgcagtccctcgggttcagcgccgtggaggtgcgcggggagctgcaccggttcgtgtcgcaggacatggcgcacccgcggacgcgcgacatctacgagatgctccaccagatggagtggcagctgcggttcgatggctacaaacctgacacgtcggaggtggcgctggacgcgggcgaagaggagaaggggcgcgtggtcgcggcgcacagccagaagctggccatggcgttcggcctgctcagcacgccggagggggcgccggtgagggtcgtgaccaacctccggatgagcaaggaatgccacgcgtacagcgccctgatctcggagatcttcgggcgggacatcgtcatcagggacaggaaccggctccaccggttcagaaatggaaggtgttgctatctgaagatgaccaaagcatgctagagaagaaggtagaagaggtgcagtcttggatcttcagcttcaagagtgttgatggagggggaagcgacatagtagtgatttgaagtattagaaaaactttgttagagatttctcaacgctttctggagtgtttcagagtgttctactcttagctggtggttcaactttgctgggaggaaaaattctggaggtttttctttttctttttggaggagttcatggctcctgtgtgctgtcaatattacttctagctgatcggttcactgattgaatcttggctatgctagtctataggtttctttagttctggtggttggtgg

SEQ ID NO: 55634 - DNA, 221 bp, Zea Mays
tctcatgtttgtcaccagctttgattatgtacttgtccagatatagcttcaggagcttgaatcgctcatcttccccaggcaggggaaattccaggacctcatcaatacggtcagcaacagcagagtcaagatcaccgggtctgttggtggcaagtgcaaggacaatgtccttggattggtcacctgtgcggaagaggagagcattcagggcactcctttga

SEQ ID NO: 55635 - DNA, 1316 bp, Zea Mays
ctttgatcggcatggttgtagttgtaggaggctgtcgagacgctggcccccaacataagtacaggagaatctgacccagcggcagctgttcctgcggagagcccccatggcatcgaggttggtgttgagttcaagccagtggagcgccccgtggaacctatcaatcttgatgagccagtgaaatgcccgcttcctgagccgtctatactgcacgtaagccatcctctcagttccagtggtttatagaaaaatggctctagaatatcaatttattgacaaggcgattaactttcttttcttgcatcgttcagtattaaacggtatcaggaaactttcttgtgctgcagaatgtgatgttaaaccattctagtaaacttccttgtgttgtgttacagaattagttactcgatgcttgaacttattgttgcgtaaactgatcgatggatgatgctaggataggaggatatgtggtgttttcagtatcaaatgcagaccatattagaaatctttcttgtgctgcagacttaactgctaggtctcatcttgacagtctggtcttgtatatgcttcaagttcgacgtttccttagcagtaaagcatcagctattccagtctttacttgttcccttatcggtttgatcggttgatggtccgatggatgctaggacgggaggatatggaaggagaaaatgtcttcagtcagcacgagggtgagaacagacttgccggtcgtgaaggaagggtcgcagctggagcctgacggtagcagcgctaggtcacgatctgcagttccaaggcgcgccatactgccctccgtaagcgcgcccgagcacaacatcctagcgctgcttgacgagtgcgacgtctccgggagccgtggctctgctgaatgagctcgagttgggcgtcgccagcacattgtaactaaactgcgtttgccacgagctgatctgagcacagcaaaccttacagtatgtctgaaaagaattggaactacgcaacagatcttttgtctggattgtatctataaatacgagtgaaagcgttttggggaaattgtctcgcacttgtcggaggcagttatggttactgaaactgaaacacttggttttgtgttgtaacttttgcactgttgagtgcgagcatgcagctctgaatgtgacgccaagttgtcaagtgcaaaatgaactggaaaatttgttacgggtaggcagtggttgctacttatctatcaaatctcaattcgcttgcccgtagatttgccgctaccgccgacagccgcagctgcggtgccgtcggcctcaccgggatcgtgg

SEQ ID NO: 55636 - DNA, 1005 bp, Zea Mays
gtttacttccccaactccaagaaagggtctgcttgtttataaccagcatatcaggtcaacagtaggttagcttagcttctacaaggcgtgcaagggtcagatttgagctggtttcatttgcccccctcctatttgttcatgggtggattctgctgtctccgagactcggaggctgtcgagacgctggcccccaacataagtacaggagaatctgacccagcggcagctgttcctgcggagagcccccatggcatcgaggttggtgttgagttcaagccagtggagcgccccgtggaacctatcaatcttgatgagccagtgaaatgcccgcttcctgagccgtctatactgcacgacgggaggatatggaaggagaaaatgtcttcagtcagcacgagggtgagaacagacttgccggtcgtgaaggaagggtcgcagctggagcctgacggtagcagcgctaggtcacgatctgcagttccaaggcgcgccatactgccctccgtaagcgcgcccgagcacaacatcctagcgctgcttgacgagtgcgacgtctccgggagccgtggctctgctgaatgagctcgagttgggcgtcgccagcacattgtaactaaactgcgtttgccacgagctgatctgagcacagcaaaccttacagtatgtctgaaaagaattggaactacgcaacagatcttttgtctggattgtatctataaatacgagtgaaagcgttttggggaaattgtctcgcacttgtcggaggcagttatggttactgaaactgaaacacttggttttgtgttgtaacttttgcactgttgagtgcgagcatgcagctctgaatgtgacgccaagttgtcaagtgcaaaatgaactggaaaatttgttacgggtaggcagtggttgctacttatctatcaaatctcaattcgcttgcccgtagatttgccgctaccgccgacagccgcagctgcggtgccgtcggcctcaccgggatcgtgg

SEQ ID NO: 55637 - DNA, 1531 bp, Zea Mays
gtgagttatctcttccccctctttctccttcccctactatgcccactttgtacttccgtgtcgtttctgctgtagtttacttccccaactccaagaaagggtctgcttgtttataaccagcatatcaggtcaacagtaggttagcttagcttctacaaggcgtgcaagggtcagatttgagctggtttcatttgcccccctcctatttgttcatgggtggattctgctgtctccgagactcggaggctgtcgagacgctggcccccaacataagtacaggagaatctgacccagcggcagctgttcctgcggagagcccccatggcatcgaggttggtgttgagttcaagccagtggagcgccccgtggaacctatcaatcttgatgagccagtgaaatgcccgcttcctgagccgtctatactgcacgtaagccatcctctcagttccagtggtttatagaaaaatggctctagaatatcaatttattgacaaggcgattaactttcttttcttgcatcgttcagtattaaacggtatcaggaaactttcttgtgctgcagaatgtgatgttaaaccattctagtaaacttccttgtgttgtgttacagaattagttactcgatgcttgaacttattgttgcgtaaactgatcgatggatgatgctaggataggaggatatgtggtgttttcagtatcaaatgcagaccatattagaaatctttcttgtgctgcagacttaactgctaggtctcatcttgacagtctggtcttgtatatgcttcaagttcgacgtttccttagcagtaaagcatcagctattccagtctttacttgttcccttatcggtttgatcggttgatggtccgatggatgctaggacgggaggatatggaaggagaaaatgtcttcagtcagcacgagggtgagaacagacttgccggtcgtgaaggaagggtcgcagctggagcctgacggtagcagcgctaggtcacgatctgcagttccaaggcgcgccatactgccctccgtaagcgcgcccgagcacaacatcctagcgctgcttgacgagtgcgacgtctccgggagccgtggctctgctgaatgagctcgagttgggcgtcgccagcacattgtaactaaactgcgtttgccacgagctgatctgagcacagcaaaccttacagtatgtctgaaaagaattggaactacgcaacagatcttttgtctggattgtatctataaatacgagtgaaagcgttttggggaaattgtctcgcacttgtcggaggcagttatggttactgaaactgaaacacttggttttgtgttgtaacttttgcactgttgagtgcgagcatgcagctctgaatgtgacgccaagttgtcaagtgcaaaatgaactggaaaatttgttacgggtaggcagtggttgctacttatctatcaaatctcaattcgcttgcccgtagatttgccgctaccgccgacagccgcagctgcggtgccgtcggcctcaccgggatcgtgg

SEQ ID NO: 55638 - DNA, 1066 bp, Zea Mays
gttaaacaattgtccggaggttgaacaatatatagagtatgtcttcatatccacaattttgcttcatttgaatacaaacctactaatttgatgtgctaattgtttatttaaaaatgctttccaggttatacagaaaggagctacataatgaaggaaatcaagatattgaaaaaaccattgagaaacaatttggtacctggtttaagaaccatgtgagttgttcttgtatattttcttaaaccatttttagtggttgaagttgttttaaccatcttggggaattctgtgtacagattgcaactctacgatttgtgaatggtaaagatgtaagtggtgacctatacgctttgtcatgtcagccagatctgtgagtaagaatattttcagcatgtattgttggtggtgtaaggttccacactattgagcgtgagaaaaatagaaggacgcagaatagtggagttatggttgatggctcacataatggagaagatattgaattttatggttgcttgaaagaaataattcagctgcagtacaatgcagactctagcggatatcggtcagtggttctatttcggtgtgattggattgatacgtgtagtaacagggcaaggatgaaagatgatggattctttagaagcatcaaccatgcatgtatttggtacaaggatgatccttttattctatccacgcaggcggcaaaggtgttttacttggaagataccaaatatcgtggagactggtgagttgttcaaaaattctcacataggcatttgtggaatgtggatgaaatttcaagtgatgaaatatcaaagggtgtggaactgtcataccaagatgatgactgtgttgattttcatattcaagattatgatgtcaatatggacagtgatgtgttggtcggtgaaaattcttttactgttcatgcaagtatagttgaagaccttcagagacaaagggaggatgaacctgaagatttatttgaagacgaagaagatgaaacatttctgcaatatgctagtgataatgaagagagaacaatccataacggcgaagatgatgatag

SEQ ID NO: 55639 - DNA, 329 bp, Zea Mays
aaataatataatgtctagatccatatatgtctagacccatacatgtcacgttgaaatatattttgcccaaaaaatcccacatcgaccagatccatacacacgtgagttacaaatcagttttgcccaaataagtccacgagtctcacagcagcccgccggctacgagtctacagcagcccaccgactacaactctcagaacatccatttaggtcctaggtatcccgtcggctgagtccagcagggtacagacgcaacaaccaaacgccggaaacacacgtaggagcttgaagccgtcgacggctgttctggcgctaccactgtggaaagg

SEQ ID NO: 55640 - DNA, 4524 bp, Zea Mays
cttgaaagttgaaaccctagtgcaggcacacgacctccgtgtgcaacgcgtcgccgccatggcggcccccctgcactccagctccggccacaacgccgccgcaggcggcggggccaagaccatcgaggagatgtaccagaagaaaacgcagctggagcacatcctgctgcgccctgacacctacatcggctccgtggagaagcacacccaggcgctttggatatacgaggacggtgccatggtgaaccgctcggtcacctacgtccctggactctacaagatcttcgacgagatcctcgtcaacgccgccgacaacaagcagcgggatcccaagatggacgcgctccgcgtcgagattgacgtcgacagctgctgcatctccgtatacaacaacggcgacgggatccccgtcgaggtccaccaggaggagggcgtctacgtgccagagatgatattgggccacctcctcaccagtagcaactacaacgacaacgagaagaagaccaccggcgggaggaacggatacggcgccaaactcactaacatcttctccactgagttcgtcatcgagaccgccgatgggcgtcgccagaagaagtacaagcaggttttctatgagaacatggggaagaagtcagagccccagattaccaagtgcaagcagggcgagaactggaccagggtcactttcaagcctgatcttgccaagttcaacatgacccatctcgaagatgatgttgtagccctcatgaggaagagagttgttgatatggcaggcactctcggcaaaacggtgaaggtcgagttggatggccagagggtgcccataaagagcttctgtgactatgtcgacctgtatatgaagagtgctaactgcgacagacctgataatttcaaaaggatttatgagcaagtaaatgatcggtgggaagtgtgtgttagtcaaagtgaagggcaatttcagcaggtcagctttgtcaacagaattgcaaccatacgaggtggaagtcatgttgattatgttaccaaccaaattgccaaccatgtggtggccattgtgaataagaaaaacaagaatgcaaacatgaagctgcacaacgtgaagagccatctatgggtctttgttaatgcgctcattgacaatccggcttttgattcacaaaccaaggagaccttgaccactcgtcagggaagctttgggtcaaagtgtgagctttctagtgatttcctcaagaaagttgagaaatctggtgtaattgagaatgtcctctcttgggctgatttcaaacttagcaaagaattaaagaagactgatggaagcaaaaagtcaagaatttctggcatccctaagcttgaggatgcaaatgaagctggtgggaaggactctgacaagtgcactttgatcctgactgaaggcgactccgcaaaagcacttgctatgtctggcatagctgtcgtagggagagattactatggcgtatttcctctcaggggaaaactgttgaatgtcagagaggcaaaccacaagcaaataatggacaacgctgaaattcagcacataaagcaaatacttggtttgcagcatggaaagcagtatgagagcaccaaaggtttgagatatggtcatctcatgataatgacagatcaggatcatgatggctcccacattaaagggttgctgatcaacttcatccactcattctggccgtctcttcttaaagttccatcttttttggttgagttcattactccaatcatcaaggcaaccagaggtcaaactacgaaatcattttacacaatgccagagtatgaagaatggagaaagaatttaggagcaagtgcaagttcgtggactataaaatactacaaggggttggggacaagcacagccaaagaaggccggaagtactttgaagatattattgatcacaaaaaggattttgtctgggtagatgaccaagatggcaaccatattgagttagcattcagcaagaaacggattgctgataggaaacagtggcttacaaattttcagcctggaacatacatagaccaacgtgagaaacaagtcaagtatagtgatttcatcaacaaagagctgatactcttctcaatggcggacctgcagcgatcaataccttcaatggttgatggccttaaaccaggccagaggaagattctgttttgttcattcaagaggaattttgtcaaggaagctaaggtggctcagttctctggttatgtgtcagaacactccgcataccaccatggtgagcagagtttagcaagtacaattattggcatggcccagaattttgttggcagcaataacatcaaccttatgtcccctaatggtcagtttggcacaagagctcagggaggcaaggacgctgcaagtcctcggtatatcttcaccaagctgtctaatattacacgttcaattttcccgaaggatgacgatattcttcttaattatctgaatgaggatgggcagtcaattgaacccacctggtatatgccaatccttcccatggtattggtcaatggaagtgaaggaattggaactggatggagcacatatattccaaactacaatccaagagacattgttgctaacgtcaggcggttgttgaatgaagagtctactgtaccaatgcatccttggtataggggattcaaggggtctatagagaagacagtcaatacgaaggtagctggttccacgtataccgtcaccggaatcattgaggttgttgacaacactacactgaggatcactgagctgccaatccgccgatggactcaggattacaaagattttctcgaaagtttagctccagatcctaagaacaaggacaaagatgtcacatcacaaggtgataatgaagacgtctacattcaactcaaattaagtgaggcaaatgtgaatgtagctaaggaagaaggactagtgaagaagtttaagttgacaacaacaattggtacaacaaacatgcacttgtttgattcagatggtaaaattcggaaatatgacactcctgagcaaatacttgaggaattctttcaattaaggcttgaattctattgtaagagaaaggaagcattgttgaagaatatcaagctggacttaaagaagcttgaaaacaaagttaggtttatccgctgtgttgttgataatgaaattatagttaacaacaggaaaagggcagatctatttttggagctccggcacaagaattttgaccctttcccaaagaaaaaaaagaaggctgaaccaactgctgtaggtgctatagaagaggaggaaaatgaagagtctcctgaaactgcagcaggagtggatcctagtgactatgagtatctcctctccatgtcaattggtaccttgactttggagaagatacaagagctcaatgctgagaaacaaaagttggtggacgatgttgtggaactgatgaacacatcgccaaaatcactttggttgaaagatcttgatgcttttgagaaagaactggatgtgcttgatcaaatggatctagcagaggaggtgcaaagggaaaagaggataaaggaaggcaaaaaaggcggatcaaaagctgcacccaagaaacaacctaaaaaggctgcacctataaagctggaaagcagtacagaagacaatgctgctgaaccagtagtcgcaaagcgtggagctcaacagaagaaagcacccaaaaaggctcccgtggacgaagaggaagttgatatgccttcactgaaagaccgtcttgctgcctttaatataaatgactcatctcctcctgatcactctgctatggaaactgaaacaacagaacagccggctcagaagaaagggagaggaaagaagcctgccgccgccgctgtgaagccgaaggctcctgccgccaggaaaagggcgccgactcaagggggcaaggcaacgcagaagaaaatagatgagatgctcaaggtcactgaggataacaccagcagtgctttgtcccctgagaagaaggtccggaagatgaggccctctcccttcaacaagaagagtggctcaatcttacagagaggctcgactgccgcttctgcaagctctgaaactatcgctgaagcttcaccaccctctggtagctctgaagagccagttgctgcagcaaaacctagaaggacagccagggctacgaagaaacatgtctatattagtgaaagcgatcctgaggatgaagtggtggagttgagtgatgattcggactttgatttggatgctgactctgactagtgagggtaactgtcatccgtagcatgtgctacctttattgatgatgcatttcttgtgcatgtgctactttaattgacgagtgcgggtaactgtcaatctgtcatccgtgttgttctgttgactgttgtatgtgtgttttctgttgactgttgtcgggaacccaagacattgtctggttaactgatttgtctgtctataattttggcattcaagtgtgcttgtggtatgctctgcagcagtac

SEQ ID NO: 55641 - DNA, 4463 bp, Zea Mays
aaaatagcaaaatagctctcgataaaccccccaaccccatcccccaactccgcacgcatccgacttgaaagttgaaaccctagtgcaggcacacgacctccgtgtgcaacgcgtcgccgccatggcggcccccctgcactccagctccggccacaacgccgccgcaggcggcggggccaagaccatcgaggagatgtaccagaagaaaacgcagctggagcacatcctgctgcgccctgacacctacatcggctccgtggagaagcacacccaggcgctttggatatacgaggacggtgccatggtgaaccgctcggtcacctacgtccctggactctacaagatcttcgacgagatcctcgtcaacgccgccgacaacaagcagcgggatcccaagatggacgcgctccgcgtcgagattgacgtcgacagctgctgcatctccgtatacaacaacggcgacgggatccccgtcgaggtccaccaggaggagggcgtctacgtgccagagatgatattgggccacctcctcaccagtagcaactacaacgacaacgagaagaagaccaccggcgggaggaacggatacggcgccaaactcactaacatcttctccactgagttcgtcatcgagaccgccgatgggcgtcgccagaagaagtacaagcaggttttctatgagaacatggggaagaagtcagagccccagattaccaagtgcaagcagggcgagaactggaccagggtcactttcaagcctgatcttgccaagttcaacatgacccatctcgaagatgatgttgtagccctcatgaggaagagagttgttgatatggcaggcactctcggcaaaacggtgaaggtcgagttggatggccagagggtgcccataaagagcttctgtgactatgtcgacctgtatatgaagagtgctaactgcgacagacctgataatttcaaaaggatttatgagcaagtaaatgatcggtgggaagtgtgtgttagtcaaagtgaagggcaatttcagcaggtcagctttgtcaacagaattgcaaccatacgaggtggaagtcatgttgattatgttaccaaccaaattgccaaccatgtggtggccattgtgaataagaaaaacaagaatgcaaacatgaagctgcacaacgtgaagagccatctatgggtctttgttaatgcgctcattgacaatccggcttttgattcacaaaccaaggagaccttgaccactcgtcagggaagctttgggtcaaagtgtgagctttctagtgatttcctcaagaaagttgagaaatctggtgtaattgagaatgtcctctcttgggctgatttcaaacttagcaaagaattaaagaagactgatggaagcaaaaagtcaagaatttctggcatccctaagcttgaggatgcaaatgaagctggtgggaaggactctgacaagtgcactttgatcctgactgaaggcgactccgcaaaagcacttgctatgtctggcatagctgtcgtagggagagattactatggcgtatttcctctcaggggaaaactgttgaatgtcagagaggcaaaccacaagcaaataatggacaacgctgaaattcagcacataaagcaaatacttggtttgcagcatggaaagcagtatgagagcaccaaaggtttgagatatggtcatctcatgataatgacagatcaggatcatgatggctcccacattaaagggttgctgatcaacttcatccactcattctggccgtctcttcttaaagttccatcttttttggttgagttcattactccaatcatcaaggcaaccagaggtcaaactacgaaatcattttacacaatgccagagtatgaagaatggagaaagaatttaggagcaagtgcaagttcgtggactataaaatactacaaggggttggggacaagcacagccaaagaaggccggaagtactttgaagatattattgatcacaaaaaggattttgtctgggtagatgaccaagatggcaaccatattgagttagcattcagcaagaaacggattgctgataggaaacagtggcttacaaattttcagcctggaacatacatagaccaacgtgagaaacaagtcaagtatagtgatttcatcaacaaagagctgatactcttctcaatggcggacctgcagcgatcaataccttcaatggttgatggccttaaaccaggccagaggaagattctgttttgttcattcaagaggaattttgtcaaggaagctaaggtggctcagttctctggttatgtgtcagaacactccgcataccaccatggtgagcagagtttagcaagtacaattattggcatggcccagaattttgttggcagcaataacatcaaccttatgtcccctaatggtcagtttggcacaagagctcagggaggcaaggacgctgcaagtcctcggtatatcttcaccaagctgtctaatattacacgttcaattttcccgaaggatgacgatattcttcttaattatctgaatgaggatgggcagtcaattgaacccacctggtatatgccaatccttcccatggtattggtcaatggaagtgaaggaattggaactggatggagcacatatattccaaactacaatccaagagacattgttgctaacgtcaggcggttgttgaatgaagagtctactgtaccaatgcatccttggtataggggattcaaggggtctatagagaagacagtcaatacgaaggtagctggttccacgtataccgtcaccggaatcattgaggttgttgacaacactacactgaggatcactgagctgccaatccgccgatggactcaggattacaaagattttctcgaaagtttagctccagatcctaagaacaaggacaaagtaacattcatagaggatgtcacatcacaaggtgataatgaagacgtctacattcaactcaaattaagtgaggcaaatgtgaatgtagctaaggaagaaggactagtgaagaagtttaagttgacaacaacaattggtacaacaaacatgcacttgtttgattcagatggtaaaattcggaaatatgacactcctgagcaaatacttgaggaattctttcaattaaggcttgaattctattgtaagagaaaggaagcattgttgaagaatatcaagctggacttaaagaagcttgaaaacaaagtgctatagaagaggaggaaaatgaagagtctcctgaaactgcagcaggagtggatcctagtgactatgagtatctcctctccatgtcaattggtaccttgactttggagaagatacaagagctcaatgctgagaaacaaaagttggtggacgatgttgtggaactgatgaacacatcgccaaaatcactttggttgaaagatcttgatgcttttgagaaagaactggatgtgcttgatcaaatggatctagcagaggaggtgcaaagggaaaagaggataaaggaaggcaaaaaaggcggatcaaaagctgcacccaagaaacaacctaaaaaggctgcacctataaagctggaaagcagtacagaagacaatgctgctgaaccagtagtcgcaaagcgtggagctcaacagaagaaagcacccaaaaaggctcccgtggacgaagaggaagttgatatgccttcactgaaagaccgtcttgctgcctttaatataaatgactcatctcctcctgatcactctgctatggaaactgaaacaacagaacagccggctcagaagaaagggagaggaaagaagcctgccgccgccgctgtgaagccgaaggctcctgccgccaggaaaagggcgccgactcaagggggcaaggcaacgcagaagaaaatagatgagatgctcaaggtcactgaggataacaccagcagtgctttgtcccctgagaagaaggtccggaagatgaggccctctcccttcaacaagaagagtggctcaatcttacagagaggctcgactgccgcttctgcaagctctgaaactatcgctgaagcttcaccaccctctggtagctctgaagagccagttgctgcagcaaaacctagaaggacagccagggctacgaagaaacatgtctatattagtgaaagcgatcctgaggatgaagtggtggagttgagtgatgattcggactttgatttggatgctgactctgactagtgagggtaactgtcatccgtagcatgtgctacctttattgatgatgcatttcttgtgcatgtgctactttaattgacgagtgcgggtaactgtcaatctgtcatccgtgttgttctgttgactgttgtatgtgtgttttctgttgactgttgtcgggaacccaagacattgtctggttaactgatttgtctgtctataattttggcattcaagtgtgcttgtggtatgctctgcagcagtac

SEQ ID NO: 55642 - DNA, 3574 bp, Zea Mays
atttcacctttttcctcaaaaaagagagggaaatcatattccagggccgcccgcgccggaaccgaccacttcgccggcagcgagccggagactacgcggagcccctatccccgcgccggcgtgggcggagggaggagaaggagcagcagcagcagcagaaggataaaggggggctttgggagcctctgagaagaagattctagaagctacctgaggcgaggcgagcgcgccgcggcacgagtgatctcggtggaataagtcgcgcggggccggcgccgtgggggatgcgcctctggatgccgacacgctccgggatttgaatggtagccagatctcgagggggaggggagcttctcgaagcggggtaaggcgcgcggtctggttggccggcggttagggtttggcgggagcgggatggtggggagctcggtggagggaggagcagacggagatgggggctgctgcggcgtcggggacacctcgcccgggaccatcgtgtgggtgcggcggaggaacgggtcctggtggcccggcaggatcctgggccctgaggaactcccaccgtcgcagatcatgtcgccgaggtccggtacgccggtcaagctcctcggccgggaagacgcaagcgggattggtacaaccttgagaaatcaaaacgtgttaaagcattcaggtgtggagagtttgatgcctgtattgagaaggcagaggctacgcaagggactcttgtgaagaaaagagagaaatatgcacggagagaagatgctgttcttcatgcacttgaattggagaggaaacagtttgcatcgaagtatcagattcaaggtttcagacctggaccatctggtaatatttctgcttgcacaaaacaccgcaaagaccttggaagtactcgatacaagagtaaaaagagcaagaattgcaaagatgtatctgttcctcctgacgtaaaaaaagaagtgggacaatgtttcctacatgctggttcaaagagaaacttttcagaatctcttactcaaggaaatgttgtcagtaatcacatgggtaatttctctcatttgagccattctcatggaggtgacactttagagaacaaggagagtacaattgtgaagaaaaatagatcggatggaagtgattttgaagactctcttgtttcaaaatcagatagacgcagaccgatttctcaagtattgcagagtagtgaaaacttgcttcctcacttaaagcaaaacaatgattttggggctttgttaatcaaggagaataataatccttcacttgccacctcccggtccagaagaaataaatatacatacatggctagtgattctggtgaaactcagagtcatagtgatttaccttctataaagatgactgctactggagctgattttgagaatgaaagctatcttcggcatactggttatttttctgaggagcagacttcttctgacttcgttgagaagcaagtaactgagtcttcagagagggaatgctcagaaagtgagactgaagaggatgctgaacttctgcaaaatgcaagtgtgattctacctatagaatcacatgctcctgatccgtattctgttccaatatatgagaagttcaagcatgtggattatggtgacaatgaggtggcctattctaattatatgccccagttgaatgaatctgaggaagaggatggttcttctgagctgggtgtctctcagtggcacatgaaaggtaaacgtaacaatcgtaatgccacaaagagatcagtggacatgagagatggaaatacatggttaaaaaactacaatgggtcattaaaagggtctttgcataacacaaatgatgggaatcccagaaaagaaggtatgcacacatctggtgaaaagttttttgaggaaagcatttaccaaattaaagaggaacccagttatgatgattctgatgaaactaatgtatttgaggacacgagccattcagaggctaacttgtactatggtaaaagatgcacttcattcttgagaaccacaagagatcttagtcgaagatacagttactttaatgactatgagaatgactcttcaaatgtttctcccctaaataaggacactgaacagatgtaccatgttgatcggaatgcgtattgggatggaccttcattttaccaaacgaagttgacttcacgttttggtggcatgaggccaatgttgttcaatgttaacctcaaagttcaggctagctaccaaggagagcatgtccctcttgtctctttaatgagcagacttaatggcaaagcaattgttggacaccctatccaaattgaaatagttgaagatggttccacagatcatctgatattatgtggtgacagtggtatgcaagagagctcagctgctccacctgcttggccaacaggtagaaggactgccatgcaaagagttccccgttcaaatccatcaggagcactgttggatggcgataatgaaggtggtcttgtgtattctgattatgagatgaaaccaaccaagttgtacacttcttccaatcatcaggttaaggtgaataagaaaagcagttcaaatactaggaggtcagtagctaagtcccaaaagaagtcatccaagaaaacaaacctctcaagccagaaacgtagagttctctcttccatttccactgcaaaaaaacatcatggagaaggtggccgagcaaaggcacattggcgtaatgacatattgggtggtttaatcagatcagaaggagttcctctagtgacatgtgtcccaacgaaggttgtgttcactaggatattggaagcagttggcaggccacctctatctgtcgttcaccgtgttagaatgactagtccttcagtgcgagatcctccgtaggcttcaactgtagtgctatatatggttatatgttgccagccattgacatgcaagtttgatgtacattctgttaattgaagaggcagaccattcaatcatccggtagcacctgtgaagagtcagattgatatggttgctctaaaataacttggaacagctgagctcttattagcagtggtaacctgtaaaaatcaataacgcttgtgtatttctgactggagactgatcatgaatgcttcagagcagcttgtgtatttctgactggagacagatcatgaatgattcagagcagctgagccgttgataccatgaaggggtactctttgatgtagctaggagtctaggactggtggctgtcttttggtttcgtcacaactgtttactgtaaagtactaacttaagcattttaggtgtcaatttagttaaaacatttgtgtcatcatatatagcaataggtcataggttttctaatgacatgtataatcccccaattatatcctgatgtatctgttatttgttgtcgagatgtagttgattcagctgtatgtttagaagcatgtgtatctagtcgatgtaatatatcagagcaagtactccaacatccaaatggtgtaacaacctagtcatccatgtgaagattcctccatagacattgtgaacaaaaagatcattccataaaatgctgcgctgag

SEQ ID NO: 55643 - DNA, 3530 bp, Zea Mays
atttcacctttttcctcaaaaaagagagggaaatcatattccagggccgcccgcgccggaaccgaccacttcgccggcagcgagccggagactacgcggagcccctatccccgcgccggcgtgggcggagggaggagaaggagcagcagcagcagcagaaggataaaggggggctttgggagcctctgagaagaagattctagaagctacctgaggcgaggcgagcgcgccgcggcacgagtgatctcggtggaataagtcgcgcggggccggcgccgtgggggatgcgcctctggatgccgacacgctccgggatttgaatggtagccagatctcgagggggaggggagcttctcgaagcggggtaaggcgcgcggtctggttggccggcggttagggtttggcgggagcgggatggtggggagctcggtggagggaggagcagacggagatgggggctgctgcggcgtcggggacacctcgcccgggaccatcgtgtgggtgcggcggaggaacgggtcctggtggcccggcaggatcctgggccctgaggaactcccaccgtcgcagatcatgtcgccgaggtccggtacgccggtcaagctcctcggccgggaagacgcaagcgtgtgtggagagtttgatgcctgtattgagaaggcagaggctacgcaagggactcttgtgaagaaaagagagaaatatgcacggagagaagatgctgttcttcatgcacttgaattggagaggaaacagtttgcatcgaagtatcagattcaaggtttcagacctggaccatctggtaatatttctgcttgcacaaaacaccgcaaagaccttggaagtactcgatacaagagtaaaaagagcaagaattgcaaagatgtatctgttcctcctgacgtaaaaaaagaagtgggacaatgtttcctacatgctggttcaaagagaaacttttcagaatctcttactcaaggaaatgttgtcagtaatcacatgggtaatttctctcatttgagccattctcatggaggtgacactttagagaacaaggagagtacaattgtgaagaaaaatagatcggatggaagtgattttgaagactctcttgtttcaaaatcagatagacgcagaccgatttctcaagtattgcagagtagtgaaaacttgcttcctcacttaaagcaaaacaatgattttggggctttgttaatcaaggagaataataatccttcacttgccacctcccggtccagaagaaataaatatacatacatggctagtgattctggtgaaactcagagtcatagtgatttaccttctataaagatgactgctactggagctgattttgagaatgaaagctatcttcggcatactggttatttttctgaggagcagacttcttctgacttcgttgagaagcaagtaactgagtcttcagagagggaatgctcagaaagtgagactgaagaggatgctgaacttctgcaaaatgcaagtgtgattctacctatagaatcacatgctcctgatccgtattctgttccaatatatgagaagttcaagcatgtggattatggtgacaatgaggtggcctattctaattatatgccccagttgaatgaatctgaggaagaggatggttcttctgagctgggtgtctctcagtggcacatgaaaggtaaacgtaacaatcgtaatgccacaaagagatcagtggacatgagagatggaaatacatggttaaaaaactacaatgggtcattaaaagggtctttgcataacacaaatgatgggaatcccagaaaagaaggtatgcacacatctggtgaaaagttttttgaggaaagcatttaccaaattaaagaggaacccagttatgatgattctgatgaaactaatgtatttgaggacacgagccattcagaggctaacttgtactatggtaaaagatgcacttcattcttgagaaccacaagagatcttagtcgaagatacagttactttaatgactatgagaatgactcttcaaatgtttctcccctaaataaggacactgaacagatgtaccatgttgatcggaatgcgtattgggatggaccttcattttaccaaacgaagttgacttcacgttttggtggcatgaggccaatgttgttcaatgttaacctcaaagttcaggctagctaccaaggagagcatgtccctcttgtctctttaatgagcagacttaatggcaaagcaattgttggacaccctatccaaattgaaatagttgaagatggttccacagatcatctgatattatgtggtgacagtggtatgcaagagagctcagctgctccacctgcttggccaacaggtagaaggactgccatgcaaagagttccccgttcaaatccatcaggagcactgttggatggcgataatgaaggtggtcttgtgtattctgattatgagatgaaaccaaccaagttgtacacttcttccaatcatcaggttaaggtgaataagaaaagcagttcaaatactaggaggtcagtagctaagtcccaaaagaagtcatccaagaaaacaaacctctcaagccagaaacgtagagttctctcttccatttccactgcaaaaaaacatcatggagaaggtggccgagcaaaggcacattggcgtaatgacatattgggtggtttaatcagatcagaaggagttcctctagtgacatgtgtcccaacgaaggttgtgttcactaggatattggaagcagttggcaggccacctctatctgtcgttcaccgtgttagaatgactagtccttcagtgcgagatcctccgtaggcttcaactgtagtgctatatatggttatatgttgccagccattgacatgcaagtttgatgtacattctgttaattgaagaggcagaccattcaatcatccggtagcacctgtgaagagtcagattgatatggttgctctaaaataacttggaacagctgagctcttattagcagtggtaacctgtaaaaatcaataacgcttgtgtatttctgactggagactgatcatgaatgcttcagagcagcttgtgtatttctgactggagacagatcatgaatgattcagagcagctgagccgttgataccatgaaggggtactctttgatgtagctaggagtctaggactggtggctgtcttttggtttcgtcacaactgtttactgtaaagtactaacttaagcattttaggtgtcaatttagttaaaacatttgtgtcatcatatatagcaataggtcataggttttctaatgacatgtataatcccccaattatatcctgatgtatctgttatttgttgtcgagatgtagttgattcagctgtatgtttagaagcatgtgtatctagtcgatgtaatatatcagagcaagtactccaacatccaaatggtgtaacaacctagtcatccatgtgaagattcctccatagacattgtgaacaaaaagatcattccataaaatgctgcgctgag

SEQ ID NO: 55644 - DNA, 3563 bp, Zea Mays
atttcacctttttcctcaaaaaagagagggaaatcatattccagggccgcccgcgccggaaccgaccacttcgccggcagcgagccggagactacgcggagcccctatccccgcgccggcgtgggcggagggaggagaaggagcagcagcagcagcagaaggataaaggggggctttgggagcctctgagaagaagattctagaagctacctgaggcgaggcgagcgcgccgcggcacgagtgatctcggtggaataagtcgcgcggggccggcgccgtgggggatgcgcctctggatgccgacacgctccgggatttgaatggtagccagatctcgagggggaggggagcttctcgaagcggggtaaggcgcgcggtctggttggccggcggttagggtttggcgggagcgggatggtggggagctcggtggagggaggagcagacggagatgggggctgctgcggcgtcggggacacctcgcccgggaccatcgtgtgggtgcggcggaggaacgggtcctggtggcccggcaggatcctgggccctgaggaactcccaccgtcgcagatcatgtcgccgaggtccggtacgccggtcaagctcctcggccgggaagacgcaagcgtggattggtacaaccttgagaaatcaaaacgtgttaaagcattcaggtgtggagagtttgatgcctgtattgagaaggcagaggctacgcaagggactcttgtgaagaaaagagagaaatatgcacggagagaagatgctgttcttcatgcacttgaattggagaggaaacagtttgcatcgaagtatcagattcaaggtttcagacctggaccatctgcttgcacaaaacaccgcaaagaccttggaagtactcgatacaagagtaaaaagagcaagaattgcaaagatgtatctgttcctcctgacgtaaaaaaagaagtgggacaatgtttcctacatgctggttcaaagagaaacttttcagaatctcttactcaaggaaatgttgtcagtaatcacatgggtaatttctctcatttgagccattctcatggaggtgacactttagagaacaaggagagtacaattgtgaagaaaaatagatcggatggaagtgattttgaagactctcttgtttcaaaatcagatagacgcagaccgatttctcaagtattgcagagtagtgaaaacttgcttcctcacttaaagcaaaacaatgattttggggctttgttaatcaaggagaataataatccttcacttgccacctcccggtccagaagaaataaatatacatacatggctagtgattctggtgaaactcagagtcatagtgatttaccttctataaagatgactgctactggagctgattttgagaatgaaagctatcttcggcatactggttatttttctgaggagcagacttcttctgacttcgttgagaagcaagtaactgagtcttcagagagggaatgctcagaaagtgagactgaagaggatgctgaacttctgcaaaatgcaagtgtgattctacctatagaatcacatgctcctgatccgtattctgttccaatatatgagaagttcaagcatgtggattatggtgacaatgaggtggcctattctaattatatgccccagttgaatgaatctgaggaagaggatggttcttctgagctgggtgtctctcagtggcacatgaaaggtaaacgtaacaatcgtaatgccacaaagagatcagtggacatgagagatggaaatacatggttaaaaaactacaatgggtcattaaaagggtctttgcataacacaaatgatgggaatcccagaaaagaaggtatgcacacatctggtgaaaagttttttgaggaaagcatttaccaaattaaagaggaacccagttatgatgattctgatgaaactaatgtatttgaggacacgagccattcagaggctaacttgtactatggtaaaagatgcacttcattcttgagaaccacaagagatcttagtcgaagatacagttactttaatgactatgagaatgactcttcaaatgtttctcccctaaataaggacactgaacagatgtaccatgttgatcggaatgcgtattgggatggaccttcattttaccaaacgaagttgacttcacgttttggtggcatgaggccaatgttgttcaatgttaacctcaaagttcaggctagctaccaaggagagcatgtccctcttgtctctttaatgagcagacttaatggcaaagcaattgttggacaccctatccaaattgaaatagttgaagatggttccacagatcatctgatattatgtggtgacagtggtatgcaagagagctcagctgctccacctgcttggccaacaggtagaaggactgccatgcaaagagttccccgttcaaatccatcaggagcactgttggatggcgataatgaaggtggtcttgtgtattctgattatgagatgaaaccaaccaagttgtacacttcttccaatcatcaggttaaggtgaataagaaaagcagttcaaatactaggaggtcagtagctaagtcccaaaagaagtcatccaagaaaacaaacctctcaagccagaaacgtagagttctctcttccatttccactgcaaaaaaacatcatggagaaggtggccgagcaaaggcacattggcgtaatgacatattgggtggtttaatcagatcagaaggagttcctctagtgacatgtgtcccaacgaaggttgtgttcactaggatattggaagcagttggcaggccacctctatctgtcgttcaccgtgttagaatgactagtccttcagtgcgagatcctccgtaggcttcaactgtagtgctatatatggttatatgttgccagccattgacatgcaagtttgatgtacattctgttaattgaagaggcagaccattcaatcatccggtagcacctgtgaagagtcagattgatatggttgctctaaaataacttggaacagctgagctcttattagcagtggtaacctgtaaaaatcaataacgcttgtgtatttctgactggagactgatcatgaatgcttcagagcagcttgtgtatttctgactggagacagatcatgaatgattcagagcagctgagccgttgataccatgaaggggtactctttgatgtagctaggagtctaggactggtggctgtcttttggtttcgtcacaactgtttactgtaaagtactaacttaagcattttaggtgtcaatttagttaaaacatttgtgtcatcatatatagcaataggtcataggttttctaatgacatgtataatcccccaattatatcctgatgtatctgttatttgttgtcgagatgtagttgattcagctgtatgtttagaagcatgtgtatctagtcgatgtaatatatcagagcaagtactccaacatccaaatggtgtaacaacctagtcatccatgtgaagattcctccatagacattgtgaacaaaaagatcattccataaaatgctgcgctgag

SEQ ID NO: 55645 - DNA, 1770 bp, Zea Mays
gcactttggtcattgtcaatacttatactagtctgtgttctgttgagcttggtagttgaagcacaaaatagcaagattcatatttttaggagtagggcgcaaaaaaagacgcaaggcagtttgttgggtccttagtaagcaaaaaggcttcctgtctcatccaatgtgctaataaaaccccacacggaaaagatagagagaaacagattgcctagcttaaaccttgagtgttctcttcctctcaaacaatcaaaccaactaagccagctgcaatcttctctgtctaatcaacttcatcgttgtttcatacaggtaaccagtgccaaaatgattgctgggggaggctattttgatggttctcatgaccatattctcatggaaggatcaatgatccatgattcttcacaatcttccatctatgacaatacagatgttgaacagcagaacttcagatttgcgccctttatcatagaagatcactccaatccagccaaccttacctctgaggctgcaagggtgatagaccaaattcaacaccagctggggattgacatcgagcaggaccatagtgatcacatgatgcaagaagttcctccagcagaaactgaaaatttggttcctgctgtctatggtgttcaagatcatatccttagccaccagatagaaggtccgcataacataactgtggaacaacaggtcctgggctatgaccctgcatcatatcgaaatggcacttatgcagctgcacatgatcttctaaattctctacatatccaaaggtgcagtttgattcctgaatttccttccacagaacatatctttagtgatccagcacagaacatggtcaacaggttggacattacaaatgatcttccaggagtagcaaatcatgaaagtggaatgatgttcagcgattcaactgtaccgttaggctatcatgcaactcaatctcatatgttgaaggatctctatcattcactaccacaaaactatgggttatttaccagtgatgatgagagagatggaatggtcggggtaccaggggtctcaggaaatattttccaggagatagatgggaggcagttcgacagcccaatactggggagtagaaagcagaaaggtggatttggcaaaggcaaaggaaaagctaactttgcaactgaaagagagaggagggagcagtttaatgtgaagtatggggctttaaggtcactgttcccaaaccctactaagaatgacagggcctctatagttggagatgccattgaatacatcaatgagcttaatagaacagtgaaagaactgaagatcctacttgaaaagaagaggaacagcgctgacaggaggaagatactgaagttggatgaggaggcagctgatgatggggaaagttcttcaatgcagccagtgagtgatgatcaaaacaatcagatgaatgggactataaggagctcctgggttcaaaggaggtccaaggagtgtgacgttgatgtccgcatagtcgatgatgaaataaatatcaaattcacagagaagaagagagccaactctttgctttgtgctgcaaaggttctagaggagtttcatcttgagctcatccatgttgttgggggaatcattggagatcaccatatattcatgttcaatacaaagatacctaagggctcttctgtgtacgcatgcgcggtggccaagaagctcctcgaagctgtggagataaagaagcaggcttataatatcttcaactagacataccaatcataatgttta

SEQ ID NO: 55646 - DNA, 753 bp, Zea Mays
gacaaatgcttttacttcgtaccctagatccatacaaatccaagtatatataaagatcttgtataagattagttacccttattcggagcctctcaccaaattttacataagcaatacgctgaccatcaccataaagaagcatcgttaggaatcaagatggccgaaagaatttctcacaaacacaagggcacctcttctcttagattgatgggttacccaagattaaactactgtcctcgcctttctttctactgaacttttcaccgcatgtgttgattcatcttcagatccgtcgaaatccgatgaccgtacccgcctctgatgttcaggtccagaagtagcaacccttcgtccgtagcgcacttgacatcgtccccgtcatgaactccatggtacggctgaaagtctagattgttcgctctgagaccgtcctcggacatggctttcaccagctcgccgttgttctgctcgcacgcctgggtcacgttgtccatgaagcctgagagcgcgaggttgaagtccgtcagctgcgacctggttgcttctaggtttgcggctccagtcgcgtggtacgagaggttgctctgggccttctcgagtatcgtctgcaagtatttgccttgcgcctcgatccgcatctgcagcttcttctgaacctgcacttggaaaacgaagagatggaatgctaggaggaggtactggtgtggagaaattgatgccctgcgccgcgaatgctgtgaggagagcagaaag

SEQ ID NO: 55647 - DNA, 1527 bp, Zea Mays
cttttacttcgtaccctagatccatacaaatccaagtatatataaagatcttgtataagattagttacccttattcggagcctctcaccaaattttacataagcaatacgctgaccatcaccataaagaagcatcgttaggaatcaagatggccgaaagaatttctcacaaacacaagggcacctcttctcttagattgatgggttacccaagattaaactactgtcctcgcctttctttctactgaacttttcaccgcatgtgttgattcatcttcagatccgtcgaaatccgatgaccgtacccgcctctgatgttcaggtccagaagtagcaacccttcgtccgtagcgcacttgacatcgtccccgtcatgaactccatgcctgagagcgcgaggttgaagtccgtcagctgcgacctggttgcttctaggtttgcggctccagtcgcgtggtacgagaggttgctctgggccttctcgagtatcgtctgcaagtatttgccttgcgcctcgatccgcatctgcagcttcttctgaacctgcacttggaaaacgaagagcgcatctgcaagtggcgtttctctgatccacgttcagaaacgataaggcgaacggaaatgggagaaccgtgacagagatgaagaatgatgtaaatttacacaaatggaaaccatttgtaaacaattcctttttttttctctctaaaaacaagtagttcaaacatcacagtgagtgatctgtatattgtatgcagcctagcagacatggttgctccagttgggtgacagaaatactgaaacagtccgattctgaaatcctaacccagcatttaacttatatcatatatcacttcattacccgctgtttctgtgttgtttttgtagcattaaaaaaaatccttctgcagcttattaatcaagtaatcaacgccacaactccaggctttgacacattagggttagtttgagaactccgttttcccacgagattttcattttccaaaggaaaattagttcattttccctggaaaatagaaataccttagaaaaatgtagttcccaaactagtcccgtccctttctttttttttcgtgtgcgaggtcaacgtccctttcgtaagactccgtcttctaaatcattacccgaccagtacagtttaaataagcacgctttgattaagaattttgcaagacatttgtcttttgcaagaaaagaccacaaatagcaaatgtagattttatcgacagtatgatctataacttttggtttcaacaaaaaagaaaaaagcacgatctatagatgtctgatacacaaatcttatttcagagcatgccgactgcatgctgctgctatttcgttctattgtacttcatggccattggtcctttttagttttgctaatgcaacataatcgagcttctagattgttagtaaagaactattggtgtctcagggagaccgcgaatgcatgttcttttgtactgatgctaaaggaagcatgcaggatatgattttgggttttgac

SEQ ID NO: 55648 - DNA, 1587 bp, Zea Mays
cgaccaaacaggcaaacactgaaacactagtaccacagtagcagcgaggagcaaacagcaaagcacgctctggagaaatccctcgtctaccttcaccagttgaccgcactagtggccgtcgtccgaccacgatgagcacccgcgcggcaggatccgccctcctccgccacctgggtccgcgcgtcttcggcccagttttttctccggcggtcgcgccgccgaggccactgctggccttggccggcggcggggaacggggcggggcgctcgtgtgggtgcgggtgcggctactgtccacctccgccgccgaggcgaaggaggaggtggcggcgtccaaggggaactcaggaagcaccgcggcggcgaaggcggaggcggtggaggccgctaaggagggtgacggaaagagagacaaagtggtgagcagctactggggcgtcgcgccgtcgaagctgatgaacaaggacggcgccgagtggaggtggtcttgcttcaggccatgggaggcgtacaagccggacaccacgatcgatctcaacagacaccacgaacccaaggtgctgctcgacaagatcgcctattggaccgtcaaattactgcgcgtgcccaccgacatattcttccagaggaggtacggctgccgtgctatgatgctggaaacagtggcggcggtgccggggatggtgggcggcatgctgcttcacctgcgctcgctccgccgcttcgagcacagcggcggctggatccgggcgctgctggaggaggcggagaatgaacgcatgcacctcatgaccttcatggaggtggccaagcccaagtggtacgagcgcgcgcttgtcctcgccgtgcagggcgtcttcttcaacgcctacttcctcggctacctcatctcccccaagttcgcgcaccgtgtcgttgggtacctcgaggaggaggccatccactcatataccgaatacctcaaggacctcgaggccggcaagatcgagaacgtccccgcgccggccattgccatcgactactggcagctcccagctgatgcgacgctcaaggatgtggttgtcgtggtgcgctccgacgaggcgcaccaccgcgacgtcaatcactttgcgtcgggtatgcagctcaaggagacacctgcaccgattgagtaccattgaacaatcggggtcctgtgacgcttgagagttccagttcattttggctagctgtaggtagctaaagatgcttgagaaataaaaagaaaatgcctggctgctatgagtagcaaagatctcgtgggttgatcctaaaatcttttacgtgagtgtttgtaagtagagatacagacattgatacgtgcactgaatcttgtccagaacataccatcgacttggttggttccacagagaaaactttatatccgattgtaacagagtttttttttcctgaaaaggagcaacgaaggagccgcgcgtcgtcgattatctatgccactttgtaacccacccatttagaacttgttcggttaggagtgaattgatgaagatttctctttctatttaattttctcatccggtttgggtaaaaccgaacatgtctttaaag

SEQ ID NO: 55649 - DNA, 3629 bp, Zea Mays
gccccttccccgggctacacgactgtgcctgcgccagaagacccgtatcgccttggggtaaatggtggtgctgtgcatgtgcccgtgttcatgtgcgtccttcctgcgtcggagctctggacgcgcgcgcccggtgctatctgctccggaaatgttcggtcgcggcagttcctgcgagctgtggccctccgcctcccgctgcgtcgttgaagcttctgctggattctgttctgacctgtctgaaggtcttttaggtatgctggcgctcgctcgcacgactgatgagtttgctctggtgcaggggggcggccggcgggtggaggcgaccaggcgaggactgctctgcggcggcaaagggtttcaaaatgctggcgtgcatcgcctgctcggccaaggacggcggggatcaggacggctcccgcgccgccacgccccacggaagggacgccggcaagtccctcacctcccagctcaaggacatggtgctcaagttctccggctccggcaggcagtacaaggccgcggcggcgagcccgtcgttccggggcaaccgcttccaccgcaacagccgcctggccgcgtacacgggcgtcattgacgactcgggcttcacgtcggacggggccaccgagggctacggctacatgaggacgacgacgcacgcgaccggcgccaccgcgggaaccaaggtcggccgtggcttcccgcagcacgtcaggagcccgagcgcgagctggataccgagcatcggggaggaggacgatgaggaggatgaagaggttgtcgtcgttgaagaggaccgcgtgccgcgggagtggacggcccaggtggagcccggcgtccagatcaccttcgtctccaccgccggcggcgctggcaacgacataaagcgaatccgcttcagccgcgacatgttcaacaagtgggaggcgcagcggtggtggggagagaactacgaccgcgtggtggagctctacaacgtgcagacgttcagccggcagcagggcgtctcgacgccgacgtcctccatcgacgatgccacgcagagagactcgtcgttctactcccgcgccggctcgacgagggacagcccggtgatcctgccgccgacagccgtgggcagggagcagccgatcgcccgcgccacctcgtgcagggccacggccgcggcggcttccacggcccgagccgcgtgcaacccatcgtccagtgcggtgccggacccgtcggaccacgtgtgggcgcaccacttcaacctgctcaactccgcgccggcgccggcaccggccgctccgcacctcgacccgtcgcgcgctaccacgtcgtccctggacgaggcgtccgtgtccgtgagcaacgcgagcgacctggaggccacggagtgggtggagcaggacgagcccggcgtgtccatcaccatccgcgagttcggcgatggcacccgcgagctccgccgcgtccgcttcagccgggagaggttcggcgaggagagggccaaggtgtggtgggaccagaacaggaaccgaatacacgcgcagtacctgtgacgtcggactcggagctagctgttgggtgtgcagtacacgcgttggatggaagccaagccaccaatccatggacaatagtagcgtagggctgagtcagtgatactattgcgactactgtctactagtgctagtttttacagggtgaacagaggtgaaagaggtccacggaatggagcctgtgtaaaacatgtttgctactactactgatctgggtttgtgtgttgatgaccaatgtattttttttcttgatgaactaatactgttttgtgttgatcgcctcagatgaacagtgctcacattttctaatcgcgggcacaaacaaatcacccacaagacaccaagcaagctaactttgaccatattggataacattcactttccaattacaaaagaaagcaagacaaaattcttcagtgttgcgttttttactagtgatgaggaaacgtttgccatcgttacaagacgtgcgccaaattggcacctcactgcgttaaatgtgcattcaaaccaaatgtgaaatgtccatcccttgttgggctcaaggatttacaagctgttaaatgtgcatacagtttgtgacagcgatattggtgcaagataacattgcaaggcaaaccaaaccaaattaatagcacaatcatgtttattaaaacatgggggcaagcttttcgcaggaaaaaagcagatcaaccgcccggaagtggggaaggcttgatgcaggctctagcacttcacaaaggaatttgcaaacccattctaatatgtctcgacgcagcgaaactgtggtgatggcaaatccgcacaaccatcgatgggcaaacgctcaggctgactatcctcttcgggcacactggtttctgcacactatacacaacacccctcctgcagctgatcgaattttcactccacataccctcatttagctgaccaattttcttgtcagcctctttgctggagggatatcgtcagacttcccaagaaagtccgacttgccatgtccggccttcatcatgggggcagcaggcttcacagcgctccgtgttctagaggtcacagacatttgggatagtttctctgtaattgatgagaccttctgtattgctcctcggccagtttcaggcaagctccgtgaatgcctaagtacaggattccctacaattccaaaggaaaaaaagttctaaaaaatcaaaacccatttcgtgcaaggagttgggcaatgcaaccctatataggaaacttgcctgggctattccgagctggtacccgattcgtagttagtttattgctagtctcggttggcttcatacccttttgggatggctgacgatccaaattaagttttctttgtacacctgtaatgttggtagcaaaatagacaatcaaactaaaccctataaatcttgcttgctccagcccaattaaaacagataagacacgcaccagtcttagataaaccatttaattttgcggatgcattgctatgagatttcattgtagatagagttccagttgagaatcttctagccacactgttctctgaatttccttttgatccaactaaaacaaatgaaccaagcacatgtaaaacaacaatatcctaaatgaattaggtacaaagcagaatactagtctgttaactaaccacatggaggtgttctaggaagtgatgaagcttttggacggacagggagtggaacacatgtacaaccctaaaagttggcaaccagaaaactgattatagttccaaggagacaataactgaaccttgccaataaaaatagagtagaaagaatatactattacctgaaaaaaggtatgctggaggacttctgcggcctttggtctcttgctaggatcccatgagcataaacttactgagatgaggtcaattgcatcgctactggctgttgtcatcacctcggccagttgactgcctttgatctgcatggatagaagaacacaccctcaacattagatcaaatattaaccagtcattcaacatgtatccacattcacaatgaggtggcaaaaggtacaacaattcatccttttcaggggagtacaactattggtaatcaagaa

SEQ ID NO: 55650 - DNA, 4008 bp, Zea Mays
ggtctcgctcgatttcgggggcgcggatcagacggcggggagcgaatccggggcccagttcccgcacctgcctccctcaccctccactccaccctcctccactccatccacctctccctcccctgcgccgctgttgatctcggagcaacaaaaaaaaaagaacaaggggaagaaatctcctcccccgtgctgttgccgtctgtttggcctcgaccgcggaccgcccgctaccatccaaaaggcggcggcaggctgctctgcccactcggtgccgttgtcgtcgccccagccagcgggatcttgctgctccaccgccgcctgccgctgttttcctccattcagctcgcgcctgctccagatatctgacccgggaggcggcggcggcaggcaggcagggagccaacccgggagaagaaggccagggaagatctccgaccctttctttcttgggtccatccgggggggccgcggggcaatcaccattgtttcctgctgtcgccttttgatctggcgtggacacccttgcccggcaatgagtgttcatcacttgagctcatatcatcgtcagaggcaggcagcagtaagcagattccgctgttgctgagcattgtcgtcgtgggcgtggcaggccagttcgcgtggagacggggagggaacatctggtgtgcgtttgctaaccggggggcggccggcgggtggaggcgaccaggcgaggactgctctgcggcggcaaagggtttcaaaatgctggcgtgcatcgcctgctcggccaaggacggcggggatcaggacggctcccgcgccgccacgccccacggaagggacgccggcaagtccctcacctcccagctcaaggacatggtgctcaagttctccggctccggcaggcagtacaaggccgcggcggcgagcccgtcgttccggggcaaccgcttccaccgcaacagccgcctggccgcgtacacgggcgtcattgacgactcgggcttcacgtcggacggggccaccgagggctacggctacatgaggacgacgacgcacgcgaccggcgccaccgcgggaaccaaggtcggccgtggcttcccgcagcacgtcaggagcccgagcgcgagctggataccgagcatcggggaggaggacgatgaggaggatgaagaggttgtcgtcgttgaagaggaccgcgtgccgcgggagtggacggcccaggtggagcccggcgtccagatcaccttcgtctccaccgccggcggcgctggcaacgacataaagcgaatccgcttcagccgcgacatgttcaacaagtgggaggcgcagcggtggtggggagagaactacgaccgcgtggtggagctctacaacgtgcagacgttcagccggcagcagggcgtctcgacgccgacgtcctccatcgacgatgccacgcagagagactcgtcgttctactcccgcgccggctcgacgagggacagcccggtgatcctgccgccgacagccgtgggcagggagcagccgatcgcccgcgccacctcgtgcagggccacggccgcggcggcttccacggcccgagccgcgtgcaacccatcgtccagtgcggtgccggacccgtcggaccacgtgtgggcgcaccacttcaacctgctcaactccgcgccggcgccggcaccggccgctccgcacctcgacccgtcgcgcgctaccacgtcgtccctggacgaggcgtccgtgtccgtgagcaacgcgagcgacctggaggccacggagtgggtggagcaggacgagcccggcgtgtccatcaccatccgcgagttcggcgatggcacccgcgagctccgccgcgtccgcttcagccgggagaggttcggcgaggagagggccaaggtgtggtgggaccagaacaggaaccgaatacacgcgcagtacctgtgacgtcggactcggagctagctgttgggtgtgcagtacacgcgttggatggaagccaagccaccaatccatggacaatagtagcgtagggctgagtcagtgatactattgcgactactgtctactagtgctagtttttacagggtgaacagaggtgaaagaggtccacggaatggagcctgtgtaaaacatgtttgctactactactgatctgggtttgtgtgttgatgaccaatgtattttttttcttgatgaactaatactgttttgtgttgatcgcctcagatgaacagtgctcacattttctaatcgcgggcacaaacaaatcacccacaagacaccaagcaagctaactttgaccatattggataacattcactttccaattacaaaagaaagcaagacaaaattcttcagtgttgcgttttttactagtgatgaggaaacgtttgccatcgttacaagacgtgcgccaaattggcacctcactgcgttaaatgtgcattcaaaccaaatgtgaaatgtccatcccttgttgggctcaaggatttacaagctgttaaatgtgcatacagtttgtgacagcgatattggtgcaagataacattgcaaggcaaaccaaaccaaattaatagcacaatcatgtttattaaaacatgggggcaagcttttcgcaggaaaaaagcagatcaaccgcccggaagtggggaaggcttgatgcaggctctagcacttcacaaaggaatttgcaaacccattctaatatgtctcgacgcagcgaaactgtggtgatggcaaatccgcacaaccatcgatgggcaaacgctcaggctgactatcctcttcgggcacactggtttctgcacactatacacaacacccctcctgcagctgatcgaattttcactccacataccctcatttagctgaccaattttcttgtcagcctctttgctggagggatatcgtcagacttcccaagaaagtccgacttgccatgtccggccttcatcatgggggcagcaggcttcacagcgctccgtgttctagaggtcacagacatttgggatagtttctctgtaattgatgagaccttctgtattgctcctcggccagtttcaggcaagctccgtgaatgcctaagtacaggattccctacaattccaaaggaaaaaaagttctaaaaaatcaaaacccatttcgtgcaaggagttgggcaatgcaaccctatataggaaacttgcctgggctattccgagctggtacccgattcgtagttagtttattgctagtctcggttggcttcatacccttttgggatggctgacgatccaaattaagttttctttgtacacctgtaatgttggtagcaaaatagacaatcaaactaaaccctataaatcttgcttgctccagcccaattaaaacagataagacacgcaccagtcttagataaaccatttaattttgcggatgcattgctatgagatttcattgtagatagagttccagttgagaatcttctagccacactgttctctgaatttccttttgatccaactaaaacaaatgaaccaagcacatgtaaaacaacaatatcctaaatgaattaggtacaaagcagaatactagtctgttaactaaccacatggaggtgttctaggaagtgatgaagcttttggacggacagggagtggaacacatgtacaaccctaaaagttggcaaccagaaaactgattatagttccaaggagacaataactgaaccttgccaataaaaatagagtagaaagaatatactattacctgaaaaaaggtatgctggaggacttctgcggcctttggtctcttgctaggatcccatgagcataaacttactgagatgaggtcaattgcatcgctactggctgttgtcatcacctcggccagttgactgcctttgatctgcatggatagaagaacacaccctcaacattagatcaaatattaaccagtcattcaacatgtatccacattcacaatgaggtggcaaaaggtacaacaattcatccttttcaggggagtacaactattggtaatcaagaa

SEQ ID NO: 55651 - DNA, 3901 bp, Zea Mays
gtggtctcgctcgatttcgggggcgcggatcagacggcggggagcgaatccggggcccagttcccgcacctgcctccctcaccctccactccaccctcctccactccatccacctctccctcccctgcgccgctgttgatctcggagcaacaaaaaaaaaagaacaaggggaagaaatctcctcccccgtgctgttgccgtctgtttggcctcgaccgcggaccgcccgctaccatccaaaaggcggcggcaggctgctctgcccactcggtgccgttgtcgtcgccccagccagcgggatcttgctgctccaccgccgcctgccgctgttttcctccattcagctcgcgcctgctccagatatctgacccgggaggcggcggcggcaggcaggcagggagccaacccgggagaagaaggccagggaaggtgttcatcacttgagctcatatcatcgtcagaggcaggcagcagtaagcagattccgctgttgctgagcattgtcgtcgtgggcgtggcaggccagttcgcgtggagacggggagggaacatctggtgtgcgtttgctaaccggggggcggccggcgggtggaggcgaccaggcgaggactgctctgcggcggcaaagggtttcaaaatgctggcgtgcatcgcctgctcggccaaggacggcggggatcaggacggctcccgcgccgccacgccccacggaagggacgccggcaagtccctcacctcccagctcaaggacatggtgctcaagttctccggctccggcaggcagtacaaggccgcggcggcgagcccgtcgttccggggcaaccgcttccaccgcaacagccgcctggccgcgtacacgggcgtcattgacgactcgggcttcacgtcggacggggccaccgagggctacggctacatgaggacgacgacgcacgcgaccggcgccaccgcgggaaccaaggtcggccgtggcttcccgcagcacgtcaggagcccgagcgcgagctggataccgagcatcggggaggaggacgatgaggaggatgaagaggttgtcgtcgttgaagaggaccgcgtgccgcgggagtggacggcccaggtggagcccggcgtccagatcaccttcgtctccaccgccggcggcgctggcaacgacataaagcgaatccgcttcagccgcgacatgttcaacaagtgggaggcgcagcggtggtggggagagaactacgaccgcgtggtggagctctacaacgtgcagacgttcagccggcagcagggcgtctcgacgccgacgtcctccatcgacgatgccacgcagagagactcgtcgttctactcccgcgccggctcgacgagggacagcccggtgatcctgccgccgacagccgtgggcagggagcagccgatcgcccgcgccacctcgtgcagggccacggccgcggcggcttccacggcccgagccgcgtgcaacccatcgtccagtgcggtgccggacccgtcggaccacgtgtgggcgcaccacttcaacctgctcaactccgcgccggcgccggcaccggccgctccgcacctcgacccgtcgcgcgctaccacgtcgtccctggacgaggcgtccgtgtccgtgagcaacgcgagcgacctggaggccacggagtgggtggagcaggacgagcccggcgtgtccatcaccatccgcgagttcggcgatggcacccgcgagctccgccgcgtccgcttcagccgggagaggttcggcgaggagagggccaaggtgtggtgggaccagaacaggaaccgaatacacgcgcagtacctgtgacgtcggactcggagctagctgttgggtgtgcagtacacgcgttggatggaagccaagccaccaatccatggacaatagtagcgtagggctgagtcagtgatactattgcgactactgtctactagtgctagtttttacagggtgaacagaggtgaaagaggtccacggaatggagcctgtgtaaaacatgtttgctactactactgatctgggtttgtgtgttgatgaccaatgtattttttttcttgatgaactaatactgttttgtgttgatcgcctcagatgaacagtgctcacattttctaatcgcgggcacaaacaaatcacccacaagacaccaagcaagctaactttgaccatattggataacattcactttccaattacaaaagaaagcaagacaaaattcttcagtgttgcgttttttactagtgatgaggaaacgtttgccatcgttacaagacgtgcgccaaattggcacctcactgcgttaaatgtgcattcaaaccaaatgtgaaatgtccatcccttgttgggctcaaggatttacaagctgttaaatgtgcatacagtttgtgacagcgatattggtgcaagataacattgcaaggcaaaccaaaccaaattaatagcacaatcatgtttattaaaacatgggggcaagcttttcgcaggaaaaaagcagatcaaccgcccggaagtggggaaggcttgatgcaggctctagcacttcacaaaggaatttgcaaacccattctaatatgtctcgacgcagcgaaactgtggtgatggcaaatccgcacaaccatcgatgggcaaacgctcaggctgactatcctcttcgggcacactggtttctgcacactatacacaacacccctcctgcagctgatcgaattttcactccacataccctcatttagctgaccaattttcttgtcagcctctttgctggagggatatcgtcagacttcccaagaaagtccgacttgccatgtccggccttcatcatgggggcagcaggcttcacagcgctccgtgttctagaggtcacagacatttgggatagtttctctgtaattgatgagaccttctgtattgctcctcggccagtttcaggcaagctccgtgaatgcctaagtacaggattccctacaattccaaaggaaaaaaagttctaaaaaatcaaaacccatttcgtgcaaggagttgggcaatgcaaccctatataggaaacttgcctgggctattccgagctggtacccgattcgtagttagtttattgctagtctcggttggcttcatacccttttgggatggctgacgatccaaattaagttttctttgtacacctgtaatgttggtagcaaaatagacaatcaaactaaaccctataaatcttgcttgctccagcccaattaaaacagataagacacgcaccagtcttagataaaccatttaattttgcggatgcattgctatgagatttcattgtagatagagttccagttgagaatcttctagccacactgttctctgaatttccttttgatccaactaaaacaaatgaaccaagcacatgtaaaacaacaatatcctaaatgaattaggtacaaagcagaatactagtctgttaactaaccacatggaggtgttctaggaagtgatgaagcttttggacggacagggagtggaacacatgtacaaccctaaaagttggcaaccagaaaactgattatagttccaaggagacaataactgaaccttgccaataaaaatagagtagaaagaatatactattacctgaaaaaaggtatgctggaggacttctgcggcctttggtctcttgctaggatcccatgagcataaacttactgagatgaggtcaattgcatcgctactggctgttgtcatcacctcggccagttgactgcctttgatctgcatggatagaagaacacaccctcaacattagatcaaatattaaccagtcattcaacatgtatccacattcacaatgaggtggcaaaaggtacaacaattcatccttttcaggggagtacaactattggtaatcaagaa

SEQ ID NO: 55652 - DNA, 1446 bp, Zea Mays
gcgcgaggcagacagcgacgcagagagagacaaagcgggcaataaaggcagccgcgcgcgagcgagggaagggagcgaagcaaagcacatcacgagcccagcctgcgcctgcggagggagggggctcattaaagagggggcgcgagcgcgaccggccgcggggagcaagcagcgcgcgagagagacaggttgagatggcgatgccgtatgcctctctttccccggcaggcgccgccgaccaccgctcctccacagccacggcgtccctcgtccccttctgccgctccactccgctctccgcgggcggcgggctgggcgaggaggacgcccaggcgagcgcgaggtggccggccgcgaggccggtggtgccgttcacgccggcgcagtaccaggagctggagcagcaggcgctcatatacaagtacctggtggcgggcgtgcccgttccgccggatctcgtggttccaatccgccgcggcctcgactccctcgcaacccgcttctacggccaacccacacgtacaacgcttacggaataagatctctggcggacgagcacaaccagctgatcgcagaagccatcgactcgtcgatagagagccagtggcgcctccccagctcgtcgttcccgctctcgagctacccacatctcggggcgctgggcgacctgggcggccagaacagcacggtgagctcgctgccgaagatggagaagcagcagccgccctcgtccttcctagggaacgacaccggggccggcatggccatgggctccgcctccgcgaagcaggagggccagacgctgcggcacttcttcgacgagtggcccaaggcgcgggactcctggccgggcctctccgacgagaccgccagcctcgcctcgttccccccggcgacccagctgtcgatgtccatacccatggcgtcctccgacttctccgtggccagctcccagtcgcccaacgatgactaatggtgcgtggatcgtcgcgttctggccctttgtctgtcttccctccagtcctccacccaccgcgcagtagtagctgcggaaacagcccatgctcctgtatatttgtcggtcattttccgtgtcagatctgtgtaccaaaccaagcggcggcggccgtcgtctctccccgcctccgcctcgcctcatgtgggtgggtgaacatgagaccgttttgcttaggctcaaagctttgtgtgaccccactgatcggttgtctgcgtactacctgaaagcctgctgcttttgtagcattactgtgacacatcgaccgaagaaaggcaggaacgaacagtggagcaacatgacgcgtccatgcttctcttgtgctgcctgttccccgatctgcatggatgagagctttactgttaccatcatcaccaccatcaatatgcgtgcgcctgtagctgagatgagctgagctgagctaaccgtct

SEQ ID NO: 55653 - DNA, 2735 bp, Zea Mays
accacacacaccagattacgcttaacattctgtttgacatctaaaaccagccggcttgatccaaatgcctccctaggtagtagcttagtcttgctcgccgcctctccgggagacgacgacacgcctgatgagtgcctgacgttccagcgcgaggcagacagcgacgcagagagagacaaagcgggcaataaaggcagccgcgcgcgagcgagggaagggagcgaagcaaagcacatcacgagcccagcctgcgcctgcggagggagggggctcattaaagagggggcgcgagcgcgaccggccgcggggagcaagcagcgcgcgagagagacaggttgagatggcgatgccgtatgcctctctttccccggcaggcgccgccgaccaccgctcctccacagccacggcgtccctcgtccccttctgccgctccactccgctctccgcgggcggcgggctgggcgaggaggacgcccaggcgagcgcgaggtggccggccgcgaggccggtggtgccgttcacgccggcgcagtaccaggagctggagcagcaggcgctcatatacaagtacctggtggcgggcgtgcccgttccgccggatctcgtggttccaatccgccgcggcctcgactccctcgcaacccgcttctacggccaacccacactcgggtacggaccgtacctggggaggaaactggatccggagcccggccggtgccggcgaacggacggcaagaagtggcggtgctccaaggaggccgccccggactccaagtactgcgagcgccacatgcaccgcggccgcaaccgttcaagaaagcctgtggaaacgcagctcgcgccccagtcccaaccgcccgccgccgcagccgtctccgccgctccgcccctggcagccgccgccgccgccaccaccaacggcagcggcttccagaaccactctctctacccggccatcgccggcagcactggtggtggaggaggagttggcgggtccggcaatatctcctccccgttctcctcgtcgatggggggatcgtctcagctgcacatggacagtgctgccagctactcctacgcagctcttggtggtggaactgcaaaggatctcagtggcaatcaaaaccagtagcgtagtgcgtgctccgtagtacttcactggcaaaatcagcatggcctacgaggactttactcacttcaagagattacgttagagttcaggcgctggctggttgcctggccacgctttattaatgagttcagttctaaacccctgctgaagcccaggcagtgtccatgtctctacgagatagttgtgcccagggcaggtggacgtgcaggtgtgcagcgcacagccttgttggcttcggcacagacccagcttcgaattcgtgctggtgctgcgcataaagatggaacttgtttgtgtccagcggtcgcagtgctggtgcctgctgcttgctgatgctgtccttccctggccattactccacgtctttatgatctcgcaggatcaagtcgttgctcttgcaactcttttagggggcagcatgtaataaaatccggtccttgtaactactgataaacctgaaacgcatcatgctggaagtccatccccttttgcccataccagtttggttgattttactgtacagatgttctttcactttgtttacaatttatcgaacaggataatgaagactaacacctcacaaagaagaaaacatactgcagttggcatgtgtcctttttaacctttgcaacccccctactaatttgctgtgcccaccccgctttctgaaatccaggtacaacgcttacggaataagatctctggcggacgagcacaaccagctgatcgcagaagccatcgactcgtcgatagagagccagtggcgcctccccagctcgtcgttcccgctctcgagctacccacatctcggggcgctgggcgacctgggcggccagaacagcacggtgagctcgctgccgaagatggagaagcagcagccgccctcgtccttcctagggaacgacaccggggccggcatggccatgggctccgcctccgcgaagcaggagggccagacgctgcggcacttcttcgacgagtggcccaaggcgcgggactcctggccgggcctctccgacgagaccgccagcctcgcctcgttccccccggcgacccagctgtcgatgtccatacccatggcgtcctccgacttctccgtggccagctcccagtcgcccaacgatgactaatggtgcgtggatcgtcgcgttctggccctttgtctgtcttccctccagtcctccacccaccgcgcagtagtagctgcggaaacagcccatgctcctgtatatttgtcggtcattttccgtgtcagatctgtgtaccaaaccaagcggcggcggccgtcgtctctccccgcctccgcctcgcctcatgtgggtgggtgaacatgagaccgttttgcttaggctcaaagctttgtgtgaccccactgatcggttgtctgcgtactacctgaaagcctgctgcttttgtagcattactgtgacacatcgaccgaagaaaggcaggaacgaacagtggagcaacatgacgcgtccatgcttctcttgtgctgcctgttccccgatctgcatggatgagagctttactgttaccatcatcaccaccatcaatatgcgtgcgcctgtagctgagatgagctgagctgagctaaccgtct

SEQ ID NO: 55654 - DNA, 2468 bp, Zea Mays
ctctgaaagagtccaagcgagtgtcctcagtcctctcctcgactgctcccctccttccagagtcacggtgcctcgccgtccttccctgatctgacaacccgtttatcttgcccgggcggtccactccgacggctggcccgcccttctttaaccccgccaccccgatccagcccagccgcactccaacacggtagcagcagtcaacagactcccaccgcaatggccgcggcgctcctcttgctgctcgttccgcccgtcggcctactcgccgcgctcgcattcctcacgcggccccacgcccggatcgcgctcaaagacagccacgtcttcatcacgggcgggtccagcggcatcgggctcgccatggccacggccgctgcgcgggagggcgcgcgggtctccatcctggcccgcaaccttgcccgcctcgaggaggcgcgcgccgccatccagcgcgactcgggccgcgacgacgtcggcgtccacgcggccgacgtgcgggacgccgacgccgtggcccgtgctctccaggaggccggccccgtcgacgtcctggtctgcaaccacggcgtgttcgtgccgcaggagctcgagaggcaggacatggatgagatcaagtggatggtggacatcaacctcatgggcaccttccacctcattaaggccgcgcttcccgccatgaaggcacgcacccgcgagacgcggctccctgggtccatcgcgatcatgtcctcccaggccggccaggttggtatttatggttacactgcctactcagcgagcaagtttgctcttcgtggattgggtgaggcgttgcagcatgaggtcgtcggggacaacattcatgtctcgttgatattccctcctgacactgaaactccaggattggaagaggagcataagaggaggccagaattgacaaacatcatagcaggattgtctggtggaatgaaggccgacgatgttgccaagaaggctctggatggtatcaaatctgcaaaattcattgtcccatgcaatttcgagggcacaatgttagctgtagccactgctggtttatccccacagagctccgcattaatggcattcatagaggtgattggcacaggactcatgcggtttgcggcactttgtttccaatggaattggttctctaccatagagagctattatgccaagaacaagaagagccagtgataacacaaaccatacctggaccttaggtcagtcactcagttgcatgtaaataaagtttattatagtcgaccttactatgttgaccacctacaatttgatgtataagattcaaatgaaatttgaataaaattttagttttcctgccaaaacaaatcatacaacaaaattcatagatttcattcatatttcgatataaatcgttcacaaacaaaatataccatgatacaacatataaagtgtcattcatccatatttacaatataatgtttcaaatgtttttataatacaatcaaaatataacattaatacatatacaaaagtgtcattcatccatatacatatacataccactagttttgtcattcattcattttcataaaaattgttgaaatatttcaaattgtttcggatgatttctcagcggtccgtcatggtcgaagaagagtcccgttgtgtgtcacttcaggtcatatgaatgacagaagtttgatatcgtcatctcaactcttgtatcttccatgtttctgtaccatggtcaggttttcttttactttgtggtactcatgtaatgaacacataataacaatagctagaatgttaatgacaactttaatatattttctcttacgatgacacaaaatataaagatatataaaataaggtgacttacatccttgtgatttggaatgtatatgtcggtacagcgaagcacctcacacatataatattcgcaaactagtgttagacgactacttggaacaattcatacaacaataaatgtagcaaaaagattttgctttacatcggggttgtagaactttgatagattattagggatataattctgtaggtagcacctacgagcatgagcatctccatgagactcttcattttttctctctatttgactttatattacattttcataaagattacactatatatgtaacatgtccacttcaacagactatctatctagtttgactagtcaggttgctagctaaatttggctagtgagggagccaatttgaagagtcagatagtttgacgagccagatagctattgaaaagttattttgttattgagtaggtaaaacttagcttgatgagctatttaactagtctcgtgaagatgctctaagcaagaatcacacgataggcggataggttaagagcatctctgaaagggaaatgtgccttgggccatttctaagtattttggtgatttagtgtcaaacacaagtgcttaagtgtaaaatggtggacaaaat

SEQ ID NO: 55655 - DNA, 1786 bp, Zea Mays
agaaaaggctgattgcttggcattagttgatttcttgagaggacttgttgagtttgatcctaataagaggtggtcaccgctgcaggcctcgtatcatccattcatcactggtgaagccttcactggtccttacgagcctgttcaggagaccccacgaattcctgttggacgtgctgcagtagttgaccacaatccaggaggaggtcacttgctgggtgctggtctttctcctcaggttggaagcattaacagatgcttacgatttaacaacgctttgcaaccaaatatgcctttttcatatggaagcagttgtggcagttttgggagccatggtagctttaacgataatgctggctttagctatggaagctatgattttaacagtgtcgacatatataattcaccaatggatccttctgggtttaatttacgttcacaacttggaggatcgtttctcggatctagcccacatattcgacgaagacctcatctctcacatggtggtggcattcggttaagccctggtggtccagggcatatgtctcttggggccagtccatcacaatttacaccgccaaattcccagatgcaaatcccaacaggtcctaatggaaggtatggtgcctctccttcaagaggtggacatggctcttcgttgggaaaggttgctgttgtaggccaatacaataggaggaggaatcagggttatccacctatgccaatgccaccacatgaacacacatctcaactgatccaggggcaccaaggagatggtgtcagtactgctcgctttggtgcatatgcccaaggaaattctacctacctacataatgcactccctaattctagtcattatagttggagatcgcaaaggggatctggcagtggtttacctttggacccttcttctagccgtggttcttttccacccaccaattactatggctttcctttacactccgatgcgtcagcagatacattgccctccacctcatcagtatcagatccagccgattgggatctcaactctagtgacaagtcactcctgcaagaggaccgaacactgtcagctgggttaagtgatcttcgcttgatagacgcaagtggccaaacaaacagatctagcagattggctcctttccaaagtcatgatattttaagttcaaacccttcgactatgaatcaaagaaatggacacctatttcatgcatcatctctgggagagagtacacatactccaggtcatgtcacattggatggatacgaacacacaacttattctcagcgaagtttcccaatctatcgtgggcaaccatttcagcagtacaacaacatgacttccagttacatccgaccgatgagggctcatcacaatggtcagcctgtctggtctaattataggctgacagaacctccaccaactacaatgggtgacggaatgctctggggagggaggggtggccattcgtttgcagcgagcggactgccacctacacttaggaaagattttgggagaatcttttagtcctgaatccggaggaatgccgaatgccaccaaattgatggcatcagttgtttgcatctgcaattccgggttggattatttgctgggggtgcctactggtattgcaatttgttgtgttcctccgatgtctcccaggatgttcggttcaaatgattatatgggttttctaagggcgtctgtgtccaacgtggtattagaatttgatggatctgagtcatctgactgtaaattctataagcaaactcaaaaggggtataagag

SEQ ID NO: 55656 - DNA, 3886 bp, Zea Mays
ggggaagagaggggacgaagagggagaaggaactgggacttgccgcccccgcctccgaattccccactcctccaccaccgccaccactcaccccttgctccgctcggcctcctgaatccggcgtcgtcaagcaaccccactccttctgccgttatcagaaccctaaccgatcaatccgtccgattcccagctgccggtttcgcgttgggagcgccggagcaggggaggggcggagggtcggatcggcagccgcaggagcattgagcgatggctgccgtgtaggatgcagctggactccgccggccgccgcctagctgctgctgttgttgctgaagttccgatgcttcagcaaccgcgatcttaataggagcggagggtggagtaccggtggagtgggccggacggctggttgatctccgtgagctccagcgcctacgcactgggaggtggggaggtgattgccggaggcgtatggaggaacctgggagggagggggattcccccgggccgccgtgggcgccaagtgagtcctcagctttccgggcgttcgttacggcggtgggggagcgggcggtggcgtcgccttcaggctcggacaatggggattccgtctgctcaagcaacctccgcgccgtcaggaagagaccttttgttgcaagattaaccacatatatcatccaaacttttgaaaaatgcaatcctgagtttaagtactcagagtcactaaaccccaagcgctttctcaccaatcccgcagttcctgttcacaaccatggtcttgacaatgcaaactctgatctcatattgtatgtcaacctggaactgcttaataaaaagtcaagccggaggtatgttgtccaagaaatgcttggccaaggtacctttggacaggttgcgaaatgctgggatgcagaaactaacagttatgttgcagtgaaggttataaagaatcagcctgccttttaccagcaggctatcatggaggtctctttattaagattgttaaatgagaaatttgatcctgatgatgaacatcacattgtccggatgctggattttttcctctaccaaaaccatttgtgtatagcctttgaaatgcttggtatgagctgttgaaaaggaatagtttaagaggtttgcaaatgaaatatgttcgaactttctcaagacagatactggatgccctgattatcatgaaagatgctggcattattcattgtgatctaaaaccagaaaacatccttatagctccaactgtaaaaacagcagttggagtgaaagtaattgattttggatcagtgtgcatggagggtaaaaccatttattcatatattcagagccgttattacaggtctccagaagtacttcttggttatccatatactactgccattgatatgtggtcattcggttgcatcgttgctgagctatatatagggctgcctttatttcctggtgcatcagaatatgatgttctttgccgtatgattgagattattggtgggcaaccaccagatgatctgctacgtgaggctaaaaacactgggaaattttttaagcatgttggaagtatctatcctagtagtgaggctcggaatggcgctagcagtgcatacagaattttaagtgaagatgagatcgaagcaagggactccaagaaaccgaaggttgggagatggtatttccctcgtggaaggcttgacagactcatatatacatacccctggaagaatttgagcgagggaaacttgccagagacagaaaaggctgattgcttggcattagttgatttcttgagaggacttgttgagtttgatcctaataagaggtggtcaccgctgcagaatcattatatgttcttcacaaatgtgaaaacctattttaggcctcgtatcatccattcatcactggtgaagccttcactggtccttacgagcctgttcaggagaccccacgaattcctgttggacgtgctgcagtagttgaccacaatccaggaggaggtcacttgctgggtgctggtctttctcctcaggttggaagcattaacagatgcttacgatttaacaacgctttgcaaccaaatatgcctttttcatatggaagcagttgtggcagttttgggagccatggtagctttaacgataatgctggctttagctatggaagctatgattttaacagtgtcgacatatataattcaccaatggatccttctgggtttaatttacgttcacaacttggaggatcgtttctcggatctagcccacatattcgacgaagacctcatctctcacatggtggtggcattcggttaagccctggtggtccagggcatatgtctcttggggccagtccatcacaatttacaccgccaaattcccagatgcaaatcccaacaggtcctaatggaaggtatggtgcctctccttcaagaggtggacatggctcttcgttgggaaaggttgctgttgtaggccaatacaataggaggaggaatcagggttatccacctatgccaatgccaccacatgaacacacatctcaactgatccaggggcaccaaggagatggtgtcagtactgctcgctttggtgcatatgcccaaggaaattctacctacctacataatgcactccctaattctagtcattatagttggagatcgcaaaggggatctggcagtggtttacctttggacccttcttctagccgtggttcttttccacccaccaattactatggctttcctttacactccgatgcgtcagcagatacattgccctccacctcatcagtatcagatccagccgattgggatctcaactctagtgacaagtcactcctgcaagaggaccgaacactgtcagctgggttaagtgatcttcgcttgatagacgcaagtggccaaacaaacagatctagcagattggctcctttccaaagtcatgatattttaagttcaaacccttcgactatgaatcaaagaaatggacacctatttcatgcatcatctctgggagagagtacacatactccaggtcatgtcacattggatggatacgaacacacaacttattctcagcgaagtttcccaatctatcgtgggcaaccatttcagcagtacaacaacatgacttccagttacatccgaccgatgagggctcatcacaatggtcagcctgtctggtctaattataggctgacagaacctccaccaactacaatgggtgacggaatgctctggggagggaggggtggccattcgtttgcagcgagcggactgccacctacacttaggaaagattttgggagaatcttttagtcctgaatccggaggaatgccgaatgccaccaaattgatggcatcagttgtttgcatctgcaattccgggttggattatttgctgggggtgcctactggtattgcaatttgttgtgttcctccgatgtctcccaggatgttcggttcaaatgattatatggtacgggatatgattacagtgctcgttctttgctatacctgcacgatctagtagaaaaatgtcagttgtgctacttgatgcgaatcttgctagttcgaggtttgggagagtttttctgtctcggttattgtcttcctttctctattctatttttgacagagggttaagttcctgaaccttaacatggctaagactgaagtgaaggccacgtggtcgtggtgacatgatttcgttttcgtgatacttgaggagccgactatctgtttttaagcatctttctgttgttgttttgctacaacaggttttctaagggcgtctgtgtccaacgtggtattagaatttgatggatctgagtcatctgactgtaaattctataagcaaactcaaaaggggtataagag

SEQ ID NO: 55657 - DNA, 3649 bp, Zea Mays
ggggaagagaggggacgaagagggagaaggaactgggacttgccgcccccgcctccgaattccccactcctccaccaccgccaccactcaccccttgctccgctcggcctcctgaatccggcgtcgtcaagcaaccccactccttctgccgttatcagaaccctaaccgatcaatccgtccgattcccagctgccggtttcgcgttgggagcgccggagcaggggaggggcggagggtcggatcggcagccgcaggagcattgagcgatggctgccgtgtaggatgcagctggactccgccggccgccgcctagctgctgctgttgttgctgaagttccgatgcttcagcaaccgcgatcttaataggagcggagggtggagtaccggtggagtgggccggacggctggttgatctccgtgagctccagcgcctacgcactgggaggtggggaggtgattgccggaggcgtatggaggaacctgggagggagggggattcccccgggccgccgtgggcgccaagtgagtcctcagctttccgggcgttcgttacggcggtgggggagcgggcggtggcgtcgccttcaggctcggacaatggggattccgtctgctcaagcaacctccgcgccgtcaggaagagacctgtatgttgtccaagaaatgcttggccaaggtacctttggacaggttgcgaaatgctgggatgcagaaactaacagttatgttgcagtgaaggttataaagaatcagcctgccttttaccagcaggctatcatggaggtctctttattaagattgttaaatgagaaatttgatcctgatgatgaacatcacattgtccggatgctggattttttcctctaccaaaaccatttgtgtatagcctttgaaatgcttggtaacaacctgtatgagctgttgaaaaggaatagtttaagaggtttgcaaatgaaatatgttcgaactttctcaagacagatactggatgccctgattatcatgaaagatgctggcattattcattgtgatctaaaaccagaaaacatccttatagctccaactgtaaaaacagcagttggagtgaaagtaattgattttggatcagtgtgcatggagggtaaaaccatttattcatatattcagagccgttattacaggtctccagaagtacttcttggttatccatatactactgccattgatatgtggtcattcggttgcatcgttgctgagctatatatagggctgcctttatttcctggtgcatcagaatatgatgttctttgccgtatgattgagattattggtgggcaaccaccagatgatctgctacgtgaggctaaaaacactgggaaattttttaagcatgttggaagtatctatcctagtagtgaggctcggaatggcgctagcagtgcatacagaattttaagtgaagatgagatcgaagcaagggactccaagaaaccgaaggttgggagatggtatttccctcgtggaaggcttgacagactcatatatacatacccctggaagaatttgagcgagggaaacttgccagaaaaggctgattgcttggcattagttgatttcttgagaggacttgttgagtttgatcctaataagaggtggtcaccgctgcaggcctcgtatcatccattcatcactggtgaagccttcactggtccttacgagcctgttcaggagaccccacgaattcctgttggacgtgctgcagtagttgaccacaatccaggaggaggtcacttgctgggtgctggtctttctcctcaggttggaagcattaacagatgcttacgatttaacaacgctttgcaaccaaatatgcctttttcatatggaagcagttgtggcagttttgggagccatggtagctttaacgataatgctggctttagctatggaagctatgattttaacagtgtcgacatatataattcaccaatggatccttctgggtttaatttacgttcacaacttggaggatcgtttctcggatctagcccacatattcgacgaagacctcatctctcacatggtggtggcattcggttaagccctggtggtccagggcatatgtctcttggggccagtccatcacaatttacaccgccaaattcccagatgcaaatcccaacaggtcctaatggaaggtatggtgcctctccttcaagaggtggacatggctcttcgttgggaaaggttgctgttgtaggccaatacaataggaggaggaatcagggttatccacctatgccaatgccaccacatgaacacacatctcaactgatccaggggcaccaaggagatggtgtcagtactgctcgctttggtgcatatgcccaaggaaattctacctacctacataatgcactccctaattctagtcattatagttggagatcgcaaaggggatctggcagtggtttacctttggacccttcttctagccgtggttcttttccacccaccaattactatggctttcctttacactccgatgcgtcagcagatacattgccctccacctcatcagtatcagatccagccgattgggatctcaactctagtgacaagtcactcctgcaagaggaccgaacactgtcagctgggttaagtgatcttcgcttgatagacgcaagtggccaaacaaacagatctagcagattggctcctttccaaagtcatgatattttaagttcaaacccttcgactatgaatcaaagaaatggacacctatttcatgcatcatctctgggagagagtacacatactccaggtcatgtcacattggatggatacgaacacacaacttattctcagcgaagtttcccaatctatcgtgggcaaccatttcagcagtacaacaacatgacttccagttacatccgaccgatgagggctcatcacaatggtcagcctgtctggtctaattataggctgacagaacctccaccaactacaatgggtgacggaatgctctggggagggaggggtggccattcgtttgcagcgagcggactgccacctacacttaggaaagattttgggagaatcttttagtcctgaatccggaggaatgccgaatgccaccaaattgatggcatcagttgtttgcatctgcaattccgggttggattatttgctgggggtgcctactggtattgcaatttgttgtgttcctccgatgtctcccaggatgttcggttcaaatgattatatggtacgggatatgattacagtgctcgttctttgctatacctgcacgatctagtagaaaaatgtcagttgtgctacttgatgcgaatcttgctagttcgaggtttgggagagtttttctgtctcggttattgtcttcctttctctattctatttttgacagagggttaagttcctgaaccttaacatggctaagactgaagtgaaggccacgtggtcgtggtgacatgatttcgttttcgtgatacttgaggagccgactatctgtttttaagcatctttctgttgttgttttgctacaacaggttttctaagggcgtctgtgtccaacgtggtattagaatttgatggatctgagtcatctgactgtaaattctataagcaaactcaaaaggggtataagag

SEQ ID NO: 55658 - DNA, 3876 bp, Zea Mays
gacgctgacggagccgagacggggaagggggaagagaggggacgaagagggagaaggaactgggacttgccgcccccgcctccgaattccccactcctccaccaccgccaccactcaccccttgctccgctcggcctcctgaatccggcgtcgtcaagcaaccccactccttctgccgttatcagaaccctaaccgatcaatccgtccgattcccagctgccggtttcgcgttgggagcgccggagcaggggaggggcggagggtcggatcggcagccgcaggagcattgagcgatggctgccgtgtaggatgcagctggactccgccggccgccgcctagctgctgctgttgttgctgaagttccgatgcttcagcaaccgcgatcttaataggagcggagggtggagtaccggtggagtgggccggacggctggttgatctccgtgagctccagcgcctacgcactgggaggtggggaggtgattgccggaggcgtatggaggaacctgggagggagggggattcccccgggccgccgtgggcgccaagtgagtcctcagctttccgggcgttcgttacggcggtgggggagcgggcggtggcgtcgccttcaggctcggacaatggggattccgtctgctcaagcaacctccgcgccgtcaggaagagaccttttgttgcaagattaaccacatatatcatccaaacttttgaaaaatgcaatcctgagtttaagtactcagagtcactaaaccccaagcgctttctcaccaatcccgcagttcctgttcacaaccatggtcttgacaatgcaaactctgatctcatattgtatgtcaacctggaactgcttaataaaaagtcaagccggaggtatgttgtccaagaaatgcttggccaaggtacctttggacaggttgcgaaatgctgggatgcagaaactaacagttatgttgcagtgaaggttataaagaatcagcctgccttttaccagcaggctatcatggaggtctctttattaagattgttaaatgagaaatttgatcctgatgatgaacatcacattgtccggatgctggattttttcctctaccaaaaccatttgtgtatagcctttgaaatgcttggtaacaacctgtatgagctgttgaaaaggaatagtttaagaggtttgcaaatgaaatatgttcgaactttctcaagacagatactggatgccctgattatcatgaaagatgctggcattattcattgtgatctaaaaccagaaaacatccttatagctccaactgtaaaaacagcagttggagtgaaagtaattgattttggatcagtgtgcatggagggtaaaaccatttattcatatattcagagccgttattacaggtctccagaagtacttcttggttatccatatactactgccattgatatgtggtcattcggttgcatcgttgctgagctatatatagggctgcctttatttcctggtgcatcagaatatgatgttctttgccgtatgattgagattattggtgggcaaccaccagatgatctgctacgtgaggctaaaaacactgggaaattttttaagcatgttggaagtatctatcctagtagtgaggctcggaatggcgctagcagtgcatacagaattttaagtgaagatgagatcgaagcaagggactccaagaaaccgaaggttgggagatggtatttccctcgtggaaggcttgacagactcatatatacatacccctggaagaatttgagcgagggaaacttgccagaaaaggctgattgcttggcattagttgatttcttgagaggacttgttgagtttgatcctaataagaggtggtcaccgctgcaggcctcgtatcatccattcatcactggtgaagccttcactggtccttacgagcctgttcaggagaccccacgaattcctgttggacgtgctgcagtagttgaccacaatccaggaggaggtcacttgctgggtgctggtctttctcctcaggttggaagcattaacagatgcttacgatttaacaacgctttgcaaccaaatatgcctttttcatatggaagcagttgtggcagttttgggagccatggtagctttaacgataatgctggctttagctatggaagctatgattttaacagtgtcgacatatataattcaccaatggatccttctgggtttaatttacgttcacaacttggaggatcgtttctcggatctagcccacatattcgacgaagacctcatctctcacatggtggtggcattcggttaagccctggtggtccagggcatatgtctcttggggccagtccatcacaatttacaccgccaaattcccagatgcaaatcccaacaggtcctaatggaaggtatggtgcctctccttcaagaggtggacatggctcttcgttgggaaaggttgctgttgtaggccaatacaataggaggaggaatcagggttatccacctatgccaatgccaccacatgaacacacatctcaactgatccaggggcaccaaggagatggtgtcagtactgctcgctttggtgcatatgcccaaggaaattctacctacctacataatgcactccctaattctagtcattatagttggagatcgcaaaggggatctggcagtggtttacctttggacccttcttctagccgtggttcttttccacccaccaattactatggctttcctttacactccgatgcgtcagcagatacattgccctccacctcatcagtatcagatccagccgattgggatctcaactctagtgacaagtcactcctgcaagaggaccgaacactgtcagctgggttaagtgatcttcgcttgatagacgcaagtggccaaacaaacagatctagcagattggctcctttccaaagtcatgatattttaagttcaaacccttcgactatgaatcaaagaaatggacacctatttcatgcatcatctctgggagagagtacacatactccaggtcatgtcacattggatggatacgaacacacaacttattctcagcgaagtttcccaatctatcgtgggcaaccatttcagcagtacaacaacatgacttccagttacatccgaccgatgagggctcatcacaatggtcagcctgtctggtctaattataggctgacagaacctccaccaactacaatgggtgacggaatgctctggggagggaggggtggccattcgtttgcagcgagcggactgccacctacacttaggaaagattttgggagaatcttttagtcctgaatccggaggaatgccgaatgccaccaaattgatggcatcagttgtttgcatctgcaattccgggttggattatttgctgggggtgcctactggtattgcaatttgttgtgttcctccgatgtctcccaggatgttcggttcaaatgattatatggtacgggatatgattacagtgctcgttctttgctatacctgcacgatctagtagaaaaatgtcagttgtgctacttgatgcgaatcttgctagttcgaggtttgggagagtttttctgtctcggttattgtcttcctttctctattctatttttgacagagggttaagttcctgaaccttaacatggctaagactgaagtgaaggccacgtggtcgtggtgacatgatttcgttttcgtgatacttgaggagccgactatctgtttttaagcatctttctgttgttgttttgctacaacaggttttctaagggcgtctgtgtccaacgtggtattagaatttgatggatctgagtcatctgactgtaaattctataagcaaactcaaaaggggtataagag

SEQ ID NO: 55659 - DNA, 3882 bp, Zea Mays
gacgctgacggagccgagacggggaagggggaagagaggggacgaagagggagaaggaactgggacttgccgcccccgcctccgaattccccactcctccaccaccgccaccactcaccccttgctccgctcggcctcctgaatccggcgtcgtcaagcaaccccactccttctgccgttatcagaaccctaaccgatcaatccgtccgattcccagctgccggtttcgcgttgggagcgccggagcaggggaggggcggagggtcggatcggcagccgcaggagcattgagcgatggctgccgtgtaggatgcagctggactccgccggccgccgcctagctgctgctgttgttgctgaagttccgatgcttcagcaaccgcgatcttaataggagcggagggtggagtaccggtggagtgggccggacggctggttgatctccgtgagctccagcgcctacgcactgggaggtggggaggtgattgccggaggcgtatggaggaacctgggagggagggggattcccccgggccgccgtgggcgccaagtgagtcctcagctttccgggcgttcgttacggcggtgggggagcgggcggtggcgtcgccttcaggctcggacaatggggattccgtctgctcaagcaacctccgcgccgtcaggaagagaccttttgttgcaagattaaccacatatatcatccaaacttttgaaaaatgcaatcctgagtttaagtactcagagtcactaaaccccaagcgctttctcaccaatcccgcagttcctgttcacaaccatggtcttgacaatgcaaactctgatctcatattgtatgtcaacctggaactgcttaataaaaagtcaagccggaggtatgttgtccaagaaatgcttggccaaggtacctttggacaggttgcgaaatgctgggatgcagaaactaacagttatgttgcagtgaaggttataaagaatcagcctgccttttaccagcaggctatcatggaggtctctttattaagattgttaaatgagaaatttgatcctgatgatgaacatcacattgtccggatgctggattttttcctctaccaaaaccatttgtgtatagcctttgaaatgcttggtaacaacctgtatgagctgttgaaaaggaatagtttaagaggtttgcaaatgaaatatgttcgaactttctcaagacagatactggatgccctgattatcatgaaagatgctggcattattcattgtgatctaaaaccagaaaacatccttatagctccaactgtaaaaacagcagttggagtgaaagtaattgattttggatcagtgtgcatggagggtaaaaccatttattcatatattcagagccgttattacaggtctccagaagtacttcttggttatccatatactactgccattgatatgtggtcattcggttgcatcgttgctgagctatatatagggctgcctttatttcctggtgcatcagaatatgatgttctttgccgtatgattgagattattggtgggcaaccaccagatgatctgctacgtgaggctaaaaacactgggaaattttttaagcatgttggaagtatctatcctagtagtgaggctcggaatggcgctagcagtgcatacagaattttaagtgaagatgagatcgaagcaagggactccaagaaaccgaaggttgggagatggtatttccctcgtggaaggcttgacagactcatatatacatacccctggaagaatttgagcgagggaaacttgccagagacagaaaaggctgattgcttggcattagttgatttcttgagaggacttgttgagtttgatcctaataagaggtggtcaccgctgcaggcctcgtatcatccattcatcactggtgaagccttcactggtccttacgagcctgttcaggagaccccacgaattcctgttggacgtgctgcagtagttgaccacaatccaggaggaggtcacttgctgggtgctggtctttctcctcaggttggaagcattaacagatgcttacgatttaacaacgctttgcaaccaaatatgcctttttcatatggaagcagttgtggcagttttgggagccatggtagctttaacgataatgctggctttagctatggaagctatgattttaacagtgtcgacatatataattcaccaatggatccttctgggtttaatttacgttcacaacttggaggatcgtttctcggatctagcccacatattcgacgaagacctcatctctcacatggtggtggcattcggttaagccctggtggtccagggcatatgtctcttggggccagtccatcacaatttacaccgccaaattcccagatgcaaatcccaacaggtcctaatggaaggtatggtgcctctccttcaagaggtggacatggctcttcgttgggaaaggttgctgttgtaggccaatacaataggaggaggaatcagggttatccacctatgccaatgccaccacatgaacacacatctcaactgatccaggggcaccaaggagatggtgtcagtactgctcgctttggtgcatatgcccaaggaaattctacctacctacataatgcactccctaattctagtcattatagttggagatcgcaaaggggatctggcagtggtttacctttggacccttcttctagccgtggttcttttccacccaccaattactatggctttcctttacactccgatgcgtcagcagatacattgccctccacctcatcagtatcagatccagccgattgggatctcaactctagtgacaagtcactcctgcaagaggaccgaacactgtcagctgggttaagtgatcttcgcttgatagacgcaagtggccaaacaaacagatctagcagattggctcctttccaaagtcatgatattttaagttcaaacccttcgactatgaatcaaagaaatggacacctatttcatgcatcatctctgggagagagtacacatactccaggtcatgtcacattggatggatacgaacacacaacttattctcagcgaagtttcccaatctatcgtgggcaaccatttcagcagtacaacaacatgacttccagttacatccgaccgatgagggctcatcacaatggtcagcctgtctggtctaattataggctgacagaacctccaccaactacaatgggtgacggaatgctctggggagggaggggtggccattcgtttgcagcgagcggactgccacctacacttaggaaagattttgggagaatcttttagtcctgaatccggaggaatgccgaatgccaccaaattgatggcatcagttgtttgcatctgcaattccgggttggattatttgctgggggtgcctactggtattgcaatttgttgtgttcctccgatgtctcccaggatgttcggttcaaatgattatatggtacgggatatgattacagtgctcgttctttgctatacctgcacgatctagtagaaaaatgtcagttgtgctacttgatgcgaatcttgctagttcgaggtttgggagagtttttctgtctcggttattgtcttcctttctctattctatttttgacagagggttaagttcctgaaccttaacatggctaagactgaagtgaaggccacgtggtcgtggtgacatgatttcgttttcgtgatacttgaggagccgactatctgtttttaagcatctttctgttgttgttttgctacaacaggttttctaagggcgtctgtgtccaacgtggtattagaatttgatggatctgagtcatctgactgtaaattctataagcaaactcaaaaggggtataagag

SEQ ID NO: 55660 - DNA, 3923 bp, Zea Mays
gacgctgacggagccgagacggggaagggggaagagaggggacgaagagggagaaggaactgggacttgccgcccccgcctccgaattccccactcctccaccaccgccaccactcaccccttgctccgctcggcctcctgaatccggcgtcgtcaagcaaccccactccttctgccgttatcagaaccctaaccgatcaatccgtccgattcccagctgccggtttcgcgttgggagcgccggagcaggggaggggcggagggtcggatcggcagccgcaggagcattgagcgatggctgccgtgtaggatgcagctggactccgccggccgccgcctagctgctgctgttgttgctgaagttccgatgcttcagcaaccgcgatcttaataggagcggagggtggagtaccggtggagtgggccggacggctggttgatctccgtgagctccagcgcctacgcactgggaggtggggaggtgattgccggaggcgtatggaggaacctgggagggagggggattcccccgggccgccgtgggcgccaagtgagtcctcagctttccgggcgttcgttacggcggtgggggagcgggcggtggcgtcgccttcaggctcggacaatggggattccgtctgctcaagcaacctccgcgccgtcaggaagagaccttttgttgcaagattaaccacatatatcatccaaacttttgaaaaatgcaatcctgagtttaagtactcagagtcactaaaccccaagcgctttctcaccaatcccgcagttcctgttcacaaccatggtcttgacaatgcaaactctgatctcatattgtatgtcaacctggaactgcttaataaaaagtcaagccggaggtatgttgtccaagaaatgcttggccaaggtacctttggacaggttgcgaaatgctgggatgcagaaactaacagttatgttgcagtgaaggttataaagaatcagcctgccttttaccagcaggctatcatggaggtctctttattaagattgttaaatgagaaatttgatcctgatgatgaacatcacattgtccggatgctggattttttcctctaccaaaaccatttgtgtatagcctttgaaatgcttggtaacaacctgtatgagctgttgaaaaggaatagtttaagaggtttgcaaatgaaatatgttcgaactttctcaagacagatactggatgccctgattatcatgaaagatgctggcattattcattgtgatctaaaaccagaaaacatccttatagctccaactgtaaaaacagcagttggagtgaaagtaattgattttggatcagtgtgcatggagggtaaaaccatttattcatatattcagagccgttattacaggtctccagaagtacttcttggttatccatatactactgccattgatatgtggtcattcggttgcatcgttgctgagctatatatagggctgcctttatttcctggtgcatcagaatatgatgttctttgccgtatgattgagattattggtgggcaaccaccagatgatctgctacgtgaggctaaaaacactgggaaattttttaagcatgttggaagtatctatcctagtagtgaggctcggaatggcgctagcagtgcatacagaattttaagtgaagatgagatcgaagcaagggactccaagaaaccgaaggttgggagatggtatttccctcgtggaaggcttgacagactcatatatacatacccctggaagaatttgagcgagggaaacttgccagagacagaaaaggctgattgcttggcattagttgatttcttgagaggacttgttgagtttgatcctaataagaggtggtcaccgctgcagaatcattatatgttcttcacaaatgtgaaaacctattttaggcctcgtatcatccattcatcactggtgaagccttcactggtccttacgagcctgttcaggagaccccacgaattcctgttggacgtgctgcagtagttgaccacaatccaggaggaggtcacttgctgggtgctggtctttctcctcaggttggaagcattaacagatgcttacgatttaacaacgctttgcaaccaaatatgcctttttcatatggaagcagttgtggcagttttgggagccatggtagctttaacgataatgctggctttagctatggaagctatgattttaacagtgtcgacatatataattcaccaatggatccttctgggtttaatttacgttcacaacttggaggatcgtttctcggatctagcccacatattcgacgaagacctcatctctcacatggtggtggcattcggttaagccctggtggtccagggcatatgtctcttggggccagtccatcacaatttacaccgccaaattcccagatgcaaatcccaacaggtcctaatggaaggtatggtgcctctccttcaagaggtggacatggctcttcgttgggaaaggttgctgttgtaggccaatacaataggaggaggaatcagggttatccacctatgccaatgccaccacatgaacacacatctcaactgatccaggggcaccaaggagatggtgtcagtactgctcgctttggtgcatatgcccaaggaaattctacctacctacataatgcactccctaattctagtcattatagttggagatcgcaaaggggatctggcagtggtttacctttggacccttcttctagccgtggttcttttccacccaccaattactatggctttcctttacactccgatgcgtcagcagatacattgccctccacctcatcagtatcagatccagccgattgggatctcaactctagtgacaagtcactcctgcaagaggaccgaacactgtcagctgggttaagtgatcttcgcttgatagacgcaagtggccaaacaaacagatctagcagattggctcctttccaaagtcatgatattttaagttcaaacccttcgactatgaatcaaagaaatggacacctatttcatgcatcatctctgggagagagtacacatactccaggtcatgtcacattggatggatacgaacacacaacttattctcagcgaagtttcccaatctatcgtgggcaaccatttcagcagtacaacaacatgacttccagttacatccgaccgatgagggctcatcacaatggtcagcctgtctggtctaattataggctgacagaacctccaccaactacaatgggtgacggaatgctctggggagggaggggtggccattcgtttgcagcgagcggactgccacctacacttaggaaagattttgggagaatcttttagtcctgaatccggaggaatgccgaatgccaccaaattgatggcatcagttgtttgcatctgcaattccgggttggattatttgctgggggtgcctactggtattgcaatttgttgtgttcctccgatgtctcccaggatgttcggttcaaatgattatatggtacgggatatgattacagtgctcgttctttgctatacctgcacgatctagtagaaaaatgtcagttgtgctacttgatgcgaatcttgctagttcgaggtttgggagagtttttctgtctcggttattgtcttcctttctctattctatttttgacagagggttaagttcctgaaccttaacatggctaagactgaagtgaaggccacgtggtcgtggtgacatgatttcgttttcgtgatacttgaggagccgactatctgtttttaagcatctttctgttgttgttttgctacaacaggttttctaagggcgtctgtgtccaacgtggtattagaatttgatggatctgagtcatctgactgtaaattctataagcaaactcaaaaggggtataagag

SEQ ID NO: 55661 - DNA, 1313 bp, Zea Mays
gtttactcttatgcttctgttttgttgataagctgttggaagcattaacagatgcttacgatttaacaacgctttgcaaccaaatatgcctttttcatatggaagcagttgtggcagttttgggagccatggtagctttaacgataatgctggctttagctatggaagctatgattttaacagtgtcgacatatataattcaccaatggatccttctgggtttaatttacgttcacaacttggaggatcgtttctcggatctagcccacatattcgacgaagacctcatctctcacatggtggtggcattcggttaagccctggtggtccagggcatatgtctcttggggccagtccatcacaatttacaccgccaaattcccagatgcaaatcccaacaggtcctaatggaaggtatggtgcctctccttcaagaggtggacatggctcttcgttgggaaaggttgctgttgtaggccaatacaataggaggaggaatcagggttatccacctatgccaatgccaccacatgaacacacatctcaactgatccaggggcaccaaggagatggtgtcagtactgctcgctttggtgcatatgcccaaggaaattctacctacctacataatgcactccctaattctagtcattatagttggagatcgcaaaggggatctggcagtggtttacctttggacccttcttctagccgtggttcttttccacccaccaattactatggctttcctttacactccgatgcgtcagcagatacattgccctccacctcatcagtatcagatccagccgattgggatctcaactctagtgacaagtcactcctgcaagaggaccgaacactgtcagctgggttaagtgatcttcgcttgatagacgcaagtggccaaacaaacagatctagcagattggctcctttccaaagtcatgatattttaagttcaaacccttcgactatgaatcaaagaaatggacacctatttcatgcatcatctctgggagagagtacacatactccaggtcatgtcacattggatggatacgaacacacaacttattctcagcgaagtttcccaatctatcgtgggcaaccatttcagcagtacaacaacatgacttccagttacatccgaccgatgagggctcatcacaatggtcagcctgtctggtctaattataggctgacagaacctccaccaactacaatgggtgacggaatgctctgggttctctgttaaacctttgatcttaggcaaggcatgtttcagaaatttaattggcattatcttgttg

SEQ ID NO: 55662 - DNA, 3311 bp, Zea Mays
gacgctgacggagccgagacggggaagggggaagagaggggacgaagagggagaaggaactgggacttgccgcccccgcctccgaattccccactcctccaccaccgccaccactcaccccttgctccgctcggcctcctgaatccggcgtcgtcaagcaaccccactccttctgccgttatcagaaccctaaccgatcaatccgtccgattcccagctgccggtttcgcgttgggagcgccggagcaggggaggggcggagggtcggatcggcagccgcaggagcattgagcgatggctgccgtgtaggatgcagctggactccgccggccgccgcctagctgctgctgttgttgctgaagttccgatgcttcagcaaccgcgatcttaataggagcggagggtggagtaccggtggagtgggccggacggctggttgatctccgtgagctccagcgcctacgcactgggaggtggggaggtgattgccggaggcgtatggaggaacctgggagggagggggattcccccgggccgccgtgggcgccaagtgagtcctcagctttccgggcgttcgttacggcggtgggggagcgggcggtggcgtcgccttcaggctcggacaatggggattccgtctgctcaagcaacctccgcgccgtcaggaagagaccttttgttgcaagattaaccacatatatcatccaaacttttgaaaaatgcaatcctgagtttaagtactcagagtcactaaaccccaagcgctttctcaccaatcccgcagttcctgttcacaaccatggtcttgacaatgcaaactctgatctcatattgtatgtcaacctggaactgcttaataaaaagtcaagccggaggtatgttgtccaagaaatgcttggccaaggtacctttggacaggttgcgaaatgctgggatgcagaaactaacagttatgttgcagtgaaggttataaagaatcagcctgccttttaccagcaggctatcatggaggtctctttattaagattgttaaatgagaaatttgatcctgatgatgaacatcacattgtccggatgctggattttttcctctaccaaaaccatttgtgtatagcctttgaaatgcttggtaacaacctgtatgagctgttgaaaaggaatagtttaagaggtttgcaaatgaaatatgttcgaactttctcaagacagatactggatgccctgattatcatgaaagatgctggcattattcattgtgatctaaaaccagaaaacatccttatagctccaactgtaaaaacagcagttggagtgaaagtaattgattttggatcagtgtgcatggagggtaaaaccatttattcatatattcagagccgttattacaggtctccagaagtacttcttggttatccatatactactgccattgatatgtggtcattcggttgcatcgttgctgagctatatatagggctgcctttatttcctggtgcatcagaatatgatgttctttgccgtatgattgagattattggtgggcaaccaccagatgatctgctacgtgaggctaaaaacactgggaaattttttaagcatgttggaagtatctatcctagtagtgaggctcggaatggcgctagcagtgcatacagaattttaagtgaagatgagatcgaagcaagggactccaagaaaccgaaggttgggagatggtatttccctcgtggaaggcttgacagactcatatatacatacccctggaagaatttgagcgagggaaacttgccagagacagaaaaggctgattgcttggcattagttgatttcttgagaggacttgttgagtttgatcctaataagaggtggtcaccgctgcagggcctcgtatcatccattcatcactggtgaagccttcactggtccttacgagcctgttcaggagaccccacgaattcctgttggacgtgctgcagtagttgaccacaatccaggaggaggtcacttgctgggtgctggtctttctcctcaggttggaagcattaacagatgcttacgatttaacaacgctttgcaaccaaatatgcctttttcatatggaagcagttgtggcagttttgggagccatggtagctttaacgataatgctggctttagctatggaagctatgattttaacagtgtcgacatatataattcaccaatggatccttctgggtttaatttacgttcacaacttggaggatcgtttctcggatctagcccacatattcgacgaagacctcatctctcacatggtggtggcattcggttaagccctggtggtccagggcatatgtctcttggggccagtccatcacaatttacaccgccaaattcccagatgcaaatcccaacaggtcctaatggaaggtatggtgcctctccttcaagaggtggacatggctcttcgttgggaaaggttgctgttgtaggccaatacaataggaggaggaatcagggttatccacctatgccaatgccaccacatgaacacacatctcaactgatccaggggcaccaaggagatggtgtcagtactgctcgctttggtgcatatgcccaaggaaattctacctacctacataatgcactccctaattctagtcattatagttggagatcgcaaaggggatctggcagtggtttacctttggacccttcttctagccgtggttcttttccacccaccaattactatggctttcctttacactccgatgcgtcagcagatacattgccctccacctcatcagtatcagatccagccgattgggatctcaactctagtgacaagtcactcctgcaagaggaccgaacactgtcagctgggttaagtgatcttcgcttgatagacgcaagtggccaaacaaacagatctagcagattggctcctttccaaagtcatgatattttaagttcaaacccttcgactatgaatcaaagaaatggacacctatttcatgcatcatctctgggagagagtacacatactccaggtcatgtcacattggatggatacgaacacacaacttattctcagcgaagtttcccaatctatcgtgggcaaccatttcagcagtacaacaacatgacttccagttacatccgaccgatgagggctcatcacaatggtcagcctgtctggtctaattataggctgacagaacctccaccaactacaatgggtgacggaatgctctgggttctctgttaaacctttgatcttaggcaaggcatgtttcagaaatttaattggcattatcttgttg

SEQ ID NO: 55663 - DNA, 3365 bp, Zea Mays
tcacttccgattttgtagatccaaaagacagcagcaaataaaagagggggaggggacgctgacggagccgagacggggaagggggaagagaggggacgaagagggagaaggaactgggacttgccgcccccgcctccgaattccccactcctccaccaccgccaccactcaccccttgctccgctcggcctcctgaatccggcgtcgtcaagcaaccccactccttctgccgttatcagaaccctaaccgatcaatccgtccgattcccagctgccggtttcgcgttgggagcgccggagcaggggaggggcggagggtcggatcggcagccgcaggagcattgagcgatggctgccgtgtaggatgcagctggactccgccggccgccgcctagctgctgctgttgttgctgaagttccgatgcttcagcaaccgcgatcttaataggagcggagggtggagtaccggtggagtgggccggacggctggttgatctccgtgagctccagcgcctacgcactgggaggtggggaggtgattgccggaggcgtatggaggaacctgggagggagggggattcccccgggccgccgtgggcgccaagtgagtcctcagctttccgggcgttcgttacggcggtgggggagcgggcggtggcgtcgccttcaggctcggacaatggggattccgtctgctcaagcaacctccgcgccgtcaggaagagaccttttgttgcaagattaaccacatatatcatccaaacttttgaaaaatgcaatcctgagtttaagtactcagagtcactaaaccccaagcgctttctcaccaatcccgcagttcctgttcacaaccatggtcttgacaatgcaaactctgatctcatattgtatgtcaacctggaactgcttaataaaaagtcaagccggaggtatgttgtccaagaaatgcttggccaaggtacctttggacaggttgcgaaatgctgggatgcagaaactaacagttatgttgcagtgaaggttataaagaatcagcctgccttttaccagcaggctatcatggaggtctctttattaagattgttaaatgagaaatttgatcctgatgatgaacatcacattgtccggatgctggattttttcctctaccaaaaccatttgtgtatagcctttgaaatgcttggtaacaacctgtatgagctgttgaaaaggaatagtttaagaggtttgcaaatgaaatatgttcgaactttctcaagacagatactggatgccctgattatcatgaaagatgctggcattattcattgtgatctaaaaccagaaaacatccttatagctccaactgtaaaaacagcagttggagtgaaagtaattgattttggatcagtgtgcatggagggtaaaaccatttattcatatattcagagccgttattacaggtctccagaagtacttcttggttatccatatactactgccattgatatgtggtcattcggttgcatcgttgctgagctatatatagggctgcctttatttcctggtgcatcagaatatgatgttctttgccgtatgattgagattattggtgggcaaccaccagatgatctgctacgtgaggctaaaaacactgggaaattttttaagcatgttggaagtatctatcctagtagtgaggctcggaatggcgctagcagtgcatacagaattttaagtgaagatgagatcgaagcaagggactccaagaaaccgaaggttgggagatggtatttccctcgtggaaggcttgacagactcatatatacatacccctggaagaatttgagcgagggaaacttgccagagacagaaaaggctgattgcttggcattagttgatttcttgagaggacttgttgagtttgatcctaataagaggtggtcaccgctgcagggcctcgtatcatccattcatcactggtgaagccttcactggtccttacgagcctgttcaggagaccccacgaattcctgttggacgtgctgcagtagttgaccacaatccaggaggaggtcacttgctgggtgctggtctttctcctcaggttggaagcattaacagatgcttacgatttaacaacgctttgcaaccaaatatgcctttttcatatggaagcagttgtggcagttttgggagccatggtagctttaacgataatgctggctttagctatggaagctatgattttaacagtgtcgacatatataattcaccaatggatccttctgggtttaatttacgttcacaacttggaggatcgtttctcggatctagcccacatattcgacgaagacctcatctctcacatggtggtggcattcggttaagccctggtggtccagggcatatgtctcttggggccagtccatcacaatttacaccgccaaattcccagatgcaaatcccaacaggtcctaatggaaggtatggtgcctctccttcaagaggtggacatggctcttcgttgggaaaggttgctgttgtaggccaatacaataggaggaggaatcagggttatccacctatgccaatgccaccacatgaacacacatctcaactgatccaggggcaccaaggagatggtgtcagtactgctcgctttggtgcatatgcccaaggaaattctacctacctacataatgcactccctaattctagtcattatagttggagatcgcaaaggggatctggcagtggtttacctttggacccttcttctagccgtggttcttttccacccaccaattactatggctttcctttacactccgatgcgtcagcagatacattgccctccacctcatcagtatcagatccagccgattgggatctcaactctagtgacaagtcactcctgcaagaggaccgaacactgtcagctgggttaagtgatcttcgcttgatagacgcaagtggccaaacaaacagatctagcagattggctcctttccaaagtcatgatattttaagttcaaacccttcgactatgaatcaaagaaatggacacctatttcatgcatcatctctgggagagagtacacatactccaggtcatgtcacattggatggatacgaacacacaacttattctcagcgaagtttcccaatctatcgtgggcaaccatttcagcagtacaacaacatgacttccagttacatccgaccgatgagggctcatcacaatggtcagcctgtctggtctaattataggctgacagaacctccaccaactacaatgggtgacggaatgctctgggttctctgttaaacctttgatcttaggcaaggcatgtttcagaaatttaattggcattatcttgttg

SEQ ID NO: 55664 - DNA, 2397 bp, Zea Mays
gtttcgtgtgcgttgggagctcggagctagctccgtgtccggccggggtgtgtggtggcgcgtcgcggcagtaaataaattaaagctgggcttcttttctgcgggcggtcgccatgcacgctgccccgtgattattgcgcttgggagtaccggtagacagtgagcgttactgctggtagcgctagcgcggcgcggcggcggcggcgtaggaggaggggtcggcggcggagatgaggatgaagacgctggcgtgctgccggcggcggcctcaagacttcagcatcgatatggaccaagagcccgacagggtggtgacatataatggcctcgagacctgcattatcaacagttccacctatgacgatgacagtggcatcagtgcaacaacaggcggagatggctgtatcaccactgattcccttgatgatgaagtctctagttgctctagtaaagatgcttctggttcttccttcacttcacacagtcttagcaagcaggaggagcattcactagatgagttgggtacacccatggcaattcatctactccctttcaaagggaagaaaacaatcacatataccttgagtgcttcagatattgaaaacatgaaggaaaaatttgcaaaactattgcttggtgatgatacttcaggaggagctaggggcgtttgtgtggctctggccttgtctaatggcataatcaatctctctgcaactgtctttggagaactctggaagctggaaccactgtgcgaagataaaaagatcaggtggagaaaagaaatggactggttgctgtctcctacaacttatatggttgagctggttccaacaaagcaaagcggagcagatggatgtacatttgagaatcaaagttatgaagggcaggcctggtgtagcggtgagacctgtctcactgagtcggatttgaaatagtttctcagcatttgtggagggaaggcttgtctcgatttatctcgagacctcattcatgtgggagcctctggctctttattcagaatctaacttggttatttttcaactgaaccatgcagattatgactccaaaggcccgctcagatgtccatgtgaaccttcctgcccttcagaagcttgacatgatgctcattgaagtaatggactcaatgatagatacagaattctggtatgaggagagtggcagcagagctgatggtcgggggaaaattacaggtccaaggaagagtaaaaagtggtggctcccgtctcctcgtgtccctgagcaagggctatctcaattccagcggaaaaggcttgtttttcaggctaagcttgttcaccagatcctcaaagccgcaaaatccatcaacgaacaagtcctgtcccatatgcctattccggccgctgtcatggatgcccttccgaagtctgggagggctagcttgggtgaagatttgtatcaggctataaccacagattatattcctgtagaggaaatatttgtttcgctcagtttgaaaaccgagcatagtgtgctcgagactattaaccggttggagggcgccgtgtttgcatggaaccaaagaattctggaggaaagaagcaagaggtccccaggacgccattcctggagcttcatgaaggatagctcgtcggaagttgacaagatgtccgcatgcatcgaaagggttgacgctctcgtgcagcttctgaaatccagatatcccaacctgcccccgacttttatagatgttttaaaggtccaatacaacgtggacgtgggccatgcaatcgtggaggcctacgctagggttcttgttggggtagcgttcagcatattgtcgcgcgtggcggagatactgctggaggatgacctgatcaagaagccgaacacccccatgaccacgctgaagttcgacctctcctctgacgtgtacttggccggcatcaccgagacgccaccgggacacatccggcggtccctgatggaccagatcagcatggtggacgggcgctacgatgccgttgttggcaagaagaaagaagtgaagcagctgaggtggtgagggcagtcagcagctgttgtgtgaatcttttgccgatgtacagggtgatgcggggcccagtgtccgctccacaaggttacctttagcaaatagcgcgatgtaatgtatttttgcgacgagtttatagcgtactgtactgtaagatcagcattaggcgagtcctgcctgtcgaagtctccgggtgttgctgttgcgtctgaacgatctgacgatgctcttggtcagcctctgctgcttttcttgctggcaccttgatgatgatagcatgtcgatgacgagaccttgcttgagtgcttgacgggttcatgctgacgcgtcttccgttctcgaagcgcggtccgtgtttctggggc

SEQ ID NO: 55665 - DNA, 2079 bp, Zea Mays
gtcaaattccggcctttttaccgctgcagcctgcagttactgctggtagcgctagcgcggcgcggcggcggcggcgtaggaggaggggtcggcggcggagatgaggatgaagacgctggcgtgctgccggcggcggcctcaagacttcagcatcgatatggaccaagagcccgacagggtggtgacatataatggcctcgagacctgcattatcaacagttccacctatgacgatgacagtggcatcagtgcaacaacaggcggagatggctgtatcaccactgattcccttgatgatgaagtctctagttgctctagtaaagatgcttctggttcttccttcacttcacacagtcttagcaagcaggaggagcattcactagatgagttgggtacacccatggcaattcatctactccctttcaaagggaagaaaacaatcacatataccttgagtgcttcagatattgaaaacatgaaggaaaaatttgcaaaactattgcttggtgatgatacttcaggaggagctaggggcgtttgtgtggctctggccttgtctaatggcataatcaatctctctgcaactgtctttggagaactctggaagctggaaccactgtgcgaagataaaaagatcaggtggagaaaagaaatggactggttgctgtctcctacaacttatatggttgagctggttccaacaaagcaaagcggagcagatggatgtacatttgagattatgactccaaaggcccgctcagatgtccatgtgaaccttcctgcccttcagaagcttgacatgatgctcattgaagtaatggactcaatgatagatacagaattctggtatgaggagagtggcagcagagctgatggtcgggggaaaattacaggtccaaggaagagtaaaaagtggtggctcccgtctcctcgtgtccctgagcaagggctatctcaattccagcggaaaaggcttgtttttcaggctaagcttgttcaccagatcctcaaagccgcaaaatccatcaacgaacaagtcctgtcccatatgcctattccggccgctgtcatggatgcccttccgaagtctgggagggctagcttgggtgaagatttgtatcaggctataaccacagattatattcctgtagaggaaatatttgtttcgctcagtttgaaaaccgagcatagtgtgctcgagactattaaccggttggagggcgccgtgtttgcatggaaccaaagaattctggaggaaagaagcaagaggtccccaggacgccattcctggagcttcatgaaggatagctcgtcggaagttgacaagatgtccgcatgcatcgaaagggttgacgctctcgtgcagcttctgaaatccagatatcccaacctgcccccgacttttatagatgttttaaaggtccaatacaacgtggacgtgggccatgcaatcgtggaggcctacgctagggttcttgttggggtagcgttcagcatattgtcgcgcgtggcggagatactgctggaggatgacctgatcaagaagccgaacacccccatgaccacgctgaagttcgacctctcctctgacgtgtacttggccggcatcaccgagacgccaccgggacacatccggcggtccctgatggaccagatcagcatggtggacgggcgctacgatgccgttgttggcaagaagaaagaagtgaagcagctgaggtggtgagggcagtcagcagctgttgtgtgaatcttttgccgatgtacagggtgatgcggggcccagtgtccgctccacaaggttacctttagcaaatagcgcgatgtaatgtatttttgcgacgagtttatagcgtactgtactgtaagatcagcattaggcgagtcctgcctgtcgaagtctccgggtgttgctgttgcgtctgaacgatctgacgatgctcttggtcagcctctgctgcttttcttgctggcaccttgatgatgatagcatgtcgatgacgagaccttgcttgagtgcttgacgggttcatgctgacgcgtcttccgttctcgaagcgcggtccgtgtttctggggc

SEQ ID NO: 55666 - DNA, 2252 bp, Zea Mays
gtgaaccatcagcgcgctgctttactgctggtagcgctagcgcggcgcggcggcggcggcgtaggaggaggggtcggcggcggagatgaggatgaagacgctggcgtgctgccggcggcggcctcaagacttcagcatcgatatggaccaagagcccgacagggtggtgacatataatggcctcgagacctgcattatcaacagttccacctatgacgatgacagtggcatcagtgcaacaacaggcggagatggctgtatcaccactgattcccttgatgatgaagtctctagttgctctagtaaagatgcttctggttcttccttcacttcacacagtcttagcaagcaggaggagcattcactagatgagttgggtacacccatggcaattcatctactccctttcaaagggaagaaaacaatcacatataccttgagtgcttcagatattgaaaacatgaaggaaaaatttgcaaaactattgcttggtgatgatacttcaggaggagctaggggcgtttgtgtggctctggccttgtctaatggcataatcaatctctctgcaactgtctttggagaactctggaagctggaaccactgtgcgaagataaaaagatcaggtggagaaaagaaatggactggttgctgtctcctacaacttatatggttgagctggttccaacaaagcaaagcggagcagatggatgtacatttgagaatcaaagttatgaagggcaggcctggtgtagcggtgagacctgtctcactgagtcggatttgaaatagtttctcagcatttgtggagggaaggcttgtctcgatttatctcgagacctcattcatgtgggagcctctggctctttattcagaatctaacttggttatttttcaactgaaccatgcagattatgactccaaaggcccgctcagatgtccatgtgaaccttcctgcccttcagaagcttgacatgatgctcattgaagtaatggactcaatgatagatacagaattctggtatgaggagagtggcagcagagctgatggtcgggggaaaattacaggtccaaggaagagtaaaaagtggtggctcccgtctcctcgtgtccctgagcaagggctatctcaattccagcggaaaaggcttgtttttcaggctaagcttgttcaccagatcctcaaagccgcaaaatccatcaacgaacaagtcctgtcccatatgcctattccggccgctgtcatggatgcccttccgaagtctgggagggctagcttgggtgaagatttgtatcaggctataaccacagattatattcctgtagaggaaatatttgtttcgctcagtttgaaaaccgagcatagtgtgctcgagactattaaccggttggagggcgccgtgtttgcatggaaccaaagaattctggaggaaagaagcaagaggtccccaggacgccattcctggagcttcatgaaggatagctcgtcggaagttgacaagatgtccgcatgcatcgaaagggttgacgctctcgtgcagcttctgaaatccagatatcccaacctgcccccgacttttatagatgttttaaaggtccaatacaacgtggacgtgggccatgcaatcgtggaggcctacgctagggttcttgttggggtagcgttcagcatattgtcgcgcgtggcggagatactgctggaggatgacctgatcaagaagccgaacacccccatgaccacgctgaagttcgacctctcctctgacgtgtacttggccggcatcaccgagacgccaccgggacacatccggcggtccctgatggaccagatcagcatggtggacgggcgctacgatgccgttgttggcaagaagaaagaagtgaagcagctgaggtggtgagggcagtcagcagctgttgtgtgaatcttttgccgatgtacagggtgatgcggggcccagtgtccgctccacaaggttacctttagcaaatagcgcgatgtaatgtatttttgcgacgagtttatagcgtactgtactgtaagatcagcattaggcgagtcctgcctgtcgaagtctccgggtgttgctgttgcgtctgaacgatctgacgatgctcttggtcagcctctgctgcttttcttgctggcaccttgatgatgatagcatgtcgatgacgagaccttgcttgagtgcttgacgggttcatgctgacgcgtcttccgttctcgaagcgcggtccgtgtttctggggc

SEQ ID NO: 55667 - DNA, 2722 bp, Zea Mays
gtttgtcattgcaaggtgcaagcaaacttgaaaaaaaaaacacacgtcctgctccgtccgaatcgctactccgccgcgcttctcatcaccgtcaagagatagtcagacagttccagccccctttccacacgcacactcctctcccttcctctcctccgcttccatccctgggctgtgcgctactactccccctgctggccgctgctctgctctcacgcatgttttcacatccaagcgcctgcccctcgccctcgccgccacagtggtaacccgatccatgccgggcggcggccgctgacttgctgctgttggcttcaacggccgcaggcaaaggtcgtcatcgctttccggcagcccgtttcattgggaaagcgacgacgaggcgaggcgaggcgacggccgcgccctgccccagccgtgccgcactaaccgagtaaccgaccgacgcttgccgttgcagccccaccacgcgcaaaaaaaaaaaaaaaaccgcacgtccttcccctccacagtccacggctccacgcctgcccaatttttgtccagcccattgggcagttcctttcctccaccagtccccccagttcaaatttcaaacgcctccgcacggtcgccgccgcgctgcgtcgtcgtctcctcgaccgcggatcccctgatgctcctggtgctgtaaggcgcgttactgctggtagcgctagcgcggcgcggcggcggcggcgtaggaggaggggtcggcggcggagatgaggatgaagacgctggcgtgctgccggcggcggcctcaagacttcagcatcgatatggaccaagagcccgacagggtggtgacatataatggcctcgagacctgcattatcaacagttccacctatgacgatgacagtggcatcagtgcaacaacaggcggagatggctgtatcaccactgattcccttgatgatgaagtctctagttgctctagtaaagatgcttctggttcttccttcacttcacacagtcttagcaagcaggaggagcattcactagatgagttgggtacacccatggcaattcatctactccctttcaaagggaagaaaacaatcacatataccttgagtgcttcagatattgaaaacatgaaggaaaaatttgcaaaactattgcttggtgatgatacttcaggaggagctaggggcgtttgtgtggctctggccttgtctaatggcataatcaatctctctgcaactgtctttggagaactctggaagctggaaccactgtgcgaagataaaaagatcaggtggagaaaagaaatggactggttgctgtctcctacaacttatatggttgagctggttccaacaaagcaaagcggagcagatggatgtacatttgagattatgactccaaaggcccgctcagatgtccatgtgaaccttcctgcccttcagaagcttgacatgatgctcattgaagtaatggactcaatgatagatacagaattctggtatgaggagagtggcagcagagctgatggtcgggggaaaattacaggtccaaggaagagtaaaaagtggtggctcccgtctcctcgtgtccctgagcaagggctatctcaattccagcggaaaaggcttgtttttcaggctaagcttgttcaccagatcctcaaagccgcaaaatccatcaacgaacaagtcctgtcccatatgcctattccggccgctgtcatggatgcccttccgaagtctgggagggctagcttgggtgaagatttgtatcaggctataaccacagattatattcctgtagaggaaatatttgtttcgctcagtttgaaaaccgagcatagtgtgctcgagactattaaccggttggagggcgccgtgtttgcatggaaccaaagaattctggaggaaagaagcaagaggtccccaggacgccattcctggagcttcatgaaggatagctcgtcggaagttgacaagatgtccgcatgcatcgaaagggttgacgctctcgtgcagcttctgaaatccagatatcccaacctgcccccgacttttatagatgttttaaaggtccaatacaacgtggacgtgggccatgcaatcgtggaggcctacgctagggttcttgttggggtagcgttcagcatattgtcgcgcgtggcggagatactgctggaggatgacctgatcaagaagccgaacacccccatgaccacgctgaagttcgacctctcctctgacgtgtacttggccggcatcaccgagacgccaccgggacacatccggcggtccctgatggaccagatcagcatggtggacgggcgctacgatgccgttgttggcaagaagaaagaagtgaagcagctgaggtggtgagggcagtcagcagctgttgtgtgaatcttttgccgatgtacagggtgatgcggggcccagtgtccgctccacaaggttacctttagcaaatagcgcgatgtaatgtatttttgcgacgagtttatagcgtactgtactgtaagatcagcattaggcgagtcctgcctgtcgaagtctccgggtgttgctgttgcgtctgaacgatctgacgatgctcttggtcagcctctgctgcttttcttgctggcaccttgatgatgatagcatgtcgatgacgagaccttgcttgagtgcttgacgggttcatgctgacgcgtcttccgttctcgaagcgcggtccgtgtttctggggc

SEQ ID NO: 55668 - DNA, 2677 bp, Zea Mays
ctgatcgcctcgtggtttgtcattgcaaggtgcaagcaaacttgaaaaaaaaaacacacgtcctgctccgtccgaatcgctactccgccgcgcttctcatcaccgtcaagagatagtcagacagttccagccccctttccacacgcacactcctctcccttcctctcctccgcttccatccctgggctgtgcgctactactccccctgctggccgctgctctgctctcacgcatgttttcacatccaagcgcctgcccctcgccctcgccgccacagtggtaacccgatccatgccgggcggcggccgctgacttgctgctgttggcttcaacggccgcaggcaaagttactgctggtagcgctagcgcggcgcggcggcggcggcgtaggaggaggggtcggcggcggagatgaggatgaagacgctggcgtgctgccggcggcggcctcaagacttcagcatcgatatggaccaagagcccgacagggtggtgacatataatggcctcgagacctgcattatcaacagttccacctatgacgatgacagtggcatcagtgcaacaacaggcggagatggctgtatcaccactgattcccttgatgatgaagtctctagttgctctagtaaagatgcttctggttcttccttcacttcacacagtcttagcaagcaggaggagcattcactagatgagttgggtacacccatggcaattcatctactccctttcaaagggaagaaaacaatcacatataccttgagtgcttcagatattgaaaacatgaaggaaaaatttgcaaaactattgcttggtgatgatacttcaggaggagctaggggcgtttgtgtggctctggccttgtctaatggcataatcaatctctctgcaactgtctttggagaactctggaagctggaaccactgtgcgaagataaaaagatcaggtggagaaaagaaatggactggttgctgtctcctacaacttatatggttgagctggttccaacaaagcaaagcggagcagatggatgtacatttgagaatcaaagttatgaagggcaggcctggtgtagcggtgagacctgtctcactgagtcggatttgaaatagtttctcagcatttgtggagggaaggcttgtctcgatttatctcgagacctcattcatgtgggagcctctggctctttattcagaatctaacttggttatttttcaactgaaccatgcagattatgactccaaaggcccgctcagatgtccatgtgaaccttcctgcccttcagaagcttgacatgatgctcattgaagtaatggactcaatgatagatacagaattctggtatgaggagagtggcagcagagctgatggtcgggggaaaattacaggtccaaggaagagtaaaaagtggtggctcccgtctcctcgtgtccctgagcaagggctatctcaattccagcggaaaaggcttgtttttcaggctaagcttgttcaccagatcctcaaagccgcaaaatccatcaacgaacaagtcctgtcccatatgcctattccggccgctgtcatggatgcccttccgaagtctgggagggctagcttgggtgaagatttgtatcaggctataaccacagattatattcctgtagaggaaatatttgtttcgctcagtttgaaaaccgagcatagtgtgctcgagactattaaccggttggagggcgccgtgtttgcatggaaccaaagaattctggaggaaagaagcaagaggtccccaggacgccattcctggagcttcatgaaggatagctcgtcggaagttgacaagatgtccgcatgcatcgaaagggttgacgctctcgtgcagcttctgaaatccagatatcccaacctgcccccgacttttatagatgttttaaaggtccaatacaacgtggtaagaaagttcgaccattggctacgagcattttgataggcctaaattataaaatggtgtgattctgaacgttgactgaagaatggcaactggatgcaggacgtgggccatgcaatcgtggaggcctacgctagggttcttgttggggtagcgttcagcatattgtcgcgcgtggcggagatactgctggaggatgacctgatcaagaagccgaacacccccatgaccacgctgaagttcgacctctcctctgacgtgtacttggccggcatcaccgagacgccaccgggacacatccggcggtccctgatggaccagatcagcatggtggacgggcgctacgatgccgttgttggcaagaagaaagaagtgaagcagctgaggtggtgagggcagtcagcagctgttgtgtgaatcttttgccgatgtacagggtgatgcggggcccagtgtccgctccacaaggttacctttagcaaatagcgcgatgtaatgtatttttgcgacgagtttatagcgtactgtactgtaagatcagcattaggcgagtcctgcctgtcgaagtctccgggtgttgctgttgcgtctgaacgatctgacgatgctcttggtcagcctctgctgcttttcttgctggcaccttgatgatgatagcatgtcgatgacgagaccttgcttgagtgcttgacgggttcatgctgacgcgtcttccgttctcgaagcgcggtccgtgtttctggggc

SEQ ID NO: 55669 - DNA, 2470 bp, Zea Mays
ctccaacccttttttctagtggcggacctgacctgatcgcctcgtggtttgtcattgcaaggtgcaagcaaacttgaaaaaaaaaacacacgtcctgctccgtccgaatcgctactccgccgcgcttctcatcaccgtcaagagatagtcagacagttccagccccctttccacacgcacactcctctcccttcctctcctccgcttccatccctgggctgtgcgctactactccccctgctggccgctgctctgctctcacgcatgttttcacatccaagcgcctgcccctcgccctcgccgccacagtggtaacccgatccatgccgggcggcggccgctgacttgctgctgttggcttcaacggccgcaggcaaaggggtggtgacatataatggcctcgagacctgcattatcaacagttccacctatgacgatgacagtggcatcagtgcaacaacaggcggagatggctgtatcaccactgattcccttgatgatgaagtctctagttgctctagtaaagatgcttctggttcttccttcacttcacacagtcttagcaagcaggaggagcattcactagatgagttgggtacacccatggcaattcatctactccctttcaaagggaagaaaacaatcacatataccttgagtgcttcagatattgaaaacatgaaggaaaaatttgcaaaactattgcttggtgatgatacttcaggaggagctaggggcgtttgtgtggctctggccttgtctaatggcataatcaatctctctgcaactgtctttggagaactctggaagctggaaccactgtgcgaagataaaaagatcaggtggagaaaagaaatggactggttgctgtctcctacaacttatatggttgagctggttccaacaaagcaaagcggagcagatggatgtacatttgagaatcaaagttatgaagggcaggcctggtgtagcggtgagacctgtctcactgagtcggatttgaaatagtttctcagcatttgtggagggaaggcttgtctcgatttatctcgagacctcattcatgtgggagcctctggctctttattcagaatctaacttggttatttttcaactgaaccatgcagattatgactccaaaggcccgctcagatgtccatgtgaaccttcctgcccttcagaagcttgacatgatgctcattgaagtaatggactcaatgatagatacagaattctggtatgaggagagtggcagcagagctgatggtcgggggaaaattacaggtccaaggaagagtaaaaagtggtggctcccgtctcctcgtgtccctgagcaagggctatctcaattccagcggaaaaggcttgtttttcaggctaagcttgttcaccagatcctcaaagccgcaaaatccatcaacgaacaagtcctgtcccatatgcctattccggccgctgtcatggatgcccttccgaagtctgggagggctagcttgggtgaagatttgtatcaggctataaccacagattatattcctgtagaggaaatatttgtttcgctcagtttgaaaaccgagcatagtgtgctcgagactattaaccggttggagggcgccgtgtttgcatggaaccaaagaattctggaggaaagaagcaagaggtccccaggacgccattcctggagcttcatgaaggatagctcgtcggaagttgacaagatgtccgcatgcatcgaaagggttgacgctctcgtgcagcttctgaaatccagatatcccaacctgcccccgacttttatagatgttttaaaggtccaatacaacgtggacgtgggccatgcaatcgtggaggcctacgctagggttcttgttggggtagcgttcagcatattgtcgcgcgtggcggagatactgctggaggatgacctgatcaagaagccgaacacccccatgaccacgctgaagttcgacctctcctctgacgtgtacttggccggcatcaccgagacgccaccgggacacatccggcggtccctgatggaccagatcagcatggtggacgggcgctacgatgccgttgttggcaagaagaaagaagtgaagcagctgaggtggtgagggcagtcagcagctgttgtgtgaatcttttgccgatgtacagggtgatgcggggcccagtgtccgctccacaaggttacctttagcaaatagcgcgatgtaatgtatttttgcgacgagtttatagcgtactgtactgtaagatcagcattaggcgagtcctgcctgtcgaagtctccgggtgttgctgttgcgtctgaacgatctgacgatgctcttggtcagcctctgctgcttttcttgctggcaccttgatgatgatagcatgtcgatgacgagaccttgcttgagtgcttgacgggttcatgctgacgcgtcttccgttctcgaagcgcggtccgtgtttctggggc

SEQ ID NO: 55670 - DNA, 1530 bp, Zea Mays
tcggcctattccaccggtcgtcgcctttttgctgctgcgcgacgccgacgcggccgtgcgagtgcggcgcagcgacggtcgagccaagctcactactccaaattcgtgtcgtagtcgtaggaggaatgtgggagagaatacaggggagaagccgagagccgaacgaagagaccgagcccccgccgcccgcggcgtctgttcctttcgtgccgcttcgtggtggcgccgtggcgcccaccaccacctcacctctcagtctctcaccacctatagcaataccacgagtccacgatccatggaatagactagactacaccgctcggccggtgacgacgacggcgacagccgacagtctatccccaactacgctctgcaccagcgccttatccgccgcctggggtttgttctggcgcggtggcagttgataaaggcgggagggattagagcaaggagagggatcggcgatgagcttcgcggatctggaggcgggggctctcagggcgcccctcgggaggaaagcgagaggggggccaaacgacgcgagagcgctcgtcttccagataaccaccgcggtggcctcgtaccgccgcctcctcaactcgctcggcacgcccaaggacaccatcacgcttcgtgataacctgtctctcctcgagccctcttatgctttacatatctagcgatcagcgtaaacccttgcgtaaatttgctagcttgagtactagtaagccttgcccaattcaagtttggagccttttttactttcaagtctggagcaattagtctgctcttagatcgataggatcgctaaatcatgtcttaaacaacatgttgcttttttttgctcactcatgtcgctttcttagttgccttacgatctagtgctttgtttccctcgcaggcataagactagtcagaacatccttcaattagcaaaggatgcgaaagataagctccaaaaggctgctgaagcagacaagagcactgatacaagtgcagacaagaggatagctgatatgaagcttgccaaagattttgctgccacaatggaggagttcaggaaacttcagagtcttgcgattcagagggagacggcatataagccagttgttccacagaatacgcagtcaaactattctacagatgagcgaagttccgaatctggtaatatgcctgagcagcgtgcattactcgctgaatcaatgagaaccggtgccgaaggctcccacatgagtgaggtctgagcaagagataaatagaggcaagcctttctctgcaaatgcggaaagacaagaggtgctgcaattggacaatgaaattgtttacaatgaagctataattgaggaaagggagcaagccattcaagatatccaacagcagattggtgaagtacatgaagtgttcaaagatcttgctacccttgtgcattcccaaggaatcataatcgaggaaatcgacatgaacattgaaaaataagcagcagtgaccaaagaggcaaagacacacctagctttaaaaaggcacgactca

SEQ ID NO: 55671 - DNA, 624 bp, Zea Mays
tcggcctattccaccggtcgtcgcctttttgctgctgcgcgacgccgacgcggccgtgcgagtgcggcgcagcgacggcataagactagtcagaacatccttcaattagcaaaggatgcgaaagataagctccaaaaggctgctgaagcagacaagagcactgatacaagtgcagacaagaggatagctgatatgaagcttgccaaagattttgctgccacaatggaggagttcaggaaacttcagagtcttgcgattcagagggagacggcatataagccagttgttccacagaatacgcagtcaaactattctacagatgagcgaagttccgaatctggtaatatgcctgagcagcgtgcattactcgctgaatcaatgagacaagaggtgctgcaattggacaatgaaattgtttacaatgaagctataattgaggaaagggagcaagccattcaagatatccaacagcagattggtgaagtacatgaagtgttcaaagatcttgctacccttgtgcattcccaaggaatcataatcgaggaaatcgacatgaacattgaaaaataagcagcagtgaccaaagaggcaaagacacacctagctttaaaaaggcacgactca

SEQ ID NO: 55672 - DNA, 1448 bp, Zea Mays
tcggcctattccaccggtcgtcgcctttttgctgctgcgcgacgccgacgcggccgtgcgagtgcggcgcagcgacggtcgagccaagctcactactccaaattcgtgtcgtagtcgtaggaggaatgtgggagagaatacaggggagaagccgagagccgaacgaagagaccgagcccccgccgcccgcggcgtctgttcctttcgtgccgcttcgtggtggcgccgtggcgcccaccaccacctcacctctcagtctctcaccacctatagcaataccacgagtccacgatccatggaatagactagactacaccgctcggccggtgacgacgacggcgacagccgacagtctatccccaactacgctctgcaccagcgccttatccgccgcctggggtttgttctggcgcggtggcagttgataaaggcgggagggattagagcaaggagagggatcggcgatgagcttcgcggatctggaggcgggggctctcagggcgcccctcgggaggaaagcgagaggggggccaaacgacgcgagagcgctcgtcttccagataaccaccgcggtggcctcgtaccgccgcctcctcaactcgctcggcacgcccaaggacaccatcacgcttcgtgataacctgtctctcctcgagccctcttatgctttacatatctagcgatcagcgtaaacccttgcgtaaatttgctagcttgagtactagtaagccttgcccaattcaagtttggagccttttttactttcaagtctggagcaattagtctgctcttagatcgataggatcgctaaatcatgtcttaaacaacatgttgcttttttttgctcactcatgtcgctttcttagttgccttacgatctagtgctttgtttccctcgcaggcataagactagtcagaacatccttcaattagcaaaggatgcgaaagataagctccaaaaggctgctgaagcagacaagagcactgatacaagtgcagacaagaggatagctgatatgaagcttgccaaagattttgctgccacaatggaggagttcaggaaacttcagagtcttgcgattcagagggagacggcatataagccagttgttccacagaatacgcagtcaaactattctacagatgagcgaagttccgaatctggtaatatgcctgagcagcgtgcattactcgctgaatcaatgagacaagaggtgctgcaattggacaatgaaattgtttacaatgaagctataattgaggaaagggagcaagccattcaagatatccaacagcagattggtgaagtacatgaagtgttcaaagatcttgctacccttgtgcattcccaaggaatcataatcgaggaaatcgacatgaacattgaaaaataagcagcagtgaccaaagaggcaaagacacacctagctttaaaaaggcacgactca

SEQ ID NO: 55673 - DNA, 2016 bp, Zea Mays
tcggcctattccaccggtcgtcgcctttttgctgctgcgcgacgccgacgcggccgtgcgagtgcggcgcagcgacggtcgagccaagctcactactccaaattcgtgtcgtagtcgtaggaggaatgtgggagagaatacaggggagaagccgagagccgaacgaagagaccgagcccccgccgcccgcggcgtctgttcctttcgtgccgcttcgtggtggcgccgtggcgcccaccaccacctcacctctcagtctctcaccacctatagcaataccacgagtccacgatccatggaatagactagactacaccgctcggccggtgacgacgacggcgacagccgacagtctatccccaactacgctctgcaccagcgccttatccgccgcctggggtttgttctggcgcggtggcagttgataaaggcgggagggattagagcaaggagagggatcggcgatgagcttcgcggatctggaggcgggggctctcagggcgcccctcgggaggaaagcgagaggggggccaaacgacgcgagagcgctcgtcttccagataaccaccgcggtggcctcgtaccgccgcctcctcaactcgctcggcacgcccaaggacaccatcacgcttcgtgataacctgtctctcctcgagccctcttatgctttacatatctagcgatcagcgtaaacccttgcgtaaatttgctagcttgagtactagtaagccttgcccaattcaagtttggagccttttttactttcaagtctggagcaattagtctgctcttagatcgataggatcgctaaatcatgtcttaaacaacatgttgcttttttttgctcactcatgtcgctttcttagttgccttacgatctagtgctttgtttccctcgcaggcataagactagtcagaacatccttcaattagcaaaggatgcgaaagataagctccaaaaggctgctgaagcagacaagagcactgatacaagtgcagacaagaggatagctgatatgaagcttgccaaagattttgctgccacaatggaggagttcaggaaacttcagagtcttgcgattcagagggagacggcatataagccagttgttccacagaatacgcagtcaaagtaaccctgttcacgattaaaccaatccatagtgaaattcttcttatgtattccattttttctgtaccatggaaatgctttagtttgtcacttatgtttacagattacattagatacacaagatactcataacatgtgaagttgagctatatgaattgctgctaatataaaactttgcacacaattgttcaaaacggtaaggttaaagtgcagttatgtaagtgaaccatgatgactaagctagtccacacaggatactaaacactattcatccatgacttggatatgttagaatgtaaaacaacttgatgtatggagaaagtcatcagtagtcagtgtatggttttttgcagatagctataaacagatgcatagtctttgacatgtttttattctgtacgtatcatggccctatttttgaccgaataccttggtcctactgttaacttgtaatttgcttggcctttacttagtgtaatataaacttaagggttttaattgtgctgttttgactttgactgggctgtcttctaatcttctggatgttattgtggttgttgtgatgcagctattctacagatgagcgaagttccgaatctggtaatatgcctgagcagcgtgcattactcgctgaatcaatgagacaagaggtgctgcaattggacaatgaaattgtttacaatgaagctataattgaggaaagggagcaagccattcaagatatccaacagcagattggtgaagtacatgaagtgttcaaagatcttgctacccttgtgcattcccaaggaatcataatcgaggaaatcgacatgaacattgaaaaataagcagcagtgaccaaagaggcaaagacacacctagctttaaaaaggcacgactca

SEQ ID NO: 55674 - DNA, 1447 bp, Zea Mays
tcggcctattccaccggtcgtcgcctttttgctgctgcgcgacgccgacgcggccgtgcgagtgcggcgcagcgacggtcgagccaagctcactactccaaattcgtgtcgtagtcgtaggaggaatgtgggagagaatacaggggagaagccgagagccgaacgaagagaccgagcccccgccgcccgcggcgtctgttcctttcgtgccgcttcgtggtggcgccgtggcgcccaccaccacctcacctctcagtctctcaccacctatagcaataccacgagtccacgatccatggaatagactagactacaccgctcggccggtgacgacgacggcgacagccgacagtctatccccaactacgctctgcaccagcgccttatccgccgcctggggtttgttctggcgcggtggcagttgataaaggcgggagggattagagcaaggagagggatcggcgatgagcttcgcggatctggaggcgggggctctcagggcgcccctcgggaggaaagcgagaggggggccaaacgacgcgagagcgctcgtcttccagataaccaccgcggtggcctcgtaccgccgcctcctcaactcgctcggcacgcccaaggacaccatcacgcttcgtgataacctgtctctcctcgagccctcttatgctttacatatctagcgatcagcgtaaacccttgcgtaaatttgctagcttgagtactagtaagccttgcccaattcaagtttggagccttttttactttcaagtctggagcaattagtctgctcttagatcgataggatcgctaaatcatgtcttaaacaacatgttgcttttttttgctcactcatgtcgctttcttagttgccttacgatctagtgctttgtttccctcgcaggcataagactagtcagaacatccttcaattagcaaaggatgcgaaagataagctccaaaaggctgctgaagcagacaagagcactgatacaagtgcagacaagaggatagctgatatgaagcttgccaaagattttgctgccacaatggaggagttcaggaaacttcagagtcttgcgattcagagggagacggcatataagccagttgttccacagaatacgcagtcaactattctacagatgagcgaagttccgaatctggtaatatgcctgagcagcgtgcattactcgctgaatcaatgagacaagaggtgctgcaattggacaatgaaattgtttacaatgaagctataattgaggaaagggagcaagccattcaagatatccaacagcagattggtgaagtacatgaagtgttcaaagatcttgctacccttgtgcattcccaaggaatcataatcgaggaaatcgacatgaacattgaaaaataagcagcagtgaccaaagaggcaaagacacacctagctttaaaaaggcacgactca

SEQ ID NO: 55675 - DNA, 759 bp, Zea Mays
tcggcctattccaccggtcgtcgcctttttgctgctgcgcgacgccgacgcggccgtgcgagtgcggcgcagcgacggcataagactagtcagaacatccttcaattagcaaaggatgcgaaagataagctccaaaaggctgctgaagcagacaagagcactgatacaagtgcagacaagaggatagctgatatgaagcttgccaaagattttgctgccacaatggaggagttcaggaaacttcagagtcttgcgattcagagggagacggcatataagccagttgttccacagaatacgcagtcaaactattctacagatgagcgaagttccgaatctggtaatatgcctgagcagcgtgcattactcgctgaatcaatgaggtcagtattgagctattagctggcgatcaggtggaagctcagctgaagctctgtagtgcattaggcaaatgttggatagatatacatgttaggatatcttattgactattgcattagctcatgtacttgaaaaaacaggacgttcatctagatcttatgtcccatggcatacttgcccctgggtttgtgatgaagctgtagggcttgcgctaatttcttagtcgatacaagtggactgtaatgtgaatttaaaaagatatatgtctgcacacgagagagttttttagactagcaacaaagtaatatttgatggttgtggggcagaaccggtgccgaaggctcccacatgagtgaggtctgagcaagagataaatag

SEQ ID NO: 55676 - DNA, 1325 bp, Zea Mays
tcggcctattccaccggtcgtcgcctttttgctgctgcgcgacgccgacgcggccgtgcgagtgcggcgcagcgacggtcgagccaagctcactactccaaattcgtgtcgtagtcgtaggaggaatgtgggagagaatacaggggagaagccgagagccgaacgaagagaccgagcccccgccgcccgcggcgtctgttcctttcgtgccgcttcgtggtggcgccgtggcgcccaccaccacctcacctctcagtctctcaccacctatagcaataccacgagtccacgatccatggaatagactagactacaccgctcggccggtgacgacgacggcgacagccgacagtctatccccaactacgctctgcaccagcgccttatccgccgcctggggtttgttctggcgcggtggcagttgataaaggcgggagggattagagcaaggagagggatcggcgatgagcttcgcggatctggaggcgggggctctcagggcgcccctcgggaggaaagcgagaggggggccaaacgacgcgagagcgctcgtcttccagataaccaccgcggtggcctcgtaccgccgcctcctcaactcgctcggcacgcccaaggacaccatcacgcttcgtgataacctgcataagactagtcagaacatccttcaattagcaaaggatgcgaaagataagctccaaaaggctgctgaagcagacaagagcactgatacaagtgcagacaagaggatagctgatatgaagcttgccaaagattttgctgccacaatggaggagttcaggaaacttcagagtcttgcgattcagagggagacggcatataagccagttgttccacagaatacgcagtcaaactattctacagatgagcgaagttccgaatctggtaatatgcctgagcagcgtgcattactcgctgaatcaatgaggtcagtattgagctattagctggcgatcaggtggaagctcagctgaagctctgtagtgcattaggcaaatgttggatagatatacatgttaggatatcttattgactattgcattagctcatgtacttgaaaaaacaggacgttcatctagatcttatgtcccatggcatacttgcccctgggtttgtgatgaagctgtagggcttgcgctaatttcttagtcgatacaagtggactgtaatgtgaatttaaaaagatatatgtctgcacacgagagagttttttagactagcaacaaagtaatatttgatggttgtggggcagaaccggtgccgaaggctcccacatgagtgaggtctgagcaagagataaatag

SEQ ID NO: 55677 - DNA, 1583 bp, Zea Mays
tcggcctattccaccggtcgtcgcctttttgctgctgcgcgacgccgacgcggccgtgcgagtgcggcgcagcgacggtcgagccaagctcactactccaaattcgtgtcgtagtcgtaggaggaatgtgggagagaatacaggggagaagccgagagccgaacgaagagaccgagcccccgccgcccgcggcgtctgttcctttcgtgccgcttcgtggtggcgccgtggcgcccaccaccacctcacctctcagtctctcaccacctatagcaataccacgagtccacgatccatggaatagactagactacaccgctcggccggtgacgacgacggcgacagccgacagtctatccccaactacgctctgcaccagcgccttatccgccgcctggggtttgttctggcgcggtggcagttgataaaggcgggagggattagagcaaggagagggatcggcgatgagcttcgcggatctggaggcgggggctctcagggcgcccctcgggaggaaagcgagaggggggccaaacgacgcgagagcgctcgtcttccagataaccaccgcggtggcctcgtaccgccgcctcctcaactcgctcggcacgcccaaggacaccatcacgcttcgtgataacctgtctctcctcgagccctcttatgctttacatatctagcgatcagcgtaaacccttgcgtaaatttgctagcttgagtactagtaagccttgcccaattcaagtttggagccttttttactttcaagtctggagcaattagtctgctcttagatcgataggatcgctaaatcatgtcttaaacaacatgttgcttttttttgctcactcatgtcgctttcttagttgccttacgatctagtgctttgtttccctcgcaggcataagactagtcagaacatccttcaattagcaaaggatgcgaaagataagctccaaaaggctgctgaagcagacaagagcactgatacaagtgcagacaagaggatagctgatatgaagcttgccaaagattttgctgccacaatggaggagttcaggaaacttcagagtcttgcgattcagagggagacggcatataagccagttgttccacagaatacgcagtcaaactattctacagatgagcgaagttccgaatctggtaatatgcctgagcagcgtgcattactcgctgaatcaatgaggtcagtattgagctattagctggcgatcaggtggaagctcagctgaagctctgtagtgcattaggcaaatgttggatagatatacatgttaggatatcttattgactattgcattagctcatgtacttgaaaaaacaggacgttcatctagatcttatgtcccatggcatacttgcccctgggtttgtgatgaagctgtagggcttgcgctaatttcttagtcgatacaagtggactgtaatgtgaatttaaaaagatatatgtctgcacacgagagagttttttagactagcaacaaagtaatatttgatggttgtggggcagaaccggtgccgaaggctcccacatgagtgaggtctgagcaagagataaatag

SEQ ID NO: 55678 - DNA, 1893 bp, Zea Mays
tcggcctattccaccggtcgtcgcctttttgctgctgcgcgacgccgacgcggccgtgcgagtgcggcgcagcgacggtcgagccaagctcactactccaaattcgtgtcgtagtcgtaggaggaatgtgggagagaatacaggggagaagccgagagccgaacgaagagaccgagcccccgccgcccgcggcgtctgttcctttcgtgccgcttcgtggtggcgccgtggcgcccaccaccacctcacctctcagtctctcaccacctatagcaataccacgagtccacgatccatggaatagactagactacaccgctcggccggtgacgacgacggcgacagccgacagtctatccccaactacgctctgcaccagcgccttatccgccgcctggggtttgttctggcgcggtggcagttgataaaggcgggagggattagagcaaggagagggatcggcgatgagcttcgcggatctggaggcgggggctctcagggcgcccctcgggaggaaagcgagaggggggccaaacgacgcgagagcgctcgtcttccagataaccaccgcggtggcctcgtaccgccgcctcctcaactcgctcggcacgcccaaggacaccatcacgcttcgtgataacctgcataagactagtcagaacatccttcaattagcaaaggatgcgaaagataagctccaaaaggctgctgaagcagacaagagcactgatacaagtgcagacaagaggatagctgatatgaagcttgccaaagattttgctgccacaatggaggagttcaggaaacttcagagtcttgcgattcagagggagacggcatataagccagttgttccacagaatacgcagtcaaagtaaccctgttcacgattaaaccaatccatagtgaaattcttcttatgtattccattttttctgtaccatggaaatgctttagtttgtcacttatgtttacagattacattagatacacaagatactcataacatgtgaagttgagctatatgaattgctgctaatataaaactttgcacacaattgttcaaaacggtaaggttaaagtgcagttatgtaagtgaaccatgatgactaagctagtccacacaggatactaaacactattcatccatgacttggatatgttagaatgtaaaacaacttgatgtatggagaaagtcatcagtagtcagtgtatggttttttgcagatagctataaacagatgcatagtctttgacatgtttttattctgtacgtatcatggccctatttttgaccgaataccttggtcctactgttaacttgtaatttgcttggcctttacttagtgtaatataaacttaagggttttaattgtgctgttttgactttgactgggctgtcttctaatcttctggatgttattgtggttgttgtgatgcagctattctacagatgagcgaagttccgaatctggtaatatgcctgagcagcgtgcattactcgctgaatcaatgaggtcagtattgagctattagctggcgatcaggtggaagctcagctgaagctctgtagtgcattaggcaaatgttggatagatatacatgttaggatatcttattgactattgcattagctcatgtacttgaaaaaacaggacgttcatctagatcttatgtcccatggcatacttgcccctgggtttgtgatgaagctgtagggcttgcgctaatttcttagtcgatacaagtggactgtaatgtgaatttaaaaagatatatgtctgcacacgagagagttttttagactagcaacaaagtaatatttgatggttgtggggcagaaccggtgccgaaggctcccacatgagtgaggtctgagcaagagataaatag

SEQ ID NO: 55679 - DNA, 1630 bp, Zea Mays
tcggcctattccaccggtcgtcgcctttttgctgctgcgcgacgccgacgcggccgtgcgagtgcggcgcagcgacggtcgagccaagctcactactccaaattcgtgtcgtagtcgtaggaggaatgtgggagagaatacaggggagaagccgagagccgaacgaagagaccgagcccccgccgcccgcggcgtctgttcctttcgtgccgcttcgtggtggcgccgtggcgcccaccaccacctcacctctcagtctctcaccacctatagcaataccacgagtccacgatccatggaatagactagactacaccgctcggccggtgacgacgacggcgacagccgacagtctatccccaactacgctctgcaccagcgccttatccgccgcctggggtttgttctggcgcggtggcagttgataaaggcgggagggattagagcaaggagagggatcggcgatgagcttcgcggatctggaggcgggggctctcagggcgcccctcgggaggaaagcgagaggggggccaaacgacgcgagagcgctcgtcttccagataaccaccgcggtggcctcgtaccgccgcctcctcaactcgctcggcacgcccaaggacaccatcacgcttcgtgataacctgtctctcctcgagccctcttatgctttacatatctagcgatcagcgtaaacccttgcgtaaatttgctagcttgagtactagtaagccttgcccaattcaagtttggagccttttttactttcaagtctggagcaattagtctgctcttagatcgataggatcgctaaatcatgtcttaaacaacatgttgcttttttttgctcactcatgtcgctttcttagttgccttacgatctagtgctttgtttccctcgcaggcataagactagtcagaacatccttcaattagcaaaggatgcgaaagataagctccaaaaggctgctgaagcagacaagagcactgatacaagtgcagacaagaggatagctgatatgaagcttgccaaagattttgctgccacaatggaggagttcaggaaacttcagagtcttgcgattcagagggagacggcatataagccagttgttccacagaatacgcagtcaaagtaaccctgttcacgattaaaccaatccatagtgaaattcttcttatctattctacagatgagcgaagttccgaatctggtaatatgcctgagcagcgtgcattactcgctgaatcaatgaggtcagtattgagctattagctggcgatcaggtggaagctcagctgaagctctgtagtgcattaggcaaatgttggatagatatacatgttaggatatcttattgactattgcattagctcatgtacttgaaaaaacaggacgttcatctagatcttatgtcccatggcatacttgcccctgggtttgtgatgaagctgtagggcttgcgctaatttcttagtcgatacaagtggactgtaatgtgaatttaaaaagatatatgtctgcacacgagagagttttttagactagcaacaaagtaatatttgatggttgtggggcagaaccggtgccgaaggctcccacatgagtgaggtctgagcaagagataaatag

SEQ ID NO: 55680 - DNA, 2151 bp, Zea Mays
tcggcctattccaccggtcgtcgcctttttgctgctgcgcgacgccgacgcggccgtgcgagtgcggcgcagcgacggtcgagccaagctcactactccaaattcgtgtcgtagtcgtaggaggaatgtgggagagaatacaggggagaagccgagagccgaacgaagagaccgagcccccgccgcccgcggcgtctgttcctttcgtgccgcttcgtggtggcgccgtggcgcccaccaccacctcacctctcagtctctcaccacctatagcaataccacgagtccacgatccatggaatagactagactacaccgctcggccggtgacgacgacggcgacagccgacagtctatccccaactacgctctgcaccagcgccttatccgccgcctggggtttgttctggcgcggtggcagttgataaaggcgggagggattagagcaaggagagggatcggcgatgagcttcgcggatctggaggcgggggctctcagggcgcccctcgggaggaaagcgagaggggggccaaacgacgcgagagcgctcgtcttccagataaccaccgcggtggcctcgtaccgccgcctcctcaactcgctcggcacgcccaaggacaccatcacgcttcgtgataacctgtctctcctcgagccctcttatgctttacatatctagcgatcagcgtaaacccttgcgtaaatttgctagcttgagtactagtaagccttgcccaattcaagtttggagccttttttactttcaagtctggagcaattagtctgctcttagatcgataggatcgctaaatcatgtcttaaacaacatgttgcttttttttgctcactcatgtcgctttcttagttgccttacgatctagtgctttgtttccctcgcaggcataagactagtcagaacatccttcaattagcaaaggatgcgaaagataagctccaaaaggctgctgaagcagacaagagcactgatacaagtgcagacaagaggatagctgatatgaagcttgccaaagattttgctgccacaatggaggagttcaggaaacttcagagtcttgcgattcagagggagacggcatataagccagttgttccacagaatacgcagtcaaagtaaccctgttcacgattaaaccaatccatagtgaaattcttcttatgtattccattttttctgtaccatggaaatgctttagtttgtcacttatgtttacagattacattagatacacaagatactcataacatgtgaagttgagctatatgaattgctgctaatataaaactttgcacacaattgttcaaaacggtaaggttaaagtgcagttatgtaagtgaaccatgatgactaagctagtccacacaggatactaaacactattcatccatgacttggatatgttagaatgtaaaacaacttgatgtatggagaaagtcatcagtagtcagtgtatggttttttgcagatagctataaacagatgcatagtctttgacatgtttttattctgtacgtatcatggccctatttttgaccgaataccttggtcctactgttaacttgtaatttgcttggcctttacttagtgtaatataaacttaagggttttaattgtgctgttttgactttgactgggctgtcttctaatcttctggatgttattgtggttgttgtgatgcagctattctacagatgagcgaagttccgaatctggtaatatgcctgagcagcgtgcattactcgctgaatcaatgaggtcagtattgagctattagctggcgatcaggtggaagctcagctgaagctctgtagtgcattaggcaaatgttggatagatatacatgttaggatatcttattgactattgcattagctcatgtacttgaaaaaacaggacgttcatctagatcttatgtcccatggcatacttgcccctgggtttgtgatgaagctgtagggcttgcgctaatttcttagtcgatacaagtggactgtaatgtgaatttaaaaagatatatgtctgcacacgagagagttttttagactagcaacaaagtaatatttgatggttgtggggcagaaccggtgccgaaggctcccacatgagtgaggtctgagcaagagataaatag

SEQ ID NO: 55681 - DNA, 393 bp, Zea Mays
  misc_feature (392)..(393): n is a, c, g, or t
ttttacgcgtaaccatctctttgctttatttgatcggggtacttacagggttacaaaaatcacaccaagcgaacttccgaaatccaaagaagcaaaagaacatcagtgttcactcaaggcaagccatgaaaaaaaggactcacacatgacatgacatggcaaagagaaccgctcactcacaagccatgaaatgtaaaggggggggggggggcttctaaaatccgttggtgacattttttttggcacacgatatgatggttagataagaaccacgaacaatcttcaattctgaactccgcggaatagctctgtaagagaaaaggttgcatgtctcaagctgccaaaactataatcacaacgagcagcacgaccccaaatatgaccataagcann

SEQ ID NO: 55682 - DNA, 2661 bp, Zea Mays
ccaccccaacaccccatctcatctcttgctcctcgtccgtagttgcagttgcagtgtcctcggccgcctctagtcctagccgtttactccttcctttcaccgcatcaagcagagagcaagcgaggcaagagccatgggcgcctttctgctcttcgtctgtctcctggcgccggtcgtcgtgctcgcctgcgccgtccgcggcaggaagcggcgggcgtcctccgcggcggcgggcggcaaggcgctgccgctgccgcccgggtcgatggggtggccgtacgtgggcgagacgttccagctctactcgtccaagaaccccaacgtgttcttcgcccggaagcagaaccggtacgggccaatcttcaagacgcacatcctgggctgcccctgcgtgatggtgtccagcccggaggcggcgcgcttcgtgctcgtcacgcaggcccacctcttcaagcccaccttcccggcgagcaaggagcgcatgctggggccgcaggccatcttcttccagcagggcgactaccacgcccacctccgccgcctcgtctcccgggctttctcccccgaggccatccgcggctccgtgccggccatcgaggccatcgcgctgcgctcgctcgagtcctgggacggccgcctcgtcaacaccttccaagagatgaagctgtacgcgctgaatgtggcattgctgtccatcttcggcgaggaagagatgcggtacatagaggagctgaagcagtgctacctgaccctggagaaggggtacaactcgatgcccgtgaacctgccgggcaccctgttccacaaggccatgaaggcccgcaagcgcctgggcgccgtcgtggcccacatcatcgaggcccggcgcgagggcgagcggcagcgcgggagcgacctcctggcctccttcctggacgaccgcgaggcgctcaccgacgcccagatcgccgacaacgtgatcggcgtcatcttcgccgcccgcgacaccaccgccagcgtgctcacctggatggtcaagttcctcggcgaccaccccgccgtcctcaaggccgtcatcgaggagcagcaggagatcgcgcggtccaaaggctcctccggcgagcccctgacgtgggcggacaccaggcggatgcgcacgacgagccgtgtgatccaggagacgatgcgggtggcgtccatcctgtccttcaccttccgggaggccgtggaggacgtggagtaccaaggtgaggcgtcaatcatactcatgcggtcatgcccctcgctgtcaaaaaaaaaaaaaaaaactcccgccaccgtttcacgttggattggaggcgggggcagtctgtccctgtcgtgcgctgctgcggatgaactggacggacgggacgcgttcctaaccgaaatgaatagacagactgactcatccgctgtgtgctggctgcagggtacctgatccccaagggctggaaggtgatgcccctgttccggaacatccaccacagccccgaccacttcccctgcccggagaagttcgacccctcccgattcgaggttgctcccaagcccaacacgttcctgccgttcggcaacgggacccactcgtgcccgggcaacgagctcgccaagctggagatgctcgtgctcttccaccacctcgccaccaagtacaggtggtccacctccaagtccgagagcggcgtgcagttcggccccttcgcgctgccgctcaacggcctgcccatgaccttcgtccgcaaggactgatgagccgccgacagatgtgtggatcgtggacggagccacaccaaaaccacggcaggccgacggaaccaaaccaaagccaacaacaaacaggcggatggatatggtatggcggtatatgctagctagtactactataggagccgcgaaaaccgcttccgggatttggcgttgcggcggtcgccatcggacgggacggggacaggcatcaggcaagcatgggatgatcacagaggaaagaaaaaaaaagataacggtgtacagattcttcttcagctagtaggaccggatcccaagaagccggaagaggagaccaaacacaaaattaggcctagccacgttggtgtcactcggtgtaagctactccagtaggcatcagatggcccagcgccacaaagaagtggcgcttagttgtaaaaccaaaccccccttttttctccatcgtcttctttttcttccccccttttcagattttttataagctataagctagccagacaacacctgtaggagaagaataagggaaaccataaaagaaagagagggaggccctgattgggattgtaagctagctaggttgtccgcctgaaagcaggctggcagctaggcacaataatccatggacggatggatggattggatgggtcgccggagtcaaaaggaggccacgtcgtcttccccgcaggcgcagccaaggactacggcccgggacggcgaccccgccttgtatttgtttcgtgatttcgtccaatgcaaaaaagacagtgactgctttcacagcaccaactgcccgtattactaatttaattctctaaagtgcgtctgcgtctgtgttgcgttgcatatttgcattgctcgcctactcatctccgacgactaaggctgtccgtccttgggttctcccgctaatttgac

SEQ ID NO: 55683 - DNA, 2440 bp, Zea Mays
gatttgtttgctttaatttttttttcctttacacatgcctttttcaacatataaaatgtagcactccaaaatgtctccgagtcccaaaatatatatgcgctttctgcagcgtattttcacgacaaggatgaaccacaatatctatctatctatgaatagtatcttccacttcctagatcctcaggtgctaaggctatatatagtcacatatatatgccacatcagaagcgcttctttctatcacacaaatttgatcgtcccggagggttcactacatctctcctgcggcctctgctgctgcacacaactccagctacaggaagaagaagaagaacgccccgtctccgccgccgtcggccgccgcaactgacaccgttgtcatctcccctcctgccactgacaatgttcagtccactgctccgaagcaggccggccgacaggagcttgaagagctcgtggccgccaagactaacacttcaagaattgctactgcaagaacaagtgcgtcgagccagtctcgggctaagcttcgccgccggcctgccccggcaatcacgtccctgccgatggcgttctgcagcgcgttggaggaggcgatcaacacgttcgtcgacccgccggtgctgcgaccgtccgtggacccgcggaacgtgctgtcgaccaacttcgcgccagtggacgagctgccgccgacgccctgccccgtcgtgcgcggcgcaatcccgcgctgcctcgccggaggggcctacatccggaacgggcccaacccccagcacctcccgcgtgggccgcaccacctcttcgacggcgacggcatgctgcactcgctcctcctcccgacggcggagtcgccgtcgtcggaccccgtcctgtgctcgcgctacgtgcagacgtacaagtacctcgtggagcgcgacgcaggagcgccggtcatgccgaacgtcttctccggattccacggcgtggctgggctggcgcgcggcgccgtcgtggcggccagagtactcactgggcagatgaacccagccgagggcgtggggctcgctaacaccagcctcgtcttcttcggcggccgcctctacgcgcttggcgagtcggatctcccgtacaccgtgcgtgtcgacccggccaccggcgaggtgaccacgcacggccggtgcgacttcggcggccgtctcttcatgggcatgaccgctcacccgaagaaagaccccgtcactggcgaggtcttcgcgttccgtgcggcagccgtcgttcctgcatgacttcgccgtcacggagaggtacgctatcttcccggagatacagatcgtcatgcagcccatgggcatggtgacgggcggcgcgcccgttgggtctgacgccggcaaggtaccccggctcggcgtgctccccaagtacgccacggacgagtcggagatgcggtggttcgaggtgccggggttcaacataatgcactcgctgaacgcgtgggaggaggccgacggcgaggagctagtgctggtggcgcccaacgtcctgtccctggagcacgcgctggagcgcatggagctcgtgcactcctgtgtcgagaaggtgcgcatcaacctgcgcacgggtgccgtgtcgcgcacccctctctcggcagagaacctcgacttcggcgtaatccatccgggataccttggccggcgcaaccggtacgggtacctcggcatcggcgaccccatgccgaagatcgccggggtggccaagctggacttggaccgcgccggcacgggcgactgcacggtggcgcggcgcgtcttcgggcccgggtgcttcgcgggggagccgttcttcgtccccgacgacgtggaggggaatagcaacgaggacgacggctacttggtgtgctacgtccacaacgagcggaccggcgagaaccagttcgtggtgatggacgccaggtcggcgcagctggacatcgtcgccgaggtgcagctgcccgcgcgcgtcccctacggcttccacggcatctttatcacgcaggccgagctccaggcgcagcagcaatgatcaaagcacaggaatccaatccaagagaaacacgccgctggatactgaatagattgtagcaagaacaactctaggccacatagcattcacgaatacgaactatcttatattgcaaatgtagcagaacccaaagaaagggttcatgagtaaaaagtatatgaaatcacaaagattttatgggtccaccactgccattgtcggctgtgcacggtgcagtctggacaacaacctcataacgcaaccgacgaggcgttcgacatactccctctttgccaaaataccgtattttgagattttatttttgatctaatagcgtccgttgacctaagagccacatttctatccattattaaaaaaaatagaaacatggtgcaaaatgtggacaatattatacaagccgcag

SEQ ID NO: 55684 - DNA, 1916 bp, Zea Mays
ctggttttcggtggggacgaggcggcggtccagctggatcgtcggaggcggagttggggcttcctctcgtacgcgtgatggagctggtcggagttttggtcaaatttttgcaacggagctggacgtgtccacgctgatgccagcgaggtgcagccgtctttgattcccctcctgtagctgcatcctcatgccgaccatcacgcactacgtgctggatcccttcctcgagacagggtcgcctgcgcaggccgagaaagccacgcccaagccgccgccctcgcctccagacaaggccacacctgtaccggtggctcctattagggcacagacgtcgccggcatcactctatgccacgcctgagagcaccaccttgcccgactcaccttcctcgttccccgggacctggtcgccgtacattatcaaccataagaggcggggggcctcccttgccaagaccgttcctcagggtgacgttggaagtgagggcagccagccaaagctcccagtgatactgcctgctctgcctaaagggggtgaacccactgcagtggaggagcctgagtttgcgtttcagcaatcagggaatgatcaagctgaaggtgacagtggtgtggacgaggcccccatcaatgggaaaaatgaaatgctgctgaagggcaagggacctgtgacagccaaaaatgagcacgagcagcctgagtttgagtttcaccgtggaaatcttgaagcactagtgaggcctgttaatgttggaaggcctttgattggcggagcacccaaaaatgatgagagtgacaccttccttgaacttcaggattccatgagtgtggctagcaatactgaaactgatgatgctggcacccaagagtggtggtggaaaccgagttcccctcttgggatctctgttggcacaccctgtgctgaattctatgatgcatttgaagaaatatcaagtgatggtggaactcgatcttcacgggccatggatgatgacctccgtgaaatgaggttaagcctgttgaccgaaattgagaggaggaagcaagcagaagaaacacttgagatatggcagaaggaatggaagaagctgagtcaccacctatcacatgttgccttatcacttccatctccaagtatagctgaggatactgatgattcaagcgtcgatcctggtgctgagttgtgccagcaaataactgtttcacaacttgtagctgctgctatttcccaggattttgctcgtgctgaagttgcttcagagatggaagccgtgattgccacaaagaacttcgagattgcaaggctgtcggatagggtccagtactatgaagctgcaaacagggaaatgtcccaaagaaaccaagaagctatcgagacgtcaaggcaacaacgcaaggagcgtaagaagcgacagaagtggttctggggttcagttgggcttgcagtcacccttggtgccacggccattgcctggtcttatctaccttcatcgcagccccgagctagtgcagattcaaatagtaccgtcagtgactagagctaggatgaagatactccctccgtttctttttatttgtcgctggatagtgtaaaattgcactatccagcgacaaataaaaagaaacggagggagtatctcatttcagaagcctaacaaacctctaactatactcctagaggagaaaaaaaaaacgttgtataagttctcttttggtgatcgtccatgatcgctacaatcttcatttgctgctttgtatgtaaaaatgttgggtgggccatctccgtcaggattggctccattccaatcaccgtaaatctctgcatagatgattcatggttgagcaaataatacaaagggatgtggatatggttagtaatccatgcccaccgaccccactcgaggagttgattttgcc

SEQ ID NO: 55685 - DNA, 1814 bp, Zea Mays
gtcgtccttcggcgtcggtgccgggtccacgctgatgccagcgaggtgcagccgtctttgattcccctcctgtagctgcatcctcatgccgaccatcacgcactacgtgctggatcccttcctcgagacagggtcgcctgcgcaggccgagaaagccacgcccaagccgccgccctcgcctccagacaaggccacacctgtaccggtggctcctattagggcacagacgtcgccggcatcactctatgccacgcctgagagcaccaccttgcccgactcaccttcctcgttccccgggacctggtcgccgtacattatcaaccataagaggcggggggcctcccttgccaagaccgttcctcagggtgacgttggaagtgagggcagccagccaaagctcccagtgatactgcctgctctgcctaaagggggtgaacccactgcagtggaggagcctgagtttgcgtttcagcaatcagggaatgatcaagctgaaggtgacagtggtgtggacgaggcccccatcaatgggaaaaatgaaatgctgctgaagggcaagggacctgtgacagccaaaaatgagcacgagcagcctgagtttgagtttcaccgtggaaatcttgaagcactagtgaggcctgttaatgttggaaggcctttgattggcggagcacccaaaaatgatgagagtgacaccttccttgaacttcaggattccatgagtgtggctagcaatactgaaactgatgatgctggcacccaagagtggtggtggaaaccgagttcccctcttgggatctctgttggcacaccctgtgctgaattctatgatgcatttgaagaaatatcaagtgatggtggaactcgatcttcacgggccatggatgatgacctccgtgaaatgaggttaagcctgttgaccgaaattgagaggaggaagcaagcagaagaaacacttgagatatggcagaaggaatggaagaagctgagtcaccacctatcacatgttgccttatcacttccatctccaagtatagctgaggatactgatgattcaagcgtcgatcctggtgctgagttgtgccagcaaataactgtttcacaacttgtagctgctgctatttcccaggattttgctcgtgctgaagttgcttcagagatggaagccgtgattgccacaaagaacttcgagattgcaaggctgtcggatagggtccagtactatgaagctgcaaacagggaaatgtcccaaagaaaccaagaagctatcgagacgtcaaggcaacaacgcaaggagcgtaagaagcgacagaagtggttctggggttcagttgggcttgcagtcacccttggtgccacggccattgcctggtcttatctaccttcatcgcagccccgagctagtgcagattcaaatagtaccgtcagtgactagagctaggatgaagatactccctccgtttctttttatttgtcgctggatagtgtaaaattgcactatccagcgacaaataaaaagaaacggagggagtatctcatttcagaagcctaacaaacctctaactatactcctagaggagaaaaaaaaaacgttgtataagttctcttttggtgatcgtccatgatcgctacaatcttcatttgctgctttgtatgtaaaaatgttgggtgggccatctccgtcaggattggctccattccaatcaccgtaaatctctgcatagatgattcatggttgagcaaataatacaaagggatgtggatatggttagtaatccatgcccaccgaccccactcgaggagttgattttgcc

SEQ ID NO: 55686 - DNA, 1991 bp, Zea Mays
aaaaatcgcgcaccttcccctcccctacccctcgtctgcccctgttacctcgcgcggttggctgcgccagcgaggctcgtatcgccctcctcctcggctcctcgcgccgcttacttctattctattttgcccggtcccataaattcgaatccaaacgcgcgaccatcgccgctgcggccgtgggaaaggaaacacagaaaaaggacaacgccgtcgtctcttcctcgcaccagcctcccgctagggtttcccctcttctcggtggaggcgccgcgcctccgggacctggatcctatcaggtccacgctgatgccagcgaggtgcagccgtctttgattcccctcctgtagctgcatcctcatgccgaccatcacgcactacgtgctggatcccttcctcgagacagggtcgcctgcgcaggccgagaaagccacgcccaagccgccgccctcgcctccagacaaggccacacctgtaccggtggctcctattagggcacagacgtcgccggcatcactctatgccacgcctgagagcaccaccttgcccgactcaccttcctcgttccccgggacctggtcgccgtacattatcaaccataagaggcggggggcctcccttgccaagaccgttcctcagggtgacgttggaagtgagggcagccagccaaagctcccagtgatactgcctgctctgcctaaagggggtgaacccactgcagtggaggagcctgagtttgcgtttcagcaatcagggaatgatcaagctgaaggtgacagtggtgtggacgaggcccccatcaatgggaaaaatgaaatgctgctgaagggcaagggacctgtgacagccaaaaatgagcacgagcagcctgagtttgagtttcaccgtggaaatcttgaagcactagtgaggcctgttaatgttggaaggcctttgattggcggagcacccaaaaatgatgagagtgacaccttccttgaacttcaggattccatgagtgtggctagcaatactgaaactgatgatgctggcacccaagagtggtggtggaaaccgagttcccctcttgggatctctgttggcacaccctgtgctgaattctatgatgcatttgaagaaatatcaagtgatggtggaactcgatcttcacgggccatggatgatgacctccgtgaaatgaggttaagcctgttgaccgaaattgagaggaggaagcaagcagaagaaacacttgagatatggcagaaggaatggaagaagctgagtcaccacctatcacatgttgccttatcacttccatctccaagattttgctcgtgctgaagttgcttcagagatggaagccgtgattgccacaaagaacttcgagattgcaaggctgtcggatagggtccagtactatgaagctgcaaacagggaaatgtcccaaagaaaccaagaagctatcgagacgtcaaggcaacaacgcaaggagcgtaagaagcgacagaagtggttctggggttcagttgggcttgcagtcacccttggtgccacggccattgcctggtcttatctaccttcatcgcagccccgagctagtgcagattcaaatagtaccgtcagtgactagagctaggatgaagatactccctccgtttctttttatttgtcgctggatagtgtaaaattgcactatccagcgacaaataaaaagaaacggagggagtatctcatttcagaagcctaacaaacctctaactatactcctagaggagaaaaaaaaaacgttgtataagttctcttttggtgatcgtccatgatcgctacaatcttcatttgctgctttgtatgtaaaaatgttgggtgggccatctccgtcaggattggctccattccaatcaccgtaaatctctgcatagatgattcatggttgagcaaataatacaaagggatgtggatatggttagtaatccatgcccaccgaccccactcgaggagttgattttgcc

SEQ ID NO: 55687 - DNA, 1582 bp, Zea Mays
aaaaatcgcgcaccttcccctcccctacccctcgtctgcccctgttacctcgcgcggttggctgcgccagcgaggctcgtatcgccctcctcctcggctcctcgcgccgcttacttctattctattttgcccggtcccataaattcgaatccaaacgcgcgaccatcgccgctgcggccgtgggaaaggaaacacagaaaaaggacaacgccgtcgtctcttcctcgcaccagcctcccgctagggtttcccctcttctcggtggaggcgccgcgcctccgggacctggatcctatcaggtccacgctgatgccagcgaggtgcagccgtctttgattcccctcctgtagctgcatcctcatgccgaccatcacgcactacgtgctggatcccttcctcgagacagggtcgcctgcgcaggccgagaaagccacgcccaagccgccgccctcgcctccagacaaggccacacctgtaccggtggctcctattagggcacagacgtcgccggcatcactctatgccacgcctgagagcaccaccttgcccgactcaccttcctcgttccccgggacctggtcgccgtacattatcaaccataagaggcggggggcctcccttgccaagaccgttcctcagggtgacgttggaagtgagggcagccagccaaagctcccagtgatactgcctgctctgcctaaagggggtgaacccactgcagtggaggagcctgagtttgcgtttcagcaatcagggaatgatcaagctgaaggtgacagtggtgtggacgaggcccccatcaatgggaaaaatgaaatgctgctgaagggcaagggacctgtgacagccaaaaatgagcacgagcagcctgagtttgagtttcaccgtggaaatcttgaagcactagtgaggcctgttaatgttggaaggcctttgattggcggagcacccaaaaatgatgagagtgacaccttccttgaacttcaggattccatgagtgtggctagcaatactgaaactgatgatgctggcacccaagagtggtggtggaaaccgagttcccctcttgggatctctgttggcacaccctgtgctgaattctatgatgcatttgaagaaatatcaagtgatggtggaactcgatcttcacgggccatggatgatgacctccgtgaaatgaggttaagcctgttgaccgaaattgagaggaggaagcaagcagaagaaacacttgagatatggcagaaggaatggaagaagctgagtcaccacctatcacatgttgccttatcacttccatctccaagtatagctgaggatactgatgattcaagcgtcgatcctggtgctgagttgtgccagcaaataactgtttcacaacttgtagctgctgctatttcccaggattttgctcgtgctgaagttgcttcagagatggaagccgtgattgccacaaagaacttcgagattgcaaggctgtcggatagggtccagtactatgaagctgcaaacagggaaatgtcccaaagaaaccaagaagctatcgggcgcgctccagcctccaggccgccgctgctccaac

SEQ ID NO: 55688 - DNA, 1029 bp, Zea Mays
aagcaggcaatacagatcaaaagcgatccttgttctggaaataagggaattgtgtcatcgtgggtagtgggtacagccatggctggacctgctgttctcaatgagcgtatcctttcttccatgtcccagaaacatgttgctgctcacccatggcatgatttggagataggaccaggggctcctgaattcttcaattgtgtggttgagattcctagaggcagcaaggttaagtacgagttggacaaggcatctggtctgatcaaggtggaccgtgttctttattcctctgttgtttacccacataactatggcttcattccacgcacactctgtgaggataacgaccccctggatgtcctcatactgatgcaggaacaagttgtccctgggtgtttcctgcgagctcgtgctattgggctcatgcctatgatcgatcagggcgagaaagatgataagattatagcagtctgtgctgatgaccctgaattccgtcactacacggacatcacggacctcccaccgcatcgccttcaagagatccgccgcttttttgaagattataaaaagaatgaaaacaaagaggtcgcagtgaatgagttcctgccagcgaaagatgccatcaacgcaatcaagtactcgatggacctgtatggctcatacgtcatcgaaagcctgaggaagtgatctccagctgcttgattgtggttgtggatgctacaccattttctcaacagctcatccagagtaccgtagtacagacttaacacgaacgaactgtaatcgtgaccaagggatgctattaccttctgctcatgttgaaacaatcagcagtgcctttctttccattatatgccatgtcgaatcaaggcaacttggccctgaaatctttgtggtcaagttaaaccagcactttgacagaacaaggattgctggatgcctggattactgttacataaatgaccattactgaacttcatttcttgctcttatcttttggtgagatgcccagttctcatccgatgcataact

SEQ ID NO: 55689 - DNA, 984 bp, Zea Mays
aaaatgtggtgctggaactgttcagggctagccatggctggacctgctgttctcaatgagcgtatcctttcttccatgtcccagaaacatgttgctgctcacccatggcatgatttggagataggaccaggggctcctgaattcttcaattgtgtggttgagattcctagaggcagcaaggttaagtacgagttggacaaggcatctggtctgatcaaggtggaccgtgttctttattcctctgttgtttacccacataactatggcttcattccacgcacactctgtgaggataacgaccccctggatgtcctcatactgatgcaggaacaagttgtccctgggtgtttcctgcgagctcgtgctattgggctcatgcctatgatcgatcagggcgagaaagatgataagattatagcagtctgtgctgatgaccctgaattccgtcactacacggacatcacggacctcccaccgcatcgccttcaagagatccgccgcttttttgaagattataaaaagaatgaaaacaaagaggtcgcagtgaatgagttcctgccagcgaaagatgccatcaacgcaatcaagtactcgatggacctgtatggctcatacgtcatcgaaagcctgaggaagtgatctccagctgcttgattgtggttgtggatgctacaccattttctcaacagctcatccagagtaccgtagtacagacttaacacgaacgaactgtaatcgtgaccaagggatgctattaccttctgctcatgttgaaacaatcagcagtgcctttctttccattatatgccatgtcgaatcaaggcaacttggccctgaaatctttgtggtcaagttaaaccagcactttgacagaacaaggattgctggatgcctggattactgttacataaatgaccattactgaacttcatttcttgctcttatcttttggtgagatgcccagttctcatccgatgcataact

SEQ ID NO: 55690 - DNA, 990 bp, Zea Mays
gtttggtttcgtttgtgttctcctccttttcccggagccatggctggacctgctgttctcaatgagcgtatcctttcttccatgtcccagaaacatgttgctgctcacccatggcatgatttggagataggaccaggggctcctgaattcttcaattgtgtggttgagattcctagaggcagcaaggttaagtacgagttggacaaggcatctggtctgatcaaggtggaccgtgttctttattcctctgttgtttacccacataactatggcttcattccacgcacactctgtgaggataacgaccccctggatgtcctcatactgatgcaggaacaagttgtccctgggtgtttcctgcgagctcgtgctattgggctcatgcctatgatcgatcagggcgagaaagatgataagattatagcagtctgtgctgatgaccctgaattccgtcactacacggacatcacggacctcccaccgcatcgccttcaagagatccgccgcttttttgaagattataaaaagaatgaaaacaaagaggtcgcagtgaatgagttcctgccagcgaaagatgccatcaacgcaatcaagtactcgatggacctgtatggctcatacgtcatcgaaagcctgaggaagtgatctccagctgcttgattgtggttgtggatgctacaccattttctcaacagctcatccagagtaccgtagtacagacttaacacgaacgaactgtaatcgtgaccaagggatgctattaccttctgctcatgttgaaacaatcagcagtgcctttctttccattatatgccatgtcgaatcaaggcaacttggccctgaaatctttgtggtcaagttaaaccagcactttgacagaacaaggattgctggatgcctggattactgttacataaatgaccattactgaacttcatttcttgctcttatcttttggtgagatgcccagttctcatccgatgcataact

SEQ ID NO: 55691 - DNA, 979 bp, Zea Mays
ctttgcttggtgctggcgcttctttgccatggctggacctgctgttctcaatgagcgtatcctttcttccatgtcccagaaacatgttgctgctcacccatggcatgatttggagataggaccaggggctcctgaattcttcaattgtgtggttgagattcctagaggcagcaaggttaagtacgagttggacaaggcatctggtctgatcaaggtggaccgtgttctttattcctctgttgtttacccacataactatggcttcattccacgcacactctgtgaggataacgaccccctggatgtcctcatactgatgcaggaacaagttgtccctgggtgtttcctgcgagctcgtgctattgggctcatgcctatgatcgatcagggcgagaaagatgataagattatagcagtctgtgctgatgaccctgaattccgtcactacacggacatcacggacctcccaccgcatcgccttcaagagatccgccgcttttttgaagattataaaaagaatgaaaacaaagaggtcgcagtgaatgagttcctgccagcgaaagatgccatcaacgcaatcaagtactcgatggacctgtatggctcatacgtcatcgaaagcctgaggaagtgatctccagctgcttgattgtggttgtggatgctacaccattttctcaacagctcatccagagtaccgtagtacagacttaacacgaacgaactgtaatcgtgaccaagggatgctattaccttctgctcatgttgaaacaatcagcagtgcctttctttccattatatgccatgtcgaatcaaggcaacttggccctgaaatctttgtggtcaagttaaaccagcactttgacagaacaaggattgctggatgcctggattactgttacataaatgaccattactgaacttcatttcttgctcttatcttttggtgagatgcccagttctcatccgatgcataact

SEQ ID NO: 55692 - DNA, 988 bp, Zea Mays
ggcgaagggcccctcccggctcccgcttccctctgccatggctggacctgctgttctcaatgagcgtatcctttcttccatgtcccagaaacatgttgctgctcacccatggcatgatttggagataggaccaggggctcctgaattcttcaattgtgtggttgagattcctagaggcagcaaggttaagtacgagttggacaaggcatctggtctgatcaaggtggaccgtgttctttattcctctgttgtttacccacataactatggcttcattccacgcacactctgtgaggataacgaccccctggatgtcctcatactgatgcaggaacaagttgtccctgggtgtttcctgcgagctcgtgctattgggctcatgcctatgatcgatcagggcgagaaagatgataagattatagcagtctgtgctgatgaccctgaattccgtcactacacggacatcacggacctcccaccgcatcgccttcaagagatccgccgcttttttgaagattataaaaagaatgaaaacaaagaggtcgcagtgaatgagttcctgccagcgaaagatgccatcaacgcaatcaagtactcgatggacctgtatggctcatacgtcatcgaaagcctgaggaagtgatctccagctgcttgattgtggttgtggatgctacaccattttctcaacagctcatccagagtaccgtagtacagacttaacacgaacgaactgtaatcgtgaccaagggatgctattaccttctgctcatgttgaaacaatcagcagtgcctttctttccattatatgccatgtcgaatcaaggcaacttggccctgaaatctttgtggtcaagttaaaccagcactttgacagaacaaggattgctggatgcctggattactgttacataaatgaccattactgaacttcatttcttgctcttatcttttggtgagatgcccagttctcatccgatgcataact

SEQ ID NO: 55693 - DNA, 587 bp, Zea Mays
gacccgatgaaatgctgcagtgcatcctcgcgctccacgtgtccccagccgtcttgtcgtcgttgcgtcttctctggtgctccttctcacgctccgccttagcctgccaccattgtcgtctcgctcgctgctcgccaacgccctgccttgccgacggttgtaggctcctccgctcgctccaccgtctccaccacatcctcgcgatctggcaccgtgtcccttccggttccgatttcggctatgattcattatctcagtatcggtgtctccaagtgcctcttcatgatgttttgcatcgacgagtgtgacagatggctggaatggctagagtaggagatgttgttgttggagaattatggttttctttgctatatgacccaattattcacaattcgaacaaaatcattatgccagcttctacgtacgaatcacacagtatttgtcagtcttattcaattcaattttacagctggaacaataacaatgaacaatcttatgcaggtatcttcggactcaagtcggcatcacagtagaccagaataatacgaaggttggtacagcgccgaaggtgtgagcaagaaagcttc

SEQ ID NO: 55694 - DNA, 2815 bp, Zea Mays
cgatgaaatgctgcagtgcatcctcgcgctccacgtgtccccagccgtcttgtcgtcgttgcgtcttctctggtgctccttctcacgctccgccttagcctgccaccattgtcgtctcgctcgctgctcgccaacgccctgccttgccgacggttgtaggctcctccgctcgctccaccgtctccaccacatcctcgcgatctggcaccgtgtcccttccggttccgatttcggctatgattcattatctcagtatcggtgtctccaagtgcctcttcatgatgttttgcatcgacgagtgtgacagatggctggaatggctagagtaggagatgttgttgttggagaattatggttttctttgctatatgacccaattattcacaattcgaacaaaatcattatgccagcttctacgtacgaatcacacagtatttgtcagtcttattcaattcaattttacagctggaacaataacaatgaacaatcttatgcaggttacaaaacatcaaactccggctgatgcaacccacaacagttgatgaggaaattcaagtttgtcaatcgcctagcttcaaagacaagactgttgaagaactacttgatatagatccagacatattccctataaccactatgaaattctcttgtgttcgactaatttcatacatcaacaataagtttattctatttgcaatatcctttttttcttccactatacagccacaaggttacatatgcactatcactatctcactcctcgtacaagatagtggatggtggtttccatcttgcaccaagtgcaacaagtctttagctcagacctccactggataccgctacacaccatgcgactgggcagacattaaatttaggtagctctccacacaaacacttggtttatcatgcttcgtttggagaaaaaatatttttttatttcctacatacctaatcactgctataaagcactaacatttccaattcacagatacaaacttgacttcattggtaatgatggaacatccaaagcataattcttttgtttcgataatatagacaaacgaatactatgaaagccttatgaaacccttgttagaataacgaaagcctctcagggtcctctagtcgacctggccgccattgtattgcttaagtttacctttgcatttatcattaacatgtcagaattctctgtcacaaatagtcttttaagttctctctgtgttaacaaatcatggaagacaaagatcagtaccatctaccatgcttaattatccccaactagaattgctgacccaagacgacatatttggccttacaaccacacaggactctccaccgacatcgtttgctagactatccacttctaccaattaaaaaatgttgtaagaaattcctttttagtagcgtctgaaactacatgtgtagagcctgattccggtgcgcatcagagtacaaaggtaaatttggtataatagtgtatttaacttttgtaataatagcatatattataatctattcccccatatacatctttttgtaaaggaaaaatgagagaactactaaacttctactttaaaccagcaaaaatgatttgacagctcttatccacttaatcacagggtgatgagcaatatacaagtcagcttaaacaggacgaagtacatattacataggagattatttgggaaaaatacaaatagcaaatagcttgatattttatagctataacttatacttcataatgatgcaacaaagcacatacatgatatatacatgatcaaacctagccaacttcacaaactcctacccgcatatcccaaaaagaacaacggttagatcgtcatgaattgcatgaaggtatgacaccatctatgctccttaatcgcacagagcttatttacaatatagtttgcacattgtccttcgccctccattgtacccattacacaacaataaaataactgacacacactttaagtgcaacggatcttctctttttatttgtgtacaggtagctgtttttgcatacctatgaaggacatcgtcacttttgaatcaagaatgcttttgtatacatataacccaactgctgatgcctttctacctctgtatatgttcatgcgacccctctaattaactcttgacatacgctactttaatgctacttaatatgcattgtaatctcagtttacaactggtgtaagcgcttgaattatcgtctcaatttagtcgatagctgctgaaatacagtaagttgggtcttgcacttatgtatttatgtgctccataataactgctcttaatgtatatatgatcacttccaatgtatatatgatcgcgacacaatatctaattagacattgttggggaccttcggcttccgaaggtcctcaaaaacagaatttaacaatatttctggagtatgatgtgtgaacaggtatcttcggactcaagtcggcatcacagtagaccagaataatacgaaggttggtacagcgccgaaggtgtgagcaagaaagcttcggcgtggcagcgaaaagtgaaaccgacttaaagatgaaaaggctatttagacctcgacagattactatagaattattatcaagtgtaaagggcatgaatgtaattttgtatggattgtgtcccgtgcctataaataggtgaacagtacccccgtactgttcacgcggacttggcattcgctttttgcgtcacacttgtactatcatctcctttcagttgaaggtacacttgtaattcaacgacatttctgtttatgcctggtaataataaataattgtttatgttgtct

SEQ ID NO: 55695 - DNA, 3233 bp, Zea Mays
gatgagctccacgaagcaaacttccagcgccttcgtcctcgccaatccacatgcacagatgctcgacccgatgaaatgctgcagtgcatcctcgcgctccacgtgtccccagccgtcttgtcgtcgttgcgtcttctctggtgctccttctcacgctccgccttagcctgccaccattgtcgtctcgctcgctgctcgccaacgccctgccttgccgacggttgtaggctcctccgctcgctccaccgtctccaccacatcctcgcgatctggcaccgtgtcccttccggttccgatttcggctatgattcattatctcagtatcggtgtctccaagtgcctcttcatgatgttttgcatcgacgagtgtgacagatggctggaatggctagagtaggagatgttgttgttggagaattatggttttctttgctatatgacccaattattcacaattcgaacaaaatcattatgccagcttctacgtacgaatcacacagtatttgtcagtcttattcaattcaattttacagctggaacaataacaatgaacaatcttatgcagttatactcgatatgtactcttagaattttgacatagagactgaaaaggaatctgaaccaacctagttactcatttaatgagacttttcatcattatacgtatattatcttgcttaacaatgtgtaaatattttaaggtaatcactaagccgtatgtaaggtccttgagtcatgttacctgtggcatgtatttttccttgcgttccttttttttgctcccaagacctgctcttctctgatattgtgttgatagttacctagctcatctaatactccaataatatcatttttcaaataaagctagaattatagaatttcatcaccattacttcttgcagacctcccataaaatattaaaagttcacagttctcttttccatggacaattaagcaaccactactgctccaactaataacattacatgaacatcattttttcacaactattgcagaggaaaaacagttgtgatttccaaaaggcttacataattgcactgagacttggtaccatctcattatagttgtcacgttatctataggttacaaaacatcaaactccggctgatgcaacccacaacagttgatgaggaaattcaagtttgtcaatcgcctagcttcaaagacaagactgttgaagaactacttgatatagatccagacatattccctataaccactatgaaattctcttgtgttcgactaatttcatacatcaacaataagtttattctatttgcaatatcctttttttcttccactatacagccacaaggttacatatgcactatcactatctcactcctcgtacaagatagtggatggtggtttccatcttgcaccaagtgcaacaagtctttagctcagacctccactggataccgctacacaccatgcgactgggcagacattaaatttaggtagctctccacacaaacacttggtttatcatgcttcgtttggagaaaaaatatttttttatttcctacatacctaatcactgctataaagcactaacatttccaattcacagatacaaacttgacttcattggtaatgatggaacatccaaagcataattcttttgtttcgataatatagacaaacgaatactatgaaagccttatgaaacccttgttagaataacgaaagcctctcagggtcctctagtcgacctggccgccattgtattgcttaagtttacctttgcatttatcattaacatgtcagaattctctgtcacaaatagtcttttaagttctctctgtgttaacaaatcatggaagacaaagatcagtaccatctaccatgcttaattatccccaactagaattgctgacccaagacgacatatttggccttacaaccacacaggactctccaccgacatcgtttgctagactatccacttctaccaattaaaaaatgttgtaagaaattcctttttagtagcgtctgaaactacatgtgtagagcctgattccggtgcgcatcagagtacaaaggtaaatttggtataatagtgtatttaacttttgtaataatagcatatattataatctattcccccatatacatctttttgtaaaggaaaaatgagagaactactaaacttctactttaaaccagcaaaaatgatttgacagctcttatccacttaatcacagggtgatgagcaatatacaagtcagcttaaacaggacgaagtacatattacataggagattatttgggaaaaatacaaatagcaaatagcttgatattttatagctataacttatacttcataatgatgcaacaaagcacatacatgatatatacatgatcaaacctagccaacttcacaaactcctacccgcatatcccaaaaagaacaacggttagatcgtcatgaattgcatgaaggtatgacaccatctatgctccttaatcgcacagagcttatttacaatatagtttgcacattgtccttcgccctccattgtacccattacacaacaataaaataactgacacacactttaagtgcaacggatcttctctttttatttgtgtacaggtagctgtttttgcatacctatgaaggacatcgtcacttttgaatcaagaatgcttttgtatacatataacccaactgctgatgcctttctacctctgtatatgttcatgcgacccctctaattaactcttgacatacgctactttaatgctacttaatatgcattgtaatctcagtttacaactggtgtaagcgcttgaattatcgtctcaatttagtcgatagctgctgaaatacagtatcttcggactcaagtcggcatcacagtagaccagaataatacgaaggttggtacagcgccgaaggtgtgagcaagaaagcttcggcgtggcagcgaaaagtgaaaccgacttaaagatgaaaaggctatttagacctcgacagattactatagaattattatcaagtgtaaagggcatgaatgtaattttgtatggattgtgtcccgtgcctataaataggtgaacagtacccccgtactgttcacgcggacttggcattcgctttttgcgtcacacttgtactatcatctcctttcagttgaaggtacacttgtaattcaacgacatttctgtttatgcctggtaataataaataattgtttatgttgtct

SEQ ID NO: 55696 - DNA, 3538 bp, Zea Mays
ctatataatttatttctttgaatttatttcttgaaaaaggttttatttctagtcatccgaaaaggctgtcagctaaattcttcggaacccccgttgccagccggcgatcgcgccgtgggatctcatcgaggcgacgacggcgatgtcaagggaggcggcgaggacgaggagccgggtcctggtggttggcgccaccggccgcctcggtggaagcatcgctcgggccagcctcgccgcgggtcaccccaccttcgcgctcgttcggccccaccacttcgcacgccccgattcccccgtgcttgggccgctcgtagccgccggcgccactctgctccaggggtcactggaagattactcgagcctgctcgaggcggtgtgtcaggtggacgttgtcatctgcgcggtgtccacgaagcaggtgctcgagcagaagcctctgattcgggctataaaggaagctggatgcgtgaagagatttattccggcagaatttggagcagatccaacaaaggttcaaatttgtggcatggattatggcttctatgagaagaaaattgaaatccgtcattcaatagagagtgaaggcattcctcatacttacatatgctgcaacttctttatgcgctatttgcttccttcactggtgcaacctgggctagatgctcctcctagagatgaaatcaaaatatttggtgaaggaaatactaaaggtgtttttgttaaagagaatgatgttgctaaatttacaatatgcaccatagaggatcccagaacattgaacaagacgttgtatctgagacctccaggaaatgtcttctcaatgaatgaattggctgacctctgggagtcaaaactcaagaaatccctgaaaaggttatatgtaacagaagagcaacttcttaaagaaatccatgatgctccatttcccttgaagatggatttaatctttatatattcagcgtttgttaagggtgaccacacgtattttgaaattgacttgtcaatggaaggaactcaactgtatccccatatggctggaatggctagagtaggagatgttgttgttggagaattatggttttctttgctatatgacccaattattcacaattcgaacaaaatcattatgccagcttctacgtacgaatcacacagtatttgtcagtcttattcaattcaattttacagctggaacaataacaatgaacaatcttatgcaggttacaaaacatcaaactccggctgatgcaacccacaacagttgatgaggaaattcaagtttgtcaatcgcctagcttcaaagacaagactgttgaagaactacttgatatagatccagacatattccctataaccactatgaaattctcttgtgttcgactaatttcatacatcaacaataagtttattctatttgcaatatcctttttttcttccactatacagccacaaggttacatatgcactatcactatctcactcctcgtacaagatagtggatggtggtttccatcttgcaccaagtgcaacaagtctttagctcagacctccactggataccgctacacaccatgcgactgggcagacattaaatttaggtagctctccacacaaacacttggtttatcatgcttcgtttggagaaaaaatatttttttatttcctacatacctaatcactgctataaagcactaacatttccaattcacagatacaaacttgacttcattggtaatgatggaacatccaaagcataattcttttgtttcgataatatagacaaacgaatactatgaaagccttatgaaacccttgttagaataacgaaagcctctcagggtcctctagtcgacctggccgccattgtattgcttaagtttacctttgcatttatcattaacatgtcagaattctctgtcacaaatagtcttttaagttctctctgtgttaacaaatcatggaagacaaagatcagtaccatctaccatgcttaattatccccaactagaattgctgacccaagacgacatatttggccttacaaccacacaggactctccaccgacatcgtttgctagactatccacttctaccaattaaaaaatgttgtaagaaattcctttttagtagcgtctgaaactacatgtgtagagcctgattccggtgcgcatcagagtacaaaggtaaatttggtataatagtgtatttaacttttgtaataatagcatatattataatctattcccccatatacatctttttgtaaaggaaaaatgagagaactactaaacttctactttaaaccagcaaaaatgatttgacagctcttatccacttaatcacagggtgatgagcaatatacaagtcagcttaaacaggacgaagtacatattacataggagattatttgggaaaaatacaaatagcaaatagcttgatattttatagctataacttatacttcataatgatgcaacaaagcacatacatgatatatacatgatcaaacctagccaacttcacaaactcctacccgcatatcccaaaaagaacaacggttagatcgtcatgaattgcatgaaggtatgacaccatctatgctccttaatcgcacagagcttatttacaatatagtttgcacattgtccttcgccctccattgtacccattacacaacaataaaataactgacacacactttaagtgcaacggatcttctctttttatttgtgtacaggtagctgtttttgcatacctatgaaggacatcgtcacttttgaatcaagaatgcttttgtatacatataacccaactgctgatgcctttctacctctgtatatgttcatgcgacccctctaattaactcttgacatacgctactttaatgctacttaatatgcattgtaatctcagtttacaactggtgtaagcgcttgaattatcgtctcaatttagtcgatagctgctgaaatacagtaagttgggtcttgcacttatgtatttatgtgctccataataactgctcttaatgtatatatgatcacttccaatgtatatatgatcgcgacacaatatctaattagacattgttggggaccttcggcttccgaaggtcctcaaaaacagaatttaacaatatttctggagtatgatgtgtgaacaggtatcttcggactcaagtcggcatcacagtagaccagaataatacgaaggttggtacagcgccgaaggtgtgagcaagaaagcttcggcgtggcagcgaaaagtgaaaccgacttaaagatgaaaaggctatttagacctcgacagattactatagaattattatcaagtgtaaagggcatgaatgtaattttgtatggattgtgtcccgtgcctataaataggtgaacagtacccccgtactgttcacgcggacttggcattcgctttttgcgtcacacttgtactatcatctcctttcagttgaaggtacacttgtaattcaacgacatttctgtttatgcctggtaataataaataattgtttatgttgtct

SEQ ID NO: 55697 - DNA, 461 bp, Zea Mays
gaaaaaggttttatttctagtcatccgaaaaggctgtcagctaaattcttcggaacccccgttgccagccggcgatcgcgccgtgggatctcatcgaggcgacgacggcgatgtcaagggaggcggcgaggacgaggagccgggtcctggtggttggcgccaccggccgcctcggtggaagcatcgctcgggccagcctcgccgcgggtcaccccaccttcgcgctcgttcggccccaccacttcgcacgccccgattcccccgtgcttgggccgctcgtagccgccggcgccactctgctccaggggtcactggaagattactcgagcctgctcgaggcggtgtgtcaggtggacgttgtcatctgcgcggtgtccacgaagcaggtgctcgagcagaagcctctgattcgggctataaaggaagctggatgcgtgaagggagtgtgttttgaaaaggag

SEQ ID NO: 55698 - DNA, 3917 bp, Zea Mays
gatcgcaccgcacctaaagggagggccaaatccaatctcaatctcccacggccaagtaccatcacccccaccccaacgaaagggagccgggctcccctatctatatccacccgtccttctccctatatatatggattgggaaatttttcaggagggcagagaagcgaaagggacgcgcaagctccttcacccaccctcccccacgccacacgctcctcctacataaccacgctgcttcgattcactcctcatcggtggctcacgaccgagctgctgaggcaaagcttgtcccgcagtccttcccttagccttaacactcggagttgatcccgtctccgggggaagcagctggtaataatggcgcggtgccaggggaccgttgagagcctctgccaggggctgctcgacctcgacgacgacaagttcggtgcaatgtgcagcgccttcggctacctccaggagtggccggacctgggtgccgccatgtgcggcgccaatctcgccgtgccgcctgccgtggcgacgccgagcgccggcgacggcaacgattcctcctcttgcagcgtcagcggcgggttgaggaagaggaggccggacgcgtacctcgatgccaagggtggtgcgaacggcatgaacaagagacccagagggaagcagcagccgtctggcctctctgagatcgcggcggcgcccgggaaagggaagcaggagaggccaaaggctggcaccaagaagaaggccgaggctgcggcggcggcggcggctgccggccagaagaccgactacatccacgtccgggcccgccgcggccaggccacggacagccacagcctcgccgagcgggtgaggagggagaggatcagcgagcggatgcggtacctgcaggagctggtgcccgggtgcagcaaggtcacgggcaaggccggcatgctcgacgagatcatcaactacgtccagtccctgcagaagcaagtcgagttcttgtccatgaagatcgccgcttccaacccggtggtgagcttcgacatcgtcgaggacctcttcggccgccagctgaagcaggcgtgcggcccggcggccggccagctggagccgtcctgccttcagatgagcatgagccccatgcagcaggtagtgcacccgtctgcagcggcgggctccactggctttgggccgctggacatggtcctcagcaacctgtacgcgcccgccgccgcaagctgccctgtgtcggctgccccgtcggtctcggtggccgccggaccgtcgaccatcgagccgtgcctcaacgtgaatggaactgctgctgcctgggatattggctcccagaatttgttcagcggatttgatgcacaatttcagtcggtagaaagtgagtagctgcttcctcaagaacaagccagaagttactttgccgcctcttgtgaaatgaaagaacacaatagtggttagatcagggtaaaaatgaaccccccaacgccaacctgaacatgtttaaagctcagagttcataatggccgtaacgtgccatcacagaaaactcaaactggctgccgatcaaataactccaccaaaaatgagcacatcaaataaaattttgacttgtatgaactgtgcatatgtccctgtacatttaactgcaacagaagtgactgaatccagctactgctttccctgcaggtggctgcttgctagacaacctcaaaatggaaatgtgagaagaattaatcctcattgctggagttttaaccacgggaaaaaaaacttgtggctgaagattctttattcatatcaactgtactaatgaagtattctgtcagcaatggcaatacaagtacatttcttgtgttatatgtttgtctgctactctcccggtttctaagcattccttcataaccaagccagacagagggttcagagcttcagattacaagcaaagcaaagcacttaaggacatgttcccacaacaaaccagcaccaatatacaacactttatcacctaaactgacagtacaacgaacaggaacaactctcctactcatcttccttcaaagcacagactgttcaccagcttctgtaaagacatgattcaaccttgtaacagaagtaaaggataattcgcttgcacaatatataatgacagtgaccaccacaaaggatttgagtgcattgagatatcagatgaatcttatttcaatatttacatgtatctacactgacatggcacatgatttgagtgcgttaggttacttgatacccagtctattttcgtgaaatgcttgagacgaagtaaagaacctgaactaacctttcccaggcacaatgataattggggctgctttacagttgtggaagcaatactcactgacacttccctgcaacacactacagtacaaaggcaaagttagagatatgcttataaatgcaatctacagctcacctccagcaataagatataaactaggcaccaaaaggtaaaaagaacaagtaataaacaatgtctaattgtgttcatttgctttagtgccaaacatttcttgtcatttcagatgattctgcaactatcaagttatctaaagaggcactctagtcactgttctttccatgcatttgtacaagcatctcaccataattcagccaaagtcgctttttatactgaacaatcagacctaccttctcgaattattgaatctgagcatgggctcagcactcagcatttttcagcaagcttccaaagtaagagatccaggcacaaattatgaagatgttgttttacatcaaaagggaaaaaggcaaaaaggcaaagatatttcatatctgaatctcgcaagatctttttccttaaaatggtgatgtttacttttccaaacatcaggaccacgcctgccctgatttcagtttcatgcaaacaataatggcgttagttagacagatcccttggcattctaaagccagtaaagaatcccttagggcatgtacatttctgagccaccagttcggtttccaagtataaaagacgattgagaggttacatggtaaaatcctgagaccttggatcatcaatgcagttaagagacaacgtgtatgaaaagttgtgaagaaacatgctcttcgcgaagagtccaggtcttatattttttccacttggcctcttaaagaccactcaagagatcccatattaaatggggttgtacatgcccttagcatcaagacgtctcttgctgttgacatcataccagaactgaaaacacgtggttttattactgagatgaagtttctttttcttggagtaattcttttagatggtgaactggtgatcaaatatttgtattcgttacttgcaagtaacaagacatgcatattgcaggaacataatcacagaagtgttccaaagaagagatccctgattttgaataaaaatgacataaaggcaattgaatgacaacttttatggattacatgcaccatgcaaaaaaatgaaggtagcagcagaatcatgacttcgaattatacgatttttttcacttgcaaagttggctggacataaaactaagtcaaacgaccgtagatataatgttaattcaaaaggctgaatatctaaatgtaccacagatatataatgatttggagtttaaaagagtcaggtacctttgaataaggcctctaccacgtgtaccaagaatgacagcggcaggcttcagtcgatctgcttctcggcaaataacttttccagcgtctccttcaacaattctggccttggtccggacctaaggaattctcaattaaaggcacatgtatcaattccttgatgaatatatggaaaagaaaccaaaacagaaattcacaaatgtgcatacacagtaataaaaaatttctagaaaaatttctagaaaaccacgtagtaactgaggtctggg

SEQ ID NO: 55699 - DNA, 3225 bp, Zea Mays
catgatcgcaccgcacctaaagggagggccaaatccaatctcaatctcccacggccaagtaccatcacccccaccccaacgaaagggagccgggctcccctatctatatccacccgtccttctccctatatatatggattgggaaatttttcaggagggcagagaagcgaaagggacgcgcaagctccttcacccaccctcccccacgccacacgctcctcctacataaccacgctgcttcgattcactcctcatcggtggctcacgaccgagctgctgaggcaaagcttgtcccgcagtccttcccttagccttaacactcggagttgatcccgtctccgggggaagcagctggtaataatggcgcggtgccaggggaccgttgagagcctctgccaggggctgctcgacctcgacgacgacaagttcggtgcaatgtgcagcgccttcggctacctccaggagtggccggacctgggtgccgccatgtgcggcgccaatctcgccgtgccgcctgccgtggcgacgccgagcgccggcgacggcaacgattcctcctcttgcagcgtcagcggcgggttgaggaagaggaggccggacgcgtacctcgatgccaagggtggtgcgaacggcatgaacaagagacccagagggaagcagcagccgtctggcctctctgagatcgcggcggcgcccgggaaagggaagcaggagaggccaaaggctggcaccaagaagaaggccgaggctgcggcggcggcggcggctgccggccagaagaccgactacatccacgtccgggcccgccgcggccaggccacggacagccacagcctcgccgagcgggtgaggagggagaggatcagcgagcggatgcggtacctgcaggagctggtgcccgggtgcagcaaggtcacgggcaaggccggcatgctcgacgagatcatcaactacgtccagtccctgcagaagcaagtcgaggtgaatggaactgctgctgcctgggatattggctcccagaatttgttcagcggatttgatgcacaatttcagtcggtagaaagtggctgcttgctagacaacctcaaaatggaaatgtgagaagaattaatcctcattgctggagttttaaccacgggaaaaaaaacttgtggctgaagattctttattcatatcaactgtactaatgaagtattctgtcagcaatggcaatacaagtacatttcttgtgttatatgtttgtctgctactctcccggtttctaagcattccttcataaccaagccagacagagggttcagagcttcagattacaagcaaagcaaagcacttaaggacatgttcccacaacaaaccagcaccaatatacaacactttatcacctaaactgacagtacaacgaacaggaacaactctcctactcatcttccttcaaagcacagactgttcaccagcttctgtaaagacatgattcaaccttgtaacagaagtaaaggataattcgcttgcacaatatataatgacagtgaccaccacaaaggatttgagtgcattgagatatcagatgaatcttatttcaatatttacatgtatctacactgacatggcacatgatttgagtgcgttaggttacttgatacccagtctattttcgtgaaatgcttgagacgaagtaaagaacctgaactaacctttcccaggcacaatgataattggggctgctttacagttgtggaagcaatactcactgacacttccctgcaacacactacagtacaaaggcaaagttagagatatgcttataaatgcaatctacagctcacctccagcaataagatataaactaggcaccaaaagatgattctgcaactatcaagttatctaaagaggcactctagtcactgttctttccatgcatttgtacaagcatctcaccataattcagccaaagtcgctttttatactgaacaatcagacctaccttctcgaattattgaatctgagcatgggctcagcactcagcatttttcagcaagcttccaaagtaagagatccaggcacaaattatgaagatgttgttttacatcaaaagggaaaaaggcaaaaaggcaaagatatttcatatctgaatctcgcaagatctttttccttaaaatggtgatgtttacttttccaaacatcaggaccacgcctgccctgatttcagtttcatgcaaacaataatggcgttagttagacagatcccttggcattctaaagccagtaaagaatcccttagggcatgtacatttctgagccaccagttcggtttccaagtataaaagacgattgagaggttacatggtaaaatcctgagaccttggatcatcaatgcagttaagagacaacgtgtatgaaaagttgtgaagaaacatgctcttcgcgaagagtccaggtcttatattttttccacttggcctcttaaagaccactcaagagatcccatattaaatggggttgtacatgcccttagcatcaagacgtctcttgctgttgacatcataccagaactgaaaacacgtggttttattactgagatgaagtttctttttcttggagtaattcttttagatggtgaactggtgatcaaatatttgtattcgttacttgcaagtaacaagacatgcatattgcaggaacataatcacagaagtgttccaaagaagagatccctgattttgaataaaaatgacataaaggcaattgaatgacaacttttatggattacatgcaccatgcaaaaaaatgaaggtagcagcagaatcatgacttcgaattatacgatttttttcacttgcaaagttggctggacataaaactaagtcaaacgaccgtagatataatgttaattcaaaaggctgaatatctaaatgtaccacagatatataatgatttggagtttaaaagagtcaggtacctttgaataaggcctctaccacgtgtaccaagaatgacagcggcaggcttcagtcgatctgcttctcggcaaataacttttccagcgtctccttcaacaattctggccttggtccggacctaaggaattctcaattaaaggcacatgtatcaattccttgatgaatatatggaaaagaaaccaaaacagaaattcacaaatgtgcatacacagtaataaaaaatttctagaaaaatttctagaaaaccacgtagtaactgaggtctggg

SEQ ID NO: 55700 - DNA, 2866 bp, Zea Mays
actgcctgcccgcacccctttctcatcatttcttccacgatcccgttccatcctctctctctctcctcggcgcgggcgctatctttatccgtctcagccagggcgggtcagcactcagcaggcgcgagagatacaggagagaaaccgcagggccgccgccgccttccctgatcgaccgctcccgcgtgcggattcaggcgccgggctttccagccatggttcagtgagccgggaggaatccttgcgctgccggagaaggattatattcgtcggtggaggtccctgcgtgcatcgatcgtctcccgggtttccgagagcaccctccgcccccggattcactgcttcgattgattcgtcaagcaagcacagggatatcttcacgagaagtgtcatcatcaagattgacagccttcttcgtggatggcgaatggtaacaatgaagtgatgggtatatctcagcgcaaatcttgccccaaggttcacagctcaatgtgtagtgagctgacaatgatgttggataaggtctcttctattcttccatcaatagaggctgcacgaccaggttgtaaagcaggcatacaggaattatgcaatctatacaatgttgtcgagaaagggaggctcataatcatacactgcattgactgtagtaagctctatttggctattaccggagagacgattgtagcaagatgtgaaagaataagagactcactgaggcggagtttgttccttattcagaatatggttccaccagcactagctaatcagattgctgaagtccacaatgatctccgggatgtcaaatttcttcttgatccaatggaagaagaggctggcaaagccatgttacagatgctccggcagtctgacgcaagtgaagaattagaacttgagacattcctgcaggctgcttcaaagttggagctgacatctcctaaagaagtcttaattgaaagacgagcaatcaagaaactgcttggaaaagttagtggtaatgatgcaaaaaaggagggggtccttaagtttttcatgtacctcattaagaagtatggaaagatcatcagacaggactctggcgaacagaatgagaatttgcaatctgaaagtcaatctttaactctgagcacaccttcctgtgatgccagtgctcctggaaaatgttacacaccaacagactttcagatttatgaggatcacagtaatatgtctggtgcagctactccacctccagagttctgctgcccaatatcaacaaagataatgcatgatcctgttataataacatctggacagacttatgaaagagaatatattgagaggtggtttaatgaaggatatgatacttgtcctaggacacagatgaagctagagaacttctccatgatcccaaatacctgcatgagagatctcatttgcaattggtgcaaagagcatggttttacagtttccgattttattcctccaaatgaaaatgcttacagttacttaccagagcaattgcatggttactctatgtcaagtttgcacaatgtttcggtacctctcattgctggaaaggccaacagttatgtgattgatcacagcaatacgtctgttgcattatctgatgccagttttgtctctaatgcatcccacgctagggacatggaggattcaaaagatatttctcagttctcttggaacgccgactatcaaaagtacctgtcgttccacaacttcaaccaggagatgttcctgaagttctttcatgagctgtccatgctcccattcgaactgcaagacaagtcaattaaagatttgaagaacgttctcgattatggaagtgagatttcatatgatatgatgtcaaatgggtttgttgaagcattccttgaattcttgagaaacgatactggcagctacagtgtgcaagatcaggaagctggatttcggttttttcttgcttttatttccaatagcaggcatggtagtagaggatgctcccaagaactcggttcacaagcagcctgcgtcgaagtcgtccaggtttttccagaggaaactgaacatcttctcgaagcctcggtcgctcacgctgttctgaaacccggtttgtgtttgtcggagctggtagtccttttttagtggaaagggaaagcggagtagtccttgactccttccttgtacatgcatgctgcaaaactaaccaccttctgtgtagatggtagcgcttgtgtttgccccggtgagatgcttgatgagatgatagtttttcatcctcatgtgtttcagtagagcttgttagttgctacagaactgtcctgtgtgcccaaaaaaaaaagaaagaaagaaaaaagtcagtagatggcatctcttttctcttttggcggaaagcctgccgttttgtatcccgctgttcctggctaagattacctttgaagcctgaatagaagcttgttttgccaaggtcatgttcacatttccccatcacttgacactagctggcatagaagaatactgcccactgtctgcaacctaattcgatgctgttatgtacagattacagactgggggggttgtgggcgttcggaaagctcacttacatacagtcaggtccctttccagacgagggggacagaagaaacctcccatgatcccatccgattggccgccgcccgttccaattatgcccacatgggggctccatctccgtctccatccgagtgggctgcctcgagtcaggtcattagtcatcactcatcaccccttccccggctgatgatgagtgatgagcgatccatcactcactgcacccgtccgtcggtcttcgtccaggtgcagcgcacgggaggccggccgcccgtttcttcagtgccaaggcact

SEQ ID NO: 55701 - DNA, 1024 bp, Zea Mays
acaccggtcaccacccgcaagtcactctcaccactgccttgtgtgggggagcggtagactggctagactcattcaaaatacacacccaaaacaagccaggcctaggcctgcctagccgggttcccctcttcactcttcaactctccctttgtcgttgttcccttcttcctcctccttgctctcggtaagggtgcaagcatagatggatgatggatggaaaagatggatatgttttttcctctataactagctagtagctctctatctctctcaaggaaacattccccactttatttgggccaaaactgttattgcgattgctatggttagtgtatttttatcggttcttcgtaacgtagctcaactttaccgagaaatataatccacatcaccatctccttctcccttcacccttgaggccaacacaacacccctatttcttccccaaaacctacatgtagagcgcacagcgacagcaacacagcctcgcaagagaaagcaaagcaaagtcaggagggaaagaaagaaatccttttcctacacctaaagagaccaccaaaccctgcgagccaaaaaaaaaaaagccatggagtacaagagatcatcgcatgcgcaagaggaagaagaggacgaggaggaggaggaagaagaagacgacgagaacgaggaagaagaggaggatgaggaggaggccagaggccttcgctacaccacggcggcggtggcacccgtaggcgctccacagcagcagcagatcagatattgaggatcacccaagggacataagttcagtgctggaaatccacaccaaagaaccacaatagttggatgaacgcgcgcgtgcagagagagggagaagttgaaaaactcttaacacatcaccgatgttctacagttctaacttctcatgttggtcagttgtccattttgtatcctgtgaagttgtggaattttaaattcgtagttacttgctatccacgaaggtcagccagagttgttttgcacgttcactgttttgatgaag

SEQ ID NO: 55702 - DNA, 3437 bp, Zea Mays
caaaaaaatccacatcaatcacgactctgcatcgtgaggcgaaaacgataacggggtgggacccgcatggccgcagcaagatgaggaggagaggcagcaaggcaaggcaaggcaaggcaaggcaacgcgccgtcatctcattctccctcgcaccgacgaggtcaggtcagagaccttcgagtactactagtcatggcccgcatctagaaggcagcaagaaagggggcggatggggcgcgcgttcgtgtacgtgatcctgggcggcggcgtggccgcgggctacgccgcgctcgagttcgcccgccgcggtgggtactcccgcggagagctctgcatcatctccgaagaggccgttgctccttatgaacgtcctgcactaagcaaaggctatttactcccagaaggtgctgctcgtcttccaggatttcatacttgtgttggtgctaatgatgagttactgacaccgaaatggtacaaagaacaaggcattgaacttgttcttggaacaaaagtgatttctgctgatgtgaggcgcaagacattgcttacaggcactggtgaaactatcagctacaaaactctaattattgcgacaggtgctcgggctttgaagctgcaagaatttggaatacaaggttcagatgcttcaaacatatgttatttgcgcaacatcgatgacgcggataagttggtgagtgtgatgaaatcatgtcctggtggaaatgctgttgtcattggtggtggctacattggaatggagtgtgcagcggcattggttactaacaagattagggtcaccatggtcttccctgagaaacactgcatgggtcgtctatttacaccaaaaattgcagaattttatgaaaactactacacctcgaaaggggtcacctttgttaaaggaactgtgcttacatcctttgaaaaagatacgacggggaaggtgaggtttcataatttcagaccatgaaactggaactgatttgagatatatagttcccaattttacatttattaccaagtaataaaccatagttgtataaccaagttctggtcctggtccagaaacctcttcttcagcagttcctttctgttgtttggtagaggtttcttctagtgcgtatggataactattcaagtcaaacaatttcatctgcctaaaagtcattataatagaaattttttactattttttattgattgctagcaataaacccggtttctgcttttctcgagagattttctcaaaaaatgttattaatttggtcttaatctcgtctcttggattcacttggactcagcctgtatgttatggggataaactatacagcttttgacaccttggtactgcttgcttaaattgttgataacactgtaatataaatggcttgttctgaaggatatgctatggcaacaatggtaccgatgagcttgcctggattcatcaatccctgttaatctttttcttactgtatcaagcatatttagtcaatcaagcatattttgctctcctattttaaagcctagcacttacaatctggccaaagaatcttcaagcagtgtcagaaatagttaaattgataatcctaaacagttcaactctctccctccatcctaaaatattatttggatagcccctaaactaattctgtgttcaattactcccaaagatacttcagttggttcaatccacccttaggtaagatttttttttgtttctacacattcaatttgagtattaagttcaaattttatggggcaatagttgacatcataacttatgttagaaaaataggaccaggtcaattcatcgttattatttttgcataaatttgtatatgtagggctaatttataacttcctaacctatcaaaataattacgaaaatttgtgatgtatttttccaacactagaaaatgtgcccatgtgttgcaagaaaacacaatacatatatgaatcggctctatcaccattatgtgtgggttctaaattgtatgagtgctgatccatatgcgagatacggatggtgtgatccaatacatactggaattagatcatgtatcaatcatcactagacgtgagtttttctaactcatatgagttgtaagttcggatcgaatcaagaaaaaagtgggatgaaagaaactatgtatagttattgggggggggggagggggatacaaaaagtgggatgaaattttggctctttaatattaggtatagataagttacgatgtcacctatcaccctagaaatgaacttaaaactcgtatgtggagaaacagaaaaaagaaaaatcttgtggacgcgttagattactagattgaaccttttgttccttaaaaaaactggacttcttccataataatatttccaggcatgcacaggtgactgcagtaatactcaaagatggtaggcaccttcctgctgatatggtagtagttggtattggcatccgtgcaaacactagcctttttgaaggtcaactgatgatgtcaacagagaatggtgggataaaggtaaatggacagctgcagacaagcgacagctctgtgtatgccgttggcgatgtggccgcgttccccatcaagctttttgacgatgatatccgacggctcgagcatgtggactcagctcgtagaactggtagacatgctgttgcctccatcttggatccttcaaagacgagggacatcgattacctgccgttcttctactccagagtgttcacgttgtcctggcaattctatggggataatgtcggggaagtggtccactttggagacttcacaagcagcagtccgaggttcggtgcatattgggtcaacaaagggcggatcgcgggtgcgtttcttgaaggcggaagtcgggaagagtacgaggccatatcgatcgctgttcggcgggaagctgtggtcacagacatgggtgaactcgagaaacaaggcctggcactcgccattcaggagagccagaaggaggtgcctgacagtgggcttgctgttgtcggaaaacctacttatgcgtggcatgccacagccggtgtcattgcagctgtgtcgattgctgcaattgggtattggtatggcaggaagcgccgcaggtggtgaggatttgcattggggtgattccctttggtctgccgggccgaactgctgctggtggaatatctgggacgagtgctattggctgttaatccaatcatagttgtatagcttgtatgagagtatagtctgtcgcaaacgtatactgaaacacagatgcctcgtgtattatctagtgaagaaaccagtggctgcctctaactcctcaggggttctcttgttgtaaaattgcaactcttttcttaatgagatccgcaattttgtggcactgctggtcactgttcttaactatctctgtttgccaaaagcttttgcaaatccatatattcagcg

SEQ ID NO: 55703 - DNA, 1206 bp, Zea Mays
cccggctccccgctcccacccaggtcctaggctcccctcccggtcccggacgcgtctcctccgttcaccacgctgccggagtgccgggcgcttctggccccgacaccgtgggccaccccggcccttgtgcgcgctctctctctctctctctctctctctctctctctctctctcgtagcgaatagcgatctatctatcactcggggttggggtcgggcgcgcaacttttccttccttcttattgacatctcccagagctctctcgctcgcatctctccaccaaccggcggcaccaccagattcctctcttcctctgctctagcttcttctagctagccccctccttcgcaccacgcactattatctcatccgttctttccttcagtctatgtttatttgctctgcacatcatcgctcggtggccctgtcctcgctaccttccaattagtcggcaaggcaaaggcaccggcagagaggaagaaggccagttctatagtatatatgacgatcagggttccggtggcgtcgctggctcgttggatggcgccagctccgagacgcacttcgcagggacgggcatgctgggcatcccaggtggcagcgggggcggcgagtgccacgcgctgagcgcgctccggtacgcggccggcctgggcgagaacctgcaggtgcagggtctcccgtttggggcgcgcgctgagcacgacgcgatggagatgaagcctgcggcgacggacaggctgctctcgctggactggtacagcgagacaagccgcgcgccagagagcgccatcagctcgttgggcgcgctgggcctgtggagcggcatgctcggcggtgcgcaccagcaccatggctcgtcggcggccatctaagaccctagcaaaacgtgcctccatgcttgcgttgcattgcaccagtttgctaatggcgttaacaagtatgagtgactacgtagaaatgcttgtttttttacctgtttttatcttctgtttcgtttcgtcgtttgttttttggacgatccatgtttgccgctcgtcatttcagatgatgtctctgttgttgtaccgcttcaaagttcaaacacttgctgtggttcaaattacagtttgctggtgattgatgagcccaggttttatacgtatggaaatatggattatgtatggaactatgtatctcttctctactcctataaagtatattaat

SEQ ID NO: 55704 - DNA, 2772 bp, Zea Mays
gtctgctcccgtgccctccgcggctccgccgcactcatcttctagtcttcttccctcccctccgtcaccactcaccacctcccctatggcatgggagcttctcccggcctcttcctccccttcctgccagaccatcttcctaccgcaacgcacctgacggtttccatccacctggcttccctgttgcgctagctgatcgacccacgcaacgcaagtgcaatgccgtgccgaggctagatcgagctgccgagcgctgatcacgggcactggagggctaccatctgcttcgctttctgaaaaaaaaacagtttcggcataattatcaccctaagatgcctggaattacaatggatggatttgttgcagaggaggtgccgaacagggtgaattcctctccacagaatgaaaatctgcccgccccaaattcgacggcagcttcaacaatggcgccaagcatgcaaagtgaggcacttgagatgcatgtcgagagctccggtactggggagccctcaattgagcagctctacaacaatgtgtgcgagatgaagagctcaagtgagggtggctccctgtcacatgagagctttggctcagatggggaggagtctaggattgattcagagcttcgccatcttgttgctggggagatggaggccatgaaggtgattgaggaggaagaggagaatggtagtgttgccaacgttgtgccaccggttcccgctgagaatggaaccccagtaaaggagcagccttccaaatcgtccaacaagtcgaagaaggactcaaaatcacagcttgagtctgatgcctctgttggtcccaataggaaggcgtccactgaggaaggtgagagggaggtcagcaaacaggcaacccgagttggccgtcggcggaaatcaaatgccaatccacagaatggaacagaagatgctgggcttgataacccagaccttggtccatttcttctcaaacatgcaagagacttgcttgcctcagaaaactcacgtcgggcactgaaatatgctctccgtgccactaagacatttgagaaatgtgctggtggaaaaccaagcttgaacttagtcatgagtttgcatgttgttgcagcaatctactgcaacttgggaaaatatgaagaggctttacctgtgctgcatcgatctcttgagatccctgtaattgaggaaggtcaggaacatgctcttgcaaagttttctggttgcatgcagttaggggacacctatggcatgctaggtcaaactgcactctcactgcaatggtatgcttctgggcttgaaatacaaaagcaaacattgggagagcaagacccaagggttggagagacttgtcggtacttagctgaggcccatgtgcaggcattacaactcgatgaagcacaaagattgtgtcagatagcccttgacatccacagggagcatggcgggacagcctcactagaagaaacagctgataggaggctgatgggtctaatctatgacaccaagggtgatcatgaagctgccttggagcatctagtgatggccggcacggccatgatagccaatggtcaggagacagaggtggcctcagtggattgcagcattggtgatatctacctctccttgggccggtatgatgaggctgtgtttgcttaccagaaagctcttactgtattcaagaccagcaaaggggagaatcatgcaactgtggcttctgtttttgtgcgcatagcggatctgtacaataagtcagggaagctgagggagtcaaaatcttactgtgaaaacgctctcaaaatttaccaaaaacctattccagggacttctctggaagaaattgccactggtttaactgatgtttcagccatatatgagacgatgaatgagcatgagcaagcactcaagttacttcagaaggccttaaaaatgtacaacaattctgctggccaacagagcacaattgctggaattgaggctcagatgggtgtcttgcactatattttgggcaattatggcgagtcatatgattccttcaagagtgcgattgcaaagctccgcacctgtggtgagaaaaagtctgccttcttcggaattgccctgaaccagatgggattggcatgcgttcaaagatattcgataaatgaagcagcagaactgtttgaggaagctagaacagttctggaacaagaatacgggccttatcatccagatactttaggagtgtacagtaatcttgctggaacttatgatgcaatgggcagacttgatgaggccatcgagatcttggaatatgttgttggaatgcgcgaggagaagctaggtacggcaaacccagatgtcgacgacgagaagcggaggcttggggagctattgaaggaggctggccgggtgcgaagcagaaaggcaaagtccctggagaatctgctcgagaccaacccatatatcgccaccaagagaaatgcagttgctgcatgaatcactgttctgaagatgaaaggcgaggattgttactaaggtattcaattggttcgttcagatgggggtaacgggaatattggtgcttacctattaagaaaatatgaaatgatcaaatcactgatctcaaattctttgctgtaaagttttcaaatactattaccgttacatgtacagtgctcttttataccgttcttgagaaaacgagtggtgggtactgattctctttctctagctcaggtgcgagcttgcattcatcagttgtaccttggtttttattacattaaaaaaagttaat

SEQ ID NO: 55705 - DNA, 1152 bp, Zea Mays
caaaattatgtcatgtacactctatgatacttatcatgatatgtttatttaatccaactatacaaaaagacaagtcatgtaagaatacctacacattttattgatcattatgtggtatcttaagctggactagatgttcactaggactttctgagtttccatagatgtgcgtcagtgcgtcattggtcgtcttacaaatatttaacatgtcaattattttctttgtatgtttcccagcattgtttcatcttaatcgtttgatttcagatgattcttcctgactacataagctatgaatggctacaaaattcttttaagatgtggaaccaaaagtgtatgaatgcacatgatgctgagactattgaaatgctttgtgaggtactataatttttgtccttctctgcaccatgttgtttggaaggttgcaatttacggctgctcgaagcttaacattgtcattcctaagctcaatgaccgcctaagaacaaaataaaacaactcataagggatctcctccctctcaacctggatcaaatagagtcttcaggttcttggcacctgcaagggaccagttctgctgctcttccctgaaaccctcgacctgattagcaaggcaaggactaactccgtcaaagacatatttgtttctatgtttctagaggctccaagcccctagaatgacagcgctgtcgttgaagccctttttcttgcctttgggaattaaggacgaaaaaccaatacgggagagaatagagtgccaaaattgccttgcaaacaaactgctggagatgatatgctgcacggtttcctcttcttgatcacaaagcacgcaacacttcgggaagtcaagcccgcttttttcatcatgtctgcagtccaacacttgtttgttattgatagctagccaaatgaaaaacttgcatttaggggtcgcccaactcttccaaaccatcttccaaggctcaaacactacaatagccatgtagaaagctctgcaagccgacttagatgtaaacaacccagaattggagaacctccaaacatgtttgtaagtgagtaattacacggggagaaccccaaaccctaaaccctaacaccccccgcagtcacaattctatcctgtacaaatgtcgagactagaccgaaagtcta

SEQ ID NO: 55706 - DNA, 1480 bp, Zea Mays
ctataatcgtgcagttaactgttgattcaggtcgctgcagcactaggtagtctcaagttcccctatgtgtaccctgatcctgaaagccgccaattgcgtgctgcccttgctgaagattctggacttgaatctgattacatacttgctggatgtggcgcagatgaactaattgatttaattatgagatgtgtgcttgaaccaggcgacaaaattgttgattgccctccaacattcacaatgtatgagttcgacgcttcagtcaatggtgcacttgttatcaaggttccaagactgcccgatttttccctagatgttgatctcattgtcgaagtggttgaacaggaaatgccaaaatgcatatttctgacatccccaaataatccagatggcagtgtaatcaatgatgaggatcttttaaagatacttgatctcccaatacttgtagtgctggatgaagcttatattgagttttcaagccttcagtcaagaatggcatgggttaagaagcatgataatttgattgttctccgaacatttagcaaacgggcaggtttagctggtcttcgtgtgggttatggtgcatttcctctgagcattatcgagtatttgtggcgggccaagcagccctataatgtttctgtggccgcagaagtttcagcatgtgcagctttacagaatccaacttatctggagaatgtgaaaaatttactggtaaaagaaagggagaggttgtttaatcttctcaagggaataccattcctgaagccatttcccagtcattctaacttcattctctgcgaggtcacgtcaggaaaggatgcaaagaaaataaaggaagaccttgcgaagatgggagtgatgatccgccactatgacaagaaggaactgaaaggctatattcgtatctcggttgggaaacccgagcacactgatgcactaatgaagggcctgaatgcacttcgattgtgagagcttttgcacacgatcaagcttttgcacactatcaagcttttgcacaccatcacatcaatgtaaacagtgtattcctttgcggatatatatccgtcaggctggatgcagtctataagaggagattgcatcactccaacgcatgtgaagcccaaacagacaagggtcatgtgggtttcactatccttttgtttagcaagttgaagtctgtttttgttattcagtggcataacagctattcacaagattatcttgttcagaacaagtgtagcagttgaattcctggtaggtggtttctgatgttgggttgagacttgagagaactgaacattgtgtaggtataaataaaggccaacatagcaatgctgttgtcttagtacttgtatcaaaggtcattcagtcgttgcaaatttcgaccaaataaagggatgaaatgaaagcttggaaacggaacagattctcatccataaccgccgtgacgacaatgtgtaaacgtcgcgacttttattta

SEQ ID NO: 55707 - DNA, 1783 bp, Zea Mays
gtagctggctttggagtacgagtggcagcctcacgctcactttaccgaccctttgcgacgccaaccggccaaagctcccggctcggcggcgccgcttcgttgatggattggtccacccggttccgcatccgaaacccgtcgccggccgcgtcccactttgccggccacaggcggagtcaagcggatagggtatttctccggaccatggcgtcggcggccccggtggaggagccgacggcggcggccgaggcgaaggggcggctgaccggtgactccttcatccggcgccacctcaggaccctcgccccgtatcagcccatcctgccctttgaggtcgctgcagcactaggtagtctcaagttcccctatgtgtaccctgatcctgaaagccgccaattgcgtgctgcccttgctgaagattctggacttgaatctgattacatacttgctggatgtggcgcagatgaactaattgatttaattatgagatgtgtgcttgaaccaggcgacaaaattgttgattgccctccaacattcacaatgtatgagttcgacgcttcagtcaatggtgcacttgttatcaaggttccaagactgcccgatttttccctagatgttgatctcattgtcgaagtggttgaacaggaaatgccaaaatgcatatttctgacatccccaaataatccagatggcagtgtaatcaatgatgaggatcttttaaagatacttgatctcccaatacttgtagtgctggatgaagcttatattgagttttcaagccttcagtcaagaatggcatgggttaagaagcatgataatttgattgttctccgaacatttagcaaacgggcaggtttagctggtcttcgtgtgggttatggtgcatttcctctgagcattatcgagtatttgtggcgggccaagcagccctataatgtttctgtggccgcagaagtttcagcatgtgcagctttacagaatccaacttatctggagaatgtgaaaaatttactggtaaaagaaagggagaggttgtttaatcttctcaagggaataccattcctgaagccatttcccagtcattctaacttcattctctgcgaggtcacgtcaggaaaggatgcaaagaaaataaaggaagaccttgcgaagatgggagtgatgatccgccactatgacaagaaggaactgaaaggctatattcgtatctcggttgggaaacccgagcacactgatgcactaatgaagggcctgaatgcacttcgattgtgagagcttttgcacacgatcaagcttttgcacactatcaagcttttgcacaccatcacatcaatgtaaacagtgtattcctttgcggatatatatccgtcaggctggatgcagtctataagaggagattgcatcactccaacgcatgtgaagcccaaacagacaagggtcatgtgggtttcactatccttttgtttagcaagttgaagtctgtttttgttattcagtggcataacagctattcacaagattatcttgttcagaacaagtgtagcagttgaattcctggtaggtggtttctgatgttgggttgagacttgagagaactgaacattgtgtaggtataaataaaggccaacatagcaatgctgttgtcttagtacttgtatcaaaggtcattcagtcgttgcaaatttcgaccaaataaagggatgaaatgaaagcttggaaacggaacagattctcatccataaccgccgtgacgacaatgtgtaaacgtcgcgacttttattta

SEQ ID NO: 55708 - DNA, 1814 bp, Zea Mays
gtagctggctttggagtacgagtggcagcctcacgctcactttaccgaccctttgcgacgccaaccggccaaagctcccggctcggcggcgccgcttcgttgatggattggtccacccggttccgcatccgaaacccgtcgccggccgcgtcccactttgccggccacaggcggagtcaagcggatagggtatttctccggaccatggcgtcggcggccccggtggaggagccgacggcggcggccgaggcgaaggggcggctgaccggtgactccttcatccggcgccacctcaggaccctcgccccgtatcagcccatcctgccctttgaggtgttatctgctcgccttgggcgtagaccagaggacataatcaagttggatgcaaatgagaatccatatggtccacccccggaggtcgctgcagcactaggtagtctcaagttcccctatgtgtaccctgatcctgaaagccgccaattgcgtgctgcccttgctgaagattctggacttgaatctgattacatacttgctggatgtggcgcagatgaactaattgatttaattatgagatgtgtgcttgaaccaggcgacaaaattgttgattgccctccaacattcacaatgtatgagttcgacgcttcagtcaatggtgcacttgttatcaaggttccaagactgcccgatttttccctagatgttgatctcattgtcgaagtggttgaacaggaaatgccaaaatgcatatttctgacatccccaaataatccagatggcagtgctggatgaagcttatattgagttttcaagccttcagtcaagaatggcatgggttaagaagcatgataatttgattgttctccgaacatttagcaaacgggcaggtttagctggtcttcgtgtgggttatggtgcatttcctctgagcattatcgagtatttgtggcgggccaagcagccctataatgtttctgtggccgcagaagtttcagcatgtgcagctttacagaatccaacttatctggagaatgtgaaaaatttactggtaaaagaaagggagaggttgtttaatcttctcaagggaataccattcctgaagccatttcccagtcattctaacttcattctctgcgaggtcacgtcaggaaaggatgcaaagaaaataaaggaagaccttgcgaagatgggagtgatgatccgccactatgacaagaaggaactgaaaggctatattcgtatctcggttgggaaacccgagcacactgatgcactaatgaagggcctgaatgcacttcgattgtgagagcttttgcacacgatcaagcttttgcacactatcaagcttttgcacaccatcacatcaatgtaaacagtgtattcctttgcggatatatatccgtcaggctggatgcagtctataagaggagattgcatcactccaacgcatgtgaagcccaaacagacaagggtcatgtgggtttcactatccttttgtttagcaagttgaagtctgtttttgttattcagtggcataacagctattcacaagattatcttgttcagaacaagtgtagcagttgaattcctggtaggtggtttctgatgttgggttgagacttgagagaactgaacattgtgtaggtataaataaaggccaacatagcaatgctgttgtcttagtacttgtatcaaaggtcattcagtcgttgcaaatttcgaccaaataaagggatgaaatgaaagcttggaaacggaacagattctcatccataaccgccgtgacgacaatgtgtaaacgtcgcgacttttattta

SEQ ID NO: 55709 - DNA, 1808 bp, Zea Mays
gtagctggctttggagtacgagtggcagcctcacgctcactttaccgaccctttgcgacgccaaccggccaaagctcccggctcggcggcgccgcttcgttgatggattggtccacccggttccgcatccgaaacccgtcgccggccgcgtcccactttgccggccacaggcggagtcaagcggatagggtatttctccggaccatggcgtcggcggccccggtggaggagccgacggcggcggccgaggcgaaggggcggctgaccggtgactccttcatccggcgccacctcaggaccctcgccccgtatcagcccatcctgccctttgaggtgttatctgctcgccttgggcgtagaccagaggacataatcaagttggatgcaaatgagaatccatatggtccacccccggaggtcgctgcagcactaggtagtctcaagttcccctatgtgtaccctgatcctgaaagccgccaattgcgtgctgcccttgctgaagattctggacttgaatctgattacatacttgctggatgtggcgcagatgaactaattgatttaattatgagatgtgtgcttgaaccaggcgacaaaattgttgattgccctccaacattcacaatgtatgagttcgacgcttcagtcaatggtgcacttgttatcaagggaaatgccaaaatgcatatttctgacatccccaaataatccagatggcagtgtaatcaatgatgaggatcttttaaagatacttgatctcccaatacttgtagtgctggatgaagcttatattgagttttcaagccttcagtcaagaatggcatgggttaagaagcatgataatttgattgttctccgaacatttagcaaacgggcaggtttagctggtcttcgtgtgggttatggtgcatttcctctgagcattatcgagtatttgtggcgggccaagcagccctataatgtttctgtggccgcagaagtttcagcatgtgcagctttacagaatccaacttatctggagaatgtgaaaaatttactggtaaaagaaagggagaggttgtttaatcttctcaagggaataccattcctgaagccatttcccagtcattctaacttcattctctgcgaggtcacgtcaggaaaggatgcaaagaaaataaaggaagaccttgcgaagatgggagtgatgatccgccactatgacaagaaggaactgaaaggctatattcgtatctcggttgggaaacccgagcacactgatgcactaatgaagggcctgaatgcacttcgattgtgagagcttttgcacacgatcaagcttttgcacactatcaagcttttgcacaccatcacatcaatgtaaacagtgtattcctttgcggatatatatccgtcaggctggatgcagtctataagaggagattgcatcactccaacgcatgtgaagcccaaacagacaagggtcatgtgggtttcactatccttttgtttagcaagttgaagtctgtttttgttattcagtggcataacagctattcacaagattatcttgttcagaacaagtgtagcagttgaattcctggtaggtggtttctgatgttgggttgagacttgagagaactgaacattgtgtaggtataaataaaggccaacatagcaatgctgttgtcttagtacttgtatcaaaggtcattcagtcgttgcaaatttcgaccaaataaagggatgaaatgaaagcttggaaacggaacagattctcatccataaccgccgtgacgacaatgtgtaaacgtcgcgacttttattta

SEQ ID NO: 55710 - DNA, 110 bp, Zea Mays
gtggatgtcgccggcgaaaggaccaacgaagacctcggcacctggcgtacggaggcggcggtagccccgtcgtcgcagactcgcagagagagagagagccagagaggtgg

SEQ ID NO: 55711 - DNA, 108 bp, Zea Mays
tagcgcgccccctccgaaactccaaagatattatcctcactacaggggcggatccagtgaaggacatgggtgtactgtgtacaaatgtacacccggtaatgaattgat

SEQ ID NO: 55712 - DNA, 69 bp, Zea Mays
tctctccgacactcggtccaacagcttccggacatatgtatgattctcacgcgaacaacactgaaatgg

SEQ ID NO: 55713 - DNA, 274 bp, Zea Mays
gaaaactgccagaagggtcattcaccaaccttaccactaacataaacaagatccccttctttgtgctttgctgacattaagttaagaaaatgttgggaagaaaaacgtgcgccactgaaaaatctgttgaggtgcaagtgaattctcttttgctctgctccagagtgactactctcaactgaagagctcaattcagactcgattatggaacaaccaacaaccacctcaagaagacctaaagtggacttaaccttgattcccctgagaacagtca

SEQ ID NO: 55714 - DNA, 797 bp, Zea Mays
agaggaggcccacgagcctacgctcgcgcctaggtcgcgccgaggctgtacctcgccggaggagccagccgccagggcggcgccgtggccaccattgcctcgtgatgaggctccgtgtcgtgcgccgccgagccgtttcccgcgccggggccggcgtggccgcgccgccatggacggaccgtcgcgtccacactgccagggggtcgcgcctcgcgccgtcgaggccaggggctgccactcccgcgccgagctacgaggggccgcgcccatgcacagccgcgccaggggcaagtgccgccccgagagggaggagcctcctggagggcgacgacggctcaggtggtggcggctgctgtggggtgggaggcgaccggtggctactgtgggtttcagaaaaccctaacctagtctaataacatgtagaatagtgaagtggatcattgtattgcatagagaaggggttacaatatatagactcaactctaaccctaatgaaccggcagcctaacaatggtaccagcccacacacactcacacaatcagtctaacagttattcatggtacacgcctcgctcaccagacggcatgtcaactttgccgacgctacgagcctacgaccaatagttatccacagtacacgcgtcgcccaatgctacgagcctacgagcagtactgttgacatgtcaatctccaagaatgcacaatggctgcctcatgctgagctccaccttcagccgtggatacaacgctaggtcgttgcttgcgaccagcactttctgcattgtataaccccaaag

SEQ ID NO: 55715 - DNA, 1806 bp, Zea Mays
gggccggcgtcgagtggagatccaatcgaaaatcgaactgacttcatcttctgttggtcaacaggagagcccgttgaaatcctggacctctcaattgtccttttctctctccccgcccaccttcccctgttctgccgcctccccagtccggcgtgcatcagcagcgacatcagagtcggcgatgggaggcgtcatcgacgttctcgtccccttatgttgatgaagtggtgtgccgtggagattccttgaccgatttcttgccggtaagacggagtctgccatctgcgtggctggtcatcgcggtgagcaaggaacgacgaagtgcgcccctccgcccttcggctcgtcgttgtgccttgcgtcgtcggggggcaaaagtgtaaagaagcctagattctcattacgaggatatgattttgttccattagatgttaagactgataacttgtgcattggggagcaagatggttcttctgcagtgccatcaactaaagcttcacaaaccatggtggctgaacggttggaaaacgttgaggaacaaactgaagatttggcaccagagtttgcccttccacccaaagcaaatactttagtttctgagctgctagataatttacagcgtaggggtggttcttttgtcaggacaccatctttgttgcaccaacatgctccaagcatatcaatcagggagcaggaagtttcatccggagtgccaccaactaaagcttcacaagctttgatggatgaaccgtttgaaaatgacaatggacaaactgaagagttgccatcagagctcccctgctcgatcaagagaccaaaattttcagttgcagaacttctagaagacctacagggtagaagtggttcttatgttgagacagcatctttgtcacaccaacacaccagagctaaacattggaagccaaagttcctttcttccgagaagaaaacaatagctattctaggagacaggagtattgacagtgaggaccccttggagcatgtaattgacggaacatctagcgaggaggaagatgctactcaaaaccacttgagtttggtgaacaaagatgagaaccagcaaactatggctgacctatttcaagaagtttttaatccaacaaacatggatggtgccatgaaatcaatgagatcaacaggagctggtaactatggaagaatgcaacagattatgcacatggagaaagattggcatgtggaattctcgaggcagtatagcagagagcacagttattcaggtgatttaaagggaactactgttcagattatgtcaaggtcattggaaggaaagctaacagtctgcagctgcatgttccaggaaaagggcaatgatgccactataagtaatgcctcagcagacggcaccatggatgaaagcagaactaggaggactattatcttcagtccaaagatatgtaacaatgtagatcttctggttggaaacataattcatatcttcccaccatggaaggaagttaaaatacaagaagagcatgtgattatttgcacctacttctcgcaccaccaccggacttgatactcggagatatttctgtgctagctgcaaagctagaggcagaccgccagcataaccgttgctgacagtttaatgttgatgtactcgcagggtctattctgtttgttttgtaatcacaagtgtactggctgcaaagctataggcagaccgcaagcataaccgttcctgatagcctaatgctgatgtacttgcagtctctcttctgttttacaatcacaagttactgaggcctagttcggattctctaa

SEQ ID NO: 55716 - DNA, 1894 bp, Zea Mays
gggccggcgtcgagtggagatccaatcgaaaatcgaactgacttcatcttctgttggtcaacaggagagcccgttgaaatcctggacctctcaattgtccttttctctctccccgcccaccttcccctgttctgccgcctccccagtccggcgtgcatcagcagcgacatcagagtcggcgatgggaggcgtcatcgacgttctcgtccccttatgttgatgaagtggtgtgccgtggagattccttgaccgatttcttgccggtaagacggagtctgccatctgcgtggctggtcatcgcggtgagcaaggaacgacgaagtgcgcccctccgcccttcggctcgtcgttgtgccttgcgtcgtcggacaaaaagagtagagcagcaaaatggagaaccatggaaaattggatgggtgggatgaagttctggaagaagaagatgagttagcgagtggggcaaaagtgtaaagaagcctagattctcattacgaggatatgattttgttccattagatgttaagactgataacttgtgcattggggagcaagatggttcttctgcagtgccatcaactaaagcttcacaaaccatggtggctgaacggttggaaaacgttgaggaacaaactgaagatttggcaccagagtttgcccttccacccaaagcaaatactttagtttctgagctgctagataatttacagcgtaggggtggttcttttgtcaggacaccatctttgttgcaccaacatgctccaagcatatcaatcagggagcaggaagtttcatccggagtgccaccaactaaagcttcacaagctttgatggatgaaccgtttgaaaatgacaatggacaaactgaagagttgccatcagagctcccctgctcgatcaagagaccaaaattttcagttgcagaacttctagaagacctacagggtagaagtggttcttatgttgagacagcatctttgtcacaccaacacaccagagctaaacattggaagccaaagttcctttcttccgagaagaaaacaatagctattctaggagacaggagtattgacagtgaggaccccttggagcatgtaattgacggaacatctagcgaggaggaagatgctactcaaaaccacttgagtttggtgaacaaagatgagaaccagcaaactatggctgacctatttcaagaagtttttaatccaacaaacatggatggtgccatgaaatcaatgagatcaacaggagctggtaactatggaagaatgcaacagattatgcacatggagaaagattggcatgtggaattctcgaggcagtatagcagagagcacagttattcaggtgatttaaagggaactactgttcagattatgtcaaggtcattggaaggaaagctaacagtctgcagctgcatgttccaggaaaagggcaatgatgccactataagtaatgcctcagcagacggcaccatggatgaaagcagaactaggaggactattatcttcagtccaaagatatgtaacaatgtagatcttctggttggaaacataattcatatcttcccaccatggaaggaagttaaaatacaagaagagcatgtgattatttgcacctacttctcgcaccaccaccggacttgatactcggagatatttctgtgctagctgcaaagctagaggcagaccgccagcataaccgttgctgacagtttaatgttgatgtactcgcagggtctattctgtttgttttgtaatcacaagtgtactggctgcaaagctataggcagaccgcaagcataaccgttcctgatagcctaatgctgatgtacttgcagtctctcttctgttttacaatcacaagttactgaggcctagttcggattctctaa

SEQ ID NO: 55717 - DNA, 1748 bp, Zea Mays
gggccggcgtcgagtggagatccaatcgaaaatcgaactgacttcatcttctgttggtcaacaggagagcccgttgaaatcctggacctctcaattgtccttttctctctccccgcccaccttcccctgttctgccgcctccccagtccggcgtgcatcagcagcgacatcagagtcggcgatgggaggcgtcatcgacgttctcgtccccttatgttgatgaagtggtgtgccgtggagattccttgaccgatttcttgccggtaagacggagtctgccatctgcgtggctggtcatcgcggtgagcaaggaacgacgaagtgcgcccctccgcccttcggctcgtcgttgtgccttgcgtcgtcgggtggagttccttcccctgcttcaagctaattcgacaaaaagagtagagcagcaaaatggagaaccatggaaaattggatgggtgggatgaagttctggaagaagaagatgagttagcgagtggggcaaaagtgtaaagaagcctagattctcattacgaggatatgattttgttccattagatgttaagactgataacttgtgcattggggagcaagatggttcttctgcagtgccatcaactaaagcttcacaaaccatggtggctgaacggttggaaaacgttgaggaacaaactgaagatttggcaccagagtttgcccttccacccaaagcaaatactttagtttctgagctgctagataatttacagcgtaggggtggttcttttgtcaggacaccatctttgttgcaccaacatgctccaagcatatcaatcagggagcaggaagtttcatccggagtgccaccaactaaagcttcacaagctttgatggatgaaccgtttgaaaatgacaatggacaaactgaagagttgccatcagagctcccctgctcgatcaagagaccaaaattttcagttgcagaacttctagaagacctacagggtagaagtggttcttatgttgagacagcatctttggatgctactcaaaaccacttgagtttggtgaacaaagatgagaaccagcaaactatggctgacctatttcaagaagtttttaatccaacaaacatggatggtgccatgaaatcaatgagatcaacaggagctggtaactatggaagaatgcaacagattatgcacatggagaaagattggcatgtggaattctcgaggcagtatagcagagagcacaattatgtcaaggtcattggaaggaaagctaacagtctgcagctgcatgttccaggaaaagggcaatgatgccactataagtaatgcctcagcagacggcaccatggatgaaagcagaactaggaggactattatcttcagtccaaagatatgtaacaatgtagatcttctggttggaaacataattcatatcttcccaccatggaaggaagttaaaatacaagaagagcatgtgattatttgcacctacttctcgcaccaccaccggacttgatactcggagatatttctgtgctagctgcaaagctagaggcagaccgccagcataaccgttgctgacagtttaatgttgatgtactcgcagggtctattctgtttgttttgtaatcacaagtgtactggctgcaaagctataggcagaccgcaagcataaccgttcctgatagcctaatgctgatgtacttgcagtctctcttctgttttacaatcacaagttactgaggcctagttcggattctctaa

SEQ ID NO: 55718 - DNA, 3109 bp, Zea Mays
gggccggcgtcgagtggagatccaatcgaaaatcgaactgacttcatcttctgttggtcaacaggagagcccgttgaaatcctggacctctcaattgtccttttctctctccccgcccaccttcccctgttctgccgcctccccagtccggcgtgcatcagcagcgacatcagagtcggcgatgggaggcgtcatcgacgttctcgtccccttatgttgatgaagtggtgtgccgtggagattccttgaccgatttcttgccggtaagacggagtctgccatctgcgtggctggtcatcgcggtgagcaaggaacgacgaagtgcgcccctccgcccttcggctcgtcgttgtgccttgcgtcgtcgggtggagttccttcccctgcttcaagctaattcggtttttccctctcatcctgtcagttttctctttgttggcattttcggttctctgctgtgaggttttttaaggtgattttgttcgcatctgtgatttgtgtctctgtgttcatcgtttgatgagggattcgatgccaaattcatttgaatcgattacaggaaatcatgcaaaaaatcaaacacatacctgtagaattgcgttggattggattccaaaaaataatgaaggaaaaaggaaaaacaaatctgatccgattttgtggcctgcatgcttactaacttcgtttttaagaggctccaggaaaatgtaattttgggtagggtttgtcaagcggtggtgcctgaatgtatcttctcctgtcacctccctcctttcacattagagttattgggtctacctttactgggtctactcctggatcctgctctatttaattatccttttttgtgccaaagcagccaaaccgccaatcaccacaaattgtagattaatgtttccagcattagcttgctgctcctggttccatacctgcaatcagttgcaaatacaccatgttttgtactaccccctcccccaattaaactttataattaaatgaaaaagtgtaggagtttgcctagtgaccacaaagcattttttggtgcattggaatcttgtgtatgcttgaatttaaaattatgaattcaaatgttgttgaattacatgcaggacccataaactttgaattattatgatgtgaaaaatgatttataatacagtatgtgcacaagtgtagatagatataagaaaatgaaatataggggaagggatcattggtagtgtcaccctaaagtgctggaaaagttttaaggtgcttcccatagaacaacttcttgggggagcactattggtatggaattgctcttattcagtttttttggggtttctgaggatcctccatgtcccctagattattgacctcactttgttctttgtatcgatttattgttgtaggcagttataatagtaggaggtatgcgtgctttgtagaatcatacagatgcttgttgaacatgtgtctttgtttctgtgtctgtgtcaacaagatgttctagcatcaacaagatcctgattagcatgtcaacttccagacaaaaagagtagagcagcaaaatggagaaccatggaaaattggatgggtgggatgaagttctggaagaagaagatgagttagcgagtgtatgcaaatatcctattagcacatcgtacctttcttatggaacaagcagaaggggcaaaagtgtaaagaagcctagattctcattacgaggatatgattttgttccattagatgttaagactgataacttgtgcattggggagcaagatggttcttctgcagtgccatcaactaaagcttcacaaaccatggtggctgaacggttggaaaacgttgaggaacaaactgaagatttggcaccagagtttgcccttccacccaaagcaaatactttagtttctgagctgctagataatttacagcgtaggggtggttcttttgtcaggacaccatctttgttgcaccaacatgctccaagcatatcaatcagggagcaggaagtttcatccggagtgccaccaactaaagcttcacaagctttgatggatgaaccgtttgaaaatgacaatggacaaactgaagagttgccatcagagctcccctgctcgatcaagagaccaaaattttcagttgcagaacttctagaagacctacagggtagaagtggttcttatgttgagacagcatctttgtcacaccaacacaccagagctaaacattggaagccaaagttcctttcttccgagaagaaaacaatagctattctaggagacaggagtattgacagtgaggaccccttggagcatgtaattgacggaacatctagcgaggaggaagatgctactcaaaaccacttgagtttggtgaacaaagatgagaaccagcaaactatggctgacctatttcaagaagtttttaatccaacaaacatggatggtgccatgaaatcaatgagatcaacaggagctggtaactatggaagaatgcaacagattatgcacatggagaaagattggcatgtggaattctcgaggcagtatagcagagagcacagttattcaggtgatttaaagggaactactgttcagattatgtcaaggtcattggaaggaaagctaacagtctgcagctgcatgttccaggaaaagggcaatgatgccactataagtaatgcctcagcagacggcaccatggatgaaagcagaactaggaggactattatcttcagtccaaagatatgtaacaatgtagatcttctggttggaaacataattcatatcttcccaccatggaaggaagttaaaatacaagaagagcatgtgattatttgcacctacttctcgcaccaccaccggacttgatactcggagatatttctgtgctagctgcaaagctagaggcagaccgccagcataaccgttgctgacagtttaatgttgatgtactcgcagggtctattctgtttgttttgtaatcacaagtgtactggctgcaaagctataggcagaccgcaagcataaccgttcctgatagcctaatgctgatgtacttgcagtctctcttctgttttacaatcacaagttactgaggcctagttcggattctctaa

SEQ ID NO: 55719 - DNA, 2116 bp, Zea Mays
gggccggcgtcgagtggagatccaatcgaaaatcgaactgacttcatcttctgttggtcaacaggagagcccgttgaaatcctggacctctcaattgtccttttctctctccccgcccaccttcccctgttctgccgcctccccagtccggcgtgcatcagcagcgacatcagagtcggcgatgggaggcgtcatcgacgttctcgtccccttatgttgatgaagtggtgtgccgtggagattccttgaccgatttcttgccggtaagacggagtctgccatctgcgtggctggtcatcgcggtgagcaaggaacgacgaagtgcgcccctccgcccttcggctcgtcgttgtgccttgcgtcgtcgggtggagttccttcccctgcttcaagctaattcggcagttataatagtaggaggtatgcgtgctttgtagaatcatacagatgcttgttgaacatgtgtctttgtttctgtgtctgtgtcaacaagatgttctagcatcaacaagatcctgattagcatgtcaacttccagacaaaaagagtagagcagcaaaatggagaaccatggaaaattggatgggtgggatgaagttctggaagaagaagatgagttagcgagtgtatgcaaatatcctattagcacatcgtacctttcttatggaacaagcagaaggggcaaaagtgtaaagaagcctagattctcattacgaggatatgattttgttccattagatgttaagactgataacttgtgcattggggagcaagatggttcttctgcagtgccatcaactaaagcttcacaaaccatggtggctgaacggttggaaaacgttgaggaacaaactgaagatttggcaccagagtttgcccttccacccaaagcaaatactttagtttctgagctgctagataatttacagcgtaggggtggttcttttgtcaggacaccatctttgttgcaccaacatgctccaagcatatcaatcagggagcaggaagtttcatccggagtgccaccaactaaagcttcacaagctttgatggatgaaccgtttgaaaatgacaatggacaaactgaagagttgccatcagagctcccctgctcgatcaagagaccaaaattttcagttgcagaacttctagaagacctacagggtagaagtggttcttatgttgagacagcatctttgtcacaccaacacaccagagctaaacattggaagccaaagttcctttcttccgagaagaaaacaatagctattctaggagacaggagtattgacagtgaggaccccttggagcatgtaattgacggaacatctagcgaggaggaagatgctactcaaaaccacttgagtttggtgaacaaagatgagaaccagcaaactatggctgacctatttcaagaagtttttaatccaacaaacatggatggtgccatgaaatcaatgagatcaacaggagctggtaactatggaagaatgcaacagattatgcacatggagaaagattggcatgtggaattctcgaggcagtatagcagagagcacagttattcaggtgatttaaagggaactactgttcagattatgtcaaggtcattggaaggaaagctaacagtctgcagctgcatgttccaggaaaagggcaatgatgccactataagtaatgcctcagcagacggcaccatggatgaaagcagaactaggaggactattatcttcagtccaaagatatgtaacaatgtagatcttctggttggaaacataattcatatcttcccaccatggaaggaagttaaaatacaagaagagcatgtgattatttgcacctacttctcgcaccaccaccggacttgatactcggagatatttctgtgctagctgcaaagctagaggcagaccgccagcataaccgttgctgacagtttaatgttgatgtactcgcagggtctattctgtttgttttgtaatcacaagtgtactggctgcaaagctataggcagaccgcaagcataaccgttcctgatagcctaatgctgatgtacttgcagtctctcttctgttttacaatcacaagttactgaggcctagttcggattctctaa

SEQ ID NO: 55720 - DNA, 3139 bp, Zea Mays
gggccggcgtcgagtggagatccaatcgaaaatcgaactgacttcatcttctgttggtcaacaggagagcccgttgaaatcctggacctctcaattgtccttttctctctccccgcccaccttcccctgttctgccgcctccccagtccggcgtgcatcagcagcgacatcagagtcggcgatgggaggcgtcatcgacgttctcgtccccttatgttgatgaagtggtgtgccgtggagattccttgaccgatttcttgccggtaagacggagtctgccatctgcgtggctggtcatcgcggtgagcaaggaacgacgaagtgcgcccctccgcccttcggctcgtcgttgtgccttgcgtcgtcgggtggagttccttcccctgcttcaagctaattcggtttttccctctcatcctgtcagttttctctttgttggcattttcggttctctgctgtgaggttttttaaggtgattttgttcgcatctgtgatttgtgtctctgtgttcatcgtttgatgagggattcgatgccaaattcatttgaatcgattacaggaaatcatgcaaaaaatcaaacacatacctgtagaattgcgttggattggattccaaaaaataatgaaggaaaaaggaaaaacaaatctgatccgattttgtggcctgcatgcttactaacttcgtttttaagaggctccaggaaaatgtaattttgggtagggtttgtcaagcggtggtgcctgaatgtatcttctcctgtcacctccctcctttcacattagagttattgggtctacctttactgggtctactcctggatcctgctctatttaattatccttttttgtgccaaagcagccaaaccgccaatcaccacaaattgtagattaatgtttccagcattagcttgctgctcctggttccatacctgcaatcagttgcaaatacaccatgttttgtactaccccctcccccaattaaactttataattaaatgaaaaagtgtaggagtttgcctagtgaccacaaagcattttttggtgcattggaatcttgtgtatgcttgaatttaaaattatgaattcaaatgttgttgaattacatgcaggacccataaactttgaattattatgatgtgaaaaatgatttataatacagtatgtgcacaagtgtagatagatataagaaaatgaaatataggggaagggatcattggtagtgtcaccctaaagtgctggaaaagttttaaggtgcttcccatagaacaacttcttgggggagcactattggtatggaattgctcttattcagtttttttggggtttctgaggatcctccatgtcccctagattattgacctcactttgttctttgtatcgatttattgttgtaggcagttataatagtaggaggtatgcgtgctttgtagaatcatacagatgcttgttgaacatgtgtctttgtttctgtgtctgtgtcaacaagatgttctagcatcaacaagatcctgattagcatgtcaacttccagacaaaaagagtagagcagcaaaatggagaaccatggaaaattggatgggtgggatgaagttctggaagaagaagatgagttagcgagtgtatgcaaatatcctattagcacatcgtacctttcttatggaacaagcagaagtatgttatctcatttccagcatctctcctcttagagagaatgttgtgagcaaaggaggactttgttttgttaaactataccaggtggacaatctaatgcgtgtcctctgtttccatactgcagggggcaaaagtgtaaagaagcctagattctcattacgaggatatgattttgttccattagatgttaagactgataacttgtgcattggggagcaagatggttcttctgcagtgccatcaactaaagcttcacaaaccatggtggctgaacggttggaaaacgttgaggaacaaactgaagatttggcaccagattgcaccaacatgctccaagcatatcaatcagggagcaggaagtttcatccggagtgccaccaactaaagcttcacaagctttgatggatgaaccgtttgaaaatgacaatggacaaactgaagagttgccatcagagctcccctgctcgatcaagagaccaaaattttcagttgcagaacttctagaagacctacagggtagaagtggttcttatgttgagacagcatctttgtcacaccaacacaccagagctaaacattggaagccaaagttcctttcttccgagaagaaaacaatagctattctaggagacaggagtattgacagtgaggaccccttggagcatgtaattgacggaacatctagcgaggaggaagatgctactcaaaaccacttgagtttggtgaacaaagatgagaaccagcaaactatggctgacctatttcaagaagtttttaatccaacaaacatggatggtgccatgaaatcaatgagatcaacaggagctggtaactatggaagaatgcaacagattatgcacatggagaaagattggcatgtggaattctcgaggcagtatagcagagagcacagttattcaggtgatttaaagggaactactgttcagattatgtcaaggtcattggaaggaaagctaacagtctgcagctgcatgttccaggaaaagggcaatgatgccactataagtaatgcctcagcagacggcaccatggatgaaagcagaactaggaggactattatcttcagtccaaagatatgtaacaatgtagatcttctggttggaaacataattcatatcttcccaccatggaaggaagttaaaatacaagaagagcatgtgattatttgcacctacttctcgcaccaccaccggacttgatactcggagatatttctgtgctagctgcaaagctagaggcagaccgccagcataaccgttgctgacagtttaatgttgatgtactcgcagggtctattctgtttgttttgtaatcacaagtgtactggctgcaaagctataggcagaccgcaagcataaccgttcctgatagcctaatgctgatgtacttgcagtctctcttctgttttacaatcacaagttactgaggcctagttcggattctctaa

SEQ ID NO: 55721 - DNA, 1971 bp, Zea Mays
gggccggcgtcgagtggagatccaatcgaaaatcgaactgacttcatcttctgttggtcaacaggagagcccgttgaaatcctggacctctcaattgtccttttctctctccccgcccaccttcccctgttctgccgcctccccagtccggcgtgcatcagcagcgacatcagagtcggcgatgggaggcgtcatcgacgttctcgtccccttatgttgatgaagtggtgtgccgtggagattccttgaccgatttcttgccggtaagacggagtctgccatctgcgtggctggtcatcgcggtgagcaaggaacgacgaagtgcgcccctccgcccttcggctcgtcgttgtgccttgcgtcgtcgggtggagttccttcccctgcttcaagctaattcgacaaaaagagtagagcagcaaaatggagaaccatggaaaattggatgggtgggatgaagttctggaagaagaagatgagttagcgagtggggcaaaagtgtaaagaagcctagattctcattacgaggatatgattttgttccattagatgttaagactgataacttgtgcattggggagcaagatggttcttctgcagtgccatcaactaaagcttcacaaaccatggtggctgaacggttggaaaacgttgaggaacaaactgaagatttggcaccagagtttgcccttccacccaaagcaaatactttagtttctgagctgctagataatttacagcgtaggggtggttcttttgtcaggacaccatctttggtgtgtgttgtcttgcattattttttcatattggagttcttacataacacttatattacttctgaatattttaatctagttgcaccaacatgctccaagcatatcaatcagggagcaggaagtttcatccggagtgccaccaactaaagcttcacaagctttgatggatgaaccgtttgaaaatgacaatggacaaactgaagagttgccatcagagctcccctgctcgatcaagagaccaaaattttcagttgcagaacttctagaagacctacagggtagaagtggttcttatgttgagacagcatctttgtcacaccaacacaccagagctaaacattggaagccaaagttcctttcttccgagaagaaaacaatagctattctaggagacaggagtattgacagtgaggaccccttggagcatgtaattgacggaacatctagcgaggaggaagatgctactcaaaaccacttgagtttggtgaacaaagatgagaaccagcaaactatggctgacctatttcaagaagtttttaatccaacaaacatggatggtgccatgaaatcaatgagatcaacaggagctggtaactatggaagaatgcaacagattatgcacatggagaaagattggcatgtggaattctcgaggcagtatagcagagagcacaattatgtcaaggtcattggaaggaaagctaacagtctgcagctgcatgttccaggaaaagggcaatgatgccactataagtaatgcctcagcagacggcaccatggatgaaagcagaactaggaggactattatcttcagtccaaagatatgtaacaatgtagatcttctggttggaaacataattcatatcttcccaccatggaaggaagttaaaatacaagaagagcatgtgattatttgcacctacttctcgcaccaccaccggacttgatactcggagatatttctgtgctagctgcaaagctagaggcagaccgccagcataaccgttgctgacagtttaatgttgatgtactcgcagggtctattctgtttgttttgtaatcacaagtgtactggctgcaaagctataggcagaccgcaagcataaccgttcctgatagcctaatgctgatgtacttgcagtctctcttctgttttacaatcacaagttactgaggcctagttcggattctctaa

SEQ ID NO: 55722 - DNA, 1804 bp, Zea Mays
gggccggcgtcgagtggagatccaatcgaaaatcgaactgacttcatcttctgttggtcaacaggagagcccgttgaaatcctggacctctcaattgtccttttctctctccccgcccaccttcccctgttctgccgcctccccagtccggcgtgcatcagcagcgacatcagagtcggcgatgggaggcgtcatcgacgttctcgtccccttatgttgatgaagtggtgtgccgtggagattccttgaccgatttcttgccggtaagacggagtctgccatctgcgtggctggtcatcgcggtgagcaaggaacgacgaagtgcgcccctccgcccttcggctcgtcgttgtgccttgcgtcgtcgggtggagttccttcccctgcttcaagctaattcgggggcaaaagtgtaaagaagcctagattctcattacgaggatatgattttgttccattagatgttaagactgataacttgtgcattggggagcaagatggttcttctgcagtgccatcaactaaagcttcacaaaccatggtggctgaacggttggaaaacgttgaggaacaaactgaagatttggcaccagagtttgcccttccacccaaagcaaatactttagtttctgagctgctagataatttacagcgtaggggtggttcttttgtcaggacaccatctttgttgcaccaacatgctccaagcatatcaatcagggagcaggaagtttcatccggagtgccaccaactaaagcttcacaagctttgatggatgaaccgtttgaaaatgacaatggacaaactgaagagttgccatcagagctcccctgctcgatcaagagaccaaaattttcagttgcagaacttctagaagacctacagggtagaagtggttcttatgttgagacagcatctttgtcacaccaacacaccagagctaaacattggaagccaaagttcctttcttccgagaagaaaacaatagctattctaggagacaggagtattgacagtgaggaccccttggagcatgtaattgacggaacatctagcgaggaggaagatgctactcaaaaccacttgagtttggtgaacaaagatgagaaccagcaaactatggctgacctatttcaagaagtttttaatccaacaaacatggatggtgccatgaaatcaatgagatcaacaggagctggtaactatggaagaatgcaacagattatgcacatggagaaagattggcatgtggaattctcgaggcagtatagcagagagcacaattatgtcaaggtcattggaaggaaagctaacagtctgcagctgcatgttccaggaaaagggcaatgatgccactataagtaatgcctcagcagacggcaccatggatgaaagcagaactaggaggactattatcttcagtccaaagatatgtaacaatgtagatcttctggttggaaacataattcatatcttcccaccatggaaggaagttaaaatacaagaagagcatgtgattatttgcacctacttctcgcaccaccaccggacttgatactcggagatatttctgtgctagctgcaaagctagaggcagaccgccagcataaccgttgctgacagtttaatgttgatgtactcgcagggtctattctgtttgttttgtaatcacaagtgtactggctgcaaagctataggcagaccgcaagcataaccgttcctgatagcctaatgctgatgtacttgcagtctctcttctgttttacaatcacaagttactgaggcctagttcggattctctaa

SEQ ID NO: 55723 - DNA, 3197 bp, Zea Mays
gggccggcgtcgagtggagatccaatcgaaaatcgaactgacttcatcttctgttggtcaacaggagagcccgttgaaatcctggacctctcaattgtccttttctctctccccgcccaccttcccctgttctgccgcctccccagtccggcgtgcatcagcagcgacatcagagtcggcgatgggaggcgtcatcgacgttctcgtccccttatgttgatgaagtggtgtgccgtggagattccttgaccgatttcttgccggtaagacggagtctgccatctgcgtggctggtcatcgcggtgagcaaggaacgacgaagtgcgcccctccgcccttcggctcgtcgttgtgccttgcgtcgtcgggtggagttccttcccctgcttcaagctaattcggtttttccctctcatcctgtcagttttctctttgttggcattttcggttctctgctgtgaggttttttaaggtgattttgttcgcatctgtgatttgtgtctctgtgttcatcgtttgatgagggattcgatgccaaattcatttgaatcgattacaggaaatcatgcaaaaaatcaaacacatacctgtagaattgcgttggattggattccaaaaaataatgaaggaaaaaggaaaaacaaatctgatccgattttgtggcctgcatgcttactaacttcgtttttaagaggctccaggaaaatgtaattttgggtagggtttgtcaagcggtggtgcctgaatgtatcttctcctgtcacctccctcctttcacattagagttattgggtctacctttactgggtctactcctggatcctgctctatttaattatccttttttgtgccaaagcagccaaaccgccaatcaccacaaattgtagattaatgtttccagcattagcttgctgctcctggttccatacctgcaatcagttgcaaatacaccatgttttgtactaccccctcccccaattaaactttataattaaatgaaaaagtgtaggagtttgcctagtgaccacaaagcattttttggtgcattggaatcttgtgtatgcttgaatttaaaattatgaattcaaatgttgttgaattacatgcaggacccataaactttgaattattatgatgtgaaaaatgatttataatacagtatgtgcacaagtgtagatagatataagaaaatgaaatataggggaagggatcattggtagtgtcaccctaaagtgctggaaaagttttaaggtgcttcccatagaacaacttcttgggggagcactattggtatggaattgctcttattcagtttttttggggtttctgaggatcctccatgtcccctagattattgacctcactttgttctttgtatcgatttattgttgtaggcagttataatagtaggaggtatgcgtgctttgtagaatcatacagatgcttgttgaacatgtgtctttgtttctgtgtctgtgtcaacaagatgttctagcatcaacaagatcctgattagcatgtcaacttccagacaaaaagagtagagcagcaaaatggagaaccatggaaaattggatgggtgggatgaagttctggaagaagaagatgagttagcgagtgtatgcaaatatcctattagcacatcgtacctttcttatggaacaagcagaagtatgttatctcatttccagcatctctcctcttagagagaatgttgtgagcaaaggaggactttgttttgttaaactataccaggtggacaatctaatgcgtgtcctctgtttccatactgcagggggcaaaagtgtaaagaagcctagattctcattacgaggatatgattttgttccattagatgttaagactgataacttgtgcattggggagcaagatggttcttctgcagtgccatcaactaaagcttcacaaaccatggtggctgaacggttggaaaacgttgaggaacaaactgaagatttggcaccagagtttgcccttccacccaaagcaaatactttagtttctgagctgctagataatttacagcgtaggggtggttcttttgtcaggacaccatctttgttgcaccaacatgctccaagcatatcaatcagggagcaggaagtttcatccggagtgccaccaactaaagcttcacaagctttgatggatgaaccgtttgaaaatgacaatggacaaactgaagagttgccatcagagctcccctgctcgatcaagagaccaaaattttcagttgcagaacttctagaagacctacagggtagaagtggttcttatgttgagacagcatctttgtcacaccaacacaccagagctaaacattggaagccaaagttcctttcttccgagaagaaaacaatagctattctaggagacaggagtattgacagtgaggaccccttggagcatgtaattgacggaacatctagcgaggaggaagatgctactcaaaaccacttgagtttggtgaacaaagatgagaaccagcaaactatggctgacctatttcaagaagtttttaatccaacaaacatggatggtgccatgaaatcaatgagatcaacaggagctggtaactatggaagaatgcaacagattatgcacatggagaaagattggcatgtggaattctcgaggcagtatagcagagagcacaattatgtcaaggtcattggaaggaaagctaacagtctgcagctgcatgttccaggaaaagggcaagatgccactataagtaatgcctcagcagacggcaccatggatgaaagcagaactaggaggactattatcttcagtccaaagatatgtaacaatgtagatcttctggttggaaacataattcatatcttcccaccatggaaggaagttaaaatacaagaagagcatgtgattatttgcacctacttctcgcaccaccaccggacttgatactcggagatatttctgtgctagctgcaaagctagaggcagaccgccagcataaccgttgctgacagtttaatgttgatgtactcgcagggtctattctgtttgttttgtaatcacaagtgtactggctgcaaagctataggcagaccgcaagcataaccgttcctgatagcctaatgctgatgtacttgcagtctctcttctgttttacaatcacaagttactgaggcctagttcggattctctaa

SEQ ID NO: 55724 - DNA, 1800 bp, Zea Mays
gggccggcgtcgagtggagatccaatcgaaaatcgaactgacttcatcttctgttggtcaacaggagagcccgttgaaatcctggacctctcaattgtccttttctctctccccgcccaccttcccctgttctgccgcctccccagtccggcgtgcatcagcagcgacatcagagtcggcgatgggaggcgtcatcgacgttctcgtccccttatgttgatgaagtggtgtgccgtggagattccttgaccgatttcttgccggtaagacggagtctgccatctgcgtggctggtcatcgcggtgagcaaggaacgacgaagtgcgcccctccgcccttcggctcgtcgttgtgccttgcgtcgtcgggtggagttccttcccctgcttcaagctaattcgacaaaaagagtagagcagcaaaatggagaaccatggaaaattggatgggtgggatgaagttctggaagaagaagatgagttagcgagtgtatgcaaatatcctattagcacatcgtacctttcttatggaacaagcagaaggggcaaaagtgtaaagaagcctagattctcattacgaggatatgattttgttccattagatgttaagactgataacttgtgcattggggagcaagatggttcttctgcagtgccatcaactaaagcttcacaaaccatggtggctgaacggttggaaaacgttgaggaacaaactgaagatttggcaccagagtttgcccttccacccaaagcaaatactttagtttctgagctgctagataatttacagcgtaggggtggttcttttgtcaggacaccatctttgttgcaccaacatgctccaagcatatcaatcagggagcaggaagtttcatccggagtgccaccaactaaagcttcacaagctttgatggatgaaccgtttgaaaatgacaatggacaaactgaagagttgccatcagagctcccctgctcgatcaagagaccaaaattttcagttgcagaacttctagaagacctacagggtagaagtggttcttatgttgagacagcatctttggatgctactcaaaaccacttgagtttggtgaacaaagatgagaaccagcaaactatggctgacctatttcaagaagtttttaatccaacaaacatggatggtgccatgaaatcaatgagatcaacaggagctggtaactatggaagaatgcaacagattatgcacatggagaaagattggcatgtggaattctcgaggcagtatagcagagagcacaattatgtcaaggtcattggaaggaaagctaacagtctgcagctgcatgttccaggaaaagggcaatgatgccactataagtaatgcctcagcagacggcaccatggatgaaagcagaactaggaggactattatcttcagtccaaagatatgtaacaatgtagatcttctggttggaaacataattcatatcttcccaccatggaaggaagttaaaatacaagaagagcatgtgattatttgcacctacttctcgcaccaccaccggacttgatactcggagatatttctgtgctagctgcaaagctagaggcagaccgccagcataaccgttgctgacagtttaatgttgatgtactcgcagggtctattctgtttgttttgtaatcacaagtgtactggctgcaaagctataggcagaccgcaagcataaccgttcctgatagcctaatgctgatgtacttgcagtctctcttctgttttacaatcacaagttactgaggcctagttcggattctctaa

SEQ ID NO: 55725 - DNA, 2114 bp, Zea Mays
gggccggcgtcgagtggagatccaatcgaaaatcgaactgacttcatcttctgttggtcaacaggagagcccgttgaaatcctggacctctcaattgtccttttctctctccccgcccaccttcccctgttctgccgcctccccagtccggcgtgcatcagcagcgacatcagagtcggcgatgggaggcgtcatcgacgttctcgtccccttatgttgatgaagtggtgtgccgtggagattccttgaccgatttcttgccggtaagacggagtctgccatctgcgtggctggtcatcgcggtgagcaaggaacgacgaagtgcgcccctccgcccttcggctcgtcgttgtgccttgcgtcgtcggacaaaaagagtagagcagcaaaatggagaaccatggaaaattggatgggtgggatgaagttctggaagaagaagatgagttagcgagtgtatgcaaatatcctattagcacatcgtacctttcttatggaacaagcagaagtatgttatctcatttccagcatctctcctcttagagagaatgttgtgagcaaaggaggactttgttttgttaaactataccaggtggacaatctaatgcgtgtcctctgtttccatactgcagggggcaaaagtgtaaagaagcctagattctcattacgaggatatgattttgttccattagatgttaagactgataacttgtgcattggggagcaagatggttcttctgcagtgccatcaactaaagcttcacaaaccatggtggctgaacggttggaaaacgttgaggaacaaactgaagatttggcaccagagtttgcccttccacccaaagcaaatactttagtttctgagctgctagataatttacagcgtaggggtggttcttttgtcaggacaccatctttggtgtgtgttgtcttgcattattttttcatattggagttcttacataacacttatattacttctgaatattttaatctagttgcaccaacatgctccaagcatatcaatcagggagcaggaagtttcatccggagtgccaccaactaaagcttcacaagctttgatggatgaaccgtttgaaaatgacaatggacaaactgaagagttgccatcagagctcccctgctcgatcaagagaccaaaattttcagttgcagaacttctagaagacctacagggtagaagtggttcttatgttgagacagcatctttgtcacaccaacacaccagagctaaacattggaagccaaagttcctttcttccgagaagaaaacaatagctattctaggagacaggagtattgacagtgaggaccccttggagcatgtaattgacggaacatctagcgaggaggaagatgctactcaaaaccacttgagtttggtgaacaaagatgagaaccagcaaactatggctgacctatttcaagaagtttttaatccaacaaacatggatggtgccatgaaatcaatgagatcaacaggagctggtaactatggaagaatgcaacagattatgcacatggagaaagattggcatgtggaattctcgaggcagtatagcagagagcacaattatgtcaaggtcattggaaggaaagctaacagtctgcagctgcatgttccaggaaaagggcaatgatgccactataagtaatgcctcagcagacggcaccatggatgaaagcagaactaggaggactattatcttcagtccaaagatatgtaacaatgtagatcttctggttggaaacataattcatatcttcccaccatggaaggaagttaaaatacaagaagagcatgtgattatttgcacctacttctcgcaccaccaccggacttgatactcggagatatttctgtgctagctgcaaagctagaggcagaccgccagcataaccgttgctgacagtttaatgttgatgtactcgcagggtctattctgtttgttttgtaatcacaagtgtactggctgcaaagctataggcagaccgcaagcataaccgttcctgatagcctaatgctgatgtacttgcagtctctcttctgttttacaatcacaagttactgaggcctagttcggattctctaa

SEQ ID NO: 55726 - DNA, 2878 bp, Zea Mays
gggccggcgtcgagtggagatccaatcgaaaatcgaactgacttcatcttctgttggtcaacaggagagcccgttgaaatcctggacctctcaattgtccttttctctctccccgcccaccttcccctgttctgccgcctccccagtccggcgtgcatcagcagcgacatcagagtcggcgatgggaggcgtcatcgacgttctcgtccccttatgttgatgaagtggtgtgccgtggagattccttgaccgatttcttgccggtaagacggagtctgccatctgcgtggctggtcatcgcggtgagcaaggaacgacgaagtgcgcccctccgcccttcggctcgtcgttgtgccttgcgtcgtcgggtggagttccttcccctgcttcaagctaattcggtttttccctctcatcctgtcagttttctctttgttggcattttcggttctctgctgtgaggttttttaaggtgattttgttcgcatctgtgatttgtgtctctgtgttcatcgtttgatgagggattcgatgccaaattcatttgaatcgattacaggaaatcatgcaaaaaatcaaacacatacctgtagaattgcgttggattggattccaaaaaataatgaaggaaaaaggaaaaacaaatctgatccgattttgtggcctgcatgcttactaacttcgtttttaagaggctccaggaaaatgtaattttgggtagggtttgtcaagcggtggtgcctgaatgtatcttctcctgtcacctccctcctttcacattagagttattgggtctacctttactgggtctactcctggatcctgctctatttaattatccttttttgtgccaaagcagccaaaccgccaatcaccacaaattgtagattaatgtttccagcattagcttgctgctcctggttccatacctgcaatcagttgcaaatacaccatgttttgtactaccccctcccccaattaaactttataattaaatgaaaaagtgtaggagtttgcctagtgaccacaaagcattttttggtgcattggaatcttgtgtatgcttgaatttaaaattatgaattcaaatgttgttgaattacatgcaggacccataaactttgaattattatgatgtgaaaaatgatttataatacagtatgtgcacaagtgtagatagatataagaaaatgaaatataggggaagggatcattggtagtgtcaccctaaagtgctggaaaagttttaaggtgcttcccatagaacaacttcttgggggagcactattggtatggaattgctcttattcagtttttttggggtttctgaggatcctccatgtcccctagattattgacctcactttgttctttgtatcgatttattgttgtaggcagttataatagtaggaggtatgcgtgctttgtagaatcatacagatgcttgttgaacatgtgtctttgtttctgtgtctgtgtcaacaagatgttctagcatcaacaagatcctgattagcatgtcaacttccagacaaaaagagtagagcagcaaaatggagaaccatggaaaattggatgggtgggatgaagttctggaagaagaagatgagttagcgagtggggcaaaagtgtaaagaagcctagattctcattacgaggatatgattttgttccattagatgttaagactgataacttgtgcattggggagcaagatggttcttctgcagtgccatcaactaaagcttcacaaaccatggtggctgaacggttggaaaacgttgaggaacaaactgaagatttggcaccagagtttgcccttccacccaaagcaaatactttagtttctgagctgctagataatttacagcgtaggggtggttcttttgtcaggacaccatctttgttgcaccaacatgctccaagcatatcaatcagggagcaggaagtttcatccggagtgccaccaactaaagcttcacaagctttgatggatgaaccgtttgaaaatgacaatggacaaactgaagagttgccatcagagctcccctgctcgatcaagagaccaaaattttcagttgcagaacttctagaagacctacagggtagaagtggttcttatgttgagacagcatctttggatgctactcaaaaccacttgagtttggtgaacaaagatgagaaccagcaaactatggctgacctatttcaagaagtttttaatccaacaaacatggatggtgccatgaaatcaatgagatcaacaggagctggtaactatggaagaatgcaacagattatgcacatggagaaagattggcatgtggaattctcgaggcagtatagcagagagcacaattatgtcaaggtcattggaaggaaagctaacagtctgcagctgcatgttccaggaaaagggcaatgatgccactataagtaatgcctcagcagacggcaccatggatgaaagcagaactaggaggactattatcttcagtccaaagatatgtaacaatgtagatcttctggttggaaacataattcatatcttcccaccatggaaggaagttaaaatacaagaagagcatgtgattatttgcacctacttctcgcaccaccaccggacttgatactcggagatatttctgtgctagctgcaaagctagaggcagaccgccagcataaccgttgctgacagtttaatgttgatgtactcgcagggtctattctgtttgttttgtaatcacaagtgtactggctgcaaagctataggcagaccgcaagcataaccgttcctgatagcctaatgctgatgtacttgcagtctctcttctgttttacaatcacaagttactgaggcctagttcggattctctaa

SEQ ID NO: 55727 - DNA, 3329 bp, Zea Mays
gggccggcgtcgagtggagatccaatcgaaaatcgaactgacttcatcttctgttggtcaacaggagagcccgttgaaatcctggacctctcaattgtccttttctctctccccgcccaccttcccctgttctgccgcctccccagtccggcgtgcatcagcagcgacatcagagtcggcgatgggaggcgtcatcgacgttctcgtccccttatgttgatgaagtggtgtgccgtggagattccttgaccgatttcttgccggtaagacggagtctgccatctgcgtggctggtcatcgcggtgagcaaggaacgacgaagtgcgcccctccgcccttcggctcgtcgttgtgccttgcgtcgtcgggtggagttccttcccctgcttcaagctaattcggtttttccctctcatcctgtcagttttctctttgttggcattttcggttctctgctgtgaggttttttaaggtgattttgttcgcatctgtgatttgtgtctctgtgttcatcgtttgatgagggattcgatgccaaattcatttgaatcgattacaggaaatcatgcaaaaaatcaaacacatacctgtagaattgcgttggattggattccaaaaaataatgaaggaaaaaggaaaaacaaatctgatccgattttgtggcctgcatgcttactaacttcgtttttaagaggctccaggaaaatgtaattttgggtagggtttgtcaagcggtggtgcctgaatgtatcttctcctgtcacctccctcctttcacattagagttattgggtctacctttactgggtctactcctggatcctgctctatttaattatccttttttgtgccaaagcagccaaaccgccaatcaccacaaattgtagattaatgtttccagcattagcttgctgctcctggttccatacctgcaatcagttgcaaatacaccatgttttgtactaccccctcccccaattaaactttataattaaatgaaaaagtgtaggagtttgcctagtgaccacaaagcattttttggtgcattggaatcttgtgtatgcttgaatttaaaattatgaattcaaatgttgttgaattacatgcaggacccataaactttgaattattatgatgtgaaaaatgatttataatacagtatgtgcacaagtgtagatagatataagaaaatgaaatataggggaagggatcattggtagtgtcaccctaaagtgctggaaaagttttaaggtgcttcccatagaacaacttcttgggggagcactattggtatggaattgctcttattcagtttttttggggtttctgaggatcctccatgtcccctagattattgacctcactttgttctttgtatcgatttattgttgtaggcagttataatagtaggaggtatgcgtgctttgtagaatcatacagatgcttgttgaacatgtgtctttgtttctgtgtctgtgtcaacaagatgttctagcatcaacaagatcctgattagcatgtcaacttccagacaaaaagagtagagcagcaaaatggagaaccatggaaaattggatgggtgggatgaagttctggaagaagaagatgagttagcgagtgtatgcaaatatcctattagcacatcgtacctttcttatggaacaagcagaagtatgttatctcatttccagcatctctcctcttagagagaatgttgtgagcaaaggaggactttgttttgttaaactataccaggtggacaatctaatgcgtgtcctctgtttccatactgcagggggcaaaagtgtaaagaagcctagattctcattacgaggatatgattttgttccattagatgttaagactgataacttgtgcattggggagcaagatggttcttctgcagtgccatcaactaaagcttcacaaaccatggtggctgaacggttggaaaacgttgaggaacaaactgaagatttggcaccagagtttgcccttccacccaaagcaaatactttagtttctgagctgctagataatttacagcgtaggggtggttcttttgtcaggacaccatctttggtgtgtgttgtcttgcattattttttcatattggagttcttacataacacttatattacttctgaatattttaatctagttgcaccaacatgctccaagcatatcaatcagggagcaggaagtttcatccggagtgccaccaactaaagcttcacaagctttgatggatgaaccgtttgaaaatgacaatggacaaactgaagagttgccatcagagctcccctgctcgatcaagagaccaaaattttcagttgcagaacttctagaagacctacaggtcacaccaacacaccagagctaaacattggaagccaaagttcctttcttccgagaagaaaacaatagctattctaggagacaggagtattgacagtgaggaccccttggagcatgtaattgacggaacatctagcgaggaggaagatgctactcaaaaccacttgagtttggtgaacaaagatgagaaccagcaaactatggctgacctatttcaagaagtttttaatccaacaaacatggatggtgccatgaaatcaatgagatcaacaggagctggtaactatggaagaatgcaacagattatgcacatggagaaagattggcatgtggaattctcgaggcagtatagcagagagcacagttattcaggtgatttaaagggaactactgttcagattatgtcaaggtcattggaaggaaagctaacagtctgcagctgcatgttccaggaaaagggcaatgtctgtgatccatgtctccatcttccaaaaactcctatctactcatgtggcagatgccactataagtaatgcctcagcagacggcaccatggatgaaagcagaactaggaggactattatcttcagtccaaagatatgtaacaatgtagatcttctggttggaaacataattcatatcttcccaccatggaaggaagttaaaatacaagaagagcatgtgattatttgcacctacttctcgcaccaccaccggacttgatactcggagatatttctgtgctagctgcaaagctagaggcagaccgccagcataaccgttgctgacagtttaatgttgatgtactcgcagggtctattctgtttgttttgtaatcacaagtgtactggctgcaaagctataggcagaccgcaagcataaccgttcctgatagcctaatgctgatgtacttgcagtctctcttctgttttacaatcacaagttactgaggcctagttcggattctctaa

SEQ ID NO: 55728 - DNA, 3074 bp, Zea Mays
gggccggcgtcgagtggagatccaatcgaaaatcgaactgacttcatcttctgttggtcaacaggagagcccgttgaaatcctggacctctcaattgtccttttctctctccccgcccaccttcccctgttctgccgcctccccagtccggcgtgcatcagcagcgacatcagagtcggcgatgggaggcgtcatcgacgttctcgtccccttatgttgatgaagtggtgtgccgtggagattccttgaccgatttcttgccggtaagacggagtctgccatctgcgtggctggtcatcgcggtgagcaaggaacgacgaagtgcgcccctccgcccttcggctcgtcgttgtgccttgcgtcgtcgggtggagttccttcccctgcttcaagctaattcggtttttccctctcatcctgtcagttttctctttgttggcattttcggttctctgctgtgaggttttttaaggtgattttgttcgcatctgtgatttgtgtctctgtgttcatcgtttgatgagggattcgatgccaaattcatttgaatcgattacaggaaatcatgcaaaaaatcaaacacatacctgtagaattgcgttggattggattccaaaaaataatgaaggaaaaaggaaaaacaaatctgatccgattttgtggcctgcatgcttactaacttcgtttttaagaggctccaggaaaatgtaattttgggtagggtttgtcaagcggtggtgcctgaatgtatcttctcctgtcacctccctcctttcacattagagttattgggtctacctttactgggtctactcctggatcctgctctatttaattatccttttttgtgccaaagcagccaaaccgccaatcaccacaaattgtagattaatgtttccagcattagcttgctgctcctggttccatacctgcaatcagttgcaaatacaccatgttttgtactaccccctcccccaattaaactttataattaaatgaaaaagtgtaggagtttgcctagtgaccacaaagcattttttggtgcattggaatcttgtgtatgcttgaatttaaaattatgaattcaaatgttgttgaattacatgcaggacccataaactttgaattattatgatgtgaaaaatgatttataatacagtatgtgcacaagtgtagatagatataagaaaatgaaatataggggaagggatcattggtagtgtcaccctaaagtgctggaaaagttttaaggtgcttcccatagaacaacttcttgggggagcactattggtatggaattgctcttattcagtttttttggggtttctgaggatcctccatgtcccctagattattgacctcactttgttctttgtatcgatttattgttgtaggcagttataatagtaggaggtatgcgtgctttgtagaatcatacagatgcttgttgaacatgtgtctttgtttctgtgtctgtgtcaacaagatgttctagcatcaacaagatcctgattagcatgtcaacttccagacaaaaagagtagagcagcaaaatggagaaccatggaaaattggatgggtgggatgaagttctggaagaagaagatgagttagcgagtgtatgcaaatatcctattagcacatcgtacctttcttatggaacaagcagaaggggcaaaagtgtaaagaagcctagattctcattacgaggatatgattttgttccattagatgttaagactgataacttgtgcattggggagcaagatggttcttctgcagtgccatcaactaaagcttcacaaaccatggtggctgaacggttggaaaacgttgaggaacaaactgaagatttggcaccagagtttgcccttccacccaaagcaaatactttagtttctgagctgctagataatttacagcgtaggggtggttcttttgtcaggacaccatctttgttgcaccaacatgctccaagcatatcaatcagggagcaggaagtttcatccggagtgccaccaactaaagcttcacaagctttgatggatgaaccgtttgaaaatgacaatggacaaactgaagagttgccatcagagctcccctgctcgatcaagagaccaaaattttcagttgcagaacttctagaagacctacagggtagaagtggttcttatgttgagacagcatctttgtcacaccaacacaccagagctaaacattggaagccaaagttcctttcttccgagaagaaaacaatagctattctaggagacaggagtattgacagtgaggaccccttggagcatgtaattgacggaacatctagcgaggaggaagatgctactcaaaaccacttgagtttggtgaacaaagatgagaaccagcaaactatggctgacctatttcaagaagtttttaatccaacaaacatggatggtgccatgaaatcaatgagatcaacaggagctggtaactatggaagaatgcaacagattatgcacatggagaaagattggcatgtggaattctcgaggcagtatagcagagagcacaattatgtcaaggtcattggaaggaaagctaacagtctgcagctgcatgttccaggaaaagggcaatgatgccactataagtaatgcctcagcagacggcaccatggatgaaagcagaactaggaggactattatcttcagtccaaagatatgtaacaatgtagatcttctggttggaaacataattcatatcttcccaccatggaaggaagttaaaatacaagaagagcatgtgattatttgcacctacttctcgcaccaccaccggacttgatactcggagatatttctgtgctagctgcaaagctagaggcagaccgccagcataaccgttgctgacagtttaatgttgatgtactcgcagggtctattctgtttgttttgtaatcacaagtgtactggctgcaaagctataggcagaccgcaagcataaccgttcctgatagcctaatgctgatgtacttgcagtctctcttctgttttacaatcacaagttactgaggcctagttcggattctctaa

SEQ ID NO: 55729 - DNA, 2103 bp, Zea Mays
gggccggcgtcgagtggagatccaatcgaaaatcgaactgacttcatcttctgttggtcaacaggagagcccgttgaaatcctggacctctcaattgtccttttctctctccccgcccaccttcccctgttctgccgcctccccagtccggcgtgcatcagcagcgacatcagagtcggcgatgggaggcgtcatcgacgttctcgtccccttatgttgatgaagtggtgtgccgtggagattccttgaccgatttcttgccggtaagacggagtctgccatctgcgtggctggtcatcgcggtgagcaaggaacgacgaagtgcgcccctccgcccttcggctcgtcgttgtgccttgcgtcgtcgggtggagttccttcccctgcttcaagctaattcgatgttctagcatcaacaagatcctgattagcatgtcaacttccagacaaaaagagtagagcagcaaaatggagaaccatggaaaattggatgggtgggatgaagttctggaagaagaagatgagttagcgagtgtatgcaaatatcctattagcacatcgtacctttcttatggaacaagcagaaggggcaaaagtgtaaagaagcctagattctcattacgaggatatgattttgttccattagatgttaagactgataacttgtgcattggggagcaagatggttcttctgcagtgccatcaactaaagcttcacaaaccatggtggctgaacggttggaaaacgttgaggaacaaactgaagatttggcaccagagtttgcccttccacccaaagcaaatactttagtttctgagctgctagataatttacagcgtaggggtggttcttttgtcaggacaccatctttggtgtgtgttgtcttgcattattttttcatattggagttcttacataacacttatattacttctgaatattttaatctagttgcaccaacatgctccaagcatatcaatcagggagcaggaagtttcatccggagtgccaccaactaaagcttcacaagctttgatggatgaaccgtttgaaaatgacaatggacaaactgaagagttgccatcagagctcccctgctcgatcaagagaccaaaattttcagttgcagaacttctagaagacctacagggtagaagtggttcttatgttgagacagcatctttgtcacaccaacacaccagagctaaacattggaagccaaagttcctttcttccgagaagaaaacaatagctattctaggagacaggagtattgacagtgaggaccccttggagcatgtaattgacggaacatctagcgaggaggaagatgctactcaaaaccacttgagtttggtgaacaaagatgagaaccagcaaactatggctgacctatttcaagaagtttttaatccaacaaacatggatggtgccatgaaatcaatgagatcaacaggagctggtaactatggaagaatgcaacagattatgcacatggagaaagattggcatgtggaattctcgaggcagtatagcagagagcacagttattcaggtgatttaaagggaactactgttcagattatgtcaaggtcattggaaggaaagctaacagtctgcagctgcatgttccaggaaaagggcaatgatgccactataagtaatgcctcagcagacggcaccatggatgaaagcagaactaggaggactattatcttcagtccaaagatatgtaacaatgtagatcttctggttggaaacataattcatatcttcccaccatggaaggaagttaaaatacaagaagagcatgtgattatttgcacctacttctcgcaccaccaccggacttgatactcggagatatttctgtgctagctgcaaagctagaggcagaccgccagcataaccgttgctgacagtttaatgttgatgtactcgcagggtctattctgtttgttttgtaatcacaagtgtactggctgcaaagctataggcagaccgcaagcataaccgttcctgatagcctaatgctgatgtacttgcagtctctcttctgttttacaatcacaagttactgaggcctagttcggattctctaa

SEQ ID NO: 55730 - DNA, 3022 bp, Zea Mays
gggccggcgtcgagtggagatccaatcgaaaatcgaactgacttcatcttctgttggtcaacaggagagcccgttgaaatcctggacctctcaattgtccttttctctctccccgcccaccttcccctgttctgccgcctccccagtccggcgtgcatcagcagcgacatcagagtcggcgatgggaggcgtcatcgacgttctcgtccccttatgttgatgaagtggtgtgccgtggagattccttgaccgatttcttgccggtaagacggagtctgccatctgcgtggctggtcatcgcggtgagcaaggaacgacgaagtgcgcccctccgcccttcggctcgtcgttgtgccttgcgtcgtcgggtggagttccttcccctgcttcaagctaattcggtttttccctctcatcctgtcagttttctctttgttggcattttcggttctctgctgtgaggttttttaaggtgattttgttcgcatctgtgatttgtgtctctgtgttcatcgtttgatgagggattcgatgccaaattcatttgaatcgattacaggaaatcatgcaaaaaatcaaacacatacctgtagaattgcgttggattggattccaaaaaataatgaaggaaaaaggaaaaacaaatctgatccgattttgtggcctgcatgcttactaacttcgtttttaagaggctccaggaaaatgtaattttgggtagggtttgtcaagcggtggtgcctgaatgtatcttctcctgtcacctccctcctttcacattagagttattgggtctacctttactgggtctactcctggatcctgctctatttaattatccttttttgtgccaaagcagccaaaccgccaatcaccacaaattgtagattaatgtttccagcattagcttgctgctcctggttccatacctgcaatcagttgcaaatacaccatgttttgtactaccccctcccccaattaaactttataattaaatgaaaaagtgtaggagtttgcctagtgaccacaaagcattttttggtgcattggaatcttgtgtatgcttgaatttaaaattatgaattcaaatgttgttgaattacatgcaggacccataaactttgaattattatgatgtgaaaaatgatttataatacagtatgtgcacaagtgtagatagatataagaaaatgaaatataggggaagggatcattggtagtgtcaccctaaagtgctggaaaagttttaaggtgcttcccatagaacaacttcttgggggagcactattggtatggaattgctcttattcagtttttttggggtttctgaggatcctccatgtcccctagattattgacctcactttgttctttgtatcgatttattgttgtaggcagttataatagtaggaggtatgcgtgctttgtagaatcatacagatgcttgttgaacatgtgtctttgtttctgtgtctgtgtcaacaagatgttctagcatcaacaagatcctgattagcatgtcaacttccagacaaaaagagtagagcagcaaaatggagaaccatggaaaattggatgggtgggatgaagttctggaagaagaagatgagttagcgagtggggcaaaagtgtaaagaagcctagattctcattacgaggatatgattttgttccattagatgttaagactgataacttgtgcattggggagcaagatggttcttctgcagtgccatcaactaaagcttcacaaaccatggtggctgaacggttggaaaacgttgaggaacaaactgaagatttggcaccagagtttgcccttccacccaaagcaaatactttagtttctgagctgctagataatttacagcgtaggggtggttcttttgtcaggacaccatctttgttgcaccaacatgctccaagcatatcaatcagggagcaggaagtttcatccggagtgccaccaactaaagcttcacaagctttgatggatgaaccgtttgaaaatgacaatggacaaactgaagagttgccatcagagctcccctgctcgatcaagagaccaaaattttcagttgcagaacttctagaagacctacaggtcacaccaacacaccagagctaaacattggaagccaaagttcctttcttccgagaagaaaacaatagctattctaggagacaggagtattgacagtgaggaccccttggagcatgtaattgacggaacatctagcgaggaggaagatgctactcaaaaccacttgagtttggtgaacaaagatgagaaccagcaaactatggctgacctatttcaagaagtttttaatccaacaaacatggatggtgccatgaaatcaatgagatcaacaggagctggtaactatggaagaatgcaacagattatgcacatggagaaagattggcatgtggaattctcgaggcagtatagcagagagcacagttattcaggtgatttaaagggaactactgttcagattatgtcaaggtcattggaaggaaagctaacagtctgcagctgcatgttccaggaaaagggcaatgatgccactataagtaatgcctcagcagacggcaccatggatgaaagcagaactaggaggactattatcttcagtccaaagatatgtaacaatgtagatcttctggttggaaacataattcatatcttcccaccatggaaggaagttaaaatacaagaagagcatgtgattatttgcacctacttctcgcaccaccaccggacttgatactcggagatatttctgtgctagctgcaaagctagaggcagaccgccagcataaccgttgctgacagtttaatgttgatgtactcgcagggtctattctgtttgttttgtaatcacaagtgtactggctgcaaagctataggcagaccgcaagcataaccgttcctgatagcctaatgctgatgtacttgcagtctctcttctgttttacaatcacaagttactgaggcctagttcggattctctaa

SEQ ID NO: 55731 - DNA, 2133 bp, Zea Mays
ataaagatctccactccagtatcccctccccgtccgacttgcaacctctcctgaatcccaccgatcacgcgagctccccgccgcgatgtccgatcaccgagcgaagcggccgtccgacggcgcagccactgtggcatcgccggcggcgaagcgcgcccgcgacccgcccgcgccggcgttacccacgaacaaggaagctcccgacatggcccccaagacccgcatcttctgcgacatcctggcctcccgcgccgacgacgaggaactgaatgccgagctcgacaaggccgacatccgcgtaagcatcgctgacgtcgagcaggtgctccgcttctcctacgcgcacccgcgcgccgccgccgccttctttcgctgggcgggataccggtacctcggccacgagcactccccctactcgtggaacctcctcgtcgacatcctcggtaagaatcgcctcttcgagcccatgtgggacacagtcaaatctatgcagtcgcagcagctgctctcgctcgccactttcgcctccatattctcctccctggcggcgacccccggcggttccccgctcaaggcgttcatggacatgccccgctacggcatgacccgcgacacgccggcgctcaactcgctcctctccgcgctgtgtcgtgccaaccgcctcgacgacgctcgcgccgcgatcccagtagcccgcgccgaggctggcacgcgcccggatgccgactcctacgccatcctcctcgagggcagcgaggccgccgccgacctgcgggttgcgcgcgaggtgttcgacgaaatggtgcaggccattggattttatcctgacaacgtgcctgcctatgactccttcctcactacgcttgtttcaagtgactcctccacggcgctaccggaagcaatggagtacctaaatgtcttgagcaggcacggctgttcgccaggagagaagttcttccgtgctgctcttgctgcacaccttgatgcacgacaattgcgcggagccatgaatctctgggatgactttgttgggcgtcgaggactcgtcccagatatggaaatgtacaacacaatgatcaagctgcagggcagtctcgggcatgctgagctgatagtgggttatctcgacgacatgatctccaatggagtcttccctgataccaacacatacaatgtggtcctccagcttttgttgaagggaaagaagcaccgagaggcagccgcaatatttagcgagatggtcaagaacgaatgttggccaaacgagggaaattgttcacttgcacttcgcatgtttttggatacacactattgggagactgggatcaaagtctggtgctgcatggtggagaatggcttgccacctttacaggagtgtgggaacatgcttgtagcaaagctgaaggatgacaggctacctgaggcatgcaaatatgcagaagacatgattgatcggggtatcaagttgagttcagcgacactgtccaagctgaagcagcgcctgcagaggattaagaaaggagagatccatgatcacctgcttgcaaaatggaaggcacattagtttgttgtgctccctcgtatgggtaacctggtgcgatctcagtgttgacaatgaggttgagccttttatcactctgcaacgtttcaaacaacagttggaagtccctttctagtttctacattgaaattatcatattaatcagctggagcatttgggtctcaaggagtgagctggaacatcttccaagaaattctaccgtctgtatcaaatggctaagcctttttcaagaaagagtttgcccaggttatccatagagcatagaagaaatatttccttgaagaatgactagagcgtcagttgtggtcttttttaatatcttttgtgtcctttttttgtttcatgaattttgttgcttgcagctgtctggctgcaatttaggtagctgtttcttttatgtatttgcataattatcaatgcaacattctaggcgtaaaagtgcattctgacgtaccaggtaaaaattgtttggtttcttgacattttaagctcccagcacgtcttccgtttggcatggtttcggcagttctttctttttccccttatgacgcagtttgcttattgaaaattac

SEQ ID NO: 55732 - DNA, 325 bp, Zea Mays
gcaggtttcaattttggcaggaacacttgctcgacttgatagagaagcaccatactacaagaaggatggatataatgatttcaatacgttctatatgcaggctgcatctggtactaaaggtggctcaagtggttctcctgttgttgattgtcaaggaagggctgttgccctgaatgctggaagcaaatcttccagtgcctctgccttcttccttccattagaacgtgttgtcagagcattggatttgatacgtgacagttgggatgcatttggtaccaagacagaatctgtttatattccacgtggtacacttcaggcaacctag

SEQ ID NO: 55733 - DNA, 1220 bp, Zea Mays
gttcagtcccccgacaaccctgctccacctatggcagcgcagggcggttgggatcaggctggcctcatcgccgcactgaatcagatgtccctccaggggtcctccccttgggtcctcgacactggcgccacaactcacatgtcctcttcggcaggtatactcctgtcccatctcccccctccttcattcggcatcaccgttggcaatggaaccaccatacccatcacctgtcgtggcacatctacactttcctcccccacctctacctatcgtcttaacaatgttcttgttgcacctgcacttgtgcgcaatcttttatctgttcgtcaattcactcgtgacaactcttgttccattgaatttgacgcttatggtttttctgtcaaggacaaacagacggggcacgtgactcttcgctgcaatagtggtggcgacctctacacttacccctccaccacaactccctcctgcagcctcgccaccacgtcgtctttgtggcatcatcgcctcggccaccccggtccctccagcctcgcccaacttcgcagcatgtcggtcattaccttcaataaaagctcgccatgcctctgccatgcctgtcaacttggcaagcatgtgcgccttccatttagtcactcgacatctgttacccatgctccgtttgatttacttcactgcgatgtatggacatctcccgtgcttagcaattctgggttcaagtattaccttattatactcgatgattattcccattactgctggtccttcccactacggcacaaatctgaggtgcaccgccacatgattgaattcattgcatacacccagacccagtttagtaccacacctaaatccttccaagccgacaatgggaccgagtttgtcaaccgcgccaccacttctttccttgctagccacggcatcactcttcgcctttcctgcccctatacctcaccacaaaacggcaaggccgaacgcatgctccgcacccttgttttaaaggcgtcgcctaggcgtccaggcgcccgaaagatccaaggcgtccccgtcgcctaggtaagaagcagcaagagggcatagggcagaggggaagggaaaggggcggcgctgtttcgggttggcagcgtcgaatcgggagcggcggaggccaaatcgttggcggcagcgtccaaatcggcgctgaggcggcgacggcgaatctgaggcggcgacggcgaatc

SEQ ID NO: 55734 - DNA, 250 bp, Zea Mays
ctcgacttgatagagaagcaccatactacaagaagctgcatctggtactaaaggtggctcaagtggttctcctgttgttgattgtcaaggaagggctgttgccctgaatgctggaagcaaatcttccagtgcctctgccttcttccttccattagaacgtgttgtcagagcattggatttgatacgtgacagttgggatgcatttggtaccaagacagaatctgtttatattccacgtggtacacttcag

SEQ ID NO: 55735 - DNA, 496 bp, Zea Mays
caactaactggtgtatggcccactttttttctccagctgaaatatggttgcagcagctcagaggaccatcagtttgttagagggcaatgccatttgtcagacttttggaggtggaactttatccaactttgctatccaaggcaagaagttacggattgagtgataactgggtgcaggcccttgcgaagaaggatcctgtgcgtagacaagtcctacgggtgaaaggttgtttggctggatcgaaagcagaaaatcttctggagcagggagatatgattcttgctatcaacaaggagccaattacatgcttccttgacattgagaagacttgccaagagttggaccaatccattgggtcagatggagtgcttaacatgacaatattccgtcaggatcctcactcagcagtgcgtgcacttggctttttgccagaagaaggtcatggtgtttatgttgctagatggtgtcatggccaatccggcacatagaaatgacc

SEQ ID NO: 55736 - DNA, 1919 bp, Zea Mays
ggacggcgtggcgaaggtgacatgctccatggagatgaggacgccagttgccaggacgacgtggcgaaggtgacatgcgacgcaatccatggagatggggatgcagaagccatgggatcagattgaaacccaagctatccgataccagatgttatggtcgctagatcggtgagggattggagaggggtatcgatgggcaggaacaccgcccgggggcctctgcccacggccgagcaagagggtttctcccttccaattcttgcatactttatttgtcatccattgattacataaataggccggctgaccgcccctgtctagcgggagatccttatctccttaaaagtctcctaaaaaccctcaacaaactactaactgataaccttcctagataatctcaactaatctcctaaataatctcaactaatcttctaatcttatctctaactatccttatctaatcccccttggaggatccatatctgctactgccgtagcccctccatgggcctccttaggccctgacacccttcactccaatttccagtccatctactctgagaacaattagttttgtactactgttaattaattgttgaacccccttgcattccaaggccatcttcaacagactccctatcccacctcttagcccaccttctatttcaaactctattctatggacattgcaatctatagtgcaaaacaatattttgcacggctatatgcacgctatgctggagacaacctaagcgacatgtatttattggttttgactttcatgtttcttgcccataaccatatgccttatcagttatctctatcttttcaggtgcatgtgccgcccgtttgcatgcttgatggagttcactctcaacatttttttggaacaggggttataatatatcattctgaacacctgggtctggttgcagttgataggaatacagtggctgtatctatctctgatataatgctttcttttgctgcatatcccattgaaatacctggggaggttgttttcctccatcctgttcacaactttgtcctggtcgcttatgatccttctgcactaggagctggagcatctgttgtccgggctgctaagcttctatcagaacctgctttgcgacgaggagattctgtctatctagttgggcttagtcgaagcttacaagcaacatcaaggaaatcaatcataactaatccttgcacagctgtcaatattgggtcagctgattgtccacgataccgtgccataaatatggaggtcattgagctcgatactgattttggtagcacattttcgggcatattaactgatgagcaaggaagagttcaagcattatgggctagcttttctacccagctgaaatatggttgcagcagctcagaggaccatcagtttgttagagggcaatgccatttgtcagacttttggaggtggaactttatccaactttgctatccaaggcaagaagttacggattgagtgataactgggtgcaggcccttgcgaagaaggatcctgtgcgtagacaagtcctacgggtgaaaggttgtttggctggatcgaaagcagaaaatcttctggagcagggagatatgattcttgctatcaacaaggagccaattacatgcttccttgacattgagaagacttgccaagagttggaccaatccattgggtcagatggagtgcttaacatgacaatattccgtcagggaaaagaaattgaccttgttgtcggaactgatgtaagagatggcaatggtacaacccgtatggttaattggtgtggttgcattatccaggatcctcactcagcagtgcgtgcacttggctttttgccagaagaaggtcatggtgtttatgttgctagatggtgtcatggccaatccggcacatagaaatgacc

SEQ ID NO: 55737 - DNA, 390 bp, Zea Mays
tgtgtcatggaagtccggtacatagatatggcctcatgctctccagtggatcatcgaaattaatgggcaaccaacaactgatctggaaacttttataaaggtggtgaagggtctcgaagatggtgaatttgttagggtgaggacggtccatttaaatggaaagcctcgggtacttactctgaaacaggaccttcactactggccgacctgggagctcagctttgaaccagaaactgctacatggcggaggaaaataataaaagcattgcaatcagccagggcgtgatattttcatgttttgctgcgaccttttcatgctttcagaggagcatagaggagagggaaacagggaagagacttgggacagctaccaggcgtaatggattgtgg

SEQ ID NO: 55738 - DNA, 1666 bp, Zea Mays
cgccctgcctttatttccaagccgcgcacgccgcacgctctcccgtctcctgcccccctcgacggtgccggtacggtggctctgtgatcctccccgtgcctgacttataacagctccccgccgccacccacgcgcgtctagacccttcttctcgatcccctccttcctcctagctaggtcgtcctgcgcctataaacgcacagacacagcctctactttgcctgcctctccttccctcccgcttgtggcttcgtccttcggtgcttctcgttttaggagtgaggcagccaacggggttgctaaaggcacagctagcgaagcttctgcagcacagcgtctcgtcgagaagtcgagaagctagctcgcttctgccagaggtcctgcaggcaggtgaggtctagcggccgtgctggtggtgctgaggtaagggaagctgctgcacgcgagcagcgcgcgcccgatcgagaccgtgaagctggcggccggcaagtggtgggagcggccagatgacacggccatgcccggaatggacccgggcggaggcggcagctcgcgctacttccaccagctgctccggccgcagcagcagcagtcctcgccgctgtcgcccaactcccacgtcaagatggagcaccacaggatgtctccagacaagagccccgtcggcgaggccgaggcgggcgggagcggcgccggcgccgaccagccgtcctcgtcggccatggtcccggtcgagggtggcggcagtggcagcgggacaggaggcacgcccacgcggcggccgcgcggccgcccgccgggctccaagaacaagcccaagccgcccatcatcgtgacgcgcgacagccccaacgcgctgcactcgcacgtgctcgaggtcgcggccggcgccgacgtcgtcgactgcgtcgcagagtacgcgcgccgccggggccgcggcgtgtgcgtgctcagcggcgggggcgccgtcgtcaacgtggcgctcaggcagcccggcgcgtcgccccccgggagcatggtggccacgctgaggggccggttcgagatcctctcactcaccggaacggtgctgccgccgcccgctcctccgggcgccagcggcctcacggtgttcctctccggcgggcagggccaggtcatcggcgggagcgtggtgggccccctggtcgccgcggggcccgtcgtcctgatggctgcgtcgttcgcgaacgccgtgtacgagcggctcccgctggagggggaggaagaggagacagcagccgcggctgccgctggcgctgagccacaagatcaagtggcgcagtcggctggacccccgggtcagcagccgacggcgtcccagtcatctggtgtgaccggaggcgacgccgccggcggtggcggcatgtcgctctacaacctcgccgggaatgtaggggcctaccagctaccgggagacaacttcggaggctggagtggaggcggtggcggcggagtccggccaccgttttgatccatgcctgccttgagataccgcctgattcgcatccacatcatcacagagattcaaatggtgtgccgacaagctcttgccatcggaaaccgggggttgaagctaggctatggacagggccgttcctgacttttcaggggcccagtgcgaaatccgatatggagggtccatcca

SEQ ID NO: 55739 - DNA, 2023 bp, Zea Mays
cggaccggagcctgtactagtagatagagaagggaaaggcagcgaccttatcagcagacccacccccatccctcgccgtccccctccacgctccctccgtctcgctcgcgccctgcctttatttccaagccgcgcacgccgcacgctctcccgtctcctgcccccctcgacggtgccggtacggtggctctgtgatcctccccgtgcctgacttataacagctccccgccgccacccacgcgcgtctagacccttcttctcgatcccctccttcctcctagctaggtcgtcctgcgcctataaacgcacagacacagcctctactttgcctgcctctccttccctcccgcttgtggcttcgtccttcggtgcttctcgttttaggagtgaggcagccaacggggttgctaaaggcacagctagcgaagcttctgcagcacagcgtctcgtcgagaagtcgagaagctagctcgcttctgccagaggtaaagaacaagctagactactctttaccggttgcaacttgcaattcctccatcactagattcctgtcaagactcaagagtcaaaactcaaaagggtttcgaatagcggaaaggaaaagatctctcatttcgtgttaagctcgctagctgctcgtttcgttgtttcccggtttcgcgcttctgatgcactgcgtggcatgcaaatttacctgtgctttataagggtcgagtgcctgctgccgtgtccaggtcctgcaggcaggtgaggtctagcggccgtgctggtggtgctgaggtaagggaagctgctgcacgcgagcagcgcgcgcccgatcgagaccgtgaagctggcggccggcaagtggtgggagcggccagatgacacggccatgcccggaatggacccgggcggaggcggcagctcgcgctacttccaccagctgctccggccgcagcagcagcagtcctcgccgctgtcgcccaactcccacgtcaagatggagcaccacaggatgtctccagacaagagccccgtcggcgaggccgaggcgggcgggagcggcgccggcgccgaccagccgtcctcgtcggccatggtcccggtcgagggtggcggcagtggcagcgggacaggaggcacgcccacgcggcggccgcgcggccgcccgccgggctccaagaacaagcccaagccgcccatcatcgtgacgcgcgacagccccaacgcgctgcactcgcacgtgctcgaggtcgcggccggcgccgacgtcgtcgactgcgtcgcagagtacgcgcgccgccggggccgcggcgtgtgcgtgctcagcggcgggggcgccgtcgtcaacgtggcgctcaggcagcccggcgcgtcgccccccgggagcatggtggccacgctgaggggccggttcgagatcctctcactcaccggaacggtgctgccgccgcccgctcctccgggcgccagcggcctcacggtgttcctctccggcgggcagggccaggtcatcggcgggagcgtggtgggccccctggtcgccgcggggcccgtcgtcctgatggctgcgtcgttcgcgaacgccgtgtacgagcggctcccgctggagggggaggaagaggagacagcagccgcggctgccgctggcgctgagccacaagatcaagtggcgcagtcggctggacccccgggtcagcagccgacggcgtcccagtcatctggtgtgaccggaggcgacgccgccggcggtggcggcatgtcgctctacaacctcgccgggaatgtaggggcctaccagctaccgggagacaacttcggaggctggagtggaggcggtggcggcggagtccggccaccgttttgatccatgcctgccttgagataccgcctgattcgcatccacatcatcacagagattcaaatggtgtgccgacaagctcttgccatcggaaaccgggggttgaagctaggctatggacagggccgttcctgacttttcaggggcccagtgcgaaatccgatatggagggtccatcca

SEQ ID NO: 55740 - DNA, 1800 bp, Zea Mays
cggaccggagcctgtactagtagatagagaagggaaaggcagcgaccttatcagcagacccacccccatccctcgccgtccccctccacgctccctccgtctcgctcgcgccctgcctttatttccaagccgcgcacgccgcacgctctcccgtctcctgcccccctcgacggtgccggtacggtggctctgtgatcctccccgtgcctgacttataacagctccccgccgccacccacgcgcgtctagacccttcttctcgatcccctccttcctcctagctaggtcgtcctgcgcctataaacgcacagacacagcctctactttgcctgcctctccttccctcccgcttgtggcttcgtccttcggtgcttctcgttttaggagtgaggcagccaacggggttgctaaaggcacagctagcgaagcttctgcagcacagcgtctcgtcgagaagtcgagaagctagctcgcttctgccagagggtcgagtgcctgctgccgtgtccaggtcctgcaggcaggtgaggtctagcggccgtgctggtggtgctgaggtaagggaagctgctgcacgcgagcagcgcgcgcccgatcgagaccgtgaagctggcggccggcaagtggtgggagcggccagatgacacggccatgcccggaatggacccgggcggaggcggcagctcgcgctacttccaccagctgctccggccgcagcagcagcagtcctcgccgctgtcgcccaactcccacgtcaagatggagcaccacaggatgtctccagacaagagccccgtcggcgaggccgaggcgggcgggagcggcgccggcgccgaccagccgtcctcgtcggccatggtcccggtcgagggtggcggcagtggcagcgggacaggaggcacgcccacgcggcggccgcgcggccgcccgccgggctccaagaacaagcccaagccgcccatcatcgtgacgcgcgacagccccaacgcgctgcactcgcacgtgctcgaggtcgcggccggcgccgacgtcgtcgactgcgtcgcagagtacgcgcgccgccggggccgcggcgtgtgcgtgctcagcggcgggggcgccgtcgtcaacgtggcgctcaggcagcccggcgcgtcgccccccgggagcatggtggccacgctgaggggccggttcgagatcctctcactcaccggaacggtgctgccgccgcccgctcctccgggcgccagcggcctcacggtgttcctctccggcgggcagggccaggtcatcggcgggagcgtggtgggccccctggtcgccgcggggcccgtcgtcctgatggctgcgtcgttcgcgaacgccgtgtacgagcggctcccgctggagggggaggaagaggagacagcagccgcggctgccgctggcgctgagccacaagatcaagtggcgcagtcggctggacccccgggtcagcagccgacggcgtcccagtcatctggtgtgaccggaggcgacgccgccggcggtggcggcatgtcgctctacaacctcgccgggaatgtaggggcctaccagctaccgggagacaacttcggaggctggagtggaggcggtggcggcggagtccggccaccgttttgatccatgcctgccttgagataccgcctgattcgcatccacatcatcacagagattcaaatggtgtgccgacaagctcttgccatcggaaaccgggggttgaagctaggctatggacagggccgttcctgacttttcaggggcccagtgcgaaatccgatatggagggtccatcca

SEQ ID NO: 55741 - DNA, 1912 bp, Zea Mays
atggacgtgcgccggctcggaggccgcatcgcggcggcgctgagggcgctcggcgcggggggctcgctgtcgctgcccatcccggcgtggatcacaaacgcccttgcgatgatctcgctcgtgctctcctcctgcgacctgctccgcctctgcagcgacagggaccgccggctccggttctcgctcggcggccgcgagttcgtcaccgtggtctgccagctggcctccatcgtgtacctcttcagcctttgcggcaccggcatcccgtctgcggaccccgagacccccgcccgccgcgaccagggcgccggctcccccgaccaaacgcgcgccgccgacgcgccggagacattgcatggcggggacgaggagatcgttgccgccgtggtgtccggggcgctgccgtcgcaccacctcgagtcgcgcctcggagactgccgccgcgcggccagtctgcggcgggaggcgctacggcggatgacggggcggggcgtcgacgggctcccgctcgacgggatggactaccaggctatcctggggcaatgctgcgagatgcccatcgggtacgtgcagttgccggtcggggtcgccgggccgctgctcctggatgggaaacagtaccatgttcccatggctacaaccgagggatgtctcgtggctagcgtcaaccgcggctgcagagccatcgcggcgtctgggggcgccgtcagtgtgctgctccgggatgcaatgtctcgtgcgcctgtcgttaagttgccgtcgataaagagggcagcggagctcaaggcgttcgtcgagacaattaccaattttgagattctgtctgctgtcttcaataggtccagcagatttgggaagcttcagggtattcagtgtgcactagcaggtaggaacctttacatgaggttcacttgtagtactggagatgccatgggaatgaatatggtgtcaaaaggtgttgaggatgtcttgggctacttgcagaatgatttccccgacatggatctcatcagcctatctggtaactattgttcagacaagaaggctgcagctgtaaactggatagaaggtcgcgggaaatctgttgtttgtgaggccacagtcaaagggggagttgtgcagagtgttcttaagacttctgtgcaaaaacttatcgagcttaatattgtaaagaatctcgctgggtcagctgtagccggagctcttggaggtttcaatgcccatgcaagcaatatcgtaactgccctgttcattgctacggggcaggatcctgcccaaaatgttgaaagctcgcagtgcataaccatgatggaggcagtgaatgatggaagtgaccttcacgtttctgtgaccatgccttctattgaggcactgttgggggcggcacttgtcttgcttcacaggctgcatgtctgaacctgcttggtgtgaggggtccgaatcgtgactcacctggggcaaatgctaagcttctggctaccattgtcgctggcagtgtgcttgctggcgagctctctctcctgtcagcccttgctgcaggccaacttgtgaagagccacatgaagtacaatcgatcaagcaaagatgtgccagtagcccaagcgagatcgtcgctaaacaacagagatgggcagaggcccgactgtagataagcgagcaggtcctgacagcaagcgcaacctgtttgactgttccgtggacgctatgttagcgacgtacagcacctgacagattatgcagcttctgactgtaacttttgtttatgtatgtttagcgttcggttgtaaccgttcaattttttttggtttgctttggatagcagaagatcagataaaatttgtgttcctttttgtgcagtatagtaatttgcctgttattattatgttgatatcgcgaagagcttgagattctg

SEQ ID NO: 55742 - DNA, 2013 bp, Zea Mays
atggacgtgcgccggctcggaggccgcatcgcggcggcgctgagggcgctcggcgcggggggctcgctgtcgctgcccatcccggcgtggatcacaaacgcccttgcgatgatctcgctcgtgctctcctcctgcgacctgctccgcctctgcagcgacagggaccgccggctccggttctcgctcggcggccgcgagttcgtcaccgtggtctgccagctggcctccatcgtgtacctcttcagcctttgcggcaccggcatcccgtctgcggaccccgagacccccgcccgccgcgaccagggcgccggctcccccgaccaaacgcgcgccgccgacgcgccggagacattgcatggcggggacgaggagatcgttgccgccgtggtgtccggggcgctgccgtcgcaccacctcgagtcgcgcctcggagactgccgccgcgcggccagtctgcggcgggaggcgctacggcggatgacggggcggggcgtcgacgggctcccgctcgacgggatggactaccaggctatcctggggcaatgctgcgagatgcccatcgggtacgtgcagttgccggtcggggtcgccgggccgctgctcctggatgggaaacagtaccatgttcccatggctacaaccgagggatgtctcgtggctagcgtcaaccgcggctgcagagccatcgcggcgtctgggggcgccgtcagtgtgctgctccgggatgcaatgtctcgtgcgcctgtcgttaagttgccgtcgataaagagggcagcggagctcaaggcgttcgtcgagacaattaccaattttgagattctgtctgctgtcttcaataggtccagcagatttgggaagcttcagggtattcagtgtgcactagcaggtaggaacctttacatgaggttcacttgtagtactggagatgccatgggaatgaatatggtgtcaaaaggtgttgaggatgtcttgggctacttgcagaatgatttccccgacatggatctcatcagcctatctggtttggttcttcccttctgttatagcaaagaaaagctagttttgcactctttcaataaaactgttcaagaaaaaaatatcagacaactaaacacaatgtaactattgttcagacaagaaggctgcagctgtaaactggatagaaggtcgcgggaaatctgttgtttgtgaggccacagtcaaagggggagttgtgcagagtgttcttaagacttctgtgcaaaaacttatcgagcttaatattgtaaagaatctcgctgggtcagctgtagccggagctcttggaggtttcaatgcccatgcaagcaatatcgtaactgccctgttcattgctacggggcaggatcctgcccaaaatgttgaaagctcgcagtgcataaccatgatggaggcagtgaatgatggaagtgaccttcacgtttctgtgaccatgccttctattgaggtaggcactgttgggggcggcacttgtcttgcttcacaggctgcatgtctgaacctgcttggtgtgaggggtccgaatcgtgactcacctggggcaaatgctaagcttctggctaccattgtcgctggcagtgtgcttgctggcgagctctctctcctgtcagcccttgctgcaggccaacttgtgaagagccacatgaagtacaatcgatcaagcaaagatgtgccagtagcccaagcgagatcgtcgctaaacaacagagatgggcagaggcccgactgtagataagcgagcaggtcctgacagcaagcgcaacctgtttgactgttccgtggacgctatgttagcgacgtacagcacctgacagattatgcagcttctgactgtaacttttgtttatgtatgtttagcgttcggttgtaaccgttcaattttttttggtttgctttggatagcagaagatcagataaaatttgtgttcctttttgtgcagtatagtaatttgcctgttattattatgttgatatcgcgaagagcttgagattctg

SEQ ID NO: 55743 - DNA, 1916 bp, Zea Mays
atggacgtgcgccggctcggaggccgcatcgcggcggcgctgagggcgctcggcgcggggggctcgctgtcgctgcccatcccggcgtggatcacaaacgcccttgcgatgatctcgctcgtgctctcctcctgcgacctgctccgcctctgcagcgacagggaccgccggctccggttctcgctcggcggccgcgagttcgtcaccgtggtctgccagctggcctccatcgtgtacctcttcagcctttgcggcaccggcatcccgtctgcggaccccgagacccccgcccgccgcgaccagggcgccggctcccccgaccaaacgcgcgccgccgacgcgccggagacattgcatggcggggacgaggagatcgttgccgccgtggtgtccggggcgctgccgtcgcaccacctcgagtcgcgcctcggagactgccgccgcgcggccagtctgcggcgggaggcgctacggcggatgacggggcggggcgtcgacgggctcccgctcgacgggatggactaccaggctatcctggggcaatgctgcgagatgcccatcgggtacgtgcagttgccggtcggggtcgccgggccgctgctcctggatgggaaacagtaccatgttcccatggctacaaccgagggatgtctcgtggctagcgtcaaccgcggctgcagagccatcgcggcgtctgggggcgccgtcagtgtgctgctccgggatgcaatgtctcgtgcgcctgtcgttaagttgccgtcgataaagagggcagcggagctcaaggcgttcgtcgagacaattaccaattttgagattctgtctgctgtcttcaataggtccagcagatttgggaagcttcagggtattcagtgtgcactagcaggtaggaacctttacatgaggttcacttgtagtactggagatgccatgggaatgaatatggtgtcaaaaggtgttgaggatgtcttgggctacttgcagaatgatttccccgacatggatctcatcagcctatctggtaactattgttcagacaagaaggctgcagctgtaaactggatagaaggtcgcgggaaatctgttgtttgtgaggccacagtcaaagggggagttgtgcagagtgttcttaagacttctgtgcaaaaacttatcgagcttaatattgtaaagaatctcgctgggtcagctgtagccggagctcttggaggtttcaatgcccatgcaagcaatatcgtaactgccctgttcattgctacggggcaggatcctgcccaaaatgttgaaagctcgcagtgcataaccatgatggaggcagtgaatgatggaagtgaccttcacgtttctgtgaccatgccttctattgaggtaggcactgttgggggcggcacttgtcttgcttcacaggctgcatgtctgaacctgcttggtgtgaggggtccgaatcgtgactcacctggggcaaatgctaagcttctggctaccattgtcgctggcagtgtgcttgctggcgagctctctctcctgtcagcccttgctgcaggccaacttgtgaagagccacatgaagtacaatcgatcaagcaaagatgtgccagtagcccaagcgagatcgtcgctaaacaacagagatgggcagaggcccgactgtagataagcgagcaggtcctgacagcaagcgcaacctgtttgactgttccgtggacgctatgttagcgacgtacagcacctgacagattatgcagcttctgactgtaacttttgtttatgtatgtttagcgttcggttgtaaccgttcaattttttttggtttgctttggatagcagaagatcagataaaatttgtgttcctttttgtgcagtatagtaatttgcctgttattattatgttgatatcgcgaagagcttgagattctg

SEQ ID NO: 55744 - DNA, 2117 bp, Zea Mays
gtactcatggatcctaacttaggactcgggcaccactgtcagggtggagtatggtgatgctgcaattgcagctgacccggcaggtgctcatgtgatcagccatgcattccctcatacctatgggcagcctattgctcattttctcaggaagacagctgttgtccctgatgctaaggtcatatctgaacaccaggcggtcagggttggcattgtcttctgtggcagacaatccccaggaggccacaatgttgtttgggggctctatgaggctatcaaggcccacaaccaaaacagcaaactcattggtttccttggtggatcagatggtctgctagcacagagaaccttggagatcactgataaagttattgcttcatataaaaatcaaggtggatatgacatgcttggtcgaacaaaggatcagattaggacgacagagcaggtcaatggtgctatggctagttgccaagctttgaagttggatgctctggttatcattggaggtgtcacttccaacactgatgctgctcaacttgccgagacatttgctgaggcaaagtgtgcaacaaaggttgtaggtgttcctgtaactttaaatggggaccttaagaaccagtttgttgagacaaccgttggctttgacaccatatgcaaggtgaacgcacaacttatcagcaatgtatgcactgatgctctatctgctgagaagtattactactttattcgcctgatgggacgcaaggcttctcatgtggcattggaatgtgctcttcaatcacatccaaacatggttatcctaggagaggaggtggctgcttccaaacttacaatttttgatattacgaagcagatttgtgatgcagttcaggcaagggctgaaaaagacaagaaccatggggttattcttattcctgagggccttgtggagagtattcctgaactatatgctctgcttcaggaaatccatggcctccatggcaaaggtgtttctgttgagaatatctcttctcagctttcaccttgggcatctgcactctttgagtttttgcccccttttatcaggaagcagctactactacatcctgaatctgatgattcagctcaactttcccagattgagactgaaaagctgctagcccagttagttgagactgagatgaacagacgtttgaaggagggcacttacaaaggaaagaagtttaatgcaatctgtcacttctttggctaccaagctaggggagcactgccttcaaagtttgattgcgattatgcctacgttttggggcatgtgtgctaccacatcatagctgccggattgaacagttacatggctacggtgacaaatcttaagaatccagtgaacaagtggcgatgcggcgcgactcctatttcgtctatgatgactgtgaagcgatggtcgcgtggcccttcagccacccaaattggaaagcccgctgttcacatggctagcgttgacttgaaaggaaaagcatacgatgtgttgagacagaattcttccagctttttgttggaagatgtctacagaaacccaggcccgctccagtttgaaggaccaggtgccgattcaaagcctatttcattgtgcgttgaggatcaagactatatgggcagaataaaaaagttgcaggaatacttggagaaggtgaagaggattgtgaagcctgggtgctcgcaggatgttcttaaagcggcgctgagtgccatgtcttctgtgacggaaacactgaacatcatgacttcatcttctaccggccagactccactgagtcattaggtaccatttcatgccttttggagagttctatcggttttggattcggtagtttatgaaggcttgttgatgagtttgagctcgaatagcttttgaaacagccggatgatgccatctttaataaaccaaattctgtgactgcattcacatttctgtcagtcacctgagtgagaaaatgtgataaatcactcagggaagctatgaagaatatgtcaattggagctatcaaaccaaaagaagatgaatatgaggtgcaagatatcagcatgccttttttatcaaatgtatcatgagaaagatgttgatgctcaagcaatggtacaag

SEQ ID NO: 55745 - DNA, 2010 bp, Zea Mays
gaccatcttcctgtactcatggatcctaacttaggactcggaagacagctgttgtccctgatgctaaggtcatatctgaacaccaggcggtcagggttggcattgtcttctgtggcagacaatccccaggaggccacaatgttgtttgggggctctatgaggctatcaaggcccacaaccaaaacagcaaactcattggtttccttggtggatcagatggtctgctagcacagagaaccttggagatcactgataaagttattgcttcatataaaaatcaaggtggatatgacatgcttggtcgaacaaaggatcagattaggacgacagagcaggtcaatggtgctatggctagttgccaagctttgaagttggatgctctggttatcattggaggtgtcacttccaacactgatgctgctcaacttgccgagacatttgctgaggcaaagtgtgcaacaaaggttgtaggtgttcctgtaactttaaatggggaccttaagaaccagtttgttgagacaaccgttggctttgacaccatatgcaaggtgaacgcacaacttatcagcaatgtatgcactgatgctctatctgctgagaagtattactactttattcgcctgatgggacgcaaggcttctcatgtggcattggaatgtgctcttcaatcacatccaaacatggttatcctaggagaggaggtggctgcttccaaacttacaatttttgatattacgaagcagatttgtgatgcagttcaggcaagggctgaaaaagacaagaaccatggggttattcttattcctgagggccttgtggagagtattcctgaactatatgctctgcttcaggaaatccatggcctccatggcaaaggtgtttctgttgagaatatctcttctcagctttcaccttgggcatctgcactctttgagtttttgcccccttttatcaggaagcagctactactacatcctgaatctgatgattcagctcaactttcccagattgagactgaaaagctgctagcccagttagttgagactgagatgaacagacgtttgaaggagggcacttacaaaggaaagaagtttaatgcaatctgtcacttctttggctaccaagctaggggagcactgccttcaaagtttgattgcgattatgcctacgttttggggcatgtgtgctaccacatcatagctgccggattgaacagttacatggctacggtgacaaatcttaagaatccagtgaacaagtggcgatgcggcgcgactcctatttcgtctatgatgactgtgaagcgatggtcgcgtggcccttcagccacccaaattggaaagcccgctgttcacatggctagcgttgacttgaaaggaaaagcatacgatgtgttgagacagaattcttccagctttttgttggaagatgtctacagaaacccaggcccgctccagtttgaaggaccaggtgccgattcaaagcctatttcattgtgcgttgaggatcaagactatatgggcagaataaaaaagttgcaggaatacttggagaaggtgaagaggattgtgaagcctgggtgctcgcaggatgttcttaaagcggcgctgagtgccatgtcttctgtgacggaaacactgaacatcatgacttcatcttctaccggccagactccactgagtcattaggtaccatttcatgccttttggagagttctatcggttttggattcggtagtttatgaaggcttgttgatgagtttgagctcgaatagcttttgaaacagccggatgatgccatctttaataaaccaaattctgtgactgcattcacatttctgtcagtcacctgagtgagaaaatgtgataaatcactcagggaagctatgaagaatatgtcaattggagctatcaaaccaaaagaagatgaatatgaggtgcaagatatcagcatgccttttttatcaaatgtatcatgagaaagatgttgatgctcaagcaatggtacaag

SEQ ID NO: 55746 - DNA, 2124 bp, Zea Mays
atgatgatggaccatcttcctgtactcatggatcctaacttaggactcgggtggagtatggtgatgctgcaattgcagctgacccggcaggtgctcatgtgatcagccatgcattccctcatacctatgggcagcctattgctcattttctcaggaagacagctgttgtccctgatgctaaggtcatatctgaacaccaggcggtcagggttggcattgtcttctgtggcagacaatccccaggaggccacaatgttgtttgggggctctatgaggctatcaaggcccacaaccaaaacagcaaactcattggtttccttggtggatcagatggtctgctagcacagagaaccttggagatcactgataaagttattgcttcatataaaaatcaaggtggatatgacatgcttggtcgaacaaaggatcagattaggacgacagagcaggtcaatggtgctatggctagttgccaagctttgaagttggatgctctggttatcattggaggtgtcacttccaacactgatgctgctcaacttgccgagacatttgctgaggcaaagtgtgcaacaaaggttgtaggtgttcctgtaactttaaatggggaccttaagaaccagtttgttgagacaaccgttggctttgacaccatatgcaaggtgaacgcacaacttatcagcaatgtatgcactgatgctctatctgctgagaagtattactactttattcgcctgatgggacgcaaggcttctcatgtggcattggaatgtgctcttcaatcacatccaaacatggttatcctaggagaggaggtggctgcttccaaacttacaatttttgatattacgaagcagatttgtgatgcagttcaggcaagggctgaaaaagacaagaaccatggggttattcttattcctgagggccttgtggagagtattcctgaactatatgctctgcttcaggaaatccatggcctccatggcaaaggtgtttctgttgagaatatctcttctcagctttcaccttgggcatctgcactctttgagtttttgcccccttttatcaggaagcagctactactacatcctgaatctgatgattcagctcaactttcccagattgagactgaaaagctgctagcccagttagttgagactgagatgaacagacgtttgaaggagggcacttacaaaggaaagaagtttaatgcaatctgtcacttctttggctaccaagctaggggagcactgccttcaaagtttgattgcgattatgcctacgttttggggcatgtgtgctaccacatcatagctgccggattgaacagttacatggctacggtgacaaatcttaagaatccagtgaacaagtggcgatgcggcgcgactcctatttcgtctatgatgactgtgaagcgatggtcgcgtggcccttcagccacccaaattggaaagcccgctgttcacatggctagcgttgacttgaaaggaaaagcatacgatgtgttgagacagaattcttccagctttttgttggaagatgtctacagaaacccaggcccgctccagtttgaaggaccaggtgccgattcaaagcctatttcattgtgcgttgaggatcaagactatatgggcagaataaaaaagttgcaggaatacttggagaaggtgaagaggattgtgaagcctgggtgctcgcaggatgttcttaaagcggcgctgagtgccatgtcttctgtgacggaaacactgaacatcatgacttcatcttctaccggccagactccactgagtcattaggtaccatttcatgccttttggagagttctatcggttttggattcggtagtttatgaaggcttgttgatgagtttgagctcgaatagcttttgaaacagccggatgatgccatctttaataaaccaaattctgtgactgcattcacatttctgtcagtcacctgagtgagaaaatgtgataaatcactcagggaagctatgaagaatatgtcaattggagctatcaaaccaaaagaagatgaatatgaggtgcaagatatcagcatgccttttttatcaaatgtatcatgagaaagatgttgatgctcaagcaatggtacaag

SEQ ID NO: 55747 - DNA, 2363 bp, Zea Mays
gagagctcatggcgtgagcgaggggttgcaggcagcgctcgcctccgcccttctggtataaaagcctctcacgccgcacccacatttctcacatcacagtgcgggcggcgggcgccactctcacacctaccaggaaaccaatcaaaacttaaaaccaatcgaaattagaccggcgacgaggattagcgctcgccggcgatggattctgactacggcgtgcctcgcgagctctcggaggtgcagaagaagcgcacgctctaccagcccgagctgcccccctgcctccagggtggagtatggtgatgctgcaattgcagctgacccggcaggtgctcatgtgatcagccatgcattccctcatacctatgggcagcctattgctcattttctcaggaagacagctgttgtccctgatgctaaggtcatatctgaacaccaggcggtcagggttggcattgtcttctgtggcagacaatccccaggaggccacaatgttgtttgggggctctatgaggctatcaaggcccacaaccaaaacagcaaactcattggtttccttggtggatcagatggtctgctagcacagagaaccttggagatcactgataaagttattgcttcatataaaaatcaaggtggatatgacatgcttggtcgaacaaaggatcagattaggacgacagagcaggtcaatggtgctatggctagttgccaagctttgaagttggatgctctggttatcattggaggtgtcacttccaacactgatgctgctcaacttgccgagacatttgctgaggcaaagtgtgcaacaaaggttgtaggtgttcctgtaactttaaatggggaccttaagaaccagtttgttgagacaaccgttggctttgacaccatatgcaaggtgaacgcacaacttatcagcaatgtatgcactgatgctctatctgctgagaagtattactactttattcgcctgatgggacgcaaggcttctcatgtggcattggaatgtgctcttcaatcacatccaaacatggttatcctaggagaggaggtggctgcttccaaacttacaatttttgatattacgaagcagatttgtgatgcagttcaggcaagggctgaaaaagacaagaaccatggggttattcttattcctgagggccttgtggagagtattcctgaactatatgctctgcttcaggaaatccatggcctccatggcaaaggtgtttctgttgagaatatctcttctcagctttcaccttgggcatctgcactctttgagtttttgcccccttttatcaggaagcagctactactacatcctgaatctgatgattcagctcaactttcccagattgagactgaaaagctgctagcccagttagttgagactgagatgaacagacgtttgaaggagggcacttacaaaggaaagaagtttaatgcaatctgtcacttctttggctaccaagctaggggagcactgccttcaaagtttgattgcgattatgcctacgttttggggcatgtgtgctaccacatcatagctgccggattgaacagttacatggctacggtgacaaatcttaagaatccagtgaacaagtggcgatgcggcgcgactcctatttcgtctatgatgactgtgaagcgatggtcgcgtggcccttcagccacccaaattggaaagcccgctgttcacatggctagcgttgacttgaaaggaaaagcatacgatgtgttgagacagaattcttccagctttttgttggaagatgtctacagaaacccaggcccgctccagtttgaaggaccaggtgccgattcaaagcctatttcattgtgcgttgaggatcaagactatatgggcagaataaaaaagttgcaggaatacttggagaaggtgaagaggattgtgaagcctgggtgctcgcaggatgttcttaaagcggcgctgagtgccatgtcttctgtgacggaaacactgaacatcatgacttcatcttctaccggccagactccactgagtcattaggtaccatttcatgccttttggagagttctatcggttttggattcggtagtttatgaaggcttgttgatgagtttgagctcgaatagcttttgaaacagccggatgatgccatctttaataaaccaaattctgtgactgcattcacatttctgtcagtcacctgagtgagaaaatgtgataaatcactcagggaagctatgaagaatatgtcaattggagctatcaaaccaaaagaagatgaatatgaggtgcaagatatcagcatgccttttttatcaaatgtatcatgagaaagatgttgatgctcaagcaatggtacaag

SEQ ID NO: 55748 - DNA, 2258 bp, Zea Mays
gagagctcatggcgtgagcgaggggttgcaggcagcgctcgcctccgcccttctggtataaaagcctctcacgccgcacccacatttctcacatcacagtgcgggcggcgggcgccactctcacacctaccaggaaaccaatcaaaacttaaaaccaatcgaaattagaccggcgacgaggattagcgctcgccggcgatggattctgactacggcgtgcctcgcgagctctcggaggtgcagaagaagcgcacgctctaccagcccgagctgcccccctgcctccaggaagacagctgttgtccctgatgctaaggtcatatctgaacaccaggcggtcagggttggcattgtcttctgtggcagacaatccccaggaggccacaatgttgtttgggggctctatgaggctatcaaggcccacaaccaaaacagcaaactcattggtttccttggtggatcagatggtctgctagcacagagaaccttggagatcactgataaagttattgcttcatataaaaatcaaggtggatatgacatgcttggtcgaacaaaggatcagattaggacgacagagcaggtcaatggtgctatggctagttgccaagctttgaagttggatgctctggttatcattggaggtgtcacttccaacactgatgctgctcaacttgccgagacatttgctgaggcaaagtgtgcaacaaaggttgtaggtgttcctgtaactttaaatggggaccttaagaaccagtttgttgagacaaccgttggctttgacaccatatgcaaggtgaacgcacaacttatcagcaatgtatgcactgatgctctatctgctgagaagtattactactttattcgcctgatgggacgcaaggcttctcatgtggcattggaatgtgctcttcaatcacatccaaacatggttatcctaggagaggaggtggctgcttccaaacttacaatttttgatattacgaagcagatttgtgatgcagttcaggcaagggctgaaaaagacaagaaccatggggttattcttattcctgagggccttgtggagagtattcctgaactatatgctctgcttcaggaaatccatggcctccatggcaaaggtgtttctgttgagaatatctcttctcagctttcaccttgggcatctgcactctttgagtttttgcccccttttatcaggaagcagctactactacatcctgaatctgatgattcagctcaactttcccagattgagactgaaaagctgctagcccagttagttgagactgagatgaacagacgtttgaaggagggcacttacaaaggaaagaagtttaatgcaatctgtcacttctttggctaccaagctaggggagcactgccttcaaagtttgattgcgattatgcctacgttttggggcatgtgtgctaccacatcatagctgccggattgaacagttacatggctacggtgacaaatcttaagaatccagtgaacaagtggcgatgcggcgcgactcctatttcgtctatgatgactgtgaagcgatggtcgcgtggcccttcagccacccaaattggaaagcccgctgttcacatggctagcgttgacttgaaaggaaaagcatacgatgtgttgagacagaattcttccagctttttgttggaagatgtctacagaaacccaggcccgctccagtttgaaggaccaggtgccgattcaaagcctatttcattgtgcgttgaggatcaagactatatgggcagaataaaaaagttgcaggaatacttggagaaggtgaagaggattgtgaagcctgggtgctcgcaggatgttcttaaagcggcgctgagtgccatgtcttctgtgacggaaacactgaacatcatgacttcatcttctaccggccagactccactgagtcattaggtaccatttcatgccttttggagagttctatcggttttggattcggtagtttatgaaggcttgttgatgagtttgagctcgaatagcttttgaaacagccggatgatgccatctttaataaaccaaattctgtgactgcattcacatttctgtcagtcacctgagtgagaaaatgtgataaatcactcagggaagctatgaagaatatgtcaattggagctatcaaaccaaaagaagatgaatatgaggtgcaagatatcagcatgccttttttatcaaatgtatcatgagaaagatgttgatgctcaagcaatggtacaag

SEQ ID NO: 55749 - DNA, 2278 bp, Zea Mays
gagagctcatggcgtgagcgaggggttgcaggcagcgctcgcctccgcccttctggtataaaagcctctcacgccgcacccacatttctcacatcacagtgcgggcggcgggcgccactctcacacctaccaggaaaccaatcaaaacttaaaaccaatcgaaattagaccggcgacgaggattagcgctcgccggcgatggattctgactacggcgtgcctcgcgagctctcggaggtgcagaagaagcgcacgctctaccagcccgagctgcccccctgcctccagcctattgctcattttctcaggaagacagctgttgtccctgatgctaaggtcatatctgaacaccaggcggtcagggttggcattgtcttctgtggcagacaatccccaggaggccacaatgttgtttgggggctctatgaggctatcaaggcccacaaccaaaacagcaaactcattggtttccttggtggatcagatggtctgctagcacagagaaccttggagatcactgataaagttattgcttcatataaaaatcaaggtggatatgacatgcttggtcgaacaaaggatcagattaggacgacagagcaggtcaatggtgctatggctagttgccaagctttgaagttggatgctctggttatcattggaggtgtcacttccaacactgatgctgctcaacttgccgagacatttgctgaggcaaagtgtgcaacaaaggttgtaggtgttcctgtaactttaaatggggaccttaagaaccagtttgttgagacaaccgttggctttgacaccatatgcaaggtgaacgcacaacttatcagcaatgtatgcactgatgctctatctgctgagaagtattactactttattcgcctgatgggacgcaaggcttctcatgtggcattggaatgtgctcttcaatcacatccaaacatggttatcctaggagaggaggtggctgcttccaaacttacaatttttgatattacgaagcagatttgtgatgcagttcaggcaagggctgaaaaagacaagaaccatggggttattcttattcctgagggccttgtggagagtattcctgaactatatgctctgcttcaggaaatccatggcctccatggcaaaggtgtttctgttgagaatatctcttctcagctttcaccttgggcatctgcactctttgagtttttgcccccttttatcaggaagcagctactactacatcctgaatctgatgattcagctcaactttcccagattgagactgaaaagctgctagcccagttagttgagactgagatgaacagacgtttgaaggagggcacttacaaaggaaagaagtttaatgcaatctgtcacttctttggctaccaagctaggggagcactgccttcaaagtttgattgcgattatgcctacgttttggggcatgtgtgctaccacatcatagctgccggattgaacagttacatggctacggtgacaaatcttaagaatccagtgaacaagtggcgatgcggcgcgactcctatttcgtctatgatgactgtgaagcgatggtcgcgtggcccttcagccacccaaattggaaagcccgctgttcacatggctagcgttgacttgaaaggaaaagcatacgatgtgttgagacagaattcttccagctttttgttggaagatgtctacagaaacccaggcccgctccagtttgaaggaccaggtgccgattcaaagcctatttcattgtgcgttgaggatcaagactatatgggcagaataaaaaagttgcaggaatacttggagaaggtgaagaggattgtgaagcctgggtgctcgcaggatgttcttaaagcggcgctgagtgccatgtcttctgtgacggaaacactgaacatcatgacttcatcttctaccggccagactccactgagtcattaggtaccatttcatgccttttggagagttctatcggttttggattcggtagtttatgaaggcttgttgatgagtttgagctcgaatagcttttgaaacagccggatgatgccatctttaataaaccaaattctgtgactgcattcacatttctgtcagtcacctgagtgagaaaatgtgataaatcactcagggaagctatgaagaatatgtcaattggagctatcaaaccaaaagaagatgaatatgaggtgcaagatatcagcatgccttttttatcaaatgtatcatgagaaagatgttgatgctcaagcaatggtacaag

SEQ ID NO: 55750 - DNA, 2468 bp, Zea Mays
aaataaactagctaacaataaatttgtatagtattttctaaattttatacggtcagctgatactcttgctgacactcgaagtttgaaatgagagagctcatggcgtgagcgaggggttgcaggcagcgctcgcctccgcccttctggtataaaagcctctcacgccgcacccacatttctcacatcacagtgcgggcggcgggcgccactctcacacctaccaggaaaccaatcaaaacttaaaaccaatcgaaattagaccggcgacgaggattagcgctcgccggcgatggattctgactacggcgtgcctcgcgagctctcggaggtgcagaagaagcgcacgctctaccagcccgagctgcccccctgcctccagggcaccactgtcagggtggagtatggtgatgctgcaattgcagctgacccggcaggtgctcatgtgatcagccatgcattccctcatacctatgggcagcctattgctcattttctcaggaagacagctgttgtccctgatgctaaggtcatatctgaacaccaggcggtcagggttggcattgtcttctgtggcagacaatccccaggaggccacaatgttgtttgggggctctatgaggctatcaaggcccacaaccaaaacagcaaactcattggtttccttggtggatcagatggtctgctagcacagagaaccttggagatcactgataaagttattgcttcatataaaaatcaaggtggatatgacatgcttggtcgaacaaaggatcagattaggacgacagagcaggtcaatggtgctatggctagttgccaagctttgaagttggatgctctggttatcattggaggtgtcacttccaacactgatgctgctcaacttgccgagacatttgctgaggcaaagtgtgcaacaaaggttgtaggtgttcctgtaactttaaatggggaccttaagaaccagtttgttgagacaaccgttggctttgacaccatatgcaaggtgaacgcacaacttatcagcaatgtatgcactgatgctctatctgctgagaagtattactactttattcgcctgatgggacgcaaggcttctcatgtggcattggaatgtgctcttcaatcacatccaaacatggttatcctaggagaggaggtggctgcttccaaacttacaatttttgatattacgaagcagatttgtgatgcagttcaggcaagggctgaaaaagacaagaaccatggggttattcttattcctgagggccttgtggagagtattcctgaactatatgctctgcttcaggaaatccatggcctccatggcaaaggtgtttctgttgagaatatctcttctcagctttcaccttgggcatctgcactctttgagtttttgcccccttttatcaggaagcagctactactacatcctgaatctgatgattcagctcaactttcccagattgagactgaaaagctgctagcccagttagttgagactgagatgaacagacgtttgaaggagggcacttacaaaggaaagaagtttaatgcaatctgtcacttctttggctaccaagctaggggagcactgccttcaaagtttgattgcgattatgcctacgttttggggcatgtgtgctaccacatcatagctgccggattgaacagttacatggctacggtgacaaatcttaagaatccagtgaacaagtggcgatgcggcgcgactcctatttcgtctatgatgactgtgaagcgatggtcgcgtggcccttcagccacccaaattggaaagcccgctgttcacatggctagcgttgacttgaaaggaaaagcatacgatgtgttgagacagaattcttccagctttttgttggaagatgtctacagaaacccaggcccgctccagtttgaaggaccaggtgccgattcaaagcctatttcattgtgcgttgaggatcaagactatatgggcagaataaaaaagttgcaggaatacttggagaaggtgaagaggattgtgaagcctgggtgctcgcaggatgttcttaaagcggcgctgagtgccatgtcttctgtgacggaaacactgaacatcatgacttcatcttctaccggccagactccactgagtcattaggtaccatttcatgccttttggagagttctatcggttttggattcggtagtttatgaaggcttgttgatgagtttgagctcgaatagcttttgaaacagccggatgatgccatctttaataaaccaaattctgtgactgcattcacatttctgtcagtcacctgagtgagaaaatgtgataaatcactcagggaagctatgaagaatatgtcaattggagctatcaaaccaaaagaagatgaatatgaggtgcaagatatcagcatgccttttttatcaaatgtatcatgagaaagatgttgatgctcaagcaatggtacaag

SEQ ID NO: 55751 - DNA, 1878 bp, Zea Mays
gaaggggaggaatcccttcctccgcgagtcgcgagccgtggagatccgtcccactccacccctccgctccgccccagacctcgctacaaacctgccgcgaaaatagcagccgcccgtttgctctctcccgtctccgcactcctcccgcgatgagcgacccgcggggccgcgccgccggtcccgaccgctacggggacgaaccgcacgacctcccgctcgccgaggacgcaaacggcgaggaagcgtggcagacgcccgagaaagaggcggttgccgtgtcggaaggggccgctgcgcggagtggggatacgaccccggacgctgaacaggagagcgatgacggagaggaaggagtgggctccccggatcaggcggaacccaatgcgagcggggagggcgtaccgcccgtggccgcgactgtggagccggatgggattgttagcggcgcaaaggtggagacgaacagcgaggacgccatcagccatgacgccgacgaggaggagaaggacgacgacgatgactccacccaggatgcgtctccgatagccgaggtgaatgtggagggcgagagtggcgccgttcaccgcttggaggtggaaccggacccctttctcgatggagatgcctctgggacggaggaggagcaagccgcgttcatggtggagctggagcgcttccataaggagcacagtctcgagttcaagccgcccaagttctatggcaagggcctcaactgcctcaagttatggaggcaggtcgcccacctgggaggccacgagcaggtaacggtttgtaaactatggcgtcaagttggagagactttcaggccgccaaagacctgcacgactgtttcttggtcatttcgaattttctatgagaaggcacttcttgaatacgaaaaacacaaagtccggactggtcagcttcagataccaccgcctggtttaccacagcctagtggtgctgaccgtgaggtagttgtaaatcaatcatcttctgccagagttagaagggatgttgcagcacgtgctatgcagggttggcatgctcaccgcctccttgccaatggcacttatggggataacattttgaaggacaaagattcaatgccatcttcaagtcgtgataacctaaaaagctttggggtgctcaagagaaagaaagcatctagtccagagtatgctctcaagtcgtcctgctcaaaaataaataagtctgaggaagattctatggtcattgacgttggagaaccagccgactgggtgaagatcaatgtgcggcagactaaagattgctttgaagtctatgcactagttcctggacttctacgtgaggaggtgcatgttcaatcagatcctgctggacgtctggttatcacaggggatccagagcagcctgataatccttgggagatcactccgttcaagaaggtggtcaacttgccatcaagaatcaatcctcaccaaacatccgctgttgtcacgcttcatgggtttatgtcagttctgttgaggaaataggatttcatttgagcagatacatgatgtcaagctgacttagcagaactcttctgtagttggatgctggttgctggtgttgcgatctgttgccaccttgtttattgttacagtagtagccataaaattagttggttcatgtgtgtattccagtttcatagagaaaggacatgttggtcgtagtagggctaatttgacattatggttactaattattctttaaatacctctctggatcactccagggcgccctaaagctgcattttttatttatttatgaagctaactgatgtctctttgtggcagaaatcaactgtgtttcagtgacagaaattaacgcctaggttctatttgttgcagc

SEQ ID NO: 55752 - DNA, 1838 bp, Zea Mays
gaaggggaggaatcccttcctccgcgagtcgcgagccgtggagatccgtcccactccacccctccgctccgccccagacctcgctacaaacctgccgcgaaaatagcagccgcccgtttgctctctcccgtctccgcactcctcccgcgatgagcgacccgcggggccgcgccgccggtcccgaccgctacggggacgaaccgcacgacctcccgctcgccgaggacgcaaacggcgaggaagcgtggcagacgcccgagaaagaggcggttgccgtgtcggaaggggccgctgcgcggagtggggatacgaccccggacgctgaacaggagagcgatgacggagaggaaggagtgggctccccggatcaggcggaacccaatgcgagcggggagggcgtaccgcccgtggccgcgactgtggagccggatgggattgttagcggcgcaaaggtggagacgaacagcgaggacgccatcagccatgacgccgacgaggaggagaaggacgacgacgatgactccacccaggatgcgtctccgatagccgaggtgaatgtggagggcgagagtggcgccgttcaccgcttggaggtggaaccggacccctttctcgatggagatgcctctgggacggaggaggagcaagccgcgttcatggtggagctggagcgcttccataaggagcacagtctcgagttcaagccgcccaagttctatggcaagggcctcaactgcctcaagtaacggtttgtaaactatggcgtcaagttggagagactttcaggccgccaaagacctgcacgactgtttcttggtcatttcgaattttctatgagaaggcacttcttgaatacgaaaaacacaaagtccggactggtcagcttcagataccaccgcctggtttaccacagcctagtggtgctgaccgtgaggtagttgtaaatcaatcatcttctgccagagttagaagggatgttgcagcacgtgctatgcagggttggcatgctcaccgcctccttgccaatggcacttatggggataacattttgaaggacaaagattcaatgccatcttcaagtcgtgataacctaaaaagctttggggtgctcaagagaaagaaagcatctagtccagagtatgctctcaagtcgtcctgctcaaaaataaataagtctgaggaagattctatggtcattgacgttggagaaccagccgactgggtgaagatcaatgtgcggcagactaaagattgctttgaagtctatgcactagttcctggacttctacgtgaggaggtgcatgttcaatcagatcctgctggacgtctggttatcacaggggatccagagcagcctgataatccttgggagatcactccgttcaagaaggtggtcaacttgccatcaagaatcaatcctcaccaaacatccgctgttgtcacgcttcatgggtttatgtcagttctgttgaggaaataggatttcatttgagcagatacatgatgtcaagctgacttagcagaactcttctgtagttggatgctggttgctggtgttgcgatctgttgccaccttgtttattgttacagtagtagccataaaattagttggttcatgtgtgtattccagtttcatagagaaaggacatgttggtcgtagtagggctaatttgacattatggttactaattattctttaaatacctctctggatcactccagggcgccctaaagctgcattttttatttatttatgaagctaactgatgtctctttgtggcagaaatcaactgtgtttcagtgacagaaattaacgcctaggttctatttgttgcagc

SEQ ID NO: 55753 - DNA, 1886 bp, Zea Mays
gctgaccttgtaaacttcagcggggagaattagaggctgaggcatccatttactatcaagccatgggtagaacagtgtagatatgaataaaaatattcttgaaacggcaagggcaacggaggtatccagcaccacttgaggaacggaataacccaaactttgaaaaaggggcttgatgataaattcaaaagtattgcatggtgatcctgcaaaacacttatagctaagtaaggcaatgaaatgtatagctgcatatataatcaccgtgttctatgtcacagagatctcgagacaccaatttttcaggggacatttctattataaggaagaaaaagtctaaattcttggccttctcaaaagttccgtatttactgggtgtaaaccttacccaaggaacactttgtacttgtattgcgaatagttctgttattcaagtaatggctattggaatcctgggacacctaattatggaaaaatgtactgtgtaaagtagctagtaattacatttttcctcaaacacacaggaggagctgtgtatccttacaaagtggtaaaatacccccccccccccccccccacttccaaaaaaaaaacaaggaaacacaaacaccaacactcagcctatgaaagtcagaattgcacctttattacaagataagcgaccaaaaattacctccaaggctccaatgaactactaccagtaccaaaccattggcagtcaaaaagacaatgccctttttatcttctgtctccttttttccttgttttattaatgtatatgtgcccccaaagtaggctatgatgagagtgctaaaagacttttctaggaagaattagatgacaggttagagctatacctattagcgataagcttttcataggaacagatctcgacagacatgtaggtacaacaagtgcagctttcaagacggtttatgcaggtttggggtgtcgtaatagaaaccaggagaggaagtcttggactttgcggtagattttgacctattaatagtgttgagaatctcatttagtgacctgtatacacagcagaggcagcaggcagcaaatatgttccttggtgaacatgaacagaagatgccccttgcaaatcagtcacccaagcatggtcagggagtgcttttgaagctgtgcacttgttaactctacatttatttaggaactaaagtaaaaggcagggtgcaatattttcaattctctgcccatgaatccaactgtccgacagagtgtaagcaccatcgccaacctcagagcatacttccatagagaagacaatattgctagcaatggtgttattgccaaaagcaaagcgaaagggcttctagctgagttggttagatggactagctgagttggttagatggactgagtagcactcctcaggtcctgaattcaactcccgtgtgagcgaatttcaagctgggttaaaaaaaatcccctcatctgtccacgtcaaagtatagatctaaggcctagtgccgctgtgaatgggtggggtaggtgtttagaagttttgtcgacctacatgacaaggtcttcttcttaaatgcaatgccgtgggacagtattccctcacaggtccagtttcttttattgccaaaatcaagacaacaaaccacaaatgtcttctctacctagcctagacttttttcaaattcaagttaaaacgaaattatcagtatcactatggacagaaaaaaaaaacacaaagatggtgcagctgcatgagtataattagtaatgacatcacagaagctaacagtaaaagcaattaccatcgcatatgaaatacgcctgaccagctgctacaggagttcccttcctgtcaggaatgtcatctaaaagtcccatgcttgccaatatcagag

SEQ ID NO: 55754 - DNA, 821 bp, Zea Mays
ggaaaacgagctgggtttttttttcagcttcgacgtatcaatatcaataatatcatacggttcgtatacggcgttagatgtgcgacagccaccaaatttctgctggagcatcagttgcatttggatctaacaatggctagttacattacagctcatccaagaaagcgacctgttaaactttcaccagttcacagtatcaccacaaagtacatccgatccgaccacaggcagatgtcaggagggatacgatctggggattgctcatacgcctgacgcctcctcctcaataaaaaccaagcatgaagcttggaagttggaaccactgttacaggatccgcagtgtacgtacatgtgaaccaaacacgaattcacgctctgcctctcttgagaaggtaccggagggagaagtaccccagagcgaaggtctgccagaaccacccggcagcgttcctcgggtcaacccttctcgccaagaaccaggcgtacacggcttcgccagcatgcagtgcgatcgctaccgccaagaccagccggatcacgagcatcgagcggaaaacaaacatgtggacgtcgagcacccatttcaacgggccgactggcgggaggcaggcggcagaaaacacggccagcatcccgatcgttacggccagccaagtaaatatggtcgggccatccagctccattctcttccgctcttgccagtacgagatcgttgcggccaagccttcgtggggcctcacaatgggcacgtagccgagctcctctctagctttcaagaacgaaaagtagtgtgtgacaccaacctgcaagcaacatcagat

SEQ ID NO: 55755 - DNA, 1135 bp, Zea Mays
aggaaactccgcctcgcccgagtttggtctcggtcaactgccctggcagtagggcataccaccaactccacgtgaatcgcgcagaagaccactccgatatgccaaggacttgaatatgacttcacagcaaagaattgagattacaaagcctgaactacttgggagcaatgaagaggccaatgtagatgctttccgagtagatggagcttttgatgttaactccaagaatgatatatctattcatgattatcttccagcaatgaaagccatatgtgataaacttgaagaagcaagtggaaaggtcgactgctctcacattttccctattaaagctatgctggctcttgttgtgtcagatataaaagttgatctcgactacaggatggcatatgggcacagagcatggagaaatgtattgcatagattaatagatgcacgacttgtggagatatttgatgccgaagatgatgataaggttgtccgttgtttgcgtctactgaaaaattttgatccaaatgagtttcagccaaaaagtatagcttcaaattttaaatttgttaaaaaaggtcaggcaactgatcaaattttggaacttccattagagaactgtatatatgatatgatcagtagccaagggacaaaaggtattacacttgttgagattggcaaacatcttggactcaacaattcaaaaaaacttcataaacgagtatcatccatgctaaaaaaattcaacctaacatgggaagcagaagttccagacaagacatcgcagtaccgaatttggacttcaaaaaacttctcactctacaaagctggtactgctctgcaaaattttgaggcactctcagaagactgtgatgattgttcggatttgtggtccctagtttcatctaaagatttggaatcacctagttcacagggcaaattactcttgcttgaagaagagaaccatgacaaaccaattggacatcatatccagaacaaccgtgatgcttctgctgcagtttcccagttagttgaagaagataaacttgcttcgaatcagaggaggcgtcggtgccgtccattatcttctgatgatcaacgccatagaaggattctacacatgttaaaggttgcttcccaagtactt

SEQ ID NO: 55756 - DNA, 1001 bp, Zea Mays
cgactcgggaggaaactccgcctcgcccgagtttggtctcggtcaactgccctggcagtagggcataccaccaactccacgtgaatcgcgcagaagaccactccgatatgccaaggacttgaatatgacttcacagcaaagaattgagattacaaagcctgaactacttgggagcaatgaagaggccaatgtagatgctttccgagtagatggagcttttgatgttaactccaagaatgatatatctattcatgattatcttccagcaatgaaagccatatgtgataaacttgaagaagcaagtggaaaggctcttgttgtgtcagatataaaagttgatctcgactacaggatggcatatgggcacagagcatggagaaatgtattgcatagattaatagatgcacgacttgtggagatatttgatgccgaagatgatgataaggttgtccgttgtttgcgtctactgaaaaattttgatccaaatgagtttcagccaaaaagtatagcttcaaattttaaatttgttaaaaaaggtcaggcaactgatcaaattttggaacttccattagagaactgtatatatgatatgatcagtagccaagggacaaaaggtattacacttgttgagattggcaaacatcttggactcaacaattcaaaaaaacttcataaacgagtatcatccatgctaaaaaaattcaacctaacatgggaagcagaagttccagacaagacatcgcagtaccgaatttggacttcaaaaaacttctcactctacaaagctgggcaaattactcttgcttgaagaagagaaccatgacaaaccaattggacatcatatccagaacaaccgtgatgcttctgctgcagtttcccagttagttgaagaagataaacttgcttcgaatcagaggaggcgtcggtgccgtccattatcttctgatgatcaacgccatagaaggattctacacatgttaaaggttgcttcccaagtactt

SEQ ID NO: 55757 - DNA, 1053 bp, Zea Mays
ttccgactcgggaggaaactccgcctcgcccgagtttggtctcggtcaactgccctggcagtagggcataccaccaactccacgtgaatcgcgcagaagaccactccgatatgccaaggacttgaatatgacttcacagcaaagaattgagattacaaagcctgaactacttgggagcaatgaagaggccaatgtagatgctttccgagtagatggagcttttgatgttaactccaagaatgatatatctattcatgattatcttccagcaatgaaagccatatgtgataaacttgaagaagcaagtggaaaggctcttgttgtgtcagatataaaagttgatctcgactacaggatggcatatgggcacagagcatggagaaatgtggtgatacgtgaattgattccattcctcatactgagcaaagtattgcatagattaatagatgcacgacttgtggagatatttgatgccgaagatgatgataaggttgtccgttgtttgcgtctactgaaaaattttgatccaaatgagtttcagccaaaaagtatagcttcaaattttaaatttgttaaaaaaggtcaggcaactgatcaaattttggaacttccattagagaactgtatatatgatatgatcagtagccaagggacaaaaggtattacacttgttgagattggcaaacatcttggactcaacaattcaaaaaaacttcataaacgagtatcatccatgctaaaaaaattcaacctaacatgggaagcagaagttccagacaagacatcgcagtaccgaatttggacttcaaaaaacttctcactctacaaagctgttcacagggcaaattactcttgcttgaagaagagaaccatgacaaaccaattggacatcatatccagaacaaccgtgatgcttctgctgcagtttcccagttagttgaagaagataaacttgcttcgaatcagaggaggcgtcggtgccgtccattatcttctgatgatcaacgccatagaaggattctacacatgttaaaggttgcttcccaagtactt

SEQ ID NO: 55758 - DNA, 1019 bp, Zea Mays
aagatggcttccgactcgggaggaaactccgcctcgcccgagtttggtctcggtcaactgccctggcagtagggcataccaccaactccacgtgaatcgcgcagaagaccactccgatatgccaaggacttgaatatgacttcacagcaaagaattgagattacaaagcctgaactacttgggagcaatgaagaggccaatgtagatgctttccgagtagatggagcttttgatgttaactccaagaatgatatatctattcatgattatcttccagcaatgaaagccatatgtgataaacttgaagaagcaagtggaaaggctcttgttgtgtcagatataaaagttgatctcgactacaggatggcatatgggcacagagcatggagaaatgtattgcatagattaatagatgcacgacttgtggagatatttgatgccgaagatgatgataaggttgtccgttgtttgcgtctactgaaaaattttgatccaaatgagtttcagccaaaaagtatagcttcaaattttaaatttgttaaaaaaggtcaggcaactgatcaaattttggaacttccattagagaactgtatatatgatatgatcagtagccaagggacaaaaggtattacacttgttgagattggcaaacatcttggactcaacaattcaaaaaaacttcataaacgagtatcatccatgctaaaaaaattcaacctaacatgggaagcagaagttccagacaagacatcgcagtaccgaatttggacttcaaaaaacttctcactctacaaagctgttcacagggcaaattactcttgcttgaagaagagaaccatgacaaaccaattggacatcatatccagaacaaccgtgatgcttctgctgcagtttcccagttagttgaagaagataaacttgcttcgaatcagaggaggcgtcggtgccgtccattatcttctgatgatcaacgccatagaaggattctacacatgttaaaggttgcttcccaagtactt

SEQ ID NO: 55759 - DNA, 835 bp, Zea Mays
tttctatgtgttcctccatcatgagacattgggatcttttcgatgcttctaggggatgccatcattcctcatttttgtactcaacatttgcttgtgatgaatgattgatcaggtattgcatagattaatagatgcacgacttgtggagatatttgatgccgaagatgatgataaggttgtccgttgtttgcgtctactgaaaaattttgatccaaatgagtttcagccaaaaagtatagcttcaaattttaaatttgttaaaaaaggtcaggcaactgatcaaattttggaacttccattagagaactgtatatatgatatgatcagtagccaagggacaaaaggtattacacttgttgagattggcaaacatcttggactcaacaattcaaaaaaacttcataaacgagtatcatccatgctaaaaaaattcaacctaacatgggaagcagaagttccagacaagacatcgcagtaccgaatttggacttcaaaaaacttctcactctacaaagctggtactgctctgcaaaattttgaggcactctcagaagactgtgatgattgttcggatttgtggtccctagtttcatctaaagatttggaatcacctagttcacagggcaaattactcttgcttgaagaagagaaccatgacaaaccaattggacatcatatccagaacaaccgtgatgcttctgctgcagtttcccagttagttgaagaagataaacttgcttcgaatcagaggaggcgtcggtgccgtccattatcttctgatgatcaacgccatagaaggattctacacatgttaaaggttgcttcccaagtactt

SEQ ID NO: 55760 - DNA, 1954 bp, Zea Mays
gaatcggaggcggccaggctccctcctcctccctgcaaatcctgcagacaccaccgctcgtttttctctccgggacaggagaaaaggggagagagaggtgaggcgcggtgtccgcccgatctgctctgccccgacgcagctgttacgacctcctcagtctcaggagcaagatgggtgccggcggcaggatgaccgagaaggagcgggagaagcaggagcagctcgcccgagctaccggtggcgccgcgatgcagcggtcgccggtggagaagcctccgttcactctgggtcagatcaagaaggccatcccgccacactgcttcgagcgctcggtgctcaagtccttctcgtacgtggtccacgacctggggtgcgtgtgcaccggcgtgtgggtcatcgcgcacgagtgcggccaccacgccttctcggactactcgctcctggacgacgtggtcggcctggtgctgcactcgtcgctcatggtgccctacttctcgtggaagtacagccaccggcgccaccactccaacacggggtccctggagcgcgacgaggtgttcgtgcccaagaagaaggaggcgctgccgtggtacaccccgtacgtgtacaacaaccccggtcggccgggtggtgcacatcgtggtgcagctcaccctcgggtggccgctgtacctggcgaccaacgcgtcggggcggccgtacccgcgcttcgcctgccacttcgacccctacggccccatctacaacgaccgggagcgcgcccagatcttcgtctcggacgccggcgtcgtggccgtggcgttcgggctgtacaagctggcggcggcgttcggggtctggtgggtggtgcgcgtgtacgccgtgccgctgctgatcgtgaacgcgtggctggtgctcatcacctacctgcagcacacccacccgtcgctcccccactacgactcgagcgagtgggactggctgcgcggcgcgctggccaccatggaccgcgactacggcatcctcaaccgcgtgttccacaacatcacggacacgcacgtcgcgcaccacctcttctccaccatgccgcactaccacgccatggaggccaccaaggcgatcaggcccatcctcggggactactaccacttcgacccgacccctgttgccaaggcgacctggcgcgaggccagggagtgcatctacgtcgagcccgaggaccgcaagggcgtcttctggtacaacaagaagttctagccgccgccgctcgcagagctgagaggacgctaccataggaatgggagcaggaaccaggaggaggagacggtactcgccccaaagtctccgtcaacctatctaatcgttagtcgtcagtcttttagacgggaagagagatcatttgggcacagagacgaaggcttactgcagtgccatcgctagagctgccatcaagtacaagtaggcaaattcgtcaacttagtgtgtcccatgttgtttttcttagtcgtccgctgctgtaggctttccggcggcggtcgtttgtgtggttggcatccgtggccatgcctgtgcgtgcgtggccgcgcttgtcgtgtgcgtctgtcgtcgcgttggcgtcgtctcttcgtgctccccgtgtgttgttgtaaaacaagaagatgttttctggtgtctttggcggaataacagatcgtccgaacgacaacctttttttgggtagctgtagtggttttccgagtcggatcacgcacgattctcgtgtcgcgttgctcgtttctgggtctttgctagctggccaaggttgcccccggttcattccctgcaaatcatccacacctctggttggctgcagtgccagtttgcaacgttgtggtccaaggctccaagcccaatccttatctttgtggatgggaagctggtgctctctgtgccagtcacctgccagtctgggaggaccagtgttttgctctcggca

SEQ ID NO: 55761 - DNA, 446 bp, Zea Mays
gggccttcccctcctcttttttgcaggcacaacttcttcgccgctgctacctttatcttcgtggctcctgacagtggtcacagctgccattccacggatttttacagtcatgcatcagcgtgttcgctgtggctggtttaaaacttactgtaattcataaagacaaaataagtagaagatttaagcctgatcatgaaggacaattttatcccgatcaaatgccccaacccgcggaccgggacgaggtctgtgcctgtagccccgtacacctgcaactgcaatgccactgtcgtattcctgaatgaatatactgtatcacacacgctgtttcaagacgtcgcagaagatctgtagattgacccaaccaaatctttatgaacgtttccacattctgcagttattcagtactacagctgaaaggtgaagtaacttatacaaaattcaac

SEQ ID NO: 55762 - DNA, 4565 bp, Zea Mays
gatcccgtctccgctttaccaaaacagctcctcgcccaatcattctctctgcctcgtcctcgcgccgcctctcatcttccgggagtcagcggcggcggaatatggcggggaaatccaagggtgggaagaacaaagggaaggcgcaagtcgtgggtcactccgcctcagctgagccagaggtgctggcgactgatggagccgaattggttaatccagataacggggaagtaagcgaacccggggaagtaagcgacccccctgccacggaggatggcgtggcagatgtagagaaaggagacggggatgctccggaggttgtgcagtctgcaaaaaagccagctgaaggtgagcttcatctgtaccctgttcctgtcaggacacaatctggtgaaaagctcgagctgcagctaagcccaggagattctgttattgatgttaaacaattcctcttggatgctcctgaaacatgcttctacacatgctatgatttgatattgcatactgaagatgggtcagctcatcagttagaagactacaatgaaatatctgaaatagcagatataacttctggtggatgttcactggagatggttgctgcaatatatgatgagaggtctattaggtcacatctccgacgtgtgagggagttactatctctgtctactcttcatgtttccctatcgacatccttaactctgcagcaggagtctgcccagggaaaatctgcagattctggaaaaagccctattcaggagcttgatggtttaaattttatggaggatagtgctggtgctctcactaatttattggcatctacaccagcagagataaaatgtgttgaaagcatggttttttcttctttcaatcctccgccgacctatcggaggttacatggagatctcatctatattgatgttgctacattggaaggaaacaaatactgcattactggaagctccaaatctttttatgttaacagtagcaacaaaaatatatttgactcgaaacctacaaaacaaggactggaggccagcactctcgtaggcctactacagaagatcagtgccaaatttaagaaaggttttcgtgaagttttggatcgcagggcatcggctcatccatttgagaatgttcagtctttgcttccagtgacttcttggctaggagcgtatcctgtgcccgaacatagaagggatgcagccagggctgaagattctgttgtgttgtcatatggcactgagttaattggcatgcaaagagactggaatgaagaattgcagtcctgccgggagtttcctcatggcaatcctcaagaaaggatactgcggggcagagcgctctacaaagtaacatgtgattttgttgatgctgcagtaaaaggtgcagttggtgtcatcaatagatgcatacccccaataaatccaactgacccagaatgttttcatatgtatgttcacaacaatattttctttagttttgctgtcgactccgactatgaagacatttcaaaggaccacaagccagattgccaaaatgggtccagcagaagcaccaaggtttcctccccagatgtgataactaagccagatgcaaaccatggcaaatctgctgaggtagttgattcaaaatctgaagaggcacaactcgcagatagtgagcaggcgacatatgcttctgcaaacaatgacttaaaaggaactaaggcttatcaagaagctgatgtttctggccttcacaatcttgcgatggcaatagttgattacagaggtcacagggttgtagctcagagtataatacctggtattcttcaaggagacaagtccgattcccttctgtatggttctgttgataatggcaagaagatatcttggaacgaaacgttccattctaaggttgttgaggctgcaaagcagctccatttgaaggaacatgtggtattggatggttctggcaatcctataaaattagctgctacagtcgaatgcaagggtattgttgggagtgatgacagacattacattttggatctgatgagagtgactcctcgagattctaactacattggacaagagcaccgcttctgtgtgttgagacctgaacttatagcatcatttgttgaggttgaatccataaaacaatcgttgaagcaaaaggttccagatgctccagttgcaagtacttctgatgctaaggctacctctgttgaaggagatgacaagtctgaagaaagctctgttcatacacacgaggaaaatgacaactcaagctccgagattcttttcaatccgaatgtgtttacagagtacaagcttgctggcagtgcagaggaaatcgctgctgacgaagagttggtaaaaagggctggtacatatcttgtagatatagtgatcccaaagtttgttcaggatctttgttcccttgatatctcccctatggatggacagactttaacagatgcattgcatctccatgggataaatattaggtatctgggcaagattgcaggcatggtcaaacatttaccacacctatgggacttgttttctactgagataatagttagatctgcaaagcatgttatcaaggatatactgagacaaagtttggaccatgatattgcgccagctattgctcatttcttaaactgtttcgttgggaaagttttaggtgcttccacaaagagtagtcttagcaacgcacagtcaaaaactctgaagggtcacgaaaatagccaaactcaaaagtctactaaaggccctaaactgagccatgctgccgtttcaagaaaaagcttatcaacttattctcatctaacctctgatggaatttggtttagcattaaggaatttgcaaaatcaaaatatcagtttgaagtgccagatgaagctaggctttcagccaaaagggtagctgttctccgcaacctatgccgaaaggtaggaataacaattgctgcacgaaaatatgatatggatgcttcaagtccatttgaggcctcggatatgttaaatctccaaccagttgtcaagcattctgttccaacctgtacagatgcaaagaatcttatggaagcagggaaagtcaggatggctgagggaacattgaatgaggcatatgcattgttttctgaagccttttcactgcttcaacagattactggtcccatgcacaaggatgctgcaaattgttgccggtaccttgctatggttttgtaccatgctggtgatacagccggtgcaattgtgcagcagcatagggaactcatcataaacgagagatgtcttggtcttgatcatccggacacagcccacagttatggtaacatggccttgttctatcatgggctcaatcaaactgaattggcactgcggcacatgtcccgtacactgctgctgctaagtttggcgtcaggacctgatcatccagatgttgcagcaactctcataaatgttgcaatgatgtaccaggatgccagtaatatgaatactgctcttaggtatcttcaagaagcccttatgaagaatgaacgacttcttggccctgaccatgttcaaacagccgtatgctatcatgctcttgccattgcattcagttgtatgagcttatataagctttcaattcagcatgaaaagaagacctatgatatactggtaaaacaattaggggaaaatgactcacggactaaagattcagaaaattggttgaatacatttaagcttcgagaagaacaggtcaacgcccagaagcagaaggaccagggagctaatgcatctgataacgctgttaaattcttgaaggcaaaccctgcatttttacaagcaatgaaggctgctgcgctccaatcaggtgacaggtcagcaaatgtcaacaggtccctcaatgctgcagtagttggagaaggtgtaccacgactgagaggagtggatgagcgagctgctcgagcgaccgcagaagctcggaagaaagctgttgcaagaggcctgaatgtccgtaatggccctgcggcaaaccatgcgtctgatgaactagctcagattctcaaactcatcaatactgcttcggggtcttccacttcggcatctgcaaaaaccgaggaatctgcctctgaagggcaggcaacaaatggatctgttcaaaacggagctgcaaccgatgcgaagtctgcagatatcaacgtgccacctgcacctgccaaccaaccagttggattgggggcaacattggagttgaagaagcagaaatcaaagcaaaagtcgtagaaaacccgtgcctggaatttcttttatgactgcagttttggactttagggtgatttgtttttttacatttatagaaattccacgttcacgtggtggaagagttcatttgtttctgttggaggttcttaggagagttcaataatcattacgagaaagaagacaattgtttggaatcatcattgatagaccactgatgagataatggctaatccttaagctaataaatctgtagccggtacaacctgtttaattttttttttatatcgcgccactgcgtttaatgtgatcaacgatcacaagaaagca

SEQ ID NO: 55763 - DNA, 4683 bp, Zea Mays
aaaaaagagagtgaaaagaacgaaaccactcacccagactcgcagaggccacacgagagattaggagggtttgcccatccgtataaaaaggagcggccggcgagggctgcagtctgcagatcccgtctccgctttaccaaaacagctcctcgcccaatcattctctctgcctcgtcctcgcgccgcctctcatcttccgggagtcagcggcggcggaatatggcggggaaatccaagggtgggaagaacaaagggaaggcgcaagtcgtgggtcactccgcctcagctgagccagaggtgctggcgactgatggagccgaattggttaatccagataacggggaagtaagcgaacccggggaagtaagcgacccccctgccacggaggatggcgtggcagatgtagagaaaggagacggggatgctccggaggttgtgcagtctgcaaaaaagccagctgaaggagagcttcatctgtaccctgttcctgtcaggacacaatctggtgaaaagctcgagctgcagctaagcccaggagattctgttattgatgttaaacaattcctcttggatgctcctgaaacatgcttctacacatgctatgatttgatattgcatactgaagatgggtcagctcatcagttagaagactacaatgaaatatctgaaatagcagatataacttctggtggatgttcactggagatggttgctgcaatatatgatgagaggtctattaggtcacatctccgacgtgtgagggagttactatctctgtctactcttcatgtttccctatcgacatccttaactctgcagcaggagtctgcccagggaaaatctgcagattctggaaaaagccctattcaggagcttgatggtttaaattttatggaggatagtgctggtgctctcactaatttattggcatctacaccagcagagataaaatgtgttgaaagcatggttttttcttctttcaatcctccgccgacctatcggaggttacatggagatctcatctatattgatgttgctacattggaaggaaacaaatactgcattactggaagctccaaatctttttatgttaacagtagcaacaaaaatatatttgactcgaaacctacaaaacaaggactggaggccagcactctcgtaggcctactacagaagatcagtgccaaatttaagaaaggttttcgtgaagttttggatcgcagggcatcggctcatccatttgagaatgttcagtctttgcttccagtgacttcttggctaggagcgtatcctgtgcccgaacatagaagggatgcagccagggctgaagattctgttgtgttgtcatatggcactgagttaattggcatgcaaagagactggaatgaagaattgcagtcctgccgggagtttcctcatggcaatcctcaagaaaggatactgcggggcagagcgctctacaaagtaacatgtgattttgttgatgctgcagtaaaaggtgcagttggtgtcatcaatagatgcatacccccaataaatccaactgacccagaatgttttcatatgtatgttcacaacaatattttctttagttttgctgtcgactccgactatgaagacatttcaaaggaccacaagccagattgccaaaatgggtccagcagaagcaccaaggtttcctccccagatgtgataactaagccagatgcaaaccatggcaaatctgctgaggtagttgattcaaaatctgaagaggcacaactcgcagatagtgagcaggcgacatatgcttctgcaaacaatgacttaaaaggaactaaggcttatcaagaagctgatgtttctggccttcacaatcttgcgatggcaatagttgattacagaggtcacagggttgtagctcagagtataatacctggtattcttcaaggagacaagtccgattcccttctgtatggttctgttgataatggcaagaagatatcttggaacgaaacgttccattctaaggttgttgaggctgcaaagcagctccatttgaaggaacatgtggtattggatggttctggcaatcctataaaattagctgctacagtcgaatgcaagggtattgttgggagtgatgacagacattacattttggatctgatgagagtgactcctcgagattctaactacattggacaagagcaccgcttctgtgtgttgagacctgaacttatagcatcatttgttgaggttgaatccataaaacaatcgttgaagcaaaaggttccagatgctccagttgcaagtacttctgatgctaaggctacctctgttgaaggagatgacaagtctgaagaaagctctgttcatacacacgaggaaaatgacaactcaagctccgagattcttttcaatccgaatgtgtttacagagtacaagcttgctggcagtgcagaggaaatcgctgctgacgaagagttggtaaaaagggctggtacatatcttgtagatatagtgatcccaaagtttgttcaggatctttgttcccttgatatctcccctatggatggacagactttaacagatgcattgcatctccatgggataaatattaggtatctgggcaagattgcaggcatggtcaaacatttaccacacctatgggacttgttttctactgagataatagttagatctgcaaagcatgttatcaaggatatactgagacaaagtttggaccatgatattgcgccagctattgctcatttcttaaactgtttcgttgggaaagttttaggtgcttccacaaagagtagtcttagcaacgcacagtcaaaaactctgaagggtcacgaaaatagccaaactcaaaagtctactaaaggccctaaactgagccatgctgccgtttcaagaaaaagcttatcaacttattctcatctaacctctgatggaatttggtttagcattaaggaatttgcaaaatcaaaatatcagtttgaagtgccagatgaagctaggctttcagccaaaagggtagctgttctccgcaacctatgccgaaaggtaggaataacaattgctgcacgaaaatatgatatggatgcttcaagtccatttgaggcctcggatatgttaaatctccaaccagttgtcaagcattctgttccaacctgtacagatgcaaagaatcttatggaagcagggaaagtcaggatggctgagggaacattgaatgaggcatatgcattgttttctgaagccttttcactgcttcaacagattactggtcccatgcacaaggatgctgcaaattgttgccggtaccttgctatggttttgtaccatgctggtgatacagccggtgcaattgtgcagcagcatagggaactcatcataaacgagagatgtcttggtcttgatcatccggacacagcccacagttatggtaacatggccttgttctatcatgggctcaatcaaactgaattggcactgcggcacatgtcccgtacactgctgctgctaagtttggcgtcaggacctgatcatccagatgttgcagcaactctcataaatgttgcaatgatgtaccaggatgccagtaatatgaatactgctcttaggtatcttcaagaagcccttatgaagaatgaacgacttcttggccctgaccatgttcaaacagccgtatgctatcatgctcttgccattgcattcagttgtatgagcttatataagctttcaattcagcatgaaaagaagacctatgatatactggtaaaacaattaggggaaaatgactcacggactaaagattcagaaaattggttgaatacatttaagcttcgagaagaacaggtcaacgcccagaagcagaaggaccagggagctaatgcatctgataacgctgttaaattcttgaaggcaaaccctgcatttttacaagcaatgaaggctgctgcgctccaatcaggtgacaggtcagcaaatgtcaacaggtccctcaatgctgcagtagttggagaaggtgtaccacgactgagaggagtggatgagcgagctgctcgagcgaccgcagaagctcggaagaaagctgttgcaagaggcctgaatgtccgtaatggccctgcggcaaaccatgcgtctgatgaactagctcagattctcaaactcatcaatactgcttcggggtcttccacttcggcatctgcaaaaaccgaggaatctgcctctgaagggcaggcaacaaatggatctgttcaaaacggagctgcaaccgatgcgaagtctgcagatatcaacgtgccacctgcacctgccaaccaaccagttggattgggggcaacattggagttgaagaagcagaaatcaaagcaaaagtcgtagaaaacccgtgcctggaatttcttttatgactgcagttttggactttagggtgatttgtttttttacatttatagaaattccacgttcacgtggtggaagagttcatttgtttctgttggaggttcttaggagagttcaataatcattacgagaaagaagacaattgtttggaatcatcattgatagaccactgatgagataatggctaatccttaagctaataaatctgtagccggtacaacctgtttaattttttttttatatcgcgccactgcgtttaatgtgatcaacgatcacaagaaagca

SEQ ID NO: 55764 - DNA, 2047 bp, Zea Mays
atgcgtaagtttggcaaagaagcgctcagccaatgttatctggacatacttgtccacgtgctccgccagcgaactcctgttcaccatttacgtccgcaacaagacgggctgaagcaaaagcaaaggcggttgcccacacaatccggcgggaacatggttccagccttccaggcctcccttcgccgcgcccaattcacgcttctgcccgaaatcccaccgctcgctatgccacgtcgctgggggccgaacagtcattccgcatccctcccgtttttaggaaaaccgattccccgcttcggtgcccaccacaaagctgacctgcggaagcgcgaggaggacgaaagggaccggacgaagctacgcgctgcaccgaccgaccaaaccctaggcgttcggcgggcgtcaccacggcggcgaagaaagggtgcctcgcgtcgccttggtgtccccgaagtcgtcgacggtgcagctcgatccgcctcgtcgagcatgtcgaggagggtcccttgcaaattcttcttgcatggagcttgcttcaaaggagattactgtgaattctcccatgactgcaatgatcaaccagataatgtttgcactttctaccagaaagggacgtgcacctttggtagccgttgcagaaatgaacatgttgaagttcattgtaactgcccccaaccagcaaccactgtagcgcgtgcatcctccaattcttctcagctagttgcttcttccagagatccccattgcagcgaatgccaaacggatttatgtgaccaaacacagcagatttgcaagtcaacagcagcactttctgcacatcaacctgcatgggttgttgattatcatgaccatgacactccagatgatactacaagctggccgttgcaccaagctgtgcaaaatcaaacatcacaatatcctgttcatctgccaatttgctcttctactgctgatggcacttgtccttatgggaaaggctgttctcagatgcatggagatctgtgtgcattctgtgaaagacagtgcatgaatccttatcaatctgatgaaaggggggtacatgtcaagctatgcaagaaaaacaatagagttcttgaggccatgagaagaagtgaagacatagaatgtggaattggcgtagcacctctcctacgtctggcatggatgtcaactctacactcagggcttgtccaatttgccgcaaattgtcatactatgtagttcctagcattacttggtactcctcaaaggaagaaaagcaagaaattgttgaaggttacaaggccaagctcaggtctattgattgtaagcactttgacttcggaaagggcacttgtccatttggaagcagctgtttttacaagcatgcctacgatgatggccgtttggaagacgctttattgaatcatcatgatgccgacgatgcaagcgcagcgattgccaaacttatgaggttgtcgtacttactgactcggctgcatgtgtaaggaaactcaaacgtatctttgagcaaacattgctgagttcgattggagttcgttgaccgagcaggcaaccttggatttcgctttgtaatggatattataaaaaacatccaaaaaaaagagggcagtcatttctgaattttatcttttcgctgaatgttcaaatcatcagaaggaagcagtcccaatcgtgccacttccacttggaagctagcattttctatccgggttggtacctgattggtggttgtgaccaaacttaactatacccaatactggtgatcctcgtttgttgcagcatctctagcatttcgtttttccagccccgagaaatgctctattgctctgtaattgaagagtggagaaatgttaatctcgatctttagtgctgctcgcctgctatggcgcgtggaactaagttcagttaaacccagctatgggtattctttaccacgaaggccttattcggttattcccaatacagccttattcggttattcccaatacacatggattggatgtgattggaaaaaattaagaagaagtttaacttgtttgatatt

SEQ ID NO: 55765 - DNA, 2772 bp, Zea Mays
atgcgtaagtttggcaaagaagcgctcagccaatgttatctggacatacttgtccacgtgctccgccagcgaactcctgttcaccatttacgtccgcaacaagacgggctgaagcaaaagcaaaggcggttgcccacacaatccggcgggaacatggttccagccttccaggcctcccttcgccgcgcccaattcacgcttctgcccgaaatcccaccgctcgctatgccacgtcgctgggggccgaacagtcattccgcatccctcccgtttttaggaaaaccgattccccgcttcggtgcccaccacaaagctgacctgcggaagcgcgaggaggacgaaagggaccggacgaagctacgcgctgcaccgaccgaccaaaccctaggcgttcggcgggcgtcaccacggcggcgaagaaagggtgcctcgcgtcgccttggtgtccccgaagtcgtcgacggtgcagctcgatccgcctcgtcgagcatgtcgaggagggtcccttgcaaattcttcttgcatggagcttgcttcaaaggagattactgtgaattctcccatgactgcaatgatcaaccagataatgtttgcactttctaccagaaagggacgtgcacctttggtagccgttgcagaaatgaacatgttgaagttcattgtaactgcccccaaccagcaaccactgtagcgcgtgcatcctccaattcttctcagctagttgcttcttccagagatccccattgcagcgaatgccaaacggatttatgtgaccaaacacagcagatttgcaagtcaacagcagcactttctgcacatcaacctgcatgggttgttgattatcatgaccatgacactccagatgatactacaagctggccgttgcaccaagctgtgcaaaatcaaacatcacaatatcctgttcatctgccaatttgctcttctactgctgatggcacttgtccttatgggaaaggctgttctcagatgcatggagatctgtgtgcattctgtgaaagacagtgcatgaatccttatcaatctgatgaaaggggggtacatgtcaagctatgcaagaaaaacaatagagttcttgaggccatgagaagaagtgaagacatagaatgtggtgtgtgcttggaccgtgtgctttcaaaacctacggcagcagaaaggaggtttgggctgctatctgactgcgaccattccttctgtatctcatgcattaggaattggcgtagcacctctcctacgtctggcatggatgtcaactctacactcagggcttgtccaatttgccgcaaattgtcatactatgtagttcctagcattacttggtactcctcaaaggaagaaaagcaagaaattgttgaaggttacaaggccaagctcaggtctattgattgtaagcactttgacttcggaaagggcacttgtccatttggaagcagctgtttttacaaggtgcatagtacagtttttggggtcatttaaatgcctctttgtttgattacatgcttcaaagcatgtactgtttatcttcattcttgagtggaacataattggcttatcataggaggtattttcaatctaacaatgcaagtcttgttcctagtacatctttgtaatttgaaactggaaccttcatatagcagcttgcaatttcaagctgcttgccatcattgctcgaattcaatagtaggtttaaactgcactgtgtggcccttcaaaagcgcgctcccatttgcacagtgaattggtaccgttattccatttcttagtacatgcaaaatcaatttatatattcaaaacatctgcccgttaattatgatatttgaagagttcctttttgaggaaaaatgcaagtacagggacatggcccttcagaacttctaagtgaatttacagtttatctcgtataatgaccccttgatggtcatctggtttttcctccacgggggctcaagtcctcgattatatgctttgcatcgtagagtaatatgcgtttccttttgtagtagcccgttttttcagtttcccgtggtgttatgctctattgttttgacacctgtaaatgcaacgtcttcagcatgcctacgatgatggccgtttggaagacgctttattgaatcatcatgatgccgacgatgcaagcgcagcgattgccaaacttatgaggttgtcgtacttactgactcggctgcatgtgtaaggaaactcaaacgtatctttgagcaaacattgctgagttcgattggagttcgttgaccgagcaggcaaccttggatttcgctttgtaatggatattataaaaaacatccaaaaaaaagagggcagtcatttctgaattttatcttttcgctgaatgttcaaatcatcagaaggaagcagtcccaatcgtgccacttccacttggaagctagcattttctatccgggttggtacctgattggtggttgtgaccaaacttaactatacccaatactggtgatcctcgtttgttgcagcatctctagcatttcgtttttccagccccgagaaatgctctattgctctgtaattgaagagtggagaaatgttaatctcgatctttagtgctgctcgcctgctatggcgcgtggaactaagttcagttaaacccagctatgggtattctttaccacgaaggccttattcggttattcccaatacagccttattcggttattcccaatacacatggattggatgtgattggaaaaaattaagaagaagtttaacttgtttgatatt

SEQ ID NO: 55766 - DNA, 2129 bp, Zea Mays
atgcgtaagtttggcaaagaagcgctcagccaatgttatctggacatacttgtccacgtgctccgccagcgaactcctgttcaccatttacgtccgcaacaagacgggctgaagcaaaagcaaaggcggttgcccacacaatccggcgggaacatggttccagccttccaggcctcccttcgccgcgcccaattcacgcttctgcccgaaatcccaccgctcgctatgccacgtcgctgggggccgaacagtcattccgcatccctcccgtttttaggaaaaccgattccccgcttcggtgcccaccacaaagctgacctgcggaagcgcgaggaggacgaaagggaccggacgaagctacgcgctgcaccgaccgaccaaaccctaggcgttcggcgggcgtcaccacggcggcgaagaaagggtgcctcgcgtcgccttggtgtccccgaagtcgtcgacggtgcagctcgatccgcctcgtcgagcatgtcgaggagggtcccttgcaaattcttcttgcatggagcttgcttcaaaggagattactgtgaattctcccatgactgcaatgatcaaccagataataaagggacgtgcacctttggtagccgttgcagaaatgaacatgttgaagttcattgtaactgcccccaaccagcaaccactgtagcgcgtgcatcctccaattcttctcagctagttgcttcttccagagatccccattgcagcgaatgccaaacggatttatgtgaccaaacacagcagatttgcaagtcaacagcagcactttctgcacatcaacctgcatgggttgttgattatcatgaccatgacactccagatgatactacaagctggccgttgcaccaagctgtgcaaaatcaaacatcacaatatcctgttcatctgccaatttgctcttctactgctgatggcacttgtccttatgggaaaggctgttctcagatgcatggagatctgtgtgcattctgtgaaagacagtgcatgaatccttatcaatctgatgaaaggggggtacatgtcaagctatgcaagaaaaacaatagagttcttgaggccatgagaagaagtgaagacatagaatgtggtgtgtgcttggaccgtgtgctttcaaaacctacggcagcagaaaggaggtttgggctgctatctgactgcgaccattccttctgtatctcatgcattaggaattggcgtagcacctctcctacgtctggcatggatgtcaactctacactcagggcttgtccaatttgccgcaaattgtcatactatgtagttcctagcattacttggtactcctcaaaggaagaaaagcaagaaattgttgaaggttacaaggccaagctcaggtctattgattgtaagcactttgacttcggaaagggcacttgtccatttggaagcagctgtttttacaagcatgcctacgatgatggccgtttggaagacgctttattgaatcatcatgatgccgacgatgcaagcgcagcgattgccaaacttatgaggttgtcgtacttactgactcggctgcatgtgtaaggaaactcaaacgtatctttgagcaaacattgctgagttcgattggagttcgttgaccgagcaggcaaccttggatttcgctttgtaatggatattataaaaaacatccaaaaaaaagagggcagtcatttctgaattttatcttttcgctgaatgttcaaatcatcagaaggaagcagtcccaatcgtgccacttccacttggaagctagcattttctatccgggttggtacctgattggtggttgtgaccaaacttaactatacccaatactggtgatcctcgtttgttgcagcatctctagcatttcgtttttccagccccgagaaatgctctattgctctgtaattgaagagtggagaaatgttaatctcgatctttagtgctgctcgcctgctatggcgcgtggaactaagttcagttaaacccagctatgggtattctttaccacgaaggccttattcggttattcccaatacagccttattcggttattcccaatacacatggattggatgtgattggaaaaaattaagaagaagtttaacttgtttgatatt

SEQ ID NO: 55767 - DNA, 1416 bp, Zea Mays
tcggaccaggctaaccaacccactgtccttcataagctcggaggccagttccacctgcgctcgatcatctctgaaggtgtacgggcccgtaacatatgcccatctgtctcatcttatgaaaggagatttgccacaaggaactacatgacccagagcctttggggcccttcaatgtctgttagcggtggcatcaatgtcccagtgatgcagaccccgctctgtgctaatgctcctgctgagaaaggaggcaagaacttcatgattgatttcatgatgggcggtgtttcagctgctgtttcaaagactgctgctgctcccatcgagcgtgtgaagctgcttattcagaaccaagatgagatgattaagtctggtaggctatcagagccgtacaagggtattgttgactgcttcaaacgtaccattaaggatgaaggtttctcttccttgtggaggggtaacactgctaatgttattcgttacttccctactcaggctttgaactttgcatttaaggactacttcaagaggttgttcaacttcaagaaggatagggatggctattggaagtggtttgctggcaacctggcctctggtggtgctgctggtgcttcctctttgttttttgtgtactccctggactacgcgagaacaaggttggctaatgacgcgaaggctgccaagggaggaggtgaaaggcagttcaatgggcttgtcgatgtctaccgcaagacactcaagtctgatggtattgctgggctttaccgtggatttaacatctcctgtgttggaatcattgtttatcgtggtctgtactttgggctctatgattccatcaagccagttgtccttactggcaacctccaggacaatttctttgccagtttcgctctgggttggctgatcactaatggtgctggtcttgcatcttaccccatcgataccgtccgcagaaggatgatgatgacatctgctccagatcctcttcttcggaaagaagtacggctccggcggtgcttaaatggagaaatatgatgacgaacaagagcagtgtgtgttcccggtcctttccaatcaggatctggtgaagtttttgcctttcatatcgaagaaattaataattcatgtagagggaggattcttccaacaatttgttttggatggagacttagatctccaaacactcgtaactatcctactaggtggtgacatcggtccccaaaaacatttatggtcatagagtctgcccttcgtttgtcagtcgggcaatttttcttgcatacaatgccttcgtttaagtatcggatgagttgctgcgactaattatttgtttgtctttaccttttgcaatgcttgattgttgatagcattgtttttgtcactggatttcttgttaatgttgcatttggtttacgcgtt

SEQ ID NO: 55768 - DNA, 1581 bp, Zea Mays
gttctgatcttttcttacagtaacgttggaatggctgctacactagcttcagtctgttcagtcccattgacttcagtactgcttctctttgaactgacaaaggattacaggattttgcttccgctcatgggagcagttgggttggcaatatgggttccttcagtagtaaaccagccaaacgacagtgagccttctgggtttagaacatccagacgaggttattcttcaatgtcaccagaagaaagaaatggcagcttaaggcaaggtgatgttgtggatgatcttgagctcagtattatacaaactgacatgagtaactatggaacttataatgcagaaatgcttctggatgatttgaaggtcttccaggccatgtcaaagatatatctcaaagtgttaccatctgctacagtaacagaagttcttaatctgttgcatgatagacagcaaaattgtgccctggttgtggaccctgaagattttcttgaaggaataattacattaggggatatacggcgcatgggatatgggttacatgtggaaagtttcatcaatggagatcaccccaaggctgacgataactcttcttccatttcattgtgtcttactcgaggattccagtatcgtgggagcgaacgtggattgttaacatgctttccagatactgatttgaccactgcaaagagtcttatggaggccagagggataaagcaactgcctgtagttaagcgtggtgttgcccatagaactgcaggaaagcgcaggccgattgcccttctacattatgattctattggttgctgcgtgcgggaggaaatagagaactggaagaccatatatcagagactggcttgttaataatatgaaactacttggacgatatgattattcgtttgattgccgagggagaatattgtgaactgaaggtcatgtatcagcgaaaagcaggctttcctcttgtagcaattgtgcactgaaaaactacagtgcccttatgacaccacaacagtaagcaagactacaggacatctatgcgaaatgcagctagccagctacactgatgtagagatcattcaggcagtttaacctctatactgtatcattttgatttcacggtgatctgcaggggcaagcctgataaattctgcaaagacctcccattactgcaagtttcatgtggcatccctgctcgtaccacttatttgttcttgttacgacctggacttgtactttacgcgggataggaacgaagtacagacctagtgtaagaaggcggtactttttaccctcgtactgcttgtaaattgtaatgtgtagcatatattagagcatgataacttctgctgcatatattcgtcagtgtgatcactcaaggaatttgtgcagcagaattttgtcatgtcgatgttgtaagttgaaggatcacattgcttgtaaaatttggcagcatgttgtcttatcctcggatgagtatgttgttgtagaaacttgcatttggcctttgctctgcacactcttgtatgttgtgacgtattcaatccgttctgatttattgatcgttttaactttttcagatatata

SEQ ID NO: 55769 - DNA, 2815 bp, Zea Mays
gtagtgccgtgctcgtgctcgtgctcgcgaggtacctcgctctctcctgacttcccgcgtcggcgtcgccggcctcctcgtataagaaccgacatccgacacgccgccttcgcactcgtcaacctctccgctttgcctccctccctcgcgtccgcgttccctcccgcctccagatctcgatgcggcagcggctcccctgacagcggaggcgacgccggcaccatgtcctcctgcgacgacgaccacgcctcgctcctcagatcccacgctggggcctcgtcgccgtcctgcccctcgccgcgcggttcggcgggacatcagcaccacgccgacgtcgaggcggacgaggccaccgtcaccgcctccccgaggctcgccagcggcggcgggggtgtgcgcggtctcctgcgcaacctcgagcgccgcatgtccgcacgcggatctgggcctgggcgtcgccagcaccagcattatcagcagctcgatcgctccgtggcgatcgagtcgccgccgtctcagcggcagcgggagagagcggcggcgggggatgacgacgagctcggggacggggcgccgcccgagtgggcgctgctgctcatcggctgcctcctcgggctcgccaccggcatctgcgtcgccgcgtttaaccgcggggttcatgtcatccatgaatgggcatgggcagggactcccaacgaaggtgcagcatggctccgcctgcagaagatagctgatacttggcacaggatactgctgatcccggtgactgggggtgtggttgtaggaatgatgcatgggttgctcgatatatttgagcagctaaaacttgtgaaatcagggcagaggcaaggaatcaactttgttggagccatcttcccaaccataaaggctgtccaagctgctgttaccctagggactggctgttccctgggacctgaaggtcctagtgtggatattggcaaatcgtgtgcaaatgcatgctcagaaatgatggagagtaaccgggaaaggcgtattgcacttgttgctgctggcgctgctgctggcattgcttcaggcttcaatgcagcagttgctgggtgcttctttgccattgaaactgtattaaggcctcttaaagcagaaaattcacctccatttacgactgcaatgataatattggcatctgttatatcatctactgtttcaaatgttttacttggagccagaccagcttttatagtgccagcatatgagctcaaatctgctgccgagctaccattgtaccttatcttaggaatgctatgtggagcggtcagtgtggtatttgatagattggttggatggttttcaagattctttgggcacataaaggaaaagtttgattttcctataatagtgtaccctgctttaggtgggctgggagctggtatcatagctctgaaatatccagggatcttatactggggtttcacaaatgttgaagaaatattgcataccggtaaaagtgcttctgctcctggtatctggttgttaactcaactggcggctgcaaaggtagttgcaactgctctctgcaagggctctgggcttgtgggaggactatatgctccaagcctgatgattggggctgctgttggagctgtttttgggggttcagctgcttatttaataaattcagctttacctggtaatgctgctgttgcacagccacaagcttatgctctggttggaatggctgctacactagcttcagtctgttcagtcccattgacttcagtactgcttctctttgaactgacaaaggattacaggattttgcttccgctcatgggagcagttgggttggcaatatgggttccttcagtagtaaaccagccaaacgacagtgagccttctgggtttagaacatccagacgaggttattcttcaatgtcaccagaagaaagaaatggcagcttaaggcaaggtgatgttgtggatgatcttgagctcagtattatacaaactgacatgagtaactatggaacttataatgcagaaatgcttctggatgatttgaagggaggaaatagagaactggaagaccatatatcagagactggcttgttaataatatgaaactacttggacgatatgattattcgtttgattgccgagggagaatattgtgaactgaaggtcatgtatcagcgaaaagcaggctttcctcttgtagcaattgtgcactgaaaaactacagtgcccttatgacaccacaacagtaagcaagactacaggacatctatgcgaaatgcagctagccagctacactgatgtagagatcattcaggcagtttaacctctatactgtatcattttgatttcacggtgatctgcaggggcaagcctgataaattctgcaaagacctcccattactgcaagtttcatgtggcatccctgctcgtaccacttatttgttcttgttacgacctggacttgtactttacgcgggataggaacgaagtacagacctagtgtaagaaggcggtactttttaccctcgtactgcttgtaaattgtaatgtgtagcatatattagagcatgataacttctgctgcatatattcgtcagtgtgatcactcaaggaatttgtgcagcagaattttgtcatgtcgatgttgtaagttgaaggatcacattgcttgtaaaatttggcagcatgttgtcttatcctcggatgagtatgttgttgtagaaacttgcatttggcctttgctctgcacactcttgtatgttgtgacgtattcaatccgttctgatttattgatcgttttaactttttcagatatata

SEQ ID NO: 55770 - DNA, 4057 bp, Zea Mays
gtagtgccgtgctcgtgctcgtgctcgcgaggtacctcgctctctcctgacttcccgcgtcggcgtcgccggcctcctcgtataagaaccgacatccgacacgccgccttcgcactcgtcaacctctccgctttgcctccctccctcgcgtccgcgttccctcccgcctccagatctcgatgcggcagcggctcccctgacagcggaggcgacgccggcaccatgtcctcctgcgacgacgaccacgcctcgctcctcagatcccacgctggggcctcgtcgccgtcctgcccctcgccgcgcggttcggcgggacatcagcaccacgccgacgtcgaggcggacgaggccaccgtcaccgcctccccgaggctcgccagcggcggcgggggtgtgcgcggtctcctgcgcaacctcgagcgccgcatgtccgcacgcggatctgggcctgggcgtcgccagcaccagcattatcagcagctcgatcgctccgtggcgatcgagtcgccgccgtctcagcggcagcgggagagagcggcggcgggggatgacgacgagctcggggacggggcgccgcccgagtgggcgctgctgctcatcggctgcctcctcgggctcgccaccggcatctgcgtcgccgcgtttaaccgcggggttcatgtcatccatgaatgggcatgggcagggactcccaacgaaggtgcagcatggctccgcctgcagaagatagctgatacttggcacaggatactgctgatcccggtgactgggggtgtggttgtaggaatgatgcatgggttgctcgatatatttgagcagctaaaacttgtgaaatcagggcagaggcaaggaatcaactttgttggagccatcttcccaaccataaaggctgtccaagctgctgttaccctagggactggctgttccctgggacctgaaggtcctagtgtggatattggcaaatcgtgtgcaaatgcatgctcagaaatgatggagagtaaccgggaaaggcgtattgcacttgttgctgctggcgctgctgctggcattgcttcaggcttcaatgcagcagttgctgggtgcttctttgccattgaaactgtattaaggcctcttaaagcagaaaattcacctccatttacgactgcaatgataatattggcatctgttatatcatctactgtttcaaatgttttacttggagccagaccagcttttatagtgccagcatatgagctcaaatctgctgccgagctaccattgtaccttatcttaggaatgctatgtggagcggtcagtgtggtatttgatagattggttggatggttttcaagattctttgggcacataaaggaaaagtttgattttcctataatagtgtaccctgctttaggtgggctgggagctggtatcatagctctgaaatatccagggatcttatactggggtttcacaaatgttgaagaaatattgcataccggtaaaagtgcttctgctcctggtatctggttgttaactcaactggcggctgcaaaggtagttgcaactgctctctgcaagggctctgggcttgtgggaggactatatgctccaagcctgatgattggggctgctgttggagctgtttttgggggttcagctgcttatttaataaattcagctttacctggtaatgctgctgttgcacagccacaagcttatgctctggttggaatggctgctacactagcttcagtctgttcagtcccattgacttcagtactgcttctctttgaactgacaaaggattacaggattttgcttccgctcatgggagcagttgggttggcaatatgggttccttcagtagtaaaccagccaaacgacagtgagccttctgggtttagaacatccagacgaggttattcttcaatgtcaccagaagaaagaaatggcagcttaaggcaaggtgatgttgtggatgatcttgagctcagtattatacaaactgacatgagtaactatggaacttataatgcagaaatgcttctggatgatttgaaggtttgtcggcctctattctcgcagatcttactcatatctggctcttgttatcacgtatagtatatttgattgacatactttgtaacgcttgaattgcaaggctgtatttgtgcttctgtttatgttgtttcatttatttgtacctttttaatcaggtcttccaggccatgtcaaagatatatctcaaagtgttaccatctgctacagtaacagaagttcttaatctgttgcatgatagacagcaaaattgtgccctggttgtggaccctgaagattttcttgaaggaataattacattaggggatatacggcgcatgggatatgggttacatgtggaaagtttcatcaatggagatcaccccaaggctgacgtacgtttatatggtgcaagaaatttctttcttcccattaaatacatctgtgccttttgaaaatatggcatgagcgctgccttatattaagaaagaaaggaaaatttatacatcataaaagccttagtgcacaaatttaggacaaggttgacaatctaatgagcttatggtactttagcactgaataaagctcaaagtaacattttttttctttaggagagacacatcattgcatcaaggagataataaattacaacacgtccaccatgcttacacacacacactcttacttataccagaaataaaacatcaatccacgaccaaacccaacaaaaccaccagtttgtaatctattggctatctctagtgcctacaagctcccagatgtgtgccttgtcttaggacgagctagatgctaggattggccccattggaaacacaatcattgctaaatatgactatgctaacaaataacaaatttgtcacttttgcactatttaagttaaccgcgtcttttaaggaatcagttagctatagactcaaactgtgatgtctactatatgtgcattcatcctagcttctggagccatagaaacaattttcacacttgtaagaaaatgcattgatatttgttacaggataactcttcttccatttcattgtgtcttactcgaggattccagtatcgtgggagcgaacgtggattgttaacatgctttccagatactgatttgaccactgcaaagagtcttatggaggccagagggataaagcaactgcctgtagttaagcgtggtgttgcccatagaactgcaggaaagcgcaggccgattgcccttctacattatgattctattggttgctgcgtgcgggaggaaatagagaactggaagaccatatatcagagactggcttgttaataatatgaaactacttggacgatatgattattcgtttgattgccgagggagaatattgtgaactgaaggtcatgtatcagcgaaaagcaggctttcctcttgtagcaattgtgcactgaaaaactacagtgcccttatgacaccacaacagtaagcaagactacaggacatctatgcgaaatgcagctagccagctacactgatgtagagatcattcaggcagtttaacctctatactgtatcattttgatttcacggtgatctgcaggggcaagcctgataaattctgcaaagacctcccattactgcaagtttcatgtggcatccctgctcgtaccacttatttgttcttgttacgacctggacttgtactttacgcgggataggaacgaagtacagacctagtgtaagaaggcggtactttttaccctcgtactgcttgtaaattgtaatgtgtagcatatattagagcatgataacttctgctgcatatattcgtcagtgtgatcactcaaggaatttgtgcagcagaattttgtcatgtcgatgttgtaagttgaaggatcacattgcttgtaaaatttggcagcatgttgtcttatcctcggatgagtatgttgttgtagaaacttgcatttggcctttgctctgcacactcttgtatgttgtgacgtattcaatccgttctgatttattgatcgttttaactttttcagatatata

SEQ ID NO: 55771 - DNA, 3412 bp, Zea Mays
ggcgttgccgttgcagcagccagcagcgctcgccagtggacgaccagcgcgccgcgcgcaggtcgcaggtcagtgcgacccgtggcccgtggggtcgatcggcccttgtctctgtttcatcactgccgtagtgccgtgctcgtgctcgtgctcgcgaggtacctcgctctctcctgacttcccgcgtcggcgtcgccggcctcctcgtataagaaccgacatccgacacgccgccttcgcactcgtcaacctctccgctttgcctccctccctcgcgtccgcgttccctcccgcctccagatctcgatgcggcagcggctcccctgacagcggaggcgacgccggcaccatgtcctcctgcgacgacgaccacgcctcgctcctcagatcccacgctggggcctcgtcgccgtcctgcccctcgccgcgcggttcggcgggacatcagcaccacgccgacgtcgaggcggacgaggccaccgtcaccgcctccccgaggctcgccagcggcggcgggggtgtgcgcggtctcctgcgcaacctcgagcgccgcatgtccgcacgcggatctgggcctgggcgtcgccagcaccagcattatcagcagctcgatcgctccgtggcgatcgagtcgccgccgtctcagcggcagcgggagagagcggcggcgggggatgacgacgagctcggggacggggcgccgcccgagtgggcgctgctgctcatcggctgcctcctcgggctcgccaccggcatctgcgtcgccgcgtttaaccgcgggctgtcttgatgactttgctaggttcatgtcatccatgaatgggcatgggcagggactcccaacgaaggtgcagcatggctccgcctgcagaagatagctgatacttggcacaggatactgctgatcccggtgactgggggtgtggttgtaggaatgatgcatgggttgctcgatatatttgagcagctaaaacttgtgaaatcagggcagaggcaaggaatcaactttgttggagccatcttcccaaccataaaggctgtccaagctgctgttaccctagggactggctgttccctgggacctgaaggtcctagtgtggatattggcaaatcgtgtgcaaatgcatgctcagaaatgatggagagtaaccgggaaaggcgtattgcacttgttgctgctggcgctgctgctggcattgcttcaggcttcaatgcagcagttgctgggtgcttctttgccattgaaactgtattaaggcctcttaaagcagaaaattcacctccatttacgactgcaatgataatattggcatctgttatatcatctactgtttcaaatgttttacttggagccagaccagcttttatagtgccagcatatgagctcaaatctgctgccgagctaccattgtaccttatcttaggaatgctatgtggagcggtcagtgtggtatttgatagattggttggatggttttcaagattctttgggcacataaaggaaaagtttgattttcctataatagtgtaccctgctttaggtgggctgggagctggtatcatagctctgaaatatccagggatcttatactggggtttcacaaatgttgaagaaatattgcataccggtaaaagtgcttctgctcctggtatctggttgttaactcaactggcggctgcaaaggtagttgcaactgctctctgcaagggctctgggcttgtgggaggactatatgctccaagcctgatgattggggctgctgttggagctgtttttgggggttcagctgcttatttaataaattcagctttacctggtaatgctgctgttgcacagccacaagcttatgctctggttggaatggctgctacactagcttcagtctgttcagtcccattgacttcagtactgcttctctttgaactgacaaaggattacaggattttgcttccgctcatgggagcagttgggttggcaatatgggttccttcagtagtaaaccagccaaacgacagtgagccttctgggtttagaacatccagacgaggttattcttcaatgtcaccagaagaaagaaatggcagcttaaggcaaggtgatgttgtggatgatcttgagctcagtattatacaaactgacatgagtaactatggaacttataatgcagaaatgcttctggatgatttgaaggtcttccaggccatgtcaaagatatatctcaaagtgttaccatctgctacagtaacagaagttcttaatctgttgcatgatagacagcaaaattgtgccctggttgtggaccctgaagattttcttgaaggaataattacattaggggatatacggcgcatgggatatgggttacatgtggaaagtttcatcaatggagatcaccccaaggctgacgataactcttcttccatttcattgtgtcttactcgaggattccagtatcgtgggagcgaacgtggattgttaacatgctttccagatactgatttgaccactgcaaagagtcttatggaggccagagggataaagcaactgcctgtagttaagcgtggtgttgcccatagaactgcaggaaagcgcaggccgattgcccttctacattatgattctattggttgctgcgtgcgggaggaaatagagaactggaagaccatatatcagagactggcttgttaataatatgaaactacttggacgatatgattattcgtttgattgccgagggagaatattgtgaactgaaggtcatgtatcagcgaaaagcaggctttcctcttgtagcaattgtgcactgaaaaactacagtgcccttatgacaccacaacagtaagcaagactacaggacatctatgcgaaatgcagctagccagctacactgatgtagagatcattcaggcagtttaacctctatactgtatcattttgatttcacggtgatctgcaggggcaagcctgataaattctgcaaagacctcccattactgcaagtttcatgtggcatccctgctcgtaccacttatttgttcttgttacgacctggacttgtactttacgcgggataggaacgaagtacagacctagtgtaagaaggcggtactttttaccctcgtactgcttgtaaattgtaatgtgtagcatatattagagcatgataacttctgctgcatatattcgtcagtgtgatcactcaaggaatttgtgcagcagaattttgtcatgtcgatgttgtaagttgaaggatcacattgcttgtaaaatttggcagcatgttgtcttatcctcggatgagtatgttgttgtagaaacttgcatttggcctttgctctgcacactcttgtatgttgtgacgtattcaatccgttctgatttattgatcgttttaactttttcagatatata

SEQ ID NO: 55772 - DNA, 1978 bp, Zea Mays
caaatttcaaagagtgcatttttttttgtgatagcaaagtgctagttgtgggatggattgggcaaggcagtggacactttctctggtatcagaggatcaatgtccaattattatgatgactacgatgacattgacgggatggaggatgattatgatatggatgatcccattgatgacatggtagacgagcagcaagggattagggattctgatgtggaagataatgattatggacaaccaagtgatgtcctcacacagttgcaaaatgtcctgctgaaaattgcaactacccaaattatggatttgaatgataagatcccagatacttcatcagcagatgcaagaaaaggaagggacattcaaggaataccctgggagcagataaacataacccgtaaaaaatacagacagtccagattagaacagtacaaaaattatgagaatgtacctaactctggagaagaagctatgaaggattgcaaaccaacagagaaaggtgggatatactatgagtttagacgaaatactagatcggttaaatcaactattctacattttcagcttagaaatttggtatgggcaacgtccaagcacgacatctacctagtatctcattactcaattcgtcactggtcagcattgagtggtgtggatactgaacttatcaacgtccaaggacatgtggcaccaagggagaagcatgcaggaagtttattagaggggttttatcagactcaagttagtaccttgacagtcaaggacaatttactggtagctggtgggtttcaaggagagctgatctgtaaacaccttgatcaggaaggtattagtttttgctgtcgaacaacttatgatgataatgctattacaaatgcggttgagatatttaatacctctagtggcgccgttcacttcatggcatcaaataacgactctggtgtgagatactatgacatggagagattccagctattcaagcattttcagtttgaatggccagtgaatcatgcttcgttgagtcctgacagaaaggtggttgttattgtgggtgatgatcctgatggtctacttattgatgcaaactctggaaagacagttcattccataaaaggacatcgggactactcatttgcatcggcttggagccctgatgggcgaacatttgctaccggcaaccaagacaagacatgccgaatctgggacgtgaggaacctttcaaaatccgtccatgtgttgaggggtaaccttggagccatccggtccatccgcttcacctcggatggccagttcatgtccatggctgaacctgctgactttgtgcacatctacgacgtgaagagtgactacaacaaaaggcaggagctggacttctttggcgagatatccggcacatcgttcagcccagacactgacacgcttttcgttggtgtgtgggataggatgtatggcagcctgctacaatttggccgcctgtacaactactcgtatcttgactccctgttttgatgtggatccaaacgggtgttgaactgttgggttttggtgtacctcagtgctctgaatgttgtcagcataaattaggtggttatccctaatcaggatattaagttgcaaagataattgaattaataaatgttgtaccgtgcccgatgtgtatatgtaaaaagaaatgtatacatgtgcctattgagagaccgagttgagatgtgacttaggggttgtttgtttgggattataatctattcagattatataatctaatttatttgttttaggggttgtttgtttgggattataaatataatctaacttatttgtttgtttgagattagtctagcttgaaaagtatgtttgaccttgtgtgcataggattgaatacagtgtgtgtagtttcatgtagacgcaggtaatgtatgtttctgtcacgggactgaccggccgtggtaggaatgtgtgtcgaaggaaaatatcttttggc

SEQ ID NO: 55773 - DNA, 1837 bp, Zea Mays
ctagaagcctataattcgctgagcagtggacactttctctggtatcagaggatcaatgtccaattattatgatgactacgatgacattgacgggatggaggatgattatgatatggatgatcccattgatgacatggtagacgagcagcaagggattagggattctgatgtggaagataatgattatggacaaccaatgcaagaaaaggaagggacattcaaggaataccctgggagcagataaacataacccgtaaaaaatacagacagtccagattagaacagtacaaaaattatgagaatgtacctaactctggagaagaagctatgaaggattgcaaaccaacagagaaaggtgggatatactatgagtttagacgaaatactagatcggttaaatcaactattctacattttcagcttagaaatttggtatgggcaacgtccaagcacgacatctacctagtatctcattactcaattcgtcactggtcagcattgagtggtgtggatactgaacttatcaacgtccaaggacatgtggcaccaagggagaagcatgcaggaagtttattagaggggttttatcagactcaagttagtaccttgacagtcaaggacaatttactggtagctggtgggtttcaaggagagctgatctgtaaacaccttgatcaggaaggtattagtttttgctgtcgaacaacttatgatgataatgctattacaaatgcggttgagatatttaatacctctagtggcgccgttcacttcatggcatcaaataacgactctggtgtgagatactatgacatggagagattccagctattcaagcattttcagtttgaatggccagtgaatcatgcttcgttgagtcctgacagaaaggtggttgttattgtgggtgatgatcctgatggtctacttattgatgcaaactctggaaagacagttcattccataaaaggacatcgggactactcatttgcatcggcttggagccctgatgggcgaacatttgctaccggcaaccaagacaagacatgccgaatctgggacgtgaggaacctttcaaaatccgtccatgtgttgaggggtaaccttggagccatccggtccatccgcttcacctcggatggccagttcatgtccatggctgaacctgctgactttgtgcacatctacgacgtgaagagtgactacaacaaaaggcaggagctggacttctttggcgagatatccggcacatcgttcagcccagacactgacacgcttttcgttggtgtgtgggataggatgtatggcagcctgctacaatttggccgcctgtacaactactcgtatcttgactccctgttttgatgtggatccaaacgggtgttgaactgttgggttttggtgtacctcagtgctctgaatgttgtcagcataaattaggtggttatccctaatcaggatattaagttgcaaagataattgaattaataaatgttgtaccgtgcccgatgtgtatatgtaaaaagaaatgtatacatgtgcctattgagagaccgagttgagatgtgacttaggggttgtttgtttgggattataatctattcagattatataatctaatttatttgttttaggggttgtttgtttgggattataaatataatctaacttatttgtttgtttgagattagtctagcttgaaaagtatgtttgaccttgtgtgcataggattgaatacagtgtgtgtagtttcatgtagacgcaggtaatgtatgtttctgtcacgggactgaccggccgtggtaggaatgtgtgtcgaaggaaaatatcttttggc

SEQ ID NO: 55774 - DNA, 1890 bp, Zea Mays
gaattaggaagttgtatgcatgctagaagcctataattcgctgagcagtggacactttctctggtatcagaggatcaatgtccaattattatgatgactacgatgacattgacgggatggaggatgattatgatatggatgatcccattgatgacatggtagacgagcagcaagggattagggattctgatgtggaagataatgattatggacaaccaaatgataagatcccagatacttcatcagcagatgcaagaaaaggaagggacattcaaggaataccctgggagcagataaacataacccgtaaaaaatacagacagtccagattagaacagtacaaaaattatgagaatgtacctaactctggagaagaagctatgaaggattgcaaaccaacagagaaaggtgggatatactatgagtttagacgaaatactagatcggttaaatcaactattctacattttcagcttagaaatttggtatgggcaacgtccaagcacgacatctacctagtatctcattactcaattcgtcactggtcagcattgagtggtgtggatactgaacttatcaacgtccaaggacatgtggcaccaagggagaagcatgcaggaagtttattagaggggttttatcagactcaagttagtaccttgacagtcaaggacaatttactggtagctggtgggtttcaaggagagctgatctgtaaacaccttgatcaggaaggtattagtttttgctgtcgaacaacttatgatgataatgctattacaaatgcggttgagatatttaatacctctagtggcgccgttcacttcatggcatcaaataacgactctggtgtgagatactatgacatggagagattccagctattcaagcattttcagtttgaatggccagtgaatcatgcttcgttgagtcctgacagaaaggtggttgttattgtgggtgatgatcctgatggtctacttattgatgcaaactctggaaagacagttcattccataaaaggacatcgggactactcatttgcatcggcttggagccctgatgggcgaacatttgctaccggcaaccaagacaagacatgccgaatctgggacgtgaggaacctttcaaaatccgtccatgtgttgaggggtaaccttggagccatccggtccatccgcttcacctcggatggccagttcatgtccatggctgaacctgctgactttgtgcacatctacgacgtgaagagtgactacaacaaaaggcaggagctggacttctttggcgagatatccggcacatcgttcagcccagacactgacacgcttttcgttggtgtgtgggataggatgtatggcagcctgctacaatttggccgcctgtacaactactcgtatcttgactccctgttttgatgtggatccaaacgggtgttgaactgttgggttttggtgtacctcagtgctctgaatgttgtcagcataaattaggtggttatccctaatcaggatattaagttgcaaagataattgaattaataaatgttgtaccgtgcccgatgtgtatatgtaaaaagaaatgtatacatgtgcctattgagagaccgagttgagatgtgacttaggggttgtttgtttgggattataatctattcagattatataatctaatttatttgttttaggggttgtttgtttgggattataaatataatctaacttatttgtttgtttgagattagtctagcttgaaaagtatgtttgaccttgtgtgcataggattgaatacagtgtgtgtagtttcatgtagacgcaggtaatgtatgtttctgtcacgggactgaccggccgtggtaggaatgtgtgtcgaaggaaaatatcttttggc

SEQ ID NO: 55775 - DNA, 1932 bp, Zea Mays
ctgatcgaatctatatgcatgcagtggacactttctctggtatcagaggatcaatgtccaattattatgatgactacgatgacattgacgggatggaggatgattatgatatggatgatcccattgatgacatggtagacgagcagcaagggattagggattctgatgtggaagataatgattatggacaaccaagtgatgtcctcacacagttgcaaaatgtcctgctgaaaattgcaactacccaaattatggatttgaatgataagatcccagatacttcatcagcagatgcaagaaaaggaagggacattcaaggaataccctgggagcagataaacataacccgtaaaaaatacagacagtccagattagaacagtacaaaaattatgagaatgtacctaactctggagaagaagctatgaaggattgcaaaccaacagagaaaggtgggatatactatgagtttagacgaaatactagatcggttaaatcaactattctacattttcagcttagaaatttggtatgggcaacgtccaagcacgacatctacctagtatctcattactcaattcgtcactggtcagcattgagtggtgtggatactgaacttatcaacgtccaaggacatgtggcaccaagggagaagcatgcaggaagtttattagaggggttttatcagactcaagttagtaccttgacagtcaaggacaatttactggtagctggtgggtttcaaggagagctgatctgtaaacaccttgatcaggaaggtattagtttttgctgtcgaacaacttatgatgataatgctattacaaatgcggttgagatatttaatacctctagtggcgccgttcacttcatggcatcaaataacgactctggtgtgagatactatgacatggagagattccagctattcaagcattttcagtttgaatggccagtgaatcatgcttcgttgagtcctgacagaaaggtggttgttattgtgggtgatgatcctgatggtctacttattgatgcaaactctggaaagacagttcattccataaaaggacatcgggactactcatttgcatcggcttggagccctgatgggcgaacatttgctaccggcaaccaagacaagacatgccgaatctgggacgtgaggaacctttcaaaatccgtccatgtgttgaggggtaaccttggagccatccggtccatccgcttcacctcggatggccagttcatgtccatggctgaacctgctgactttgtgcacatctacgacgtgaagagtgactacaacaaaaggcaggagctggacttctttggcgagatatccggcacatcgttcagcccagacactgacacgcttttcgttggtgtgtgggataggatgtatggcagcctgctacaatttggccgcctgtacaactactcgtatcttgactccctgttttgatgtggatccaaacgggtgttgaactgttgggttttggtgtacctcagtgctctgaatgttgtcagcataaattaggtggttatccctaatcaggatattaagttgcaaagataattgaattaataaatgttgtaccgtgcccgatgtgtatatgtaaaaagaaatgtatacatgtgcctattgagagaccgagttgagatgtgacttaggggttgtttgtttgggattataatctattcagattatataatctaatttatttgttttaggggttgtttgtttgggattataaatataatctaacttatttgtttgtttgagattagtctagcttgaaaagtatgtttgaccttgtgtgcataggattgaatacagtgtgtgtagtttcatgtagacgcaggtaatgtatgtttctgtcacgggactgaccggccgtggtaggaatgtgtgtcgaaggaaaatatcttttggc

SEQ ID NO: 55776 - DNA, 2128 bp, Zea Mays
agccttgtactttgtttgccaattctgcaaccgtgcctttttctctcctcccaatctcccattaccccagcggcccagcgtgcggagacgggagacgcgctccccagtccccacccccctctcgtgtcgtggcgacgactggggggctgtcgctgccgccctacgtcaggtggccaggtcgtattagggcacttcgccggcgacgagtaccacaaggcagtggacactttctctggtatcagaggatcaatgtccaattattatgatgactacgatgacattgacgggatggaggatgattatgatatggatgatcccattgatgacatggtagacgagcagcaagggattagggattctgatgtggaagataatgattatggacaaccaagtgatgtcctcacacagttgcaaaatgtcctgctgaaaattgcaactacccaaattatggatttgaatgataagatcccagatacttcatcagcagatgcaagaaaaggaagggacattcaaggaataccctgggagcagataaacataacccgtaaaaaatacagacagtccagattagaacagtacaaaaattatgagaatgtacctaactctggagaagaagctatgaaggattgcaaaccaacagagaaaggtgggatatactatgagtttagacgaaatactagatcggttaaatcaactattctacattttcagcttagaaatttggtatgggcaacgtccaagcacgacatctacctagtatctcattactcaattcgtcactggtcagcattgagtggtgtggatactgaacttatcaacgtccaaggacatgtggcaccaagggagaagcatgcaggaagtttattagaggggttttatcagactcaagttagtaccttgacagtcaaggacaatttactggtagctggtgggtttcaaggagagctgatctgtaaacaccttgatcaggaaggtattagtttttgctgtcgaacaacttatgatgataatgctattacaaatgcggttgagatatttaatacctctagtggcgccgttcacttcatggcatcaaataacgactctggtgtgagatactatgacatggagagattccagctattcaagcattttcagtttgaatggccagtgaatcatgcttcgttgagtcctgacagaaaggtggttgttattgtgggtgatgatcctgatggtctacttattgatgcaaactctggaaagacagttcattccataaaaggacatcgggactactcatttgcatcggcttggagccctgatgggcgaacatttgctaccggcaaccaagacaagacatgccgaatctgggacgtgaggaacctttcaaaatccgtccatgtgttgaggggtaaccttggagccatccggtccatccgcttcacctcggatggccagttcatgtccatggctgaacctgctgactttgtgcacatctacgacgtgaagagtgactacaacaaaaggcaggagctggacttctttggcgagatatccggcacatcgttcagcccagacactgacacgcttttcgttggtgtgtgggataggatgtatggcagcctgctacaatttggccgcctgtacaactactcgtatcttgactccctgttttgatgtggatccaaacgggtgttgaactgttgggttttggtgtacctcagtgctctgaatgttgtcagcataaattaggtggttatccctaatcaggatattaagttgcaaagataattgaattaataaatgttgtaccgtgcccgatgtgtatatgtaaaaagaaatgtatacatgtgcctattgagagaccgagttgagatgtgacttaggggttgtttgtttgggattataatctattcagattatataatctaatttatttgttttaggggttgtttgtttgggattataaatataatctaacttatttgtttgtttgagattagtctagcttgaaaagtatgtttgaccttgtgtgcataggattgaatacagtgtgtgtagtttcatgtagacgcaggtaatgtatgtttctgtcacgggactgaccggccgtggtaggaatgtgtgtcgaaggaaaatatcttttggc

SEQ ID NO: 55777 - DNA, 2046 bp, Zea Mays
agccttgtactttgtttgccaattctgcaaccgtgcctttttctctcctcccaatctcccattaccccagcggcccagcgtgcggagacgggagacgcgctccccagtccccacccccctctcgtgtcgtggcgacgactggggggctgtcgctgccgccctacgtcaggtggccaggtcgtattagggcacttcgccggcgacgagtaccacaaggcagtggacactttctctggtatcagaggatcaatgtccaattattatgatgactacgatgacattgacgggatggaggatgattatgatatggatgatcccattgatgacatggtagacgagcagcaagggattagggattctgatgtggaagataatgattatggacaaccaaatgataagatcccagatacttcatcagcagatgcaagaaaaggaagggacattcaaggaataccctgggagcagataaacataacccgtaaaaaatacagacagtccagattagaacagtacaaaaattatgagaatgtacctaactctggagaagaagctatgaagagaaaggtgggatatactatgagtttagacgaaatactagatcggttaaatcaactattctacattttcagcttagaaatttggtatgggcaacgtccaagcacgacatctacctagtatctcattactcaattcgtcactggtcagcattgagtggtgtggatactgaacttatcaacgtccaaggacatgtggcaccaagggagaagcatgcaggaagtttattagaggggttttatcagactcaagttagtaccttgacagtcaaggacaatttactggtagctggtgggtttcaaggagagctgatctgtaaacaccttgatcaggaaggtattagtttttgctgtcgaacaacttatgatgataatgctattacaaatgcggttgagatatttaatacctctagtggcgccgttcacttcatggcatcaaataacgactctggtgtgagatactatgacatggagagattccagctattcaagcattttcagtttgaatggccagtgaatcatgcttcgttgagtcctgacagaaaggtggttgttattgtgggtgatgatcctgatggtctacttattgatgcaaactctggaaagacagttcattccataaaaggacatcgggactactcatttgcatcggcttggagccctgatgggcgaacatttgctaccggcaaccaagacaagacatgccgaatctgggacgtgaggaacctttcaaaatccgtccatgtgttgaggggtaaccttggagccatccggtccatccgcttcacctcggatggccagttcatgtccatggctgaacctgctgactttgtgcacatctacgacgtgaagagtgactacaacaaaaggcaggagctggacttctttggcgagatatccggcacatcgttcagcccagacactgacacgcttttcgttggtgtgtgggataggatgtatggcagcctgctacaatttggccgcctgtacaactactcgtatcttgactccctgttttgatgtggatccaaacgggtgttgaactgttgggttttggtgtacctcagtgctctgaatgttgtcagcataaattaggtggttatccctaatcaggatattaagttgcaaagataattgaattaataaatgttgtaccgtgcccgatgtgtatatgtaaaaagaaatgtatacatgtgcctattgagagaccgagttgagatgtgacttaggggttgtttgtttgggattataatctattcagattatataatctaatttatttgttttaggggttgtttgtttgggattataaatataatctaacttatttgtttgtttgagattagtctagcttgaaaagtatgtttgaccttgtgtgcataggattgaatacagtgtgtgtagtttcatgtagacgcaggtaatgtatgtttctgtcacgggactgaccggccgtggtaggaatgtgtgtcgaaggaaaatatcttttggc

SEQ ID NO: 55778 - DNA, 2233 bp, Zea Mays
agccttgtactttgtttgccaattctgcaaccgtgcctttttctctcctcccaatctcccattaccccagcggcccagcgtgcggagacgggagacgcgctccccagtccccacccccctctcgtgtcgtggcgacgactggggggctgtcgctgccgccctacgtcaggtggccaggtcgtattagggcacttcgccggcgacgagtaccacaagaaaaaaatcgggtctacatgtgtacacccatgcgctttactgggttcgccccctgatgttagaattaggaagttgtatgcatgctagaagcctataattcgctgagcagtggacactttctctggtatcagaggatcaatgtccaattattatgatgactacgatgacattgacgggatggaggatgattatgatatggatgatcccattgatgacatggtagacgagcagcaagggattagggattctgatgtggaagataatgattatggacaaccaagtgatgtcctcacacagttgcaaaatgtcctgctgaaaattgcaactacccaaattatggatttgaatgataagatcccagatacttcatcagcagatgcaagaaaaggaagggacattcaaggaataccctgggagcagataaacataacccgtaaaaaatacagacagtccagattagaacagtacaaaaattatgagaatgtacctaactctggagaagaagctatgaaggattgcaaaccaacagagaaaggtgggatatactatgagtttagacgaaatactagatcggttaaatcaactattctacattttcagcttagaaatttggtatgggcaacgtccaagcacgacatctacctagtatctcattactcaattcgtcactggtcagcattgagtggtgtggatactgaacttatcaacgtccaaggacatgtggcaccaagggagaagcatgcaggaagtttattagaggggttttatcagactcaagttagtaccttgacagtcaaggacaatttactggtagctggtgggtttcaaggagagctgatctgtaaacaccttgatcaggaaggtattagtttttgctgtcgaacaacttatgatgataatgctattacaaatgcggttgagatatttaatacctctagtggcgccgttcacttcatggcatcaaataacgactctggtgtgagatactatgacatggagagattccagctattcaagcattttcagtttgaatggccagtgaatcatgcttcgttgagtcctgacagaaaggtggttgttattgtgggtgatgatcctgatggtctacttattgatgcaaactctggaaagacagttcattccataaaaggacatcgggactactcatttgcatcggcttggagccctgatgggcgaacatttgctaccggcaaccaagacaagacatgccgaatctgggacgtgaggaacctttcaaaatccgtccatgtgttgaggggtaaccttggagccatccggtccatccgcttcacctcggatggccagttcatgtccatggctgaacctgctgactttgtgcacatctacgacgtgaagagtgactacaacaaaaggcaggagctggacttctttggcgagatatccggcacatcgttcagcccagacactgacacgcttttcgttggtgtgtgggataggatgtatggcagcctgctacaatttggccgcctgtacaactactcgtatcttgactccctgttttgatgtggatccaaacgggtgttgaactgttgggttttggtgtacctcagtgctctgaatgttgtcagcataaattaggtggttatccctaatcaggatattaagttgcaaagataattgaattaataaatgttgtaccgtgcccgatgtgtatatgtaaaaagaaatgtatacatgtgcctattgagagaccgagttgagatgtgacttaggggttgtttgtttgggattataatctattcagattatataatctaatttatttgttttaggggttgtttgtttgggattataaatataatctaacttatttgtttgtttgagattagtctagcttgaaaagtatgtttgaccttgtgtgcataggattgaatacagtgtgtgtagtttcatgtagacgcaggtaatgtatgtttctgtcacgggactgaccggccgtggtaggaatgtgtgtcgaaggaaaatatcttttggc

SEQ ID NO: 55779 - DNA, 1265 bp, Zea Mays
ctgagagtcaaggaaccaatacatatagggaagccatgaaggcaaaccctaatgcacgcctagttggcttacatgggcacacacggcccaaggccatacaggcctatacagtctaacaaggagctatcaaaatggttgccctgtgaactttgagttccaaaactacacaatcatcacaagcaagtgcaaaggaccgaagtttccagccagccaatgctgtgccgcactcaaggaattcgcgtgcccttttaacaattacctcaatgacgagagcaatgaatgtgcatcgacaatgttcagctacatcaacctctatggcaagtatccaccaggtctgttttccagcgagtgcaaagaaggcaagatggggctttcttgcgcagatgtcccccggaaggacagttccactgcaaacagtggttatcgcgcccaaagcagcttgcttgcgttgattactgtcttgagcgtggtagcagcgttgttctactgaactacagctccattcatttcccacaaagatggtgtgttacaactgttgaggcttgagttgcaccttttggtgcttatgggttggcttcctgattctttcttttgagagcaactccaatagttatataaattttagccctctaaaccacagatttaagaagttgctaaataactttgagagtaaaaaaatatgagttctcacatagttctctaaatatatgttgtagttttattttgtatttattcacataaaaaaaataagtcacaaatgtcatcaattaccttcattatctacataatgcagccaacattttttatttaacaagttgcaaatggttgtcaaatgtagaaaggaaatgaggttagatgagaagttgctaaatttaggaagttcatttagagaactgttggtgagtagtttttatgttaactgcctaaattattgatttagaaagtcttttagataactactggtttgacaaccccattttttccaatgtaattcattgcttgctgcatatttcctgagttcgatttgatctgtcagtgtcaatgttagcttgtgtctcagttaacggtgtcattctattgtgagtcccgttgtgataaatttggacaagtatatatatgtcggttataattcgtatgaatggttagcttgtttatgttgggtccgaggaatgtaatcgatggttcaccgttcctctggaaaatgttgtgtttgcaatttagagagtattgttgcaatgactattatgtttgacaacaaaatactc

SEQ ID NO: 55780 - DNA, 1242 bp, Zea Mays
atagcgctgtagagcgtcgaccccttggggttatcaactcgacctgctgatcaagagcatcaaacctagggggagttcctgaaatcggggtgacgctggcaacaacctgaggttgccctgtgaactttgagttccaaaactacacaatcatcacaagcaagtgcaaaggaccgaagtttccagccagccaatgctgtgccgcactcaaggaattcgcgtgcccttttaacaattacctcaatgacgagagcaatgaatgtgcatcgacaatgttcagctacatcaacctctatggcaagtatccaccaggtctgttttccagcgagtgcaaagaaggcaagatggggctttcttgcgcagatgtcccccggaaggacagttccactgcaaacagtggttatcgcgcccaaagcagcttgcttgcgttgattactgtcttgagcgtggtagcagcgttgttctactgaactacagctccattcatttcccacaaagatggtgtgttacaactgttgaggcttgagttgcaccttttggtgcttatgggttggcttcctgattctttcttttgagagcaactccaatagttatataaattttagccctctaaaccacagatttaagaagttgctaaataactttgagagtaaaaaaatatgagttctcacatagttctctaaatatatgttgtagttttattttgtatttattcacataaaaaaaataagtcacaaatgtcatcaattaccttcattatctacataatgcagccaacattttttatttaacaagttgcaaatggttgtcaaatgtagaaaggaaatgaggttagatgagaagttgctaaatttaggaagttcatttagagaactgttggtgagtagtttttatgttaactgcctaaattattgatttagaaagtcttttagataactactggtttgacaaccccattttttccaatgtaattcattgcttgctgcatatttcctgagttcgatttgatctgtcagtgtcaatgttagcttgtgtctcagttaacggtgtcattctattgtgagtcccgttgtgataaatttggacaagtatatatatgtcggttataattcgtatgaatggttagcttgtttatgttgggtccgaggaatgtaatcgatggttcaccgttcctctggaaaatgttgtgtttgcaatttagagagtattgttgcaatgactattatgtttgacaacaaaatactc

SEQ ID NO: 55781 - DNA, 1457 bp, Zea Mays
accaaacaaaccgcgtccgcgtcgagtctctactctctcggctgtccggtccggcgcggctctcgcgtctccaacctacccatgctgcagctcctccaactccaaggctcacaccaccccgcgacgggcgacgctaattaagtagagctgcaacacctgggttggaggctagagcttgcaaacaccaccagcgaaaacgtcgtggccagccatcccggtgtcgtcccgcgttctacagccaccgctgtcgtcgccgtcctagactcctagatccgtcagcttaacgagctccattccttcgaggagcttgctgcaggccaagaatagttgccctgtgaactttgagttccaaaactacacaatcatcacaagcaagtgcaaaggaccgaagtttccagccagccaatgctgtgccgcactcaaggaattcgcgtgcccttttaacaattacctcaatgacgagagcaatgaatgtgcatcgacaatgttcagctacatcaacctctatggcaagtatccaccaggtctgttttccagcgagtgcaaagaaggcaagatggggctttcttgcgcagatgtcccccggaaggacagttccactgcaaacagtggttatcgcgcccaaagcagcttgcttgcgttgattactgtcttgagcgtggtagcagcgttgttctactgaactacagctccattcatttcccacaaagatggtgtgttacaactgttgaggcttgagttgcaccttttggtgcttatgggttggcttcctgattctttcttttgagagcaactccaatagttatataaattttagccctctaaaccacagatttaagaagttgctaaataactttgagagtaaaaaaatatgagttctcacatagttctctaaatatatgttgtagttttattttgtatttattcacataaaaaaaataagtcacaaatgtcatcaattaccttcattatctacataatgcagccaacattttttatttaacaagttgcaaatggttgtcaaatgtagaaaggaaatgaggttagatgagaagttgctaaatttaggaagttcatttagagaactgttggtgagtagtttttatgttaactgcctaaattattgatttagaaagtcttttagataactactggtttgacaaccccattttttccaatgtaattcattgcttgctgcatatttcctgagttcgatttgatctgtcagtgtcaatgttagcttgtgtctcagttaacggtgtcattctattgtgagtcccgttgtgataaatttggacaagtatatatatgtcggttataattcgtatgaatggttagcttgtttatgttgggtccgaggaatgtaatcgatggttcaccgttcctctggaaaatgttgtgtttgcaatttagagagtattgttgcaatgactattatgtttgacaacaaaatactc

SEQ ID NO: 55782 - DNA, 1874 bp, Zea Mays
gtctactctaaaaagttgatctcaaagattttgaatttcatgaactagaggaggtcctgcaatattatcctcatggttaccatggggttgacaaggaaggaaggcctgtctacattgagttgcttgggaaagttgaacccaacaagcttatacaaatcacaacagttgagcgctacattaagtatcatgtacaagagtttgagagagctttccgggagaaattccctgcatgctcaatttctgccaaaagacatatagatactacaacgacgatattggatgtccacggtgtgggctggaaaaactttagcaagattgcaagggatttggtgcgttgtatgcaaaaaatagatggtgactattatcctgagacattacatcaaatgtttattgtaaatgcgggacctggtttcaagctgatatggagcactgttaagggacttcttgaccccaaaacgtcatctaagatacatgttctaggaacaaaatatcaaagcagacttcttgaagctattgatgcaagccaattaccagagtactttggtggttcgtgcacatgttctaaccatggagggtgcctgaggtctaacaaaggcccctggagcgatccttcaatcatgaaacttgtacatagcatggagtcattgaaggaaattgggcaagtatctgatatagaagaaacagttacaggctccatgagattgcgtgctctcaagttaccagaacgaattagtgacacgtcaaatgctgaatcaggttcagatgttgatgatcttggatcccctgtggctcctgaagatgttgaatatcctagtttggccccagttcgagaggaagcgagggaatcaggatctacaacatatagtggttcaattggcatgtctcgtatggcagataaagttgtaggatccaacgggagatacaactctactggaaatgaaactaggcaggtcaatgcagaacaaggttccctgataaatgggggtttacttgcgcccggtcagcgtgccccaaatgatgctgtaggcaatgatgatgggttcttgaaatatatatcaagaagagtcgttgctatatttcttgaagtactctcttttttgcggttcttcattcgtcgacgacaacactcggaaaatgttcattcacatactgcaactgcacccagtagtctggcaaatcttcagacaattaaggaagatcgtgtaaatccttgtctggagcgtcttgatcgacttgagtcaatgtttaatcagctgagcaaaaagcctccagagcttccagaggacaaggaccgggccatacaagattcttttgacaggataaagtccattgagtttgatctgcagaagacaaagaaggtattgcatgcaacagttatcaaacaaatgcagatggcagaaaccttggaagctgtaacggagccggatcttaggcggaggaaattttgtacataatacacttacctgcagtgtacagaaacaagaaaagatggcgatttactaatgtctgctgcctggcagagaattgaactacattgctttgtacatggccgccctttgctgattatctttctcagcttactatagagatgagtgcattggcatgttagcctcaatcagggggcctcaataacaacagatagttgacctgtgataaactgacgagataacagcgtcctggaaaatcaccggacactgcccaatctattgagctaaagagttctgtattatgcatcttttgtgtttcagaacagttagtttcacccataattcgatccattttttggttggtacatgtgaacatctgattgaacttggttttcttagaatttttgcaaatggccgaaatctagtcgtgagcacgttgtttcaaca

SEQ ID NO: 55783 - DNA, 2437 bp, Zea Mays
gtcgaatatgccctgtttccctccaatccatccagttggcagcttgtttgccgcgtggtggagttcgtactgattgttggggctgccttgtgcaccgaatcagtgatcgggcagcgtaatacaaagagggagcgcttggtcatctgagctggttttgtacagaatgtcagagggtaatgtggatagcatccagatatctgttagtaacgatgagaggaggaatagggcagatgccgagatctcggaggacgagccaaggcacaccaggatgcggtcactgaagaagaaagccttgcatgcatcgacaagactcacacactccctgaagaagagggggaagagaaaagtggactgcagagtgccaaggatagctatagaagatgtcagggatgctgaagaagagcaagcagtgaactcgtttcgggaggttttgtttgctaggggcttgctaccagtcaagcatgataattaccacacgatgcttagatttttaaaagcaaggaagttcgattttgaaaaagcagcacagatgtgggcggacatgctgcagtggagaaaggagttcggtacagacacaatttttgaagattttgaatttcatgaactagaggaggtcctgcaatattatcctcatggttaccatggggttgacaaggaaggaaggcctgtctacattgagttgcttgggaaagttgaacccaacaagcttatacaaatcacaacagttgagcgctacattaagtatcatgtacaagagtttgagagagctttccgggagaaattccctgcatgctcaatttctgccaaaagacatatagatactacaacgacgatattggatgtccacggtgtgggctggaaaaactttagcaagattgcaagggatttggtgcgttgtatgcaaaaaatagatggtgactattatcctgagacattacatcaaatgtttattgtaaatgcgggacctggtttcaagctgatatggagcactgttaagggacttcttgaccccaaaacgtcatctaagatacatgttctaggaacaaaatatcaaagcagacttcttgaagctattgatgcaagccaattaccagagtactttggtggttcgtgcacatgttctaaccatggagggtgcctgaggtctaacaaaggcccctggagcgatccttcaatcatgaaacttgtacatagcatggagtcattgaaggaaattgggcaagtatctgatatagaagaaacagttacaggctccatgagattgcgtgctctcaagttaccagaacgaattagtgacacgtcaaatgctgaatcaggttcagatgttgatgatcttggatcccctgtggctcctgaagatgttgaatatcctagtttggccccagttcgagaggaagcgagggaatcaggatctacaacatatagtggttcaattggcatgtctcgtatggcagataaagttgtaggatccaacgggagatacaactctactggaaatgaaactaggcaggtcaatgcagaacaaggttccctgataaatgggggtttacttgcgcccgcaggtcagcgtgccccaaatgatgctgtaggcaatgatgatgggttcttgaaatatatatcaagaagagtcgttgctatatttcttgaagtactctcttttttgcggttcttcattcgtcgacgacaacactcggaaaatgttcattcacatactgcaactgcacccagtagtctggcaaatcttcagacaattaaggaagatcgtgtaaatccttgtctggagcgtcttgatcgacttgagtcaatgtttaatcagctgagcaaaaagcctccagagcttccagaggacaaggaccgggccatacaagattcttttgacaggataaagtccattgagtttgatctgcagaagacaaagaaggtattgcatgcaacagttatcaaacaaatgcagatggcagaaaccttggaagctgtaacggagccggatcttaggcggaggaaattttgtacataatacacttacctgcagtgtacagaaacaagaaaagatggcgatttactaatgtctgctgcctggcagagaattgaactacattgctttgtacatggccgccctttgctgattatctttctcagcttactatagagatgagtgcattggcatgttagcctcaatcagggggcctcaataacaacagatagttgacctgtgataaactgacgagataacagcgtcctggaaaatcaccggacactgcccaatctattgagctaaagagttctgtattatgcatcttttgtgtttcagaacagttagtttcacccataattcgatccattttttggttggtacatgtgaacatctgattgaacttggttttcttagaatttttgcaaatggccgaaatctagtcgtgagcacgttgtttcaaca

SEQ ID NO: 55784 - DNA, 1926 bp, Zea Mays
cggaaacgaagcaagggaagcgtaagcgttaggagacgaggcgccgagggaggcaagccgatcacaccaaacgcttcgtgctgctgccccgtctcttctcatcgtgatctcagggcagtggatcgatctcacgtcggaggcgaccttcttaggcgcgccaccgccatccgagccgagccgcagcgatccagatccagggctggaaaaactttagcaagattgcaagggatttggtgcgttgtatgcaaaaaatagatgacattacatcaaatgtttattgtaaatgcgggacctggtttcaagctgatatggagcactgttaagggacttcttgaccccaaaacgtcatctaagatacatgttctaggaacaaaatatcaaagcagacttcttgaagctattgatgcaagccaattaccagagtactttggtggttcgtgcacatgttctaaccatggagggtgcctgaggtctaacaaaggcccctggagcgatccttcaatcatgaaacttgtacatagcatggagtcattgaaggaaattgggcaagtatctgatatagaagaaacagttacaggctccatgagattgcgtgctctcaaggttcagatgttgatgatcttggatcccctgtggctcctgaagatgttgaatatcctagtttggccccagttcgagaggaagtacagtcttactaagttctgttatgtttttttggagatattttattatttttgtcgtatgtctatcttggaactgtgaagatttgaacttgcacattcaggctttcattagaaaatgtgttctgttccttttagctgcatgacaccatgttagcatgttttataatttgtagttaattcgttctgattctttaccctgtaggcgagggaatcaggatctacaacatatagtggttcaattggcatgtctcgtatggcagataaagttgtaggatccaacgggagatacaactctactggaaatgaaactaggcaggtcaatgcagaacaaggttccctgataaatgggggtttacttgcgcccgcaggtcagcgtgccccaaatgatgctgtaggcaatgatgatgggttcttgaaatatatatcaagaagagtcgttgctatatttcttgaagtactctcttttttgcggttcttcattcgtcgacgacaacactcggaaaatgttcattcacatactgcaactgcacccagtagtctggcaaatcttcagacaattaaggaagatcgtgtaaatccttgtctggagcgtcttgatcgacttgagtcaatgtttaatcagctgagcaaaaagcctccagagcttccagaggacaaggaccgggccatacaagattcttttgacaggataaagtccattgagtttgatctgcagaagacaaagaaggtattgcatgcaacagttatcaaacaaatgcagatggcagaaaccttggaagctgtaacggagccggatcttaggcggaggaaattttgtacataatacacttacctgcagtgtacagaaacaagaaaagatggcgatttactaatgtctgctgcctggcagagaattgaactacattgctttgtacatggccgccctttgctgattatctttctcagcttactatagagatgagtgcattggcatgttagcctcaatcagggggcctcaataacaacagatagttgacctgtgataaactgacgagataacagcgtcctggaaaatcaccggacactgcccaatctattgagctaaagagttctgtattatgcatcttttgtgtttcagaacagttagtttcacccataattcgatccattttttggttggtacatgtgaacatctgattgaacttggttttcttagaatttttgcaaatggccgaaatctagtcgtgagcacgttgtttcaaca

SEQ ID NO: 55785 - DNA, 2719 bp, Zea Mays
cggaaacgaagcaagggaagcgtaagcgttaggagacgaggcgccgagggaggcaagccgatcacaccaaacgcttcgtgctgctgccccgtctcttctcatcgtgatctcagggcagtggatcgatctcacgtcggaggcgaccttcttaggcgcgccaccgccatccgagccgagccgcagcgatccagatccagtgttggggctgccttgtgcaccgaatcagtgatcgggcagcgtaatacaaagagggagcgcttggtcatctgagctggttttgtacagaatgtcagagggtaatgtggatagcatccagatatctgttagtaacgatgagaggaggaatagggcagatgccgagatctcggaggacgagccaaggcacaccaggatgcggtcactgaagaagaaagccttgcatgcatcgacaagactcacacactccctgaagaagagggggaagagaaaagtggactgcagagtgccaaggatagctatagaagatgtcagggatgctgaagaagagcaagcagtgaactcgtttcgggaggttttgtttgctaggggcttgctaccagtcaagcatgataattaccacacgatgcttagatttttaaaagcaaggaagttcgattttgaaaaagcagcacagatgtgggcggacatgctgcagtggagaaaggagttcggtacagacacaatttttgaagattttgaatttcatgaactagaggaggtcctgcaatattatcctcatggttaccatggggttgacaaggaaggaaggcctgtctacattgagttgcttgggaaagttgaacccaacaagcttatacaaatcacaacagttgagcgctacattaagtatcatgtacaagagtttgagagagctttccgggagaaattccctgcatgctcaatttctgccaaaagacatatagatactacaacgacgatattggatgtccacggtgtgggctggaaaaactttagcaagattgcaagggatttggtgcgttgtatgcaaaaaatagatggtgactattatcctgagacattacatcaaatgtttattgtaaatgcgggacctggtttcaagctgatatggagcactgttaagggacttcttgaccccaaaacgtcatctaagatacatgttctaggaacaaaatatcaaagcagacttcttgaagctattgatgcaagccaattaccagagtactttggtggttcgtgcacatgttctaaccatggagggtgcctgaggtctaacaaaggcccctggagcgatccttcaatcatgaaacttgtacatagcatggagtcattgaaggaaattgggcaagtatctgatatagaagaaacagttacaggctccatgagattgcgtgctctcaaggttcagatgttgatgatcttggatcccctgtggctcctgaagatgttgaatatcctagtttggccccagttcgagaggaagtacagtcttactaagttctgttatgtttttttggagatattttattatttttgtcgtatgtctatcttggaactgtgaagatttgaacttgcacattcaggctttcattagaaaatgtgttctgttccttttagctgcatgacaccatgttagcatgttttataatttgtagttaattcgttctgattctttaccctgtaggcgagggaatcaggatctacaacatatagtggttcaattggcatgtctcgtatggcagataaagttgtaggatccaacgggagatacaactctactggaaatgaaactaggcaggtcaatgcagaacaaggttccctgataaatgggggtttacttgcgcccggtcagcgtgccccaaatgatgctgtaggcaatgatgatgggttcttgaaatatatatcaagaagagtcgttgctatatttcttgaagtactctcttttttgcggttcttcattcgtcgacgacaacactcggaaaatgttcattcacatactgcaactgcacccagtagtctggcaaatcttcagacaattaaggaagatcgtgtaaatccttgtctggagcgtcttgatcgacttgagtcaatgtttaatcagctgagcaaaaagcctccagagcttccagaggacaaggaccgggccatacaagattcttttgacaggataaagtccattgagtttgatctgcagaagacaaagaaggtattgcatgcaacagttatcaaacaaatgcagatggcagaaaccttggaagctgtaacggagccggatcttaggcggaggaaattttgtacataatacacttacctgcagtgtacagaaacaagaaaagatggcgatttactaatgtctgctgcctggcagagaattgaactacattgctttgtacatggccgccctttgctgattatctttctcagcttactatagagatgagtgcattggcatgttagcctcaatcagggggcctcaataacaacagatagttgacctgtgataaactgacgagataacagcgtcctggaaaatcaccggacactgcccaatctattgagctaaagagttctgtattatgcatcttttgtgtttcagaacagttagtttcacccataattcgatccattttttggttggtacatgtgaacatctgattgaacttggttttcttagaatttttgcaaatggccgaaatctagtcgtgagcacgttgtttcaaca

SEQ ID NO: 55786 - DNA, 2762 bp, Zea Mays
gaaggagtaggcggaaacgaagcaagggaagcgtaagcgttaggagacgaggcgccgagggaggcaagccgatcacaccaaacgcttcgtgctgctgccccgtctcttctcatcgtgatctcagggcagtggatcgatctcacgtcggaggcgaccttcttaggcgcgccaccgccatccgagccgagccgcagcgatccagatccagtgttggggctgccttgtgcaccgaatcagtgatcgggcagcgtaatacaaagagggagcgcttggtcatctgagctggttttgtacagaatgtcagagggtaatgtggatagcatccagatatctgttagtaacgatgagaggaggaatagggcagatgccgagatctcggaggacgagccaaggcacaccaggatgcggtcactgaagaagaaagccttgcatgcatcgacaagactcacacactccctgaagaagagggggaagagaaaagtggactgcagagtgccaaggatagctatagaagatgtcagggatgctgaagaagagcaagcagtgaactcgtttcgggaggttttgtttgctaggggcttgctaccagtcaagcatgataattaccacacgatgcttagatttttaaaagcaaggaagttcgattttgaaaaagcagcacagatgtgggcggacatgctgcagtggagaaaggagttcggtacagacacaatttttgaagattttgaatttcatgaactagaggaggtcctgcaatattatcctcatggttaccatggggttgacaaggaaggaaggcctgtctacattgagttgcttgggaaagttgaacccaacaagcttatacaaatcacaacagttgagcgctacattaagtatcatgtacaagagtttgagagagctttccgggagaaattccctgcatgctcaatttctgccaaaagacatatagatactacaacgacgatattggatgtccacggtgtgggctggaaaaactttagcaagattgcaagggatttggtgcgttgtatgcaaaaaatagatggtgactattatcctgagacattacatcaaatgtttattgtaaatgcgggacctggtttcaagctgatatggagcactgttaagggacttcttgaccccaaaacgtcatctaagatacatgttctaggaacaaaatatcaaagcagacttcttgaagctattgatgcaagagtactttggtggttcgtgcacatgttctaaccatggagggtgcctgaggtctaacaaaggcccctggagcgatccttcaatcatgaaacttgtacatagcatggagtcattgaaggaaattgggcaagtatctgatatagaagaaacagttacaggctccatgagattgcgtgctctcaagttaccagaacgaattagtgacacgtcaaatgctgaatcaggttcagatgttgatgatcttggatcccctgtggctcctgaagatgttgaatatcctagtttggccccagttcgagaggaagtacagtcttactaagttctgttatgtttttttggagatattttattatttttgtcgtatgtctatcttggaactgtgaagatttgaacttgcacattcaggctttcattagaaaatgtgttctgttccttttagctgcatgacaccatgttagcatgttttataatttgtagttaattcgttctgattctttaccctgtaggcgagggaatcaggatctacaacatatagtggttcaattggcatgtctcgtatggcagataaagttgtaggatccaacgggagatacaactctactggaaatgaaactaggcaggtcaatgcagaacaaggttccctgataaatgggggtttacttgcgcccgcaggtcagcgtgccccaaatgatgctgtaggcaatgatgatgggttcttgaaatatatatcaagaagagtcgttgctatatttcttgaagtactctcttttttgcggttcttcattcgtcgacgacaacactcggaaaatgttcattcacatactgcaactgcacccagtagtctggcaaatcttcagacaattaaggaagatcgtgtaaatccttgtctggagcgtcttgatcgacttgagtcaatgtttaatcagctgagcaaaaagcctccagagcttccagaggacaaggaccgggccatacaagattcttttgacaggataaagtccattgagtttgatctgcagaagacaaagaaggtattgcatgcaacagttatcaaacaaatgcagatggcagaaaccttggaagctgtaacggagccggatcttaggcggaggaaattttgtacataatacacttacctgcagtgtacagaaacaagaaaagatggcgatttactaatgtctgctgcctggcagagaattgaactacattgctttgtacatggccgccctttgctgattatctttctcagcttactatagagatgagtgcattggcatgttagcctcaatcagggggcctcaataacaacagatagttgacctgtgataaactgacgagataacagcgtcctggaaaatcaccggacactgcccaatctattgagctaaagagttctgtattatgcatcttttgtgtttcagaacagttagtttcacccataattcgatccattttttggttggtacatgtgaacatctgattgaacttggttttcttagaatttttgcaaatggccgaaatctagtcgtgagcacgttgtttcaaca

SEQ ID NO: 55787 - DNA, 2458 bp, Zea Mays
ggaaggagtaggcggaaacgaagcaagggaagcgtaagcgttaggagacgaggcgccgagggaggcaagccgatcacaccaaacgcttcgtgctgctgccccgtctcttctcatcgtgatctcagggcagtggatcgatctcacgtcggaggcgaccttcttaggcgcgccaccgccatccgagccgagccgcagcgatccagatccagtgttggggctgccttgtgcaccgaatcagtgatcgggcagcgtaatacaaagagggagcgcttggtcatctgagctggttttgtacagaatgtcagatttttaaaagcaaggaagttcgattttgaaaaagcagcacagatgtgggcggacatgctgcagtggagaaaggagttcggtacagacacaatttttgaagattttgaatttcatgaactagaggaggtcctgcaatattatcctcatggttaccatggggttgacaaggaaggaaggcctgtctacattgagttgcttgggaaagttgaacccaacaagcttatacaaatcacaacagttgagcgctacattaagtatcatgtacaagagtttgagagagctttccgggagaaattccctgcatgctcaatttctgccaaaagacatatagatactacaacgacgatattggatgtccacggtgtgggctggaaaaactttagcaagattgcaagggatttggtgcgttgtatgcaaaaaatagatggtgactattatcctgagacattacatcaaatgtttattgtaaatgcgggacctggtttcaagctgatatggagcactgttaagggacttcttgaccccaaaacgtcatctaagatacatgttctaggaacaaaatatcaaagcagacttcttgaagctattgatgcaagccaattaccagagtactttggtggttcgtgcacatgttctaaccatggagggtgcctgaggtctaacaaaggcccctggagcgatccttcaatcatgaaacttgtacatagcatggagtcattgaaggaaattgggcaagtatctgatatagaagaaacagttacaggctccatgagattgcgtgctctcaagttaccagaacgaattagtgacacgtcaaatgctgaatcaggttcagatgttgatgatcttggatcccctgtggctcctgaagatgttgaatatcctagtttggccccagttcgagaggaagtacagtcttactaagttctgttatgtttttttggagatattttattatttttgtcgtatgtctatcttggaactgtgaagatttgaacttgcacattcaggctttcattagaaaatgtgttctgttccttttagctgcatgacaccatgttagcatgttttataatttgtagttaattcgttctgattctttaccctgtaggcgagggaatcaggatctacaacatatagtggttcaattggcatgtctcgtatggcagataaagttgtaggatccaacgggagatacaactctactggaaatgaaactaggcaggtcaatgcagaacaaggttccctgataaatgggggtttacttgcgcccgcaggtcagcgtgccccaaatgatgctgtaggcaatgatgatgggttcttgaaatatatatcaagaagagtcgttgctatatttcttgaagtactctcttttttgcggttcttcattcgtcgacgacaacactcggaaaatgttcattcacatactgcaactgcacccagtagtctggcaaatcttcagacaattaaggaagatcgtgtaaatccttgtctggagcgtcttgatcgacttgagtcaatgtttaatcagctgagcaaaaagcctccagagcttccagaggacaaggaccgggccatacaagattcttttgacaggataaagtccattgagtttgatctgcagaagacaaagaaggtattgcatgcaacagttatcaaacaaatgcagatggcagaaaccttggaagctgtaacggagccggatcttaggcggaggaaattttgtacataatacacttacctgcagtgtacagaaacaagaaaagatggcgatttactaatgtctgctgcctggcagagaattgaactacattgctttgtacatggccgccctttgctgattatctttctcagcttactatagagatgagtgcattggcatgttagcctcaatcagggggcctcaataacaacagatagttgacctgtgataaactgacgagataacagcgtcctggaaaatcaccggacactgcccaatctattgagctaaagagttctgtattatgcatcttttgtgtttcagaacagttagtttcacccataattcgatccattttttggttggtacatgtgaacatctgattgaacttggttttcttagaatttttgcaaatggccgaaatctagtcgtgagcacgttgtttcaaca

SEQ ID NO: 55788 - DNA, 2540 bp, Zea Mays
ggaaggagtaggcggaaacgaagcaagggaagcgtaagcgttaggagacgaggcgccgagggaggcaagccgatcacaccaaacgcttcgtgctgctgccccgtctcttctcatcgtgatctcagggcagtggatcgatctcacgtcggaggcgaccttcttaggcgcgccaccgccatccgagccgagccgcagcgatccagatccagtgatcgggcagcgtaatacaaagagggagcgcttggtcatctgagctggttttgtacagaatgtcagagggtaatgtggatagcatccagatatctgttagtaacgatgagaggaggaatagggcagatgccgagatctcggaggacgagccaaggcacaccaggatgcggtcactgaagaagaaagccttgcatgcatcgacaagactcacacactccctgaagaagagggggaagagaaaagtggactgcagagtgccaaggatagctatagaagatgtcagggatgctgaagaagagcaagcagtgaactcgtttcgggaggttttgtttgctaggggcttgctaccagtcaagcatgataattaccacacgatgcttagatttttaaaagcaaggaagttcgattttgaaaaagcagcacagatgtgggcggacatgctgcagtggagaaaggagttcggtacagacacaatttttgaagattttgaatttcatgaactagaggaggtcctgcaatattatcctcatggttaccatggggttgacaaggaaggaaggcctgtctacattgagttgcttgggaaagttgaacccaacaagcttatacaaatcacaacagttgagcgctacattaagtatcatgtacaagagtttgagagagctttccgggagaaattccctgcatgctcaatttctgccaaaagacatatagatactacaacgacgatattggatgtccacggtgtgggctggaaaaactttagcaagattgcaagggatttggtgcgttgtatgcaaaaaatagatggtgactattatcctgagacattacatcaaatgtttattgtaaatgcgggacctggtttcaagctgatatggagcactgttaagggacttcttgaccccaaaacgtcatctaagatacatgttctaggaacaaaatatcaaagcagacttcttgaagctattgatgcaagccaattaccagagtactttggtggttcgtgcacatgttctaaccatggagggtgcctgaggtctaacaaaggcccctggagcgatccttcaatcatgaaacttgtacatagcatggagtcattgaaggaaattgggcaagtatctgatatagaagaaacagttacaggctccatgagattgcgtgctctcaagttaccagaacgaattagtgacacgtcaaatgctgaatcaggttcagatgttgatgatcttggatcccctgtggctcctgaagatgttgaatatcctagtttggccccagttcgagaggaagcgagggaatcaggatctacaacatatagtggttcaattggcatgtctcgtatggcagataaagttgtaggatccaacgggagatacaactctactggaaatgaaactaggcaggtcaatgcagaacaaggttccctgataaatgggggtttacttgcgcccggtcagcgtgccccaaatgatgctgtaggcaatgatgatgggttcttgaaatatatatcaagaagagtcgttgctatatttcttgaagtactctcttttttgcggttcttcattcgtcgacgacaacactcggaaaatgttcattcacatactgcaactgcacccagtagtctggcaaatcttcagacaattaaggaagatcgtgtaaatccttgtctggagcgtcttgatcgacttgagtcaatgtttaatcagctgagcaaaaagcctccagagcttccagaggacaaggaccgggccatacaagattcttttgacaggataaagtccattgagtttgatctgcagaagacaaagaaggtattgcatgcaacagttatcaaacaaatgcagatggcagaaaccttggaagctgtaacggagccggatcttaggcggaggaaattttgtacataatacacttacctgcagtgtacagaaacaagaaaagatggcgatttactaatgtctgctgcctggcagagaattgaactacattgctttgtacatggccgccctttgctgattatctttctcagcttactatagagatgagtgcattggcatgttagcctcaatcagggggcctcaataacaacagatagttgacctgtgataaactgacgagataacagcgtcctggaaaatcaccggacactgcccaatctattgagctaaagagttctgtattatgcatcttttgtgtttcagaacagttagtttcacccataattcgatccattttttggttggtacatgtgaacatctgattgaacttggttttcttagaatttttgcaaatggccgaaatctagtcgtgagcacgttgtttcaaca

SEQ ID NO: 55789 - DNA, 2584 bp, Zea Mays
gaggaaggagtaggcggaaacgaagcaagggaagcgtaagcgttaggagacgaggcgccgagggaggcaagccgatcacaccaaacgcttcgtgctgctgccccgtctcttctcatcgtgatctcagggcagtggatcgatctcacgtcggaggcgaccttcttaggcgcgccaccgccatccgagccgagccgcagcgatccagatccagtgttggggctgccttgtgcaccgaatcagtgatcgggcagcgtaatacaaagagggagcgcttggtcatctgagctggttttgtacagaatgtcagagggtaatgtggatagcatccagatatctgttagtaacgatgagaggaggaatagggcagatgccgagatctcggaggacgagccaaggcacaccaggatgcggtcactgaagaagaaagccttgcatgcatcgacaagactcacacactccctgaagaagagggggaagagaaaagtggactgcagagtgccaaggatagctatagaagatgtcagggatgctgaagaagagcaagcagtgaactcgtttcgggaggttttgtttgctaggggcttgctaccagtcaagcatgataattaccacacgatgcttagttctctgctgtagatttttaaaagcaaggaagttcgattttgaaaaagcagcacagatgtgggcggacatgctgcagtggagaaaggagttcggtacagacacaatttttgaagattttgaatttcatgaactagaggaggtcctgcaatattatcctcatggttaccatggggttgacaaggaaggaaggcctgtctacattgagttgcttgggaaagttgaacccaacaagcttatacaaatcacaacagttgagcgctacattaagtatcatgtacaagagtttgagagagctttccgggagaaattccctgcatgctcaatttctgccaaaagacatatagatactacaacgacgatattggatgtccacggtgtgggctggaaaaactttagcaagattgcaagggatttggtgcgttgtatgcaaaaaatagatggtgactattatcctgagacattacatcaaatgtttattgtaaatgcgggacctggtttcaagctgatatggagcactgttaagggacttcttgaccccaaaacgtcatctaagatacatgttctaggaacaaaatatcaaagcagacttcttgaagctattgatgcaagccaattaccagagtactttggtggttcgtgcacatgttctaaccatggagggtgcctgaggtctaacaaaggcccctggagcgatccttcaatcatgaaacttgtacatagcatggagtcattgaaggaaattgggcaagtatctgatatagaagaaacagttacaggctccatgagattgcgtgctctcaagttaccagaacgaattagtgacacgtcaaatgctgaatcaggttcagatgttgatgatcttggatcccctgtggctcctgaagatgttgaatatcctagtttggccccagttcgagaggaagcgagggaatcaggatctacaacatatagtggttcaattggcatgtctcgtatggcagataaagttgtaggatccaacgggagatacaactctactggaaatgaaactaggcaggtcaatgcagaacaaggttccctgataaatgggggtttacttgcgcccggtcagcgtgccccaaatgatgctgtaggcaatgatgatgggttcttgaaatatatatcaagaagagtcgttgctatatttcttgaagtactctcttttttgcggttcttcattcgtcgacgacaacactcggaaaatgttcattcacatactgcaactgcacccagtagtctggcaaatcttcagacaattaaggaagatcgtgtaaatccttgtctggagcgtcttgatcgacttgagtcaatgtttaatcagctgagcaaaaagcctccagagcttccagaggacaaggaccgggccatacaagattcttttgacaggataaagtccattgagtttgatctgcagaagacaaagaaggtattgcatgcaacagttatcaaacaaatgcagatggcagaaaccttggaagctgtaacggagccggatcttaggcggaggaaattttgtacataatacacttacctgcagtgtacagaaacaagaaaagatggcgatttactaatgtctgctgcctggcagagaattgaactacattgctttgtacatggccgccctttgctgattatctttctcagcttactatagagatgagtgcattggcatgttagcctcaatcagggggcctcaataacaacagatagttgacctgtgataaactgacgagataacagcgtcctggaaaatcaccggacactgcccaatctattgagctaaagagttctgtattatgcatcttttgtgtttcagaacagttagtttcacccataattcgatccattttttggttggtacatgtgaacatctgattgaacttggttttcttagaatttttgcaaatggccgaaatctagtcgtgagcacgttgtttcaaca

SEQ ID NO: 55790 - DNA, 2854 bp, Zea Mays
aaaagagcgcctagttaccgagcactagcagaggcaagggcaaactagagtatagggaggaaggagtaggcggaaacgaagcaagggaagcgtaagcgttaggagacgaggcgccgagggaggcaagccgatcacaccaaacgcttcgtgctgctgccccgtctcttctcatcgtgatctcagggcagtggatcgatctcacgtcggaggcgaccttcttaggcgcgccaccgccatccgagccgagccgcagcgatccagatccagtgttggggctgccttgtgcaccgaatcagtgatcgggcagcgtaatacaaagagggagcgcttggtcatctgagctggttttgtacagaatgtcagagggtaatgtggatagcatccagatatctgttagtaacgatgagaggaggaatagggcagatgccgagatctcggaggacgagccaaggcacaccaggatgcggtcactgaagaagaaagccttgcatgcatcgacaagactcacacactccctgaagaagagggggaagagaaaagtggactgcagagtgccaaggatagctatagaagatgtcagggatgctgaagaagagcaagcagtgaactcgtttcgggaggttttgtttgctaggggcttgctaccagtcaagcatgataattaccacacgatgcttagatttttaaaagcaaggaagttcgattttgaaaaagcagcacagatgtgggcggacatgctgcagtggagaaaggagttcggtacagacacaatttttgaagtaggatgttgtctactctaaaaagttgatctcaaagttatatgaaactctgctgatatatagatgattttgaatttcatgaactagaggaggtcctgcaatattatcctcatggttaccatggggttgacaaggaaggaaggcctgtctacattgagttgcttgggaaagttgaacccaacaagcttatacaaatcacaacagttgagcgctacattaagtatcatgtacaagagtttgagagagctttccgggagaaattccctgcatgctcaatttctgccaaaagacatatagatactacaacgacgatattggatgtccacggtgtgggctggaaaaactttagcaagattgcaagggatttggtgcgttgtatgcaaaaaatagatggtgactattatcctgagacattacatcaaatgtttattgtaaatgcgggacctggtttcaagctgatatggagcactgttaagggacttcttgaccccaaaacgtcatctaagatacatgttctaggaacaaaatatcaaagcagacttcttgaagctattgatgcaagccaattaccagagtactttggtggttcgtgcacatgttctaaccatggagggtgcctgaggtctaacaaaggcccctggagcgatccttcaatcatgaaacttgtacatagcatggagtcattgaaggaaattgggcaagtatctgatatagaagaaacagttacaggctccatgagattgcgtgctctcaaggttcagatgttgatgatcttggatcccctgtggctcctgaagatgttgaatatcctagtttggccccagttcgagaggaagtacagtcttactaagttctgttatgtttttttggagatattttattatttttgtcgtatgtctatcttggaactgtgaagatttgaacttgcacattcaggctttcattagaaaatgtgttctgttccttttagctgcatgacaccatgttagcatgttttataatttgtagttaattcgttctgattctttaccctgtaggcgagggaatcaggatctacaacatatagtggttcaattggcatgtctcgtatggcagataaagttgtaggatccaacgggagatacaactctactggaaatgaaactaggcaggtcaatgcagaacaaggttccctgataaatgggggtttacttgcgcccggtcagcgtgccccaaatgatgctgtaggcaatgatgatgggttcttgaaatatatatcaagaagagtcgttgctatatttcttgaagtactctcttttttgcggttcttcattcgtcgacgacaacactcggaaaatgttcattcacatactgcaactgcacccagtagtctggcaaatcttcagacaattaaggaagatcgtgtaaatccttgtctggagcgtcttgatcgacttgagtcaatgtttaatcagctgagcaaaaagcctccagagcttccagaggacaaggaccgggccatacaagattcttttgacaggataaagtccattgagtttgatctgcagaagacaaagaaggtattgcatgcaacagttatcaaacaaatgcagatggcagaaaccttggaagctgtaacggagccggatcttaggcggaggaaattttgtacataatacacttacctgcagtgtacagaaacaagaaaagatggcgatttactaatgtctgctgcctggcagagaattgaactacattgctttgtacatggccgccctttgctgattatctttctcagcttactatagagatgagtgcattggcatgttagcctcaatcagggggcctcaataacaacagatagttgacctgtgataaactgacgagataacagcgtcctggaaaatcaccggacactgcccaatctattgagctaaagagttctgtattatgcatcttttgtgtttcagaacagttagtttcacccataattcgatccattttttggttggtacatgtgaacatctgattgaacttggttttcttagaatttttgcaaatggccgaaatctagtcgtgagcacgttgtttcaaca

SEQ ID NO: 55791 - DNA, 2887 bp, Zea Mays
aaaaagagcgcctagttaccgagcactagcagaggcaagggcaaactagagtatagggaggaaggagtaggcggaaacgaagcaagggaagcgtaagcgttaggagacgaggcgccgagggaggcaagccgatcacaccaaacgcttcgtgctgctgccccgtctcttctcatcgtgatctcagggcagtggatcgatctcacgtcggaggcgaccttcttaggcgcgccaccgccatccgagccgagccgcagcgatccagatccagtgttggggctgccttgtgcaccgaatcagtgatcgggcagcgtaatacaaagagggagcgcttggtcatctgagctggttttgtacagaatgtcagagggtaatgtggatagcatccagatatctgttagtaacgatgagaggaggaatagggcagatgccgagatctcggaggacgagccaaggcacaccaggatgcggtcactgaagaagaaagccttgcatgcatcgacaagactcacacactccctgaagaagagggggaagagaaaagtggactgcagagtgccaaggatagctatagaagatgtcagggatgctgaagaagagcaagcagtgaactcgtttcgggaggttttgtttgctaggggcttgctaccagtcaagcatgataattaccacacgatgcttagatttttaaaagcaaggaagttcgattttgaaaaagcagcacagatgtgggcggacatgctgcagtggagaaaggagttcggtacagacacaatttttgaagtaggatgttgtctactctaaaaagttgatctcaaagttatatgaaactctgctgatatatagatgattttgaatttcatgaactagaggaggtcctgcaatattatcctcatggttaccatggggttgacaaggaaggaaggcctgtctacattgagttgcttgggaaagttgaacccaacaagcttatacaaatcacaacagttgagcgctacattaagtatcatgtacaagagtttgagagagctttccgggagaaattccctgcatgctcaatttctgccaaaagacatatagatactacaacgacgatattggatgtccacggtgtgggctggaaaaactttagcaagattgcaagggatttggtgcgttgtatgcaaaaaatagatggtgactattatcctgagacattacatcaaatgtttattgtaaatgcgggacctggtttcaagctgatatggagcactgttaagggacttcttgaccccaaaacgtcatctaagatacatgttctaggaacaaaatatcaaagcagacttcttgaagctattgatgcaagagtactttggtggttcgtgcacatgttctaaccatggagggtgcctgaggtctaacaaaggcccctggagcgatccttcaatcatgaaacttgtacatagcatggagtcattgaaggaaattgggcaagtatctgatatagaagaaacagttacaggctccatgagattgcgtgctctcaagttaccagaacgaattagtgacacgtcaaatgctgaatcaggttcagatgttgatgatcttggatcccctgtggctcctgaagatgttgaatatcctagtttggccccagttcgagaggaagtacagtcttactaagttctgttatgtttttttggagatattttattatttttgtcgtatgtctatcttggaactgtgaagatttgaacttgcacattcaggctttcattagaaaatgtgttctgttccttttagctgcatgacaccatgttagcatgttttataatttgtagttaattcgttctgattctttaccctgtaggcgagggaatcaggatctacaacatatagtggttcaattggcatgtctcgtatggcagataaagttgtaggatccaacgggagatacaactctactggaaatgaaactaggcaggtcaatgcagaacaaggttccctgataaatgggggtttacttgcgcccgcaggtcagcgtgccccaaatgatgctgtaggcaatgatgatgggttcttgaaatatatatcaagaagagtcgttgctatatttcttgaagtactctcttttttgcggttcttcattcgtcgacgacaacactcggaaaatgttcattcacatactgcaactgcacccagtagtctggcaaatcttcagacaattaaggaagatcgtgtaaatccttgtctggagcgtcttgatcgacttgagtcaatgtttaatcagctgagcaaaaagcctccagagcttccagaggacaaggaccgggccatacaagattcttttgacaggataaagtccattgagtttgatctgcagaagacaaagaaggtattgcatgcaacagttatcaaacaaatgcagatggcagaaaccttggaagctgtaacggagccggatcttaggcggaggaaattttgtacataatacacttacctgcagtgtacagaaacaagaaaagatggcgatttactaatgtctgctgcctggcagagaattgaactacattgctttgtacatggccgccctttgctgattatctttctcagcttactatagagatgagtgcattggcatgttagcctcaatcagggggcctcaataacaacagatagttgacctgtgataaactgacgagataacagcgtcctggaaaatcaccggacactgcccaatctattgagctaaagagttctgtattatgcatcttttgtgtttcagaacagttagtttcacccataattcgatccattttttggttggtacatgtgaacatctgattgaacttggttttcttagaatttttgcaaatggccgaaatctagtcgtgagcacgttgtttcaaca

SEQ ID NO: 55792 - DNA, 2570 bp, Zea Mays
caaaaaagagcgcctagttaccgagcactagcagaggcaagggcaaactagagtatagggaggaaggagtaggcggaaacgaagcaagggaagcgtaagcgttaggagacgaggcgccgagggaggcaagccgatcacaccaaacgcttcgtgctgctgccccgtctcttctcatcgtgatctcagggcagtggatcgatctcacgtcggaggcgaccttcttaggcgcgccaccgccatccgagccgagccgcagcgatccagatccagtgttggggctgccttgtgcaccgaatcagtgatcgggcagcgtaatacaaagagggagcgcttggtcatctgagctggttttgtacagaatgtcagagggtaatgtggatagcatccagatatctgttagtaacgatgagaggaggaatagggcagatgccgagatctcggaggacgagccaaggcacaccaggatgcggtcactgaagaagaaagccttgcatgcatcgacaagactcacacactccctgaagaagagggggaagagaaaagtggactgcagagtgccaaggatagctatagaagatgtcagggatgctgaagaagagcaagcagtgaactcgtttcgggaggttttgtttgctaggggcttgctaccagtcaagcatgataattaccacacgatgcttagatttttaaaagcaaggaagttcgattttgaaaaagcagcacagatgtgggcggacatgctgcagtggagaaaggagttcggattttgaatttcatgaactagaggaggtcctgcaatattatcctcatggttaccatggggttgacaaggaaggaaggcctgtctacattgagttgcttgggaaagttgaacccaacaagcttatacaaatcacaacagttgagcgctacattaagtatcatgtacaagagtttgagagagctttccgggagaaattccctgcatgctcaatttctgccaaaagacatatagatactacaacgacgatattggatgtccacggtgtgggctggaaaaactttagcaagattgcaagggatttggtgcgttgtatgcaaaaaatagatggtgactattatcctgagacattacatcaaatgtttattgtaaatgcgggacctggtttcaagctgatatggagcactgttaagggacttcttgaccccaaaacgtcatctaagatacatgttctaggaacaaaatatcaaagcagacttcttgaagctattgatgcaagccaattaccagagtactttggtggttcgtgcacatgttctaaccatggagggtgcctgaggtctaacaaaggcccctggagcgatccttcaatcatgaaacttgtacatagcatggagtcattgaaggaaattgggcaagtatctgatatagaagaaacagttacaggctccatgagattgcgtgctctcaaggttcagatgttgatgatcttggatcccctgtggctcctgaagatgttgaatatcctagtttggccccagttcgagaggaagcgagggaatcaggatctacaacatatagtggttcaattggcatgtctcgtatggcagataaagttgtaggatccaacgggagatacaactctactggaaatgaaactaggcaggtcaatgcagaacaaggttccctgataaatgggggtttacttgcgcccggtcagcgtgccccaaatgatgctgtaggcaatgatgatgggttcttgaaatatatatcaagaagagtcgttgctatatttcttgaagtactctcttttttgcggttcttcattcgtcgacgacaacactcggaaaatgttcattcacatactgcaactgcacccagtagtctggcaaatcttcagacaattaaggaagatcgtgtaaatccttgtctggagcgtcttgatcgacttgagtcaatgtttaatcagctgagcaaaaagcctccagagcttccagaggacaaggaccgggccatacaagattcttttgacaggataaagtccattgagtttgatctgcagaagacaaagaaggtattgcatgcaacagttatcaaacaaatgcagatggcagaaaccttggaagctgtaacggagccggatcttaggcggaggaaattttgtacataatacacttacctgcagtgtacagaaacaagaaaagatggcgatttactaatgtctgctgcctggcagagaattgaactacattgctttgtacatggccgccctttgctgattatctttctcagcttactatagagatgagtgcattggcatgttagcctcaatcagggggcctcaataacaacagatagttgacctgtgataaactgacgagataacagcgtcctggaaaatcaccggacactgcccaatctattgagctaaagagttctgtattatgcatcttttgtgtttcagaacagttagtttcacccataattcgatccattttttggttggtacatgtgaacatctgattgaacttggttttcttagaatttttgcaaatggccgaaatctagtcgtgagcacgttgtttcaaca

SEQ ID NO: 55793 - DNA, 2630 bp, Zea Mays
agaactggcaaaaaagagcgcctagttaccgagcactagcagaggcaagggcaaactagagtatagggaggaaggagtaggcggaaacgaagcaagggaagcgtaagcgttaggagacgaggcgccgagggaggcaagccgatcacaccaaacgcttcgtgctgctgccccgtctcttctcatcgtgatctcagggcagtggatcgatctcacgtcggaggcgaccttcttaggcgcgccaccgccatccgagccgagccgcagcgatccagatccagtgttggggctgccttgtgcaccgaatcagtgatcgggcagcgtaatacaaagagggagcgcttggtcatctgagctggttttgtacagaatgtcagagggtaatgtggatagcatccagatatctgttagtaacgatgagaggaggaatagggcagatgccgagatctcggaggacgagccaaggcacaccaggatgcggtcactgaagaagaaagccttgcatgcatcgacaagactcacacactccctgaagaagagggggaagagaaaagtggactgcagagtgccaaggatagctatagaagatgtcagggatgctgaagaagagcaagcagtgaactcgtttcgggaggttttgtttgctaggggcttgctaccagtcaagcatgataattaccacacgatgcttagatttttaaaagcaaggaagttcgattttgaaaaagcagcacagatgtgggcggacatgctgcagtggagaaaggagttcggtacagacacaatttttgaagattttgaatttcatgaactagaggaggtcctgcaatattatcctcatggttaccatggggttgacaaggaaggaaggcctgtctacattgagttgcttgggaaagttgaacccaacaagcttatacaaatcacaacagttgagcgctacattaagtatcatgtacaagagtttgagagagctttccgggagaaattccctgcatgctcaatttctgccaaaagacatatagatactacaacgacgatattggatgtccacggtgtgggctggaaaaactttagcaagattgcaagggatttggtgcgttgtatgcaaaaaatagatggtgactattatcctgagacattacatcaaatgtttattgtaaatgcgggacctggtttcaagctgatatggagcactgttaagggacttcttgaccccaaaacgtcatctaagatacatgttctaggaacaaaatatcaaagcagacttcttgaagctattgatgcaagagtactttggtggttcgtgcacatgttctaaccatggagggtgcctgaggtctaacaaaggcccctggagcgatccttcaatcatgaaacttgtacatagcatggagtcattgaaggaaattgggcaagtatctgatatagaagaaacagttacaggctccatgagattgcgtgctctcaagttaccagaacgaattagtgacacgtcaaatgctgaatcaggttcagatgttgatgatcttggatcccctgtggctcctgaagatgttgaatatcctagtttggccccagttcgagaggaagcgagggaatcaggatctacaacatatagtggttcaattggcatgtctcgtatggcagataaagttgtaggatccaacgggagatacaactctactggaaatgaaactaggcaggtcaatgcagaacaaggttccctgataaatgggggtttacttgcgcccgcaggtcagcgtgccccaaatgatgctgtaggcaatgatgatgggttcttgaaatatatatcaagaagagtcgttgctatatttcttgaagtactctcttttttgcggttcttcattcgtcgacgacaacactcggaaaatgttcattcacatactgcaactgcacccagtagtctggcaaatcttcagacaattaaggaagatcgtgtaaatccttgtctggagcgtcttgatcgacttgagtcaatgtttaatcagctgagcaaaaagcctccagagcttccagaggacaaggaccgggccatacaagattcttttgacaggataaagtccattgagtttgatctgcagaagacaaagaaggtattgcatgcaacagttatcaaacaaatgcagatggcagaaaccttggaagctgtaacggagccggatcttaggcggaggaaattttgtacataatacacttacctgcagtgtacagaaacaagaaaagatggcgatttactaatgtctgctgcctggcagagaattgaactacattgctttgtacatggccgccctttgctgattatctttctcagcttactatagagatgagtgcattggcatgttagcctcaatcagggggcctcaataacaacagatagttgacctgtgataaactgacgagataacagcgtcctggaaaatcaccggacactgcccaatctattgagctaaagagttctgtattatgcatcttttgtgtttcagaacagttagtttcacccataattcgatccattttttggttggtacatgtgaacatctgattgaacttggttttcttagaatttttgcaaatggccgaaatctagtcgtgagcacgttgtttcaaca

SEQ ID NO: 55794 - DNA, 2603 bp, Zea Mays
caagaactggcaaaaaagagcgcctagttaccgagcactagcagaggcaagggcaaactagagtatagggaggaaggagtaggcggaaacgaagcaagggaagcgtaagcgttaggagacgaggcgccgagggaggcaagccgatcacaccaaacgcttcgtgctgctgccccgtctcttctcatcgtgatctcagggcagtggatcgatctcacgtcggaggcgaccttcttaggcgcgccaccgccatccgagccgagccgcagcgatccagatccagtgttggggctgccttgtgcaccgaatcagtgatcgggcagcgtaatacaaagagggagcgcttggtcatctgagctggttttgtacagaatgtcagagggtaatgtggatagcatccagatatctgttagtaacgatgagaggaggaatagggcagatgccgagatctcggaggacgagccaaggcacaccaggatgcggtcactgaagaagaaagccttgcatgcatcgacaagactcacacactccctgaagaagagggggaagagaaaagtggactgcagagtgccaaggatagctatagaagatgtcagggatgctgaagaagagcaagcagtgaactcgtttcgggaggttttgtttgctaggggcttgctaccagtcaagcatgataattaccacacgatgcttagatttttaaaagcaaggaagttcgattttgaaaaagcagcacagatgtgggcggacatgctgcagtggagaaaggagttcggtacagacacaatttttgaagattttgaatttcatgaactagaggaggtcctgcaatattatcctcatggttaccatggggttgacaaggaaggaaggcctgtctacattgagttgcttgggaaagttgaacccaacaagcttatacaaatcacaacagttgagcgctacattaagtatcatgtacaagagtttgagagagctttccgggagaaattccctgcatgctcaatttctgccaaaagacatatagatactacaacgacgatattggatgtccacggtgtgggctggaaaaactttagcaagattgcaagggatttggtgcgttgtatgcaaaaaatagatggtgactattatcctgagacattacatcaaatgtttattgtaaatgcgggacctggtttcaagctgatatggagcactgttaagggacttcttgaccccaaaacgtcatctaagatacatgttctaggaacaaaatatcaaagcagacttcttgaagctattgatgcaagccaattaccagagtactttggtggttcgtgcacatgttctaaccatggagggtgcctgaggtctaacaaaggcccctggagcgatccttcaatcatgaaacttgtacatagcatggagtcattgaaggaaattgggcaagtatctgatatagaagaaacagttacaggctccatgagattgcgtgctctcaaggttcagatgttgatgatcttggatcccctgtggctcctgaagatgttgaatatcctagtttggccccagttcgagaggaagcgagggaatcaggatctacaacatatagtggttcaattggcatgtctcgtatggcagataaagttgtaggatccaacgggagatacaactctactggaaatgaaactaggcaggtcaatgcagaacaaggttccctgataaatgggggtttacttgcgcccgcaggtcagcgtgccccaaatgatgctgtaggcaatgatgatgggttcttgaaatatatatcaagaagagtcgttgctatatttcttgaagtactctcttttttgcggttcttcattcgtcgacgacaacactcggaaaatgttcattcacatactgcaactgcacccagtagtctggcaaatcttcagacaattaaggaagatcgtgtaaatccttgtctggagcgtcttgatcgacttgagtcaatgtttaatcagctgagcaaaaagcctccagagcttccagaggacaaggaccgggccatacaagattcttttgacaggataaagtccattgagtttgatctgcagaagacaaagaaggtattgcatgcaacagttatcaaacaaatgcagatggcagaaaccttggaagctgtaacggagccggatcttaggcggaggaaattttgtacataatacacttacctgcagtgtacagaaacaagaaaagatggcgatttactaatgtctgctgcctggcagagaattgaactacattgctttgtacatggccgccctttgctgattatctttctcagcttactatagagatgagtgcattggcatgttagcctcaatcagggggcctcaataacaacagatagttgacctgtgataaactgacgagataacagcgtcctggaaaatcaccggacactgcccaatctattgagctaaagagttctgtattatgcatcttttgtgtttcagaacagttagtttcacccataattcgatccattttttggttggtacatgtgaacatctgattgaacttggttttcttagaatttttgcaaatggccgaaatctagtcgtgagcacgttgtttcaaca

SEQ ID NO: 55795 - DNA, 2851 bp, Zea Mays
gcgaaaagccgctgacgccgggcccggagcaagaactggcaaaaaagagcgcctagttaccgagcactagcagaggcaagggcaaactagagtatagggaggaaggagtaggcggaaacgaagcaagggaagcgtaagcgttaggagacgaggcgccgagggaggcaagccgatcacaccaaacgcttcgtgctgctgccccgtctcttctcatcgtgatctcagggcagtggatcgatctcacgtcggaggcgaccttcttaggcgcgccaccgccatccgagccgagccgcagcgatccagatccagtgttggggctgccttgtgcaccgaatcagtgatcgggcagcgtaatacaaagagggagcgcttggtcatctgagctggttttgtacagaatgtcagagggtaatgtggatagcatccagatatctgttagtaacgatgagaggaggaatagggcagatgccgagatctcggaggacgagccaaggcacaccaggatgcggtcactgaagaagaaagccttgcatgcatcgacaagactcacacactccctgaagaagagggggaagagaaaagtggactgcagagtgccaaggatagctatagaagatgtcagggatgctgaagaagagcaagcagtgaactcgtttcgggaggttttgtttgctaggggcttgctaccagtcaagcatgataattaccacacgatgcttagatttttaaaagcaaggaagttcgattttgaaaaagcagcacagatgtgggcggacatgctgcagtggagaaaggagttcggattttgaatttcatgaactagaggaggtcctgcaatattatcctcatggttaccatggggttgacaaggaaggaaggcctgtctacattgagttgcttgggaaagttgaacccaacaagcttatacaaatcacaacagttgagcgctacattaagtatcatgtacaagagtttgagagagctttccgggagaaattccctgcatgctcaatttctgccaaaagacatatagatactacaacgacgatattggatgtccacggtgtgggctggaaaaactttagcaagattgcaagggatttggtgcgttgtatgcaaaaaatagatggtgactattatcctgagacattacatcaaatgtttattgtaaatgcgggacctggtttcaagctgatatggagcactgttaagggacttcttgaccccaaaacgtcatctaagatacatgttctaggaacaaaatatcaaagcagacttcttgaagctattgatgcaagccaattaccagagtactttggtggttcgtgcacatgttctaaccatggagggtgcctgaggtctaacaaaggcccctggagcgatccttcaatcatgaaacttgtacatagcatggagtcattgaaggaaattgggcaagtatctgatatagaagaaacagttacaggctccatgagattgcgtgctctcaagttaccagaacgaattagtgacacgtcaaatgctgaatcaggttcagatgttgatgatcttggatcccctgtggctcctgaagatgttgaatatcctagtttggccccagttcgagaggaagtacagtcttactaagttctgttatgtttttttggagatattttattatttttgtcgtatgtctatcttggaactgtgaagatttgaacttgcacattcaggctttcattagaaaatgtgttctgttccttttagctgcatgacaccatgttagcatgttttataatttgtagttaattcgttctgattctttaccctgtaggcgagggaatcaggatctacaacatatagtggttcaattggcatgtctcgtatggcagataaagttgtaggatccaacgggagatacaactctactggaaatgaaactaggcaggtcaatgcagaacaaggttccctgataaatgggggtttacttgcgcccggtcagcgtgccccaaatgatgctgtaggcaatgatgatgggttcttgaaatatatatcaagaagagtcgttgctatatttcttgaagtactctcttttttgcggttcttcattcgtcgacgacaacactcggaaaatgttcattcacatactgcaactgcacccagtagtctggcaaatcttcagacaattaaggaagatcgtgtaaatccttgtctggagcgtcttgatcgacttgagtcaatgtttaatcagctgagcaaaaagcctccagagcttccagaggacaaggaccgggccatacaagattcttttgacaggataaagtccattgagtttgatctgcagaagacaaagaaggtattgcatgcaacagttatcaaacaaatgcagatggcagaaaccttggaagctgtaacggagccggatcttaggcggaggaaattttgtacataatacacttacctgcagtgtacagaaacaagaaaagatggcgatttactaatgtctgctgcctggcagagaattgaactacattgctttgtacatggccgccctttgctgattatctttctcagcttactatagagatgagtgcattggcatgttagcctcaatcagggggcctcaataacaacagatagttgacctgtgataaactgacgagataacagcgtcctggaaaatcaccggacactgcccaatctattgagctaaagagttctgtattatgcatcttttgtgtttcagaacagttagtttcacccataattcgatccattttttggttggtacatgtgaacatctgattgaacttggttttcttagaatttttgcaaatggccgaaatctagtcgtgagcacgttgtttcaaca

SEQ ID NO: 55796 - DNA, 2876 bp, Zea Mays
gctctggcgtacacgacaccgcgcgaaaagccgctgacgccgggcccggagcaagaactggcaaaaaagagcgcctagttaccgagcactagcagaggcaagggcaaactagagtatagggaggaaggagtaggcggaaacgaagcaagggaagcgtaagcgttaggagacgaggcgccgagggaggcaagccgatcacaccaaacgcttcgtgctgctgccccgtctcttctcatcgtgatctcagggcagtggatcgatctcacgtcggaggcgaccttcttaggcgcgccaccgccatccgagccgagccgcagcgatccagatccagtgttggggctgccttgtgcaccgaatcagtgatcgggcagcgtaatacaaagagggagcgcttggtcatctgagctggttttgtacagaatgtcagagggtaatgtggatagcatccagatatctgttagtaacgatgagaggaggaatagggcagatgccgagatctcggaggacgagccaaggcacaccaggatgcggtcactgaagaagaaagccttgcatgcatcgacaagactcacacactccctgaagaagagggggaagagaaaagtggactgcagagtgccaaggatagctatagaagatgtcagggatgctgaagaagagcaagcagtgaactcgtttcgggaggttttgtttgctaggggcttgctaccagtcaagcatgataattaccacacgatgcttagatttttaaaagcaaggaagttcgattttgaaaaagcagcacagatgtgggcggacatgctgcagtggagaaaggagttcggattttgaatttcatgaactagaggaggtcctgcaatattatcctcatggttaccatggggttgacaaggaaggaaggcctgtctacattgagttgcttgggaaagttgaacccaacaagcttatacaaatcacaacagttgagcgctacattaagtatcatgtacaagagtttgagagagctttccgggagaaattccctgcatgctcaatttctgccaaaagacatatagatactacaacgacgatattggatgtccacggtgtgggctggaaaaactttagcaagattgcaagggatttggtgcgttgtatgcaaaaaatagatggtgactattatcctgagacattacatcaaatgtttattgtaaatgcgggacctggtttcaagctgatatggagcactgttaagggacttcttgaccccaaaacgtcatctaagatacatgttctaggaacaaaatatcaaagcagacttcttgaagctattgatgcaagccaattaccagagtactttggtggttcgtgcacatgttctaaccatggagggtgcctgaggtctaacaaaggcccctggagcgatccttcaatcatgaaacttgtacatagcatggagtcattgaaggaaattgggcaagtatctgatatagaagaaacagttacaggctccatgagattgcgtgctctcaagttaccagaacgaattagtgacacgtcaaatgctgaatcaggttcagatgttgatgatcttggatcccctgtggctcctgaagatgttgaatatcctagtttggccccagttcgagaggaagtacagtcttactaagttctgttatgtttttttggagatattttattatttttgtcgtatgtctatcttggaactgtgaagatttgaacttgcacattcaggctttcattagaaaatgtgttctgttccttttagctgcatgacaccatgttagcatgttttataatttgtagttaattcgttctgattctttaccctgtaggcgagggaatcaggatctacaacatatagtggttcaattggcatgtctcgtatggcagataaagttgtaggatccaacgggagatacaactctactggaaatgaaactaggcaggtcaatgcagaacaaggttccctgataaatgggggtttacttgcgcccgcaggtcagcgtgccccaaatgatgctgtaggcaatgatgatgggttcttgaaatatatatcaagaagagtcgttgctatatttcttgaagtactctcttttttgcggttcttcattcgtcgacgacaacactcggaaaatgttcattcacatactgcaactgcacccagtagtctggcaaatcttcagacaattaaggaagatcgtgtaaatccttgtctggagcgtcttgatcgacttgagtcaatgtttaatcagctgagcaaaaagcctccagagcttccagaggacaaggaccgggccatacaagattcttttgacaggataaagtccattgagtttgatctgcagaagacaaagaaggtattgcatgcaacagttatcaaacaaatgcagatggcagaaaccttggaagctgtaacggagccggatcttaggcggaggaaattttgtacataatacacttacctgcagtgtacagaaacaagaaaagatggcgatttactaatgtctgctgcctggcagagaattgaactacattgctttgtacatggccgccctttgctgattatctttctcagcttactatagagatgagtgcattggcatgttagcctcaatcagggggcctcaataacaacagatagttgacctgtgataaactgacgagataacagcgtcctggaaaatcaccggacactgcccaatctattgagctaaagagttctgtattatgcatcttttgtgtttcagaacagttagtttcacccataattcgatccattttttggttggtacatgtgaacatctgattgaacttggttttcttagaatttttgcaaatggccgaaatctagtcgtgagcacgttgtttcaaca

SEQ ID NO: 55797 - DNA, 2983 bp, Zea Mays
cggcgcgccgcagcctgccaaagcagtcacgcaacgcgggcgcgcccagcggtggagccagtcaatcgcgacgcgcgcacgaccttctgggctctggcgtacacgacaccgcgcgaaaagccgctgacgccgggcccggagcaagaactggcaaaaaagagcgcctagttaccgagcactagcagaggcaagggcaaactagagtatagggaggaaggagtaggcggaaacgaagcaagggaagcgtaagcgttaggagacgaggcgccgagggaggcaagccgatcacaccaaacgcttcgtgctgctgccccgtctcttctcatcgtgatctcagggcagtggatcgatctcacgtcggaggcgaccttcttaggcgcgccaccgccatccgagccgagccgcagcgatccagatccagtgttggggctgccttgtgcaccgaatcagtgatcgggcagcgtaatacaaagagggagcgcttggtcatctgagctggttttgtacagaatgtcagagggtaatgtggatagcatccagatatctgttagtaacgatgagaggaggaatagggcagatgccgagatctcggaggacgagccaaggcacaccaggatgcggtcactgaagaagaaagccttgcatgcatcgacaagactcacacactccctgaagaagagggggaagagaaaagtggactgcagagtgccaaggatagctatagaagatgtcagggatgctgaagaagagcaagcagtgaactcgtttcgggaggttttgtttgctaggggcttgctaccagtcaagcatgataattaccacacgatgcttagatttttaaaagcaaggaagttcgattttgaaaaagcagcacagatgtgggcggacatgctgcagtggagaaaggagttcggtacagacacaatttttgaagattttgaatttcatgaactagaggaggtcctgcaatattatcctcatggttaccatggggttgacaaggaaggaaggcctgtctacattgagttgcttgggaaagttgaacccaacaagcttatacaaatcacaacagttgagcgctacattaagtatcatgtacaagagtttgagagagctttccgggagaaattccctgcatgctcaatttctgccaaaagacatatagatactacaacgacgatattggatgtccacggtgtgggctggaaaaactttagcaagattgcaagggatttggtgcgttgtatgcaaaaaatagatggtgactattatcctgagacattacatcaaatgtttattgtaaatgcgggacctggtttcaagctgatatggagcactgttaagggacttcttgaccccaaaacgtcatctaagatacatgttctaggaacaaaatatcaaagcagacttcttgaagctattgatgcaagccaattaccagagtactttggtggttcgtgcacatgttctaaccatggagggtgcctgaggtctaacaaaggcccctggagcgatccttcaatcatgaaacttgtacatagcatggagtcattgaaggaaattgggcaagtatctgatatagaagaaacagttacaggctccatgagattgcgtgctctcaagttaccagaacgaattagtgacacgtcaaatgctgaatcaggttcagatgttgatgatcttggatcccctgtggctcctgaagatgttgaatatcctagtttggccccagttcgagaggaagtacagtcttactaagttctgttatgtttttttggagatattttattatttttgtcgtatgtctatcttggaactgtgaagatttgaacttgcacattcaggctttcattagaaaatgtgttctgttccttttagctgcatgacaccatgttagcatgttttataatttgtagttaattcgttctgattctttaccctgtaggcgagggaatcaggatctacaacatatagtggttcaattggcatgtctcgtatggcagataaagttgtaggatccaacgggagatacaactctactggaaatgaaactaggcaggtcaatgcagaacaaggttccctgataaatgggggtttacttgcgcccggtcagcgtgccccaaatgatgctgtaggcaatgatgatgggttcttgaaatatatatcaagaagagtcgttgctatatttcttgaagtactctcttttttgcggttcttcattcgtcgacgacaacactcggaaaatgttcattcacatactgcaactgcacccagtagtctggcaaatcttcagacaattaaggaagatcgtgtaaatccttgtctggagcgtcttgatcgacttgagtcaatgtttaatcagctgagcaaaaagcctccagagcttccagaggacaaggaccgggccatacaagattcttttgacaggataaagtccattgagtttgatctgcagaagacaaagaaggtattgcatgcaacagttatcaaacaaatgcagatggcagaaaccttggaagctgtaacggagccggatcttaggcggaggaaattttgtacataatacacttacctgcagtgtacagaaacaagaaaagatggcgatttactaatgtctgctgcctggcagagaattgaactacattgctttgtacatggccgccctttgctgattatctttctcagcttactatagagatgagtgcattggcatgttagcctcaatcagggggcctcaataacaacagatagttgacctgtgataaactgacgagataacagcgtcctggaaaatcaccggacactgcccaatctattgagctaaagagttctgtattatgcatcttttgtgtttcagaacagttagtttcacccataattcgatccattttttggttggtacatgtgaacatctgattgaacttggttttcttagaatttttgcaaatggccgaaatctagtcgtgagcacgttgtttcaaca

SEQ ID NO: 55798 - DNA, 1659 bp, Zea Mays
cacttcccgagaccgcgagcgaatccaccaccaccatgtgagcagacaaaggttggctacacaaacaggaaaagaatagtatatccgcccccatattgatcctccccacgtcgccgtgctcgttttgcgcgtccaccagcccgccccccaaccccacccagcgcgacgaagccggggggcgatcgctccagcgccgccggcgacctcgccccgggagccgccggcggtaccccgctctctgtcccgcctcaacgaaccctcaggtccaagtagttcgtttcgtgagttatccaaagttgcgccgcaaagatgagtactgctaatcgctaccaacacatcaagtcaactaagcctgttgtaggcaaagcaagaaaattgaaggatctcatgataaaaagtgacaataggatatgtgctgactgtggtgcacctgatcccaaatgggcatctgctaatattggagtgtttctttgcttaaaatgtggagatgttcatagggcacttggacctgacatctcaaaggttttatctgtaactttggatgattggtctgatagtgatatcgactccatggttgaggttggtggaaactcatatgcaaattcaatttatgaggcttttcttccaaaagatcacccaaaacccaaaccagattcaacgatggaatataggacaaaatttataagagctaagtatgagacacaagattttttgaagccaagtttgcgcatttcatcaagatcatcttttaaatctaccacttctgtgaagagtgtagatagcaatttctctagcacttcaaggaaggatgtctttgaagatacaagagaatttgttggagagttgaatatcacactggtcaaaggcaccaacttggccgttagagacatgctaacaagtgatccatatgttgttttaacgctcggagggcaggaagtgtatgaccatgatatgttctcagctgatgatatcatgggtgaagcagagatagatctccagccaatgatcacagccgccatggcctttggagatacttcacgtcttggtgacatgcaaattgggaggtggttcatgaccaaagacaacgccctgatgaaagatagcacggtgaatgttgtggcaggtaaggtaaaacaggaggtgcacttaaagctacagaacgtagaatcaggtgagttggagttggagctagaatgggttccgatcctctagactaatgataactcccctgatctttgtctaaaaatctatactcaagatgcatcgatgtttccaagctgtccacttgatggtcttggacatttttgctggatggtttgaatttgttaaaaatgtcactgtagaatatcatggtgtaactgtcggttgtactcgcgcctttcacccccctcccggtaactggttatcatgccttgtaagcactcgctgtctcttgattgttgttgcattgtcccattgaaaggacctgtgtcttgtaagagatggcaattatagccagtgaactctttgtgctgatgccatgttggcgctgtagtagctaatcgggttgttggttctcctggagctttgcttagatgagtctagcccgttcagttttttcgttggagaagctgctgcaccggttactgacaaatgacattttgctgacactttgttctt

SEQ ID NO: 55799 - DNA, 1703 bp, Zea Mays
cacttcccgagaccgcgagcgaatccaccaccaccatgtgagcagacaaaggttggctacacaaacaggaaaagaatagtatatccgcccccatattgatcctccccacgtcgccgtgctcgttttgcgcgtccaccagcccgccccccaaccccacccagcgcgacgaagccggggggcgatcgctccagcgccgccggcgacctcgccccgggagccgccggcggtaccccgctctctgtcccgcctcaacgaaccctcaggtccaagtagttcgtttcgtgagttatccaaagttgcgccgcaaagatgagtactgctaatcgctaccaacacatcaagtcaactaagcctgttgtaggcaaagcaagaaaattgaaggatctcatgataaaaagtgacaataggatatgtgctgactgtggtgcacctgatcccaaatgggcatctgctaatattggagtgtttctttgcttaaaatgtggagatgttcatagggcacttggacctgacatctcaaaggttttatctgtaactttggatgattggtctgatagtgatatcgactccatggttgaggttggtggaaactcatatgcaaattcaatttatgaggcttttcttccaaaagatcacccaaaacccaaaccagattcaacgatggaatataggacaaaatttataagagctaagtatgagacacaagattttttgaagccaagtttgcgcatttcatcaagatcatcttttaaatctaccacttctgtgaagagtgtagatagcaatttctctagcacttcaaggaaggatgtctttgaagatacaagagaatttgttggagagttgaatatcacactggtcaaaggcaccaacttggccgttagagacatgctaacaagtgatccatatgttgttttaacgctcggagggcagaaagttcaatcaacggttaaaaaaagtgatctgaatccggtatggaatgaagtgcttaagatatctgttcctcgaaattatggacctctaaaacttagatagatctccagccaatgatcacagccgccatggcctttggagatacttcacgtcttggtgacatgcaaattgggaggtggttcatgaccaaagacaacgccctgatgaaagatagcacggtgaatgttgtggcaggtaaggtaaaacaggaggtgcacttaaagctacagaacgtagaatcaggtgagttggagttggagctagaatgggttccgatcctctagactaatgataactcccctgatctttgtctaaaaatctatactcaagatgcatcgatgtttccaagctgtccacttgatggtcttggacatttttgctggatggtttgaatttgttaaaaatgtcactgtagaatatcatggtgtaactgtcggttgtactcgcgcctttcacccccctcccggtaactggttatcatgccttgtaagcactcgctgtctcttgattgttgttgcattgtcccattgaaaggacctgtgtcttgtaagagatggcaattatagccagtgaactctttgtgctgatgccatgttggcgctgtagtagctaatcgggttgttggttctcctggagctttgcttagatgagtctagcccgttcagttttttcgttggagaagctgctgcaccggttactgacaaatgacattttgctgacactttgttctt

SEQ ID NO: 55800 - DNA, 1751 bp, Zea Mays
cacttcccgagaccgcgagcgaatccaccaccaccatgtgagcagacaaaggttggctacacaaacaggaaaagaatagtatatccgcccccatattgatcctccccacgtcgccgtgctcgttttgcgcgtccaccagcccgccccccaaccccacccagcgcgacgaagccggggggcgatcgctccagcgccgccggcgacctcgccccgggagccgccggcggtaccccgctctctgtcccgcctcaacgaaccctcaggtccaagtagttcgtttcgtgagttatccaaagttgcgccgcaaagatgagtactgctaatcgctaccaacacatcaagtcaactaagcctgttgtaggcaaagcaagaaaattgaaggatctcatgataaaaagtgacaataggatatgtgctgactgtggtgcacctgatcccaaatgggcatctgctaatattggagtgtttctttgcttaaaatgtggagatgttcatagggcacttggacctgacatctcaaaggttttatctgtaactttggatgattggtctgatagtgatatcgactccatggttgaggttggtggaaactcatatgcaaattcaatttatgaggcttttcttccaaaagatcacccaaaacccaaaccagattcaacgatggaatataggacaaaatttataagagctaagtatgagacacaagattttttgaagccaagtttgcgcatttcatcaagatcatcttttaaatctaccacttctgtgaagagtgtagatagcaatttctctagcacttcaaggaaggatgtctttgaagatacaagagaatttgttggagagttgaatatcacactggtcaaaggcaccaacttggccgttagagacatgctaacaagtgatccatatgttgttttaacgctcggagggcagttcaatcaacggttaaaaaaagtgatctgaatccggtatggaatgaagtgcttaagatatctgttcctcgaaattatggacctctaaaacttgaagtgtatgaccatgatatgttctcagctgatgatatcatgggtgaagcagagatagatctccagccaatgatcacagccgccatggcctttggagatacttcacgtcttggtgacatgcaaattgggaggtggttcatgaccaaagacaacgccctgatgaaagatagcacggtgaatgttgtggcaggtaaggtaaaacaggaggtgcacttaaagctacagaacgtagaatcaggtgagttggagttggagctagaatgggttccgatcctctagactaatgataactcccctgatctttgtctaaaaatctatactcaagatgcatcgatgtttccaagctgtccacttgatggtcttggacatttttgctggatggtttgaatttgttaaaaatgtcactgtagaatatcatggtgtaactgtcggttgtactcgcgcctttcacccccctcccggtaactggttatcatgccttgtaagcactcgctgtctcttgattgttgttgcattgtcccattgaaaggacctgtgtcttgtaagagatggcaattatagccagtgaactctttgtgctgatgccatgttggcgctgtagtagctaatcgggttgttggttctcctggagctttgcttagatgagtctagcccgttcagttttttcgttggagaagctgctgcaccggttactgacaaatgacattttgctgacactttgttctt

SEQ ID NO: 55801 - DNA, 3565 bp, Zea Mays
aataggtatatccccggaaaaggttaagatctgggatgatcgtaaacaagtgccattatccatttttaagccccatgatggtcaagctgtttattcagttgcttttcttacagcacctgaacgaccaaatcatataaatctaattacagcgggtcttctgaatcgagaagttaaaatttgggcttctactaatgaggatggctggttgttgccaagtgattctgagacttggaagtgtactcagacgttggaacttgttagttctctggaacctagagtcgaagaggcatttttcaaccaggttgcggtgctgccccaagcgagcctgattttgcttgcaaatgctaaaaagaacgctatttatgccgtgcatgttgagtatggcccagatcctgcttctactcgcttagactacatagcagatttcacagttgcaatgcctatattaagccttacaggaacacatgatagccaacctgatagtgaacaagttgttcaagtctattgtgttcaaactatggccattcagcaatatggtctagagctaccactctgtttgcctcctacagctgatagtactgggtttggaagagatcctgctatttctcgtgtttacgaggcacctctggaaatggcaggaacagagtcatctacaggaactagtttcacagattcttactctgtcagttctttgagtaaaccatcaactgttgaccagtctgcagagcttgatctgaaaccatcagctccaccgcttgcatactcagaaggtgatggttccgtgcctcttccatctgcacctcctgcaccgaagatggaggctcctggatcaggaccagcacctggaggtcgtggtatagatcaatcagcttttgactatacaacaaacagaaatgtggagcgtgatgttttgaaaagacaagatacacccatgcccattagaaaggatatcttaggtaaagatgagccaagagatggtcacagtgatgttccaatgcttcccaatccccgtttgatgtttcaggttggagggaatgctacgcatttggttactccatctgaaattatatcgggcactctctcgtcttctgaaaacaatgatgcttccaaatctgatggaggaaaaagtcaagatgtttccagcagaagctctcaggttccagaagtggaaccaaagcatattgatgagagtaaacaagatcaaaatttgggactcgaagctgtcaaagaaactcagattgtctgtgagaatatggagaaaactcggagttccttggaccaaactgttgaaatgatcagtgagcgctcagttacaactgataagtacagcgtggaagaatcacagtcatcatctgatcgaccgacatcagaccagactggtatcagtgaaaatgttctgaagaagtttgtggaaatgcctgagaaaattgattattcctctgcttctagggagcaatcatcttcatttacgaaagaggagaaagttttgcatcctcaaacatctggtcaaccgtcacctcctgtgagtgctttcaattcaactgagtcacatgagcctttgagctccacatacctaccaatcacagtcagctcctacccagaagttggtgccacacaagggatgctgcaacagctcatggggaggcaggaggacatggaaaagcagctgagtactgtggttcctgcatccatcgcaaaggagggcaaaagacttgagacatcattagggcgcactgtagagaaatcgatcaaagctaatattgatgcattttgggctcgtctccaggaggaaaacactaagcgtgaaaaggctgatagagatcgaatgcagcaatttgttactctcattacaagctcaataaataaggacttaccttctaatctggagaagtcacttaagaaagaaatttcttcacttgggcctgttgttgctcgtgcaattacgcctattattgagaagtgtctaacctctgctgtttctgattcagttcagaaagggttgggtgacaagttgttcaatcagctggaaaagtctattactggaaaacttgaagctacacttgccaggcaaatccaaatccagttccatacatctggaaaacaggctcttcaggatgctttacgtactagctttgaatcattgcttgttccagcgtttgagcaagcatgcaagacaatgtttgagcaaatagatggtgcatttcaaaagggaatgtctgagcactccaccgctattcagcatcaagtcgagtcttcacatagtccgttagcgctaactctaaaagaaatcatcaattctgcatcatccatcacccagagtttttcatcggagttacttgatggcaatcgcaagctactggcacttgttacttctgggaatgccatggcacataataccagtgctttgcagcccattaatggtcctatgggtggatcccaggaggttgaggctccgttagatcctatgaaagagctgggcagactgatatctgaacgcaagtttgacgaagcatttacaatggctcttcaaaggagtgatgtttccatagtatcgtggctatgctcccaggtatcttccttgcaccaaattgatcatctaagatgcaccctagttctccatattagaacaaccttgttttggccttgtgatgcttataccccccttgtacaggttgatttgcgggcattatgtgcaatggtcccagtacctcttaaccagggggtcctcctggccttattgcagcagctagcaattgacattcacaatgagacatcacgaaaggttcaatggatgacagatgttgccatggcaatcaacccagcagaccagatgatcgcggttcatgtgcggcctatctttgagcaagtctacaaccaactggcccaccagcggacactccctaccatgaccgcagcagatggcaccagcatccgtgtgatcatgcatgtaattaactcagttctgcttagctacaagtgattgtagctacgcaactgtgggaagtatggcctattctatcttgtatagagaaattttgaatggccacaacccacaacccaggagacattgtggccgagaatacttgcaagagggcggaggttactccttggtgtaaatttggcttctgtcgctcgtgaattcggactattgtagtaattgggcatcatcgaattcttcatttgacatgatcaccgggtcttgtatttccgtcataccttaatggaaatgggtcgaatatatcagttggactttgtagcacggacagtttggaaccaatagcagctgcttggtggtggttgttccacaaaattttgaagtccaatgtagacattgtcgggtcgcaactgcaaaattggaagtaatctgtttggctactcgacgacgatggatttgacatgttcttgtgccgatggagtcatgtgacgatgtggaattagcgtgcttttgagggatttgaggcaacaactcggctttcgatcaggattattcaggagttgccaagtgcccactgggtcaagctgctaaaatgcggatcggtatattgtattttttctcgaatttttg

SEQ ID NO: 55802 - DNA, 3508 bp, Zea Mays
tggaacagtgcagaaaccaactagccactatattgtataaataggtatatccccggaaaaggttaagatctgggatgatcgtaaacaagtgccattatccatttttaagccccatgatggtcaagctgtttattcagttgcttttcttacagcacctgaacgaccaaatcatataaatctaattacagcgggtcttctgaatcgagaagttaaaatttgggcttctactaatgaggatggctggttgttgccaagtgattctgagacttggaagtgtactcagacgttggaacttgttagttctctggaacctagagtcgaagaggcatttttcaaccaggttgcggtgctgccccaagcgagcctgattttgcttgcaaatgctaaaaagaacgctatttatgccgtgcatgttgagtatggcccagatcctgcttctactcgcttagactacatagcagatttcacagttgcaatgcctatattaagccttacaggaacacatgatagccaacctgatagtgaacaagttgttcaagtctattgtgttcaaactatggccattcagcaatatggtctagagctaccactctgtttgcctcctacagctgatagtactgggtttggaagagatcctgctatttctcgtgtttacgaggcacctctggaaatggcaggaacagagtcatctacaggaactagtttcacagattcttactctgtcagttctttgagtaaaccatcaactgttgaccagtctgcagagcttgatctgaaaccatcagctccaccgcttgcatactcagaaggtgatggttccgtgcctcttccatctgcacctcctgcaccgaagatggaggctcctggatcaggaccagcacctggaggtcgtggtatagatcaatcagcttttgactatacaacaaacagaaatgtggagcgtgatgttttgaaaagacaagatacacccatgcccattagaaaggatatcttaggtaaagatgagccaagagatggtcacagtgatgttccaatgcttcccaatccccgtttgatgtttcaggttggagggaatgctacgcatttggttactccatctgaaattatatcgggcactctctcgtcttctgaaaacaatgatgcttccaaatctgatggaggaaaaagtcaagatgtttccagcagaagctctcaggttccagaagtggaaccaaagcatattgatgagagtaaacaagatcaaaatttgggactcgaagctgtcaaagaaactcagattgtctgtgagaatatggagaaaactcggagttccttggaccaaactgttgaaatgatcagtgagcgctcagttacaactgataagtacagcgtggaagaatcacagtcatcatctgatcgaccgacatcagaccagactggtatcagtgaaaatgttctgaagaagtttgtggaaatgcctgagaaaattgattattcctctgcttctagggagcaatcatcttcatttacgaaagaggagaaagttttgcatcctcaaacatctggtcaaccgtcacctcctgtgagtgctttcaattcaactgagtcacatgagcctttgagctccacatacctaccaatcacagtcagctcctacccagaagttggtgccacacaagggatgctgcaacagctcatggggaggcaggaggacatggaaaagcagctgagtactgtggttcctgcatccatcgcaaaggagggcaaaagacttgagacatcattagggcgcactgtagagaaatcgatcaaagctaatattgatgcattttgggctcgtctccaggaggaaaacactaagcgtgaaaaggctgatagagatcgaatgcagcaatttgttactctcattacaagctcaataaataaggacttaccttctaatctggagaagtcacttaagaaagaaatttcttcacttgggcctgttgttgctcgtgcaattacgcctattattgagaagtgtctaacctctgctgtttctgattcagttcagaaagggttgggtgacaagttgttcaatcagctggaaaagtctattactggaaaacttgaagctacacttgccaggcaaatccaaatccagttccatacatctggaaaacaggctcttcaggatgctttacgtactagctttgaatcattgcttgttccagcgtttgagcaagcatgcaagacaatgtttgagcaaatagatggtgcatttcaaaagggaatgtctgagcactccaccgctattcagcatcaagtcgagtcttcacatagtccgttagcgctaactctaaaagaaatcatcaattctgcatcatccatcacccagagtttttcatcggagttacttgatggcaatcgcaagctactggcacttgttacttctgggaatgccatggcacataataccagtgctttgcagcccattaatggtcctatgggtggatcccaggaggtggttgttgaggctccgttagatcctatgaaagagctgggcagactgatatctgaacgcaagtttgacgaagcatttacaatggctcttcaaaggagtgatgtttccatagtatcgtggctatgctcccaggttgatttgcgggcattatgtgcaatggtcccagtacctcttaaccagggggtcctcctggccttattgcagcagctagcaattgacattcacaatgagacatcacgaaaggttcaatggatgacagatgttgccatggcaatcaacccagcagaccagatgatcgcggttcatgtgcggcctatctttgagcaagtctacaaccaactggcccaccagcggacactccctaccatgaccgcagcagatggcaccagcatccgtgtgatcatgcatgtaattaactcagttctgcttagctacaagtgattgtagctacgcaactgtgggaagtatggcctattctatcttgtatagagaaattttgaatggccacaacccacaacccaggagacattgtggccgagaatacttgcaagagggcggaggttactccttggtgtaaatttggcttctgtcgctcgtgaattcggactattgtagtaattgggcatcatcgaattcttcatttgacatgatcaccgggtcttgtatttccgtcataccttaatggaaatgggtcgaatatatcagttggactttgtagcacggacagtttggaaccaatagcagctgcttggtggtggttgttccacaaaattttgaagtccaatgtagacattgtcgggtcgcaactgcaaaattggaagtaatctgtttggctactcgacgacgatggatttgacatgttcttgtgccgatggagtcatgtgacgatgtggaattagcgtgcttttgagggatttgaggcaacaactcggctttcgatcaggattattcaggagttgccaagtgcccactgggtcaagctgctaaaatgcggatcggtatattgtattttttctcgaatttttg

SEQ ID NO: 55803 - DNA, 4728 bp, Zea Mays
ctgcccttccacgcacctccacttcgtcctccactcctcccccttcccctgttccccagtccagatctactccactgccacctcctctccctttccctctcctctcccgagcctgcctctcatggcgtctccaagcggaaaccctaaccctaatcccaatacaccattcgagatcggaaagctcttcaggccaccgaatcctatgaccaccgcgacccccaaccccatcttccccggcgtcgccggaggcccgacgggctcgccgccgccgtccggtccctactcctaccctccggtgaccccgcccttccaccgcggaccctacatccactaccagcaggatccccacgccatggcccgtcccgttgtctccttccccatgccaaacccaaacctcaaccccaatcccaacccgaacgctaaccccaacgccgcctccccgggccccaaccctggcgcgcgcctcatgcagctgctcgggaactccgggccgacccagctcgaaaccgccgtctccatgcccccgcccacgtcggagttcgcgcaactgcagcagctaccagcgatgccatccgcgccgccggccaggatgctgagcagcaccagcagcaaggtgcccaggggacggttacttggcaccggggaacgtgcggtgcacgacgttgactccaggctgcctggggaagcgcagccaccgcagctggaggtaacaccgattaccaagtacacatcggatccggggctcgtgctgggcagacagatcgctgtgaaccggacgtacatcgtgtatgggctcaagctcggtaacatccgtgtgctgaacatcaacaccgcactccgcgcgctcctccgtggtcacacacagagggtgacagacatggctttctttgctgaggatgtccatcgtttggcaagtgcgagcatagatggacggatatatgtgtggagaatcgatgaaggacctgatgaggaaaataaaccacaaattactgggaagattgaaatcgccatccagattgtaggcgaggctgaagcttaccatccaaggatatgttggcactcgcataagcaagagattctatttgttggaattgggaactgtgtcttaagaatagatacaactaaagtgggtagaggaaaagacttcactgttgaagaccctgttaaatgtcatcttgaaaagcttgttgatggtgttcgcttagttggtaagcacgatggtgatgtgactgatttgtccatatctcaatggatgagcacccgcctggcctctggatccaaggatggctcggttaagatctgggatgatcgtaaacaagtgccattatccatttttaagccccatgatggtcaagctgtttattcagttgcttttcttacagcacctgaacgaccaaatcatataaatctaattacagcgggtcttctgaatcgagaagttaaaatttgggcttctactaatgaggatggctggttgttgccaagtgattctgagacttggaagtgtactcagacgttggaacttgttagttctctggaacctagagtcgaagaggcatttttcaaccaggttgcggtgctgccccaagcgagcctgattttgcttgcaaatgctaaaaagaacgctatttatgccgtgcatgttgagtatggcccagatcctgcttctactcgcttagactacatagcagatttcacagttgcaatgcctatattaagccttacaggaacacatgatagccaacctgatagtgaacaagttgttcaagtctattgtgttcaaactatggccattcagcaatatggtctagagctaccactctgtttgcctcctacagctgatagtactgggtttggaagagatcctgctatttctcgtgtttacgaggcacctctggaaatggcaggaacagagtcatctacaggaactagtttcacagattcttactctgtcagttctttgagtaaaccatcaactgttgaccagtctgcagagcttgatctgaaaccatcagctccaccgcttgcatactcagaaggtgatggttccgtgcctcttccatctgcacctcctgcaccgaagatggaggctcctggatcaggaccagcacctggaggtcgtggtatagatcaatcagcttttgactatacaacaaacagaaatgtggagcgtgatgttttgaaaagacaagatacacccatgcccattagaaaggatatcttaggtaaagatgagccaagagatggtcacagtgatgttccaatgcttcccaatccccgtttgatgtttcaggttggagggaatgctacgcatttggttactccatctgaaattatatcgggcactctctcgtcttctgaaaacaatgatgcttccaaatctgatggaggaaaaagtcaagatgtttccagcagaagctctcaggttccagaagtggaaccaaagcatattgatgagagtaaacaagatcaaaatttgggactcgaagctgtcaaagaaactcagattgtctgtgagaatatggagaaaactcggagttccttggaccaaactgttgaaatgatcagtgagcgctcagttacaactgataagtacagcgtggaagaatcacagtcatcatctgatcgaccgacatcagaccagactggtatcagtgaaaatgttctgaagaagtttgtggaaatgcctgagaaaattgattattcctctgcttctagggagcaatcatcttcatttacgaaagaggagaaagttttgcatcctcaaacatctggtcaaccgtcacctcctgtgagtgctttcaattcaactgagtcacatgagcctttgagctccacatacctaccaatcacagtcagctcctacccagaagttggtgccacacaagggatgctgcaacagctcatggggaggcaggaggacatggaaaagcagctgagtactgtggttcctgcatccatcgcaaaggagggcaaaagacttgagacatcattagggcgcactgtagagaaatcgatcaaagctaatattgatgcattttgggctcgtctccaggaggaaaacactaagcgtgaaaaggctgatagagatcgaatgcagcaatttgttactctcattacaagctcaataaataaggacttaccttctaatctggagaagtcacttaagaaagaaatttcttcacttgggcctgttgttgctcgtgcaattacgcctattattgagaagtgtctaacctctgctgtttctgattcagttcagggttgggtgacaagttgttcaatcagctggaaaagtctattactggaaaacttgaagctacacttgccaggcaaatccaaatccagttccatacatctggaaaacaggctcttcaggatgctttacgtactagctttgaatcattgcttgttccagcgtttgagcaagcatgcaagacaatgtttgagcaaatagatggtgcatttcaaaagggaatgtctgagcactccaccgctattcagcatcaagtcgagtcttcacatagtccgttagcgctaactctaaaagaaatcatcaattctgcatcatccatcacccagagtttttcatcggagttacttgatggcaatcgcaagctactggcacttgttacttctgggaatgccatggcacataataccagtgctttgcagcccattaatggtcctatgggtggatcccaggaggttgaggctccgttagatcctatgaaagagctgggcagactgatatctgaacgcaagtttgacgaagcatttacaatggctcttcaaaggagtgatgtttccatagtatcgtggctatgctcccaggttgatttgcgggcattatgtgcaatggtcccagtacctcttaaccagggggtcctcctggccttattgcagcagctagcaattgacattcacaatgagacatcacgaaaggttcaatggatgacagatgttgccatggcaatcaacccagcagaccagatgatcgcggttcatgtgcggcctatctttgagcaagtctacaaccaactggcccaccagcggacactccctaccatgaccgcagcagatggcaccagcatccgtgtgatcatgcatgtaattaactcagttctgcttagctacaagtgattgtagctacgcaactgtgggaagtatggcctattctatcttgtatagagaaattttgaatggccacaacccacaacccaggagacattgtggccgagaatacttgcaagagggcggaggttactccttggtgtaaatttggcttctgtcgctcgtgaattcggactattgtagtaattgggcatcatcgaattcttcatttgacatgatcaccgggtcttgtatttccgtcataccttaatggaaatgggtcgaatatatcagttggactttgtagcacggacagtttggaaccaatagcagctgcttggtggtggttgttccacaaaattttgaagtccaatgtagacattgtcgggtcgcaactgcaaaattggaagtaatctgtttggctactcgacgacgatggatttgacatgttcttgtgccgatggagtcatgtgacgatgtggaattagcgtgcttttgagggatttgaggcaacaactcggctttcgatcaggattattcaggagttgccaagtgcccactgggtcaagctgctaaaatgcggatcggtatattgtattttttctcgaatttttg

SEQ ID NO: 55804 - DNA, 750 bp, Zea Mays
gaagaatccaaacagaacgtttcaagcaacaactgctccgttcgtgggaaaagcgaatggcttccatgccatctttctccgcacaaaattcctccgagaggccgcaacagctacgacgaggagaagacgcagcgcaaggaaaggagcataaatcgtagtatctcagacgagtaaacgacaaggcacaagaaggttattctggcgcaaaaatagttacaagggttcagacgttcagtgtccagatacgtgtgattctcctgctcatcgccaacgctatatgcgacctaacaagaatacaaatttacattcacgacggctacttttttttttaccaatgttgcaaccatctacaaacatacacacggccgaagaacagtctcctggcaagcgcaaataatacgtacgtattacagaacgaaaaccgagaggtataagcataccctgttaggctgttacccagactgtacaacctggcagctcactgccgaacagccgtatatagccgacgcaggtcctagcgcacagcggtacagctggaggacgacgagcgcccatccatcactgcatctgttcgacgcgcagatggcacagtgcgatccaagccactcatccgcagagaaactgaataatggatatgagtccggcaagtctgcatctttcttttttgtatttttttttcattcatcctaacacttggtatctcttcttaacgtttttcagttgcagattgcgaggctgacactggacgac

SEQ ID NO: 55805 - DNA, 2583 bp, Zea Mays
cgccccacgagccactgtagcacgtcgccctcctcggggctccacgggcccgtgatcctgttgagctccgcctcggctcccatctcctgtttggttcggtacctcgacggatgaagaagacaaaaacacaacgcgcaccagctgcatcccatggtggccactgcagtcatggcgtggcctccctatctccacgtcgtagctactgctaacacagccaccacatgacttccagaaggtgaaggcggatctcgaccttgctcacctgttagaaagccactcgcctagctccacttgtcccagctgctaggaccggcgacctgctaggtgacctgcaacttctcaaccaaggcgagcacagtcacctttgggccacagcatgccctggactctaccaccaccgtgaaggcacgctacaacagcaatggaatcgtcgatgccctcatccagcacgagtggagacccaagtcaatcttcaccctttccaccggggtcgaagtcaaaatgttcaacgtgtttgctatcttgaagccccccaagattgggttgtcactgcctcactggtcctcaagccctgatgataatgtcgatcccctttagtcctagcatagtcaggttttcgtatcaatacttgaggtcgagtgaaataattctgaaccttgggtctctttctgtcatcctgaaagttcagtcttcctagctggttttagatgttgagaactgaatctacaaatgacattgtgatcaaatacatcacttcgttgacatcttgtctaaagcttggaatcttaaccttcataattatattttcaatgttttaaagtttggttcctccaatatatcatttattcatacggttgcatgctatgaatatagaatcacctcaagtcatgttatgggtggtaaaatacatctcttgagcaatgatgatgattcaaattttatttcacacataaatagagttgtgcatgacattacatggctccaaaatagtggacgaagctaaataaatggccaatgtgcctgcaaatgatgggtggttctgaatatattaaatgctcaatggtactccctccgtttctttttatttgtcgctggatagtgtaaaattgcactatccagcgacaaataaaaagaaacggagggagtactcctattagataatcctaatcctatcagcacgacaagtgcttccatagcttatgatgttgaattttgcagctccatggcagcagcagcagcccctaccagttgaccattctgacgcgccatctcctagcattatgctttcttgtagcttcatttggaaaagacagattgctcaaggaatttcaaatttagttcaaatgtgaactagatcctagggaataacatttcatgtttagctgcaccacaccagggtgtcatcaatcattcaaccccattctacggatgtaaattgtgtaaatcctttttcttcgagacttttgagaatggtctattttgttacaagcttctcttagatagctaaaagatggatttgaatatggccgaattttgctgctccatggcagcagcagcccctgccagttgaccattctgacgcgccatctcctagcattatgctttcttgtagcttcatttggaaaaggcagattgctggaatttcaaatttagttcaaatgtgaactagatcctagggaataacatttcatgtttagctgcaccacaccagggtgtcatcaatcattcagccccattctacagatgtaaattgtgcaaatcctttttcttcgagacttttgagaatggtctgttttgttacaagcttctcttagatagctgaaagatggatttgaatatggtcgtggatagtaaaattctgtaacaacatttttgaaaattgttttaaaacttcacataaatccagtttgatcccttaaatgttaggctacacttttaacagagttgtcgctcatttctagaagaaaaaaaggatagatttagtttctagataatctcacatgatttatggagttagagttttcttctatgatgatttgagttatccatgtctcgcattgggatctcgtggcggatgatgatggagctgtgatggtctctgcgtggtttgtgttgttggagatagcaatatagcatcaagggggctacgacagagggcgtggtcatcacggaggtgctcgggtcagttgggcgcgtgctcgacgggcctcccgagctggtgctacagccgctccgccttgccgtcgagatcaaatcagagaaaggtggtctggctcctaggtacgctcatccatatgatcaaaccttctacactgtgtaggtagaggtattagatttgggatggtttgacccatttattttagaggatcttcactccaattttgagcttgatatgtcactatttgtaaaaaagccacagttgctcttctactcaagggttctacttgatctgtgggtggctagagtagcagtgcttcgagtgtgttctctaaattggttgaatcactagcagaagatttgttgtgtttttcctccgttctatttctgcaattttgcatgaaaatgatatgtcatggacatttt

SEQ ID NO: 55806 - DNA, 6606 bp, Zea Mays
ctctcatctgcgagtgaacactttcccctgtcccaaatcagctcactgcaccaacaatcgcatcttctcaggtttgtccccccatctagatctgttgttctttaacaacgtgtttggtttgccggacatcggcgtccggaatcatccggtcctatatctgaaactaatatatttgtttggtttacatcacagatctgtgtcgtccgacatcagatgctccatgtagcgttcgttagaagtgcaattatgcagcaccggttcactcccagaaaaacaacggacgacctcatgcaggagcagctcatgccggatcaactgaattcgcaaaccaaacacgtcctaacattttcttgtatttttttgcttcgattatactaatccttcggtcttgttgcaaggtcatctccccctgacctagatctgctgcctgacctagattcgctaatacctcatacacaggccagtctttacctcatactcctctatttctaagtacatatctgcttatttgtacagtcttgatttcctgttgtgtttagttgttggcctgatcgtgtgtagttaagtacatatctgtttatttttttctgtttcctgattatgtttagttgtaaaatagtgtgttttttctgtttgcatccagatatcttgtttttttgttcaattacttcgtgcagcacccttgttttgcattggaacctccaatcaaataattgacgatactcactgatgtcaaaattcactagctttcactgtaagataactactattcataagtagtcagttatatatgtttgtttttttacaactattcatatgtgcatccatgagaatcataaggccagatggatgaaaaaaatcgacaagacaactaagctacataataacatgttcagtcatataaaagattttttttgcttaacacaattatataaaaaatgtatatgttacatccatctacctgaatcctcccatgtcaggttcccttgatcctagctaagtattggtaatctctatgaattgtactagtatgaccagaaacatattgccaagtgtgcactgaatgtacataagatattttcggtaagtaggaatctggaactggcattttgaagtctgtaagtctcaaatgcaaagttcccttggtcctagacaatctctacatctcaatcagacaaataataatgtctggagtctggacaaattgtactcctatagctacaaccatgagggtactcagaagtccatgattttatgcttgttaaatatatatctgcttgttaagtaaatgcttaactgaaccttgccatctttcaatattagtatagattaatatatatattagtgtatatctgcatgttaactgacttaactgaactttgccatctttcaatatttgtgatgtgcttatttgtctattatattaagtatatatctcatatctgcttgtttagttaagtacatgcttatttgtgatgcttgttaactgaactttgccatctttcaatattagtgatgtgcttatttgtctattatattatgtatatatctgcttgtttagtatatattagtatatatctgcttgttaactgacttaactgaatttttcagtggtgtgcttaactgaactttaacatgttttgccatgtttctgcttgtttaatataatggattatgcaactagcataatctatctattatattaagtagctagttgttcctcttttcttctcccctcttaccttcatctgttcctgttttcctcttaccttacaacaatcttaccttttgttcctcttttcttctctccctctttagcctcttgtcttgtttaatttaatggattaatgcattatattatgcagttacctccataactatcttctttttatactatgcaggtagttaatgtattatattatgctgctacctccataactctcatctttttattctgaccatttttcagtgatgaaattatgtaaagtctaagcttaggaccagttttcagtgatgttttctgtaaatttgagcagaccacaatttttcagtgatgtttttttttcaatctgagcagaccacaatttttcagtgatgttttttggttcaatctgagcagagtacaatttttctgtgatgttaccaagccagtttggaggaacatcattagatgtagcaaccctggcttgttttttttcaatctgagcagagtacaatttttttctcattcaacaattcccttatcttatttattcagatatgttgggtccaaatcgtcatttgctgaagttgagagcatcggcattggttgttgctatatctgaaattggtcacaaaatagggccatggaattcaaaagaatgccttgaaattaaaaaccatagaatcataaaaatagaaccagtcatgttctacataataaaaaaatgatgctgaaaaccatttgtttcattctctaaagcaacaactgactttcaaattaaccaacttataagttatataaataactaatcaaatgttgctccatgtatacctgtagtaacatgcaaaacctggtgcgtgtcagtcagaaccatgttagcttatcattcaagtaggttgtgaggttagcattagaacacgcgtctgccaaatcaccataaatcatgccatcatgtgtgaattgtaactgtttagtatacactctaatgtgacatagttccaaagattgatggactaacgtcaaaagtgatactctcgccttggtagttcgtagctagcttgggaaccatgggtatagaaaaacaattcaaaatatcttgatatcaatctgctgatttattgagtccctcactggtagtcgttttttttcatcccctatggatccttcaaaaattctaatttggaatgcgcgaggccttaatgggtctgctagacaggatgatgtacacactttggtggattctgctcgagttgatgtggtttgtcttcaagaaactaaaatggtggatgtttctcggtttcttttattgcggatgctaggaccagcttttgacaattttgtattcctaccttatgttggtgctagtggtggcatcttggtggcttggaaaaatagcatcggtgtttgtgctggcagtagggtggatgaacatagcgtctctgtgaactttcattctagcaccagctcaccatggtggcttacatgtgtgtatggtccgcaagggaaccatgagaagattcagtttttgcaatctcttagagaaattagagctctctgtactgggccgtggcttgtgctcggggatttcaatctgatattaagggaggaagagaagaataacaataacttagaccgtgccatgatgggcaggttcaggaaatgggcaaatgacttggctcttaatgaaattccattgattggccggaaatatacatggtcgaatggacactctaatcctacactggtcaaattggatagggttttctgcacaacagattgggaggaacaattttcagattctcttctccagagctcagccacggatgactccgaccattgccctttgctgcttgggtttcatgatttcagcagaggaaaagggaagtttcacttccaagcattttggcctaggatggagggtactcatgatgtggtagctcaatcttgggccgtgccatgatgggcaggttcaggaaatggacaaatgacttggctcttaatgaaattccgttgattggccggaaatatacatggtcgaatggacactctaatcctaccctggtcaaattggatagggttttctgcacaacagattgggaggaacaattttcagattctcttccccagagctcagccacggatgactccgaccattgccctttgctgcttgggtttcatgatttcagaggaaaagggaggtttcacttccaagcattttggcctaggatggagggatttcatgatgtggtagctcaatcttgggcgcctgttccagcagggccttgcccactcatcactttggccaagaaattaaagacaacggctaggagtctgcagagctggaatgacaaaaaagttgggaggattaagctgtagcttgagatggctagggagctcctacatcaattagaggtcgcgcaggacaatcgttcctcatctcctggtgaattgtggctccgaaacatgctcaagaagcactccattgccctgtcttctatctctcgtaccatggcaaggttgaaatcgcggattgggtggttcaaagaaggtgatgccaatacctctctttttcttgcacaaacaaggttcaggaagaaaaagaatttcattgccgcaatacactcagaggatgggcaaatctggactgcccatgaaggaaaggcagcagccttctttaacttttatcaagggctacttggaactgcagaagtaagggatgttaccgttgatctggaagctctagggatgccatcttatgaccttgatgcccttgatgcgcctgtctcggaggaggaagtctgggatacaattaaggcccttccttcggacaaatccccaggtcccgacgggttcactggtagattttacaaaagttgttggtcggtaatcatggctgatttcatggcggcagttcactgcatttgggctagaaatttcagaaacttgggtccgctgaattcagcttttattacacttctgcccaaggtggagggggccactagtgtgagagaattccgcccaatcagtctggttcatagtttcgcgaagttggtgactaaattgttggctaacaggttagcaggccggctgcaaaatatggtttcccccaatcaaaccgcttttattaagaaacggtttattcttgacaactttatgctagtccagcagacgaccagattcttacattgtcagaagcaggctcgtatccttctcaagctagacatttcaaaggcttttgactcggtatcgtgggccttccttctcaaggtcttgaaaaaacttggttttggacagatctggtgtgatataataagcgggttgttagctacctcttctaccaagattttactgaatggtctgcccagggaatgtattgggcatcaacgcgggctgaggcagggtgatcctctatcacctatgttgtttattcttgtaatggatgtcttgaatctgctcgtgcagcgagcctctggggaagggttttttcaacctctctcttcaaggaatatgcagcaccgtatctcactgtacgcggatgacacagtgttatttctaagtcctactgccccggacatcagtgtggttatggatattcttcatctatttggctcagcttcaggtctaaggactaatatccagaagagtagtgtgttcccaatctgctgtggagaagaagaggtgaattgtttataggacttgctgccatgtaatatttcagattttccctgtaagtacctcggtttgcctgtctcccaagaaactctcaagggatcaggttcaggccattgttgatagagtggccagccttctgccaggatggaaagctgagcttatgaccagggctggtagagctattcatgtgcagttcgtcatgacggcaaagatgatttatgcagctttggcacttgaccttcctgtatgggccatcaaagcaatcgataaactgaggaagggcttcctctggaggggcaggaaagagttctgtggtggtcattgcctcttggcttggcctaaggttacccgtcccaaggagctgggtggtcttgggattagtgagttaaagagcctctgttgggctctgagagctcgttggccatggctgcagaaaacagatcccagtaggccttggacggacttccccactcatgtttgtaaggtggtacaaaatctgattgctgcagccgttattactaagctcggtgatggagccaatacccttttttggaaggacagatggttggatgggagatgtattaaggacatagctcctgcaatgtttgatatggtgcccttgcgtcttgccaacaaacggttggtcaaagatgctctccctaatttccattggatctccgatgtgaatggggcaatttcagtcagagtcattgctgaattcctggaactttgtgaagtgcttgatgcagttgtgcttcagcctggaataagggatcgacatatatggaaattcagtgcttcaggggattatacaactagttctgcttataaagctctcttccttggttcagttcaattcgaaccagcagagcgtgtgtggaaatcttgggctcctgggaagtgcaagttctttatctggcttgtggaacataataggtgctggactgctgacagcatggtttaaaaggcggctaggcggaactaggcgcccagccaccgcctgaccgcctaggcgacttaggcgggcgcctaggcaacgccttagtagatgttacaaacagctgtgagctgttacaaaataccaagcaaccaaacagctgttacagctcataaactagaaatcatcacaaattcacaatagcataataatggatatgaaatagccacaaagtagtttctaaaggaacaacaacaagtcacaaaatttaaaacaacacaataccaaatgtcca

SEQ ID NO: 55807 - DNA, 1159 bp, Zea Mays
ctatttcaaaccaagtcataggtgtattgaaagggaattggagtcttcggcaaagacaaaggcttccactacgtaactcatccttcgccgtcgctccaagcaactctccgttctaagggggagaaaacatgagcaccaaggacttcttctttgggggcagatgggtttatctgaggagcagcagaagcaagctctcgagcttcggagcatgacaaatggtggcaaagaatcccttgaagaaaccgaaacagacggtgcttcttgtaaccctgcagcaactggtggatgctgccaaggcaatggtggcttcactcgagctttggagcagcagaagcaagctctcgagcttcggagcatgacaaatggtggcaaagaatcccttgaagaaaccgaaacagacggtgcttcttgtaaccctgcagcaactggtggatgctgccaaggcaatggtagcttcacttgctgccatcctgacctgccaaaggaaaaacgggacaagagcatcgcaattgagcagaaccctaagagctgtgaggagaatggcaaggaggggggtggtgctggcagcaagaaggggaattcaaagacttgcccgatgcccacctggtttgagacctgggagagagctgacacctatgctgctcttgctgttgtcgcagctgccgcagctgtgtttatctctttcagaatctacaagaacctcaactgaagagcttgagagatctttgaagaggtgcccgaaacaagtctaggtgaatcagcgtactggtggtaaaacaatccgggacgagaataatctttacctgtgtatagtaatgtgaggtttagaacctcaaagtagcttatctggagatggtgataaaaaggtgttgtggctacggtgttttcgcgtgtgaacgtccactgctatcgaagtttggatgccttagctgctggtaatcgtaaggcatcaagtaagcaacattcactgtgatgatgttgtcttttgtttgggttttggatgttctggagattctaggttttgaaacaatatcaggttgattgaaaaacataaacatctggaaaaggttaacgcctttcttgtgacatttgaaaatttgaacttcctcgtttatctgcaacctgcgcgcgcatgtttctatggtgaacccggcgagac

SEQ ID NO: 55808 - DNA, 1449 bp, Zea Mays
ataggaaacacttcgtactattggactctgcgactctagcatcaaattcaccatctgtgaaggagaagatggcactgaatcatcaaatggagatgtgttgatctttccagatatgatcagatacaaagggctgacccattttgacgtcgacaactttgttgaagaagtgtttgtgaaggatattgactggcttcctggatctcctgagcctataagtggttcctatgttttcgtttgctcccatcaaagaagggatataaggtggctgtcagtgcatgctcacacgtgggaggtcataagtatgcaggaaatgtcatcattttcagttctgatgccaagggagaagtggttggtcattggtatggttatgttgtccccgacgatgtgcctgttttgctgcataaacatattggacaaggagaagttgtggaccgtctatggagggggcagatgggtttatctgaggagcagcagaagcaagctctcgagcttcggagcatgacaaatggtggcaaagaatcccttgaagaaaccgaaacagacggtgcttcttgtaaccctgcagcaactggtggatgctgccaaggcaatggtggcttcactcgagctttggagcagcagaagcaagctctcgagcttcggagcatgacaaatggtggcaaagaatcccttgaagaaaccgaaacagacggtgcttcttgtaaccctgcagcaactggtggatgctgccaaggcaatggtagcttcacttgctgccatcctgacctgccaaaggaaaaacgggacaagagcatcgcaattgagcagaaccctaagagctgtgaggagaatggcaaggaggggggtggtgctggcagcaagaaggggaattcaaagacttgcccgatgcccacctggtttgagacctgggagagagctgacacctatgctgctcttgctgttgtcgcagctgccgcagctgtgtttatctctttcagaatctacaagaacctcaactgaagagcttgagagatctttgaagaggtgcccgaaacaagtctaggtgaatcagcgtactggtggtaaaacaatccgggacgagaataatctttacctgtgtatagtaatgtgaggtttagaacctcaaagtagcttatctggagatggtgataaaaaggtgttgtggctacggtgttttcgcgtgtgaacgtccactgctatcgaagtttggatgccttagctgctggtaatcgtaaggcatcaagtaagcaacattcactgtgatgatgttgtcttttgtttgggttttggatgttctggagattctaggttttgaaacaatatcaggttgattgaaaaacataaacatctggaaaaggttaacgcctttcttgtgacatttgaaaatttgaacttcctcgtttatctgcaacctgcgcgcgcatgtttctatggtgaacccggcgagac

SEQ ID NO: 55809 - DNA, 860 bp, Zea Mays
taaaattcgacttgccctcaagtcctcctcaatcccacatggttcagcagctttgtaaaatgcatccgatgtgcaccacccaaaacagtccaaatttgaagggatcatcgtgtcctgtatgtgattgaaagtctgaatttgccacggtatctgcagtatcttgtgttggcaatgtaacaattctccattagccacgcgaacctgcaatggagcaaccaccagatccacatgctggaaccatgcacggaacttctcatgcaagaaggtatatggactaccactatcaatcaatatcagaactgaatgattctgaagttggccttgaaatttcaaagtctgagaaacatttgtacctccccaagcagccagagatactaacataaacagctgctctgtagatgaatcttctggactctgtccttcggttttagttggatcaggcaccaagagctcccaaacttcttccaatgcatgaagatgagcatcaacaatgcatttgtaggcgtgactccatttctcatcacatttttcccagagacctcgagctcgacgaaatcggcacagcgcaaccaatttatcttcagctgaagataccttgtgggtgtcagatgattgatcccatttaggcgcacccgactggaagcaatctaccgacagtgcattgtctaaaaactcaaagcaatgcttccaatgtatcacactgagttggcaatgggtaaacatgctctttctcatgtttactgagcagtggggcaccaagggcagtgattgcaacaagtgcctccgaattataataccagagaaggatggccagggaattggcctgcgttgagtggcatgcatcccgaactgaataggtg

SEQ ID NO: 55810 - DNA, 1214 bp, Zea Mays
aatccagcagcgtcctctaaatttagatgaccgtttagaggacgctgctggagagcgtagagaaccgtttgttcctctatatttagagtataggaggctttaggggctcttgctggagccagccttagactctctccagcaacgaactgtaaaacaacatgtactctaaatttagaggatattgtgctcctttatccgtccaataaggaaccctaaaaggcactctaaaatttagagtctctgtttgagccgctacatgtagagaaacattgttcgtcctctatcccgcaaccagagcgctacgacctacacctacgaacaacatgcatggtcctcgcctgcaacggctcgacgaagcttgaccgctgaggacgaccaccagagcggtaggcgctctgctgcggtggcgcagagtcgtttggcgatggcggcgccgtggagaagctcggcgacagctctgtggatctaagatggggaggacttctatccactggcgcggtgtcgctcggctatggacgcggagtcacttgtcggcggtgtggagctgggtagtggtgccctggatctttgctcgacggtgtggaggagctggcgcggtgccgcttggatgtggacacggagtcgctcgtcaaagtccctggacgagtggacgagtgttgtacgaagaacaaaaatccaatttcccattcgaatgtgtgaagcagtccaaacatccgactttaatccgaagcgaacagcccagagcagtatagaatgcaagagaaacagcagatacagagaaggaatgtagtaccttcacagctcgccatggtatatgagcagcagcagaatgtttatggaattggaggattcggtaactgtttgccaatttcatctcagatatctctttcatcaatggaggtgggcatagtacattagtaccagacaatgccataaaaagtatatcaaacctcaatattctaacaactggtgaggtggacctattaccagtccactggtttcagatgccagtgaatttgagccccagggatagagcagccaggatcctcaagcacaaaaagaaaaggcaagaaagtttgataagaccataaggtatgcaacaagaaggccctggatcaaggtcgcttcgccaaaatatcagaatagatcttaaaggggatcagatgtcctcaccaccagatctacccaatagtagctacggtaccattccatat

SEQ ID NO: 55811 - DNA, 2863 bp, Zea Mays
ctcccacttccctagctatttgtccaactgcccatcctttggagaattcttttgtggcaagaatcgccaatcagttgaaagttgccgttgtcagtcgtgatctgtcatagtctttgctccactgcaacacacccacactccaataaagctggtgtctttcttgagtcccaagaacgcaaaaggaaggaagggtgagaggggagagagtaaggaggaattttcttgcctcctttgctgtaatttttctattccaaacaggctcaggtggcaggttctcagagcagaggcatccggcacccctggtaggcttccactgccactgagaatttggttctgggaagagagaaaggctgcacgattcttcctcaccttggcctcactcttgcttccatgcttgacattgaacacggagcaagctcctgaacttgttgccgaggaggccacactcttgcgctgccttggcaatgggggaggttgttgctgcttcctccctggccctggtgctgctcttcttctgctcttgcgggcctgcaagcggccttctctcccccaagggtgtaaactatgaagttcaagctctcatgatgatcaagaactacctcaaggatcctcatggtgtactgaagaactgggaccaagactctgtggatccttgcagctggacaatggtcacttgctctccagagaaccttgtcaccggcttagaagcaccaagccagaacctttctggaattctctccccaagtatagggaatctgaccaaccttgagacagttcttctgcagaacaacaacataaacgggttaatcccagcagagattggaaagctaagaaagctcaaaacgcttgatctgtccagcaaccacttctctggagaaatcccaagctctgtgggccaccttgaaagccttcagtatttgaggcttaacaacaacacattgtctggtgccttcccttcatcatcaactaatttgtcacaccttattttcctggatctgtcatacaataatttgagtggtccaatcccagggtccctgacaaggactttcaacattgtagggaatccactgatctgtgcagcaaccatggaacaagattgttatgggtctttacctatgccaatgtcttacggactgaataacacacagggaactgtgattcctgcaaaagctaagagccataaagttgcaattgcatttggtgctacaactgcctgcatcagccttctgttccttgccgttggttcactattctggtggaggtgtaggcgaaaccggaagactcttttcaacgttgatgatcatcagcacatagagaacggcaacctcggaaatatgaagcggtttcaattcagagagctccaggctgcaacagaaaacttcagcagcaagaacatattaggaaaaggcgggtttggtattgtttaccgggggcagcttccagatggaagtcttgtagccgtcaagaggctcaaagatggtaatgctgcaggcggggaagcacagtttcagactgaagtcgagatgatcagcttagcagtgcacaggaacctcctcagactctatgggttctgcatgactgccagtgagaggctactggtctatccgtacatgtcgaatgggagtgtcgcgttgcgcctgaaagggaagccaccactggactggatcaccagaaagaggatagcacttggggcagcacgaggtctactttatctgcacgagcagtgtgatcccaagatcatccacagagacgttaaggcagcaaacatactgctagatgactgttgtgaagcaattgtcggggactttgggcttgcaaagctcctagaccaccgtgaatcgcatgtcaccacagctgtgcgcggaactgttggccacatcgctcccgagtacctctcgactggccagtcatctgagaaaacagatgtctttggttttggaattctgctgctggagctgatcactggtcagactgcactggagtttgggaagtcatcaaatcagaagggagccatgttagactgggtgaagaagatgcaccaagagaagcagctggacatacttgtcgacaagggcctggggagcaaatatgaccgcattgagctggaggagatggtgcaagtagcactgctatgtactcagttcctccctggtcacaggcccaagatgtcagaggtggtccggatgctggaaggcgatggacttgcagagcggtgggaggcgttacaacacactgagtcacacaaattcaaggtgcctgagttctccttcagccgctgccactctgacctgacggacgactcgtcactgttggtgcaagcagtggagctttctgggccaagatgacaccaacggagacggtctgtggcaagaagtatccagcagttgtttcccagtagaaaatgtaaataatacaaagtgaagcaactggtgctgcatcctgtcagaagtcgaagcaaatctcaatcagctgaactgtacaaagattaaaaaaagagcacaacctagtctaagcatggtacattactacatctacagattatgtaactgttggtagaataaggatagagcaatgtttccattttgtttgttattttcccctttgtattctattactgtagttatagtttgtaaaatgcaaaaacggtggcaatagcgctcgatgttggtgctgaagaactcaaatagcttagtaaagaccaagtgtagacaggtgccaacgaagaatttgattgtgtgcatgaacttcctacctccgttgccaacacatactgcaaagaaagcaggtataattcctagccatgacggcattttttgcatgatataaaatatttggtatctgctgtagactgtttaagtttgtc

SEQ ID NO: 55812 - DNA, 2835 bp, Zea Mays
gtttatcgctcccaccagaactcccacttccctagctatttgtccaactgcccatcctttggagaattcttttgtggcaagaatcgccaatcagttgaaagttgccgttgtcagtcgtgatctgtcatagtctttgctccactgcaacacacccacactccaataaagctggtcccaagaacgcaaaaggaaggaagggtgagaggggagagagtaaggaggaattttcttgcctcctttgctgttctcagagcagaggcatccggcacccctggtaggcttccactgccactgagaatttggttctgggaagagagaaaggctgcacgattcttcctcaccttggcctcactcttgcttccatgcttgacattgaacacggagcaagctcctgaacttgttgccgaggaggccacactcttgcgctgccttggcaatgggggaggttgttgctgcttcctccctggccctggtgctgctcttcttctgctcttgcgggcctgcaagcggccttctctcccccaagggtgtaaactatgaagttcaagctctcatgatgatcaagaactacctcaaggatcctcatggtgtactgaagaactgggaccaagactctgtggatccttgcagctggacaatggtcacttgctctccagagaaccttgtcaccggcttagaagcaccaagccagaacctttctggaattctctccccaagtatagggaatctgaccaaccttgagacagttcttctgcagaacaacaacataaacgggttaatcccagcagagattggaaagctaagaaagctcaaaacgcttgatctgtccagcaaccacttctctggagaaatcccaagctctgtgggccaccttgaaagccttcagtatttgaggcttaacaacaacacattgtctggtgccttcccttcatcatcaactaatttgtcacaccttattttcctggatctgtcatacaataatttgagtggtccaatcccagggtccctgacaaggactttcaacattgtagggaatccactgatctgtgcagcaaccatggaacaagattgttatgggtctttacctatgccaatgtcttacggactgaataacacacagggaactgtgattcctgcaaaagctaagagccataaagttgcaattgcatttggtgctacaactgcctgcatcagccttctgttccttgccgttggttcactattctggtggaggtgtaggcgaaaccggaagactcttttcaacgttgatgatcatcagcacatagagaacggcaacctcggaaatatgaagcggtttcaattcagagagctccaggctgcaacagaaaacttcagcagcaagaacatattaggaaaaggcgggtttggtattgtttaccgggggcagcttccagatggaagtcttgtagccgtcaagaggctcaaagatggtaatgctgcaggcggggaagcacagtttcagactgaagtcgagatgatcagcttagcagtgcacaggaacctcctcagactctatgggttctgcatgactgccagtgagaggctactggtctatccgtacatgtcgaatgggagtgtcgcgttgcgcctgaaagggaagccaccactggactggatcaccagaaagaggatagcacttggggcagcacgaggtctactttatctgcacgagcagtgtgatcccaagatcatccacagagacgttaaggcagcaaacatactgctagatgactgttgtgaagcaattgtcggggactttgggcttgcaaagctcctagaccaccgtgaatcgcatgtcaccacagctgtgcgcggaactgttggccacatcgctcccgagtacctctcgactggccagtcatctgagaaaacagatgtctttggttttggaattctgctgctggagctgatcactggtcagactgcactggagtttgggaagtcatcaaatcagaagggagccatgttagactgggtgaagaagatgcaccaagagaagcagctggacatacttgtcgacaagggcctggggagcaaatatgaccgcattgagctggaggagatggtgcaagtagcactgctatgtactcagttcctccctggtcacaggcccaagatgtcagaggtggtccggatgctggaaggcgatggacttgcagagcggtgggaggcgttacaacacactgagtcacacaaattcaaggtgcctgagttctccttcagccgctgccactctgacctgacggacgactcgtcactgttggtgcaagcagtggagctttctgggccaagatgacaccaacggagacggtctgtggcaagaagtatccagcagttgtttcccagtagaaaatgtaaataatacaaagtgaagcaactggtgctgcatcctgtcagaagtcgaagcaaatctcaatcagctgaactgtacaaagattaaaaaaagagcacaacctagtctaagcatggtacattactacatctacagattatgtaactgttggtagaataaggatagagcaatgtttccattttgtttgttattttcccctttgtattctattactgtagttatagtttgtaaaatgcaaaaacggtggcaatagcgctcgatgttggtgctgaagaactcaaatagcttagtaaagaccaagtgtagacaggtgccaacgaagaatttgattgtgtgcatgaacttcctacctccgttgccaacacatactgcaaagaaagcaggtataattcctagccatgacggcattttttgcatgatataaaatatttggtatctgctgtagactgtttaagtttgtc

SEQ ID NO: 55813 - DNA, 2877 bp, Zea Mays
attcccttgtccacttcctcctccacttcaggtcaggtgagaaccgagaggcacctcctccctgtcattatcctccctctccctccccagtccctcctactaaagacacattgccccggttgtttatcgctcccaccagaactcccacttccctagctatttgtccaactgcccatcctttggagaattcttttgtggcaagaatcgccaatcagttgaaagttgccgttgtcagtcgtgatctgtcatagtctttgctccactgcaacacacccacactccaataaagctggtcccaagaacgcaaaaggaaggaagggtgagaggggagagagtaaggaggaattttcttgcctcctttgctgtaatttttctattccaaacaggctcaggtggcaggttctcagagcagaggcatccggcacccctgctcctgaacttgttgccgaggaggccacactcttgcgctgccttggcaatgggggaggttgttgctgcttcctccctggccctggtgctgctcttcttctgctcttgcgggcctgcaagcggccttctctcccccaagggtgtaaactatgaagttcaagctctcatgatgatcaagaactacctcaaggatcctcatggtgtactgaagaactgggaccaagactctgtggatccttgcagctggacaatggtcacttgctctccagagaaccttgtcaccggcttagaagcaccaagccagaacctttctggaattctctccccaagtatagggaatctgaccaaccttgagacagttcttctgcagaacaacaacataaacgggttaatcccagcagagattggaaagctaagaaagctcaaaacgcttgatctgtccagcaaccacttctctggagaaatcccaagctctgtgggccaccttgaaagccttcagtatttgaggcttaacaacaacacattgtctggtgccttcccttcatcatcaactaatttgtcacaccttattttcctggatctgtcatacaataatttgagtggtccaatcccagggtccctgacaaggactttcaacattgtagggaatccactgatctgtgcagcaaccatggaacaagattgttatgggtctttacctatgccaatgtcttacggactgaataacacacagggaactgtgattcctgcaaaagctaagagccataaagttgcaattgcatttggtgctacaactgcctgcatcagccttctgttccttgccgttggttcactattctggtggaggtgtaggcgaaaccggaagactcttttcaacgttgatgatcatcagcacatagagaacggcaacctcggaaatatgaagcggtttcaattcagagagctccaggctgcaacagaaaacttcagcagcaagaacatattaggaaaaggcgggtttggtattgtttaccgggggcagcttccagatggaagtcttgtagccgtcaagaggctcaaagatggtaatgctgcaggcggggaagcacagtttcagactgaagtcgagatgatcagcttagcagtgcacaggaacctcctcagactctatgggttctgcatgactgccagtgagaggctactggtctatccgtacatgtcgaatgggagtgtcgcgttgcgcctgaaagggaagccaccactggactggatcaccagaaagaggatagcacttggggcagcacgaggtctactttatctgcacgagcagtgtgatcccaagatcatccacagagacgttaaggcagcaaacatactgctagatgactgttgtgaagcaattgtcggggactttgggcttgcaaagctcctagaccaccgtgaatcgcatgtcaccacagctgtgcgcggaactgttggccacatcgctcccgagtacctctcgactggccagtcatctgagaaaacagatgtctttggttttggaattctgctgctggagctgatcactggtcagactgcactggagtttgggaagtcatcaaatcagaagggagccatgttagactgggtgaagaagatgcaccaagagaagcagctggacatacttgtcgacaagggcctggggagcaaatatgaccgcattgagctggaggagatggtgcaagtagcactgctatgtactcagttcctccctggtcacaggcccaagatgtcagaggtggtccggatgctggaaggcgatggacttgcagagcggtgggaggcgttacaacacactgagtcacacaaattcaaggtgcctgagttctccttcagccgctgccactctgacctgacggacgactcgtcactgttggtgcaagcagtggagctttctgggccaagatgacaccaacggagacggtctgtggcaagaagtatccagcagttgtttcccagtagaaaatgtaaataatacaaagtgaagcaactggtgctgcatcctgtcagaagtcgaagcaaatctcaatcagctgaactgtacaaagattaaaaaaagagcacaacctagtctaagcatggtacattactacatctacagattatgtaactgttggtagaataaggatagagcaatgtttccattttgtttgttattttcccctttgtattctattactgtagttatagtttgtaaaatgcaaaaacggtggcaatagcgctcgatgttggtgctgaagaactcaaatagcttagtaaagaccaagtgtagacaggtgccaacgaagaatttgattgtgtgcatgaacttcctacctccgttgccaacacatactgcaaagaaagcaggtataattcctagccatgacggcattttttgcatgatataaaatatttggtatctgctgtagactgtttaagtttgtc

SEQ ID NO: 55814 - DNA, 2776 bp, Zea Mays
gttggttcttgattccccatccacacagcaagaagaccaaaattcccttgtccacttcctcctccacttcaggtcaggtcccaagaacgcaaaaggaaggaagggtgagaggggagagagtaaggaggaattttcttgcctcctttgctgtaatttttctattccaaacaggctcaggtggcaggttctcagagcagaggcatccggcacccctggtaggcttccactgccactgagaatttggttctgggaagagagaaaggctgcacgattcttcctcaccttggcctcactcttgcttccatgcttgacattgaacacggagcaagctcctgaacttgttgccgaggaggccacactcttgcgctgccttggcaatgggggaggttgttgctgcttcctccctggccctggtgctgctcttcttctgctcttgcgggcctgcaagcggccttctctcccccaagggtgtaaactatgaagttcaagctctcatgatgatcaagaactacctcaaggatcctcatggtgtactgaagaactgggaccaagactctgtggatccttgcagctggacaatggtcacttgctctccagagaaccttgtcaccggcttagaagcaccaagccagaacctttctggaattctctccccaagtatagggaatctgaccaaccttgagacagttcttctgcagaacaacaacataaacgggttaatcccagcagagattggaaagctaagaaagctcaaaacgcttgatctgtccagcaaccacttctctggagaaatcccaagctctgtgggccaccttgaaagccttcagtatttgaggcttaacaacaacacattgtctggtgccttcccttcatcatcaactaatttgtcacaccttattttcctggatctgtcatacaataatttgagtggtccaatcccagggtccctgacaaggactttcaacattgtagggaatccactgatctgtgcagcaaccatggaacaagattgttatgggtctttacctatgccaatgtcttacggactgaataacacacagggaactgtgattcctgcaaaagctaagagccataaagttgcaattgcatttggtgctacaactgcctgcatcagccttctgttccttgccgttggttcactattctggtggaggtgtaggcgaaaccggaagactcttttcaacgttgatgatcatcagcacatagagaacggcaacctcggaaatatgaagcggtttcaattcagagagctccaggctgcaacagaaaacttcagcagcaagaacatattaggaaaaggcgggtttggtattgtttaccgggggcagcttccagatggaagtcttgtagccgtcaagaggctcaaagatggtaatgctgcaggcggggaagcacagtttcagactgaagtcgagatgatcagcttagcagtgcacaggaacctcctcagactctatgggttctgcatgactgccagtgagaggctactggtctatccgtacatgtcgaatgggagtgtcgcgttgcgcctgaaagggaagccaccactggactggatcaccagaaagaggatagcacttggggcagcacgaggtctactttatctgcacgagcagtgtgatcccaagatcatccacagagacgttaaggcagcaaacatactgctagatgactgttgtgaagcaattgtcggggactttgggcttgcaaagctcctagaccaccgtgaatcgcatgtcaccacagctgtgcgcggaactgttggccacatcgctcccgagtacctctcgactggccagtcatctgagaaaacagatgtctttggttttggaattctgctgctggagctgatcactggtcagactgcactggagtttgggaagtcatcaaatcagaagggagccatgttagactgggtgaagaagatgcaccaagagaagcagctggacatacttgtcgacaagggcctggggagcaaatatgaccgcattgagctggaggagatggtgcaagtagcactgctatgtactcagttcctccctggtcacaggcccaagatgtcagaggtggtccggatgctggaaggcgatggacttgcagagcggtgggaggcgttacaacacactgagtcacacaaattcaaggtgcctgagttctccttcagccgctgccactctgacctgacggacgactcgtcactgttggtgcaagcagtggagctttctgggccaagatgacaccaacggagacggtctgtggcaagaagtatccagcagttgtttcccagtagaaaatgtaaataatacaaagtgaagcaactggtgctgcatcctgtcagaagtcgaagcaaatctcaatcagctgaactgtacaaagattaaaaaaagagcacaacctagtctaagcatggtacattactacatctacagattatgtaactgttggtagaataaggatagagcaatgtttccattttgtttgttattttcccctttgtattctattactgtagttatagtttgtaaaatgcaaaaacggtggcaatagcgctcgatgttggtgctgaagaactcaaatagcttagtaaagaccaagtgtagacaggtgccaacgaagaatttgattgtgtgcatgaacttcctacctccgttgccaacacatactgcaaagaaagcaggtataattcctagccatgacggcattttttgcatgatataaaatatttggtatctgctgtagactgtttaagtttgtc

SEQ ID NO: 55815 - DNA, 176 bp, Zea Mays
ccccacccaaccgtcctcctcccgccatccagccctgcacgcaaacctggcacatgaacccgattgtactttgcaagtcgaagcataattaagcacgcgtcgacagcgctcgcaatcgatcggtcgaggaggaggagcagcgtgaatttggaaataaacgtaccgtgaggtgggcg

SEQ ID NO: 55816 - DNA, 3336 bp, Zea Mays
ctctgtgacccctccccgcgcggcggtcgcggtcatcccgctgtcgacgctacttcggcaagatgagcttgcttgggacggggcttcagcctcggcctcgacccgcgtcaggtgaaggctgcggcacgcgtcccctcctccgcctccagtctccgcccaactcaaaaccctagcaaccgcgcctccatccctacccgaattccaatccaggtccgatcccccggtggcgaggacacccggcgccgattcgtccccgcagatcgaccgggcaggacatatttgggttcggggtccgctcgagtcgcctcgccggggtccaccgcggcggtcagggggtatggtgggcggcgggaggcggggcggagcggcggaggaggtcaagctttacaccggcaacgtgttcgcggcgctcgagtccctcaagaagaagaagaagaagggtgacaaaggcaaggcggtcgggaggaggacggcgagggggccgctgaaccctgggcaaacaggcgagcgagtacgccgactgcgaggagtaaacttgtgtcatctcgcgcggggccaacccgaggaccacgcacatcctcgccggcgagacggtggaggtgcgcaggggagacgtaggtggtggctgcacgaaggtggttttcagcattgagccgttggcattgagcgaccggcagcagcccgcgtcttcgtcttcgtcgccggcggcacccgccagagtcgtcgtgtccggtcgttgctgctgctgcatgaagaggctgctggaggaccgggacatcttcatctacctgggcaagaaggccttctgcagcgacgagtgcaggaacgggttcactatggaccgtttggctcgaattgtcttgagcccaaggaaatctgggcctttttaatcgtcgtcacctagctcgcggatggtccgcacacagtttccaccgtcagtatcgcattggagtgaaacaacacccatccttgccaccgattaggaacttaggaatggactcgccggtgcctgctacgctcgcccgcgcgccagcgagatcgcaagcgcgggcgggcgaggaggcttgcgcggatactcggcaggatgctccggcggaagcggagccacctccccgtcggccacccgcgttctacagctccgtgtttgcgtagatcgaagagatcgggtggaagcagctggtgagcgccacaggagacggagtgtcctgtctcaccttccgcgtcgtgtaaggattcatgttgctgccagttggcactaacctctttctataggtttatattatacgactgtttggagaaaaaactattgccgttcaggtggttgagcaacgctggcgcattacatactgaattttgtcagtttaatagttgttcgaaaaggttatttcagaaacctatctaaacattgtaatacatatgaacaacaatcgcaattgtagcagcgtttctttggaggcacccctttaattctattctgttgtttgaatgttgaaactatggcttatgtatctgccagggatgaaccaggacagatgcatttactggagatcacactgcccatgggctatcccgaaagtcctccttcaatctctgcagttagtctctatcctgatatttttattatactttgccagggatgaactaggcatgtttttgattatagcccatatgtagccgccagggatgaactaggcctgtttttattatactttgcagttgcatgaaatttcagaaccataaccatatgggctataattgaacttgtctcattaacaggacgtaccatatctcccaaaaatacattggtcaaaaaactcaagactgaaagatgttatttgccatgtctcattaacaggacgtaccatatactcacatatttcctgcattgcattgtacacattttcttatatattaacgagtgcaggaacgagttcatcgaggaggcggcggaggaggagctcatgattctagatcctgctcgaaatctttgatcaagatttgttagttgtcgtggcaaaagtagagagtgtaatatttgcccgcaatattttgcttctaccttcaacttggggactacttggctgggagagtgagtgggggaaggacaaaggaaatgcctctcattcaagttttttgctgtaaggagaggtcgtcccggtttggccaaccagtgcaatggtcgagccagccaatttccgtggtttgttgagctccattttggctactgtcatattagctcttcggcatcaatttccgggaggaggatggcgagggggccgcgcagcggcaagagccaccgcagaaggagctattctcagccttctcagccttttccagtttattttattttttatttagtagcatttcgttaattccagttctatttgttacaatgattccagttcgttcttgtagcaatagctggctctggctgaattttatgatctatcaatttaatgtcatcatcatgattaatgtggacttatctagactgtttttggatagagtagtagttagtgatttctgatccgactattgtcgctgcaatctttcatgttctttttatgtagtctcactttgctcctttttcattaatggtttattcgtggacattttcaacttctaccatcaaaccttctgatgttggtactttgtgttctattcaattattttacccataaaagaacttgggattattttataccttttatctctactactacttaagtgtctattgtaggcgtccacaaaggcggatggtgcacggttctgccggttccgcatcccgccagattgggacgaattcggcatcggctccaccaaaggctccacggatttggcatcagctccacagattttcgatactgggtaacagaaatgcatgtttatggtgttcgttttgaccttgcattacatctacaatgaccagaggatgcaggtggttcgaagttctatgatcataagacgcattcaggtcgatctcactcttcatgttcgtgctcgctgcgcagaacgccactgcagcaccgatggaattgtacggtgtcatcaggctcgactaaatctagatgggatggactctacttgtgttgaaggaaaggaagtatgtgcttggcttgcgaggagggggcatatttctgttcaacttttcttacgggtcatgttacttgtcatctcagattacacaactttaggtatttctgtctttgtgagaaaagtaccaaaatagtttcacatgtgtttaatttgaatattttgtgtgccgttgcaacgcacgggcacatacctagttatatttataattttagatacataattagacaaataatttcatat

SEQ ID NO: 55817 - DNA, 2433 bp, Zea Mays
ctctgtgacccctccccgcgcggcggtcgcggtcatcccgctgtcgacgctacttcggcaagatgagcttgcttgggacggggcttcagcctcggcctcgacccgcgtcaggtgaaggctgcggcacgcgtcccctcctccgcctccagtctccgcccaactcaaaaccctagcaaccgcgcctccatccctacccgaattccaatccaggtccgatcccccggtggcgaggacacccggcgccgattcgtccccgcagatcgaccgggcaggacatatttgggttcggggtccgctcgagtcgcctcgccggggtccaccgcggcggtcagggggtatggtgggcggcgggaggcggggcggagcggcggaggaggtcaagctttacaccggcaacgtgttcgcggcgctcgagtccctcaagaagaagaagaagaagggtgacaaaggcaaggcggtcgggaggaggacggcgagggggccgctgaaccctgggcaaacaggcgagcgagtacgccgactgcgaggagtaaacttgtgtcatctcgcgcggggccaacccgaggaccacgcacatcctcgccggcgagacggtggaggtgcgcaggggagacgtaggtggtggctgcacgaaggtggttttcagcattgagccgttggcattgagcgaccggcagcagcccgcgtcttcgtcttcgtcgccggcggcacccgccagagtcgtcgtgtccggtcgttgctgctgctgcatgaagaggctgctggaggaccgggacatcttcatctacctgggcaagaaggccttctgcagcgacgagtgcaggaacgggttcactatggaccgtttggctcgaattgtcttgagcccaaggaaatctgggcctttttaatcgtcgtcacctagctcgcggatggtccgcacacagtttccaccgtcagtatcgcattggagtgaaacaacacccatccttgccaccgattaggaacttaggaatggactcgccggtgcctgctacgctcgcccgcgcgccagcgagatcgcaagcgcgggcgggcgaggaggcttgcgcggatactcggcaggatgctccggcggaagcggagccacctccccgtcggccacccgcgttctacagctccgtgtttgcgtagatcgaagagatcgggtggaagcagctggtgagcgccacaggagacggagtgtcctgtctcaccttccgcgtcgtggatgaaccaggacagatgcatttactggagatcacactgcccatgggctatcccgaaagtcctccttcaatctctgcagttagtctctatcctgatatttttattatactttgccagggatgaactaggcatgtttttgattatagcccatatgtagccgccagggatgaactaggcctgtttttattatactttgcagttgcatgaaatttcagaaccataaccatatgggctataattgaacttgtctcattaacaggacgtaccatatctcccaaaaatacattggtcaaaaaactcaagactgaaagatgttatttgccatgtctcattaacaggacgtaccatatactcacatatttcctgcattgcattgtacacattttcttatatattaacgagtgcaggaacgagttcatcgaggaggcggcggaggaggagctcatgattctagatcctgctcgaaatctttgatcaagatttgttagttgtcgtggcaaaagtagagagtgtaatatttgcccgcaatattttgcttctaccttcaacttggggactacttggctgggagagtgagtgggggaaggacaaaggaaatgcctctcattcaagttttttgctgtaaggagaggtcgtcccggtttggccaaccagtgcaatggtcgagccagccaatttccgtggcgtccacaaaggcggatggtgcacggttctgccggttccgcatcccgccagattgggacgaattcggcatcggctccaccaaaggctccacggatttggcatcagctccacagattttcgatactgggtaacagaaatgcatgtttatggtgttcgttttgaccttgcattacatctacaatgaccagaggatgcagaacgccactgcagcaccgatggaattgtacggtgtcatcaggctcgactaaatctagatgggatggactctacttgtgttgaaggaaaggaagtatgtgcttggcttgcgaggagggggcatatttctgttcaacttttcttacgggtcatgttacttgtcatctcagattacacaactttaggtatttctgtctttgtgagaaaagtaccaaaatagtttcacatgtgtttaatttgaatattttgtgtgccgttgcaacgcacgggcacatacctagttatatttataattttagatacataattagacaaataatttcatat

SEQ ID NO: 55818 - DNA, 2648 bp, Zea Mays
ctcgctctgtgacccctccccgcgcggcggtcgcggtcatcccgctgtcgacgctacttcggcaagatgagcttgcttgggacggggcttcagcctcggcctcgacccgcgtcaggtgaaggctgcggcacgcgtcccctcctccgcctccagtctccgcccaactcaaaaccctagcaaccgcgcctccatccctacccgaattccaatccaggtccgatcccccggtggcgaggacacccggcgccgattcgtccccgcagatcgaccgggcaggacatatttgggttcggggtccgctcgagtcgcctcgccggggtccaccgcggcggtcagggggtatggtgggcggcgggaggcggggcggagcggcggaggaggtcaagctttacaccggcaacgtgttcgcggcgctcgagtccctcaagaagaagaagaagaagggtgacaaaggcaaggcggtcgggaggaggacggcgagggggccgctgaaccctgggcaaacaggcgagcgagtacgccgactgcgaggagtaaacttgtgtcatctcgcgcggggccaacccgaggaccacgcacatcctcgccggcgagacggtggaggtgcgcaggggagacgtaggtggtggctgcacgaaggtggttttcagcattgagccgttggcattgagcgaccggcagcagcccgcgtcttcgtcttcgtcgccggcggcacccgccagagtcgtcgtgtccggtcgttgctgctgctgcatgaagaggctgctggaggaccgggacatcttcatctacctgggcaagaaggccttctgcagcgacgagtgcaggaacgggttcactatggaccgtttggctcgaattgtcttgagcccaaggaaatctgggcctttttaatcgtcgtcacctagctcgcggatggtccgcacacagtttccaccgtcagtatcgcattggagtgaaacaacacccatccttgccaccgattaggaacttaggaatggactcgccggtgcctgctacgctcgcccgcgcgccagcgagatcgcaagcgcgggcgggcgaggaggcttgcgcggatactcggcaggatgctccggcggaagcggagccacctccccgtcggccacccgcgttctacagctccgtgtttgcgtagatcgaagagatcgggtggaagcagctggtgagcgccacaggagacggagtgtcctgtctcaccttccgcgtcgtggatgaaccaggacagatgcatttactggagatcacactgcccatgggctatcccgaaagtcctccttcaatctctgcagaacgagttcatcgaggaggcggcggaggaggagctcatgattctagatcctgctcgaaatctttgatcaagatttgttagttgtcgtggcaaaagtagagagtgtaatatttgcccgcaatattttgcttctaccttcaacttggggactacttggctgggagagtgagtgggggaaggacaaaggaaatgcctctcattcaagttttttgctgtaaggagaggtcgtcccggtttggccaaccagtgcaatggtcgagccagccaatttccgtggtttgttgagctccattttggctactgtcatattagctcttcggcatcaatttccgggaggaggatggcgagggggccgcgcagcggcaagagccaccgcagaaggagctattctcagccttctcagccttttccagtttattttattttttatttagtagcatttcgttaattccagttctatttgttacaatgattccagttcgttcttgtagcaatagctggctctggctgaattttatgatctatcaatttaatgtcatcatcatgattaatgtggacttatctagactgtttttggatagagtagtagttagtgatttctgatccgactattgtcgctgcaatctttcatgttctttttatgtagtctcactttgctcctttttcattaatggtttattcgtggacattttcaacttctaccatcaaaccttctgatgttggtactttgtgttctattcaattattttacccataaaagaacttgggattattttataccttttatctctactactacttaagtgtctattgtaggcgtccacaaaggcggatggtgcacggttctgccggttccgcatcccgccagattgggacgaattcggcatcggctccaccaaaggctccacggatttggcatcagctccacagattttcgatactgggtaacagaaatgcatgtttatggtgttcgttttgaccttgcattacatctacaatgaccagaggatgcagaacgccactgcagcaccgatggaattgtacggtgtcatcaggctcgactaaatctagatgggatggactctacttgtgttgaaggaaaggaagtatgtgcttggcttgcgaggagggggcatatttctgttcaacttttcttacgggtcatgttacttgtcatctcagattacacaactttaggtatttctgtctttgtgagaaaagtaccaaaatagtttcacatgtgtttaatttgaatattttgtgtgccgttgcaacgcacgggcacatacctagttatatttataattttagatacataattagacaaataatttcatat

SEQ ID NO: 55819 - DNA, 3873 bp, Zea Mays
caccaatctcgctctgtgacccctccccgcgcggcggtcgcggtcatcccgctgtcgacgctacttcggcaagatgagcttgcttgggacggggcttcagcctcggcctcgacccgcgtcaggtgaaggctgcggcacgcgtcccctcctccgcctccagtctccgcccaactcaaaaccctagcaaccgcgcctccatccctacccgaattccaatccaggtccgatcccccggtggcgaggacacccggcgccgattcgtccccgcagatcgaccgggcaggacatatttgggttcggggtccgctcgagtcgcctcgccggggtccaccgcggcggtcagggggtatggtgggcggcgggaggcggggcggagcggcggaggaggtcaagctttacaccggcaacgtgttcgcggcgctcgagtccctcaagaagaagaagaagaagggtgacaaaggcaaggcggtcgggaggaggacggcgagggggccgctgaaccctgggcaaacaggcgagcgagtacgccgactgcgaggagtaaacttgtgtcatctcgcgcggggccaacccgaggaccacgcacatcctcgccggcgagacggtggaggtgcgcaggggagacgtaggtggtggctgcacgaaggtggttttcagcattgagccgttggcattgagcgaccggcagcagcccgcgtcttcgtcttcgtcgccggcggcacccgccagagtcgtcgtgtccggtcgttgctgctgctgcatgaagaggctgctggaggaccgggacatcttcatctacctgggcaagaaggccttctgcagcgacgagtgcaggaacgggttcactatggaccgtttggctcgaattgtcttgagcccaaggaaatctgggcctttttaatcgtcgtcacctagctcgcggatggtccgcacacagtttccaccgtcagtatcgcattggagtgaaacaacacccatccttgccaccgattaggaacttaggaatggactcgccggtgcctgctacgctcgcccgcgcgccagcgagatcgcaagcgcgggcgggcgaggaggcttgcgcggatactcggcaggatgctccggcggaagcggagccacctccccgtcggccacccgcgttctacagctccgtgtttgcgtagatcgaagagatcgggtggaagcagctggtgagcgccacaggagacggagtgtcctgtctcaccttccgcgtcgtggatgaaccaggacagatgcatttactggagatcacactgcccatgggctatcccgaaagtcctccttcaatctctgcagttagtctctatcctgatatttttattatactttgccagggatgaactaggcatgtttttgattatagcccatatgtagccgccagggatgaactaggcctgtttttattatactttgcagttgcatgaaatttcagaaccataaccatatgggctataattgaacttgtctcattaacaggacgtaccatatctcccaaaaatacattggtcaaaaaactcaagactgaaagatgttatttgccatgtctcattaacaggacgtaccatatactcacatatttcctgcattgcattgtacacattttcttatatattaacgagtgcaggaacgagttcatcgaggaggcggcggaggaggagctcatgattctagatcctgctcgaaatctttgatcaagatttgttagttgtcgtggcaaaagtagagagtgtaatatttgcccgcaatattttgcttctaccttcaacttggggactacttggctgggagagtgagtgggggaaggacaaaggaaatgcctctcattcaagttttttgctgtaaggagaggtcgtcccggtttggccaaccagtgcaatggtcgagccagccaatttccgtggtttgttgagctccattttggctactgtcatattagctcttcggcatcaatttccgggaggaggatggcgagggggccgcgcagcggcaagagccaccgcagaaggagctattctcagccttctcagccttttccagtttattttattttttatttagtagcatttcgttaattccagttctatttgttacaatgattccagttcgttcttgtagcaatagctggctctggctgaattttatgatctatcaatttaatgtcatcatcatgattaatgtggacttatctagactgtttttggatagagtagtagttagtgatttctgatccgactattgtcgctgcaatctttcatgttctttttatgtagtctcactttgctcctttttcattaatggtttattcgtggacattttcaacttctaccatcaaaccttctgatgttggtactttgtgttctattcaattattttacccataaaagaacttgggattattttataccttttatctctactactacttaagtgtctattgtaggcgtccacaaaggcggatggtgcacggttctgccggttccgcatcccgccagattgggacgaattcggcatcggctccaccaaaggctccacggatttggcatcagctccacagattttcggtacccatgctttgtttagccagtgattttgggaaatcattatccagtaattgtcaatttcggcgaggttttcattatcataagagaactgcatcttcttttcattatcataagggtttagggttgcctggctacggtcgatagtcatctatagccttgttttccgttttgcattctgtctggttgtgtatatatcttatgaacacgatttttggatgaacacattctatctgttttgctaggtttagaaatcatagaagtgccggtcaatgattttggcaaaccattatccaacaattgttgtaggattacgatcgatagtcatatgttttttctgttttgctaggtttctgaaatactgccaatagaaatcatagcagtgcattggacttaattaaagtatagaaatgaacctcatagcagtagcactaatggcattgctctctgtagcaatagaaatccccctaaccctcccacccacacaagttgcaattgccctcttaaatctattttttggtggaacaactaaattgacattgaagaagttttttggagtgtgcccgttctgcatttagaagacttctgtaagatcattcttctctttgttttttttcatttagcaacgtatgttggttttatgattttcatggaccacaaaaatagttatgtattctatttcatacattcatgtctatataacaatttatttgaagggcatttacctgtgtactgagagttttataattattctggttgtggaaataacttcaattgtaatcatcctgtaatccctggatttatagaggattgcttgagatactgggtaacagaaatgcatgtttatggtgttcgttttgaccttgcattacatctacaatgaccagaggatgcaggtggttcgaagttctatgatcataagacgcattcaggtcgatctcactcttcatgttcgtgctcgctgcgcagaacgccactgcagcaccgatggaattgtacggtgtcatcaggctcgactaaatctagatgggatggactctacttgtgttgaaggaaaggaagtatgtgcttggcttgcgaggagggggcatatttctgttcaacttttcttacgggtcatgttacttgtcatctcagattacacaactttaggtatttctgtctttgtgagaaaagtaccaaaatagtttcacatgtgtttaatttgaatattttgtgtgccgttgcaacgcacgggcacatacctagttatatttataattttagatacataattagacaaataatttcatat

SEQ ID NO: 55820 - DNA, 1912 bp, Zea Mays
caccaatctcgctctgtgacccctccccgcgcggcggtcgcggtcatcccgctgtcgacgctacttcggcaagatgagcttgcttgggacggggcttcagcctcggcctcgacccgcgtcaggtgaaggctgcggcacgcgtcccctcctccgcctccagtctccgcccaactcaaaaccctagcaaccgcgcctccatccctacccgaattccaatccaggtccgatcccccggtggcgaggacacccggcgccgattcgtccccgcagatcgaccgggcaggacatatttgggttcggggtccgctcgagtcgcctcgccggggtccaccgcggcggtcagggggtatggtgggcggcgggaggcggggcggagcggcggaggaggtcaagctttacaccggcaacgtgttcgcggcgctcgagtccctcaagaagaagaagaagaagggtgacaaaggcaaggcggtcgggaggaggacggcgagggggccgctgaaccctgggcaaacaggcgagcgagtacgccgactgcgaggagtaaacttgtgtcatctcgcgcggggccaacccgaggaccacgcacatcctcgccggcgagacggtggaggtgcgcaggggagacgtaggtggtggctgcacgaaggtggttttcagcattgagccgttggcattgagcgaccggcagcagcccgcgtcttcgtcttcgtcgccggcggcacccgccagagtcgtcgtgtccggtcgttgctgctgctgcatgaagaggctgctggaggaccgggacatcttcatctacctgggcaagaaggccttctgcagcgacgagtgcaggaacgggttcactatggaccgtttggctcgaattgtcttgagcccaaggaaatctgggcctttttaatcgtcgtcacctagctcgcggatggtccgcacacagtttccaccgtcagtatcgcattggagtgaaacaacacccatccttgccaccgattaggaacttaggaatggactcgccggtgcctgctacgctcgcccgcgcgccagcgagatcgcaagcgcgggcgggcgaggaggcttgcgcggatactcggcaggatgctccggcggaagcggagccacctccccgtcggccacccgcgttctacagctccgtgtttgcgtagatcgaagagatcgggtggaagcagctggtgagcgccacaggagacggagtgtcctgtctcaccttccgcgtcgtggatgaaccaggacagatgcatttactggagatcacactgcccatgggctatcccgaaagtcctccttcaatctctgcagcgtccacaaaggcggatggtgcacggttctgccggttccgcatcccgccagattgggacgaattcggcatcggctccaccaaaggctccacggatttggcatcagctccacagattttcgatactgggtaacagaaatgcatgtttatggtgttcgttttgaccttgcattacatctacaatgaccagaggatgcaggtggttcgaagttctatgatcataagacgcattcaggtcgatctcactcttcatgttcgtgctcgctgcgcagaacgccactgcagcaccgatggaattgtacggtgtcatcaggctcgactaaatctagatgggatggactctacttgtgttgaaggaaaggaagtatgtgcttggcttgcgaggagggggcatatttctgttcaacttttcttacgggtcatgttacttgtcatctcagattacacaactttaggtatttctgtctttgtgagaaaagtaccaaaatagtttcacatgtgtttaatttgaatattttgtgtgccgttgcaacgcacgggcacatacctagttatatttataattttagatacataattagacaaataatttcatat

SEQ ID NO: 55821 - DNA, 3731 bp, Zea Mays
caccaatctcgctctgtgacccctccccgcgcggcggtcgcggtcatcccgctgtcgacgctacttcggcaagatgagcttgcttgggacggggcttcagcctcggcctcgacccgcgtcaggtgaaggctgcggcacgcgtcccctcctccgcctccagtctccgcccaactcaaaaccctagcaaccgcgcctccatccctacccgaattccaatccaggtccgatcccccggtggcgaggacacccggcgccgattcgtccccgcagatcgaccgggcaggacatatttgggttcggggtccgctcgagtcgcctcgccggggtccaccgcggcggtcagggggtatggtgggcggcgggaggcggggcggagcggcggaggaggtcaagctttacaccggcaacgtgttcgcggcgctcgagtccctcaagaagaagaagaagaagggtgacaaaggcaaggcggtcgggaggaggacggcgagggggccgctgaaccctgggcaaacaggcgagcgagtacgccgactgcgaggagtaaacttgtgtcatctcgcgcggggccaacccgaggaccacgcacatcctcgccggcgagacggtggaggtgcgcaggggagacgtaggtggtggctgcacgaaggtggttttcagcattgagccgttggcattgagcgaccggcagcagcccgcgtcttcgtcttcgtcgccggcggcacccgccagagtcgtcgtgtccggtcgttgctgctgctgcatgaagaggctgctggaggaccgggacatcttcatctacctgggcaagaaggccttctgcagcgacgagtgcaggaacgggttcactatggaccgtttggctcgaattgtcttgagcccaaggaaatctgggcctttttaatcgtcgtcacctagctcgcggatggtccgcacacagtttccaccgtcagtatcgcattggagtgaaacaacacccatccttgccaccgattaggaacttaggaatggactcgccggtgcctgctacgctcgcccgcgcgccagcgagatcgcaagcgcgggcgggcgaggaggcttgcgcggatactcggcaggatgctccggcggaagcggagccacctccccgtcggccacccgcgttctacagctccgtgtttgcgtagatcgaagagatcgggtggaagcagctggtgagcgccacaggagacggagtgtcctgtctcaccttccgcgtcgtggatgaaccaggacagatgcatttactggagatcacactgcccatgggctatcccgaaagtcctccttcaatctctgcagacgtaccatatctcccaaaaatacattggtcaaaaaactcaagactgaaagatgttatttgccatgtctcattaacaggacgtaccatatactcacatatttcctgcattgcattgtacacattttcttatatattaacgagtgcaggaacgagttcatcgaggaggcggcggaggaggagctcatgattctagatcctgctcgaaatctttgatcaagatttgttagttgtcgtggcaaaagtagagagtgtaatatttgcccgcaatattttgcttctaccttcaacttggggactacttggctgggagagtgagtgggggaaggacaaaggaaatgcctctcattcaagttttttgctgtaaggagaggtcgtcccggtttggccaaccagtgcaatggtcgagccagccaatttccgtggtttgttgagctccattttggctactgtcatattagctcttcggcatcaatttccgggaggaggatggcgagggggccgcgcagcggcaagagccaccgcagaaggagctattctcagccttctcagccttttccagtttattttattttttatttagtagcatttcgttaattccagttctatttgttacaatgattccagttcgttcttgtagcaatagctggctctggctgaattttatgatctatcaatttaatgtcatcatcatgattaatgtggacttatctagactgtttttggatagagtagtagttagtgatttctgatccgactattgtcgctgcaatctttcatgttctttttatgtagtctcactttgctcctttttcattaatggtttattcgtggacattttcaacttctaccatcaaaccttctgatgttggtactttgtgttctattcaattattttacccataaaagaacttgggattattttataccttttatctctactactacttaagtgtctattgtaggcgtccacaaaggcggatggtgcacggttctgccggttccgcatcccgccagattgggacgaattcggcatcggctccaccaaaggctccacggatttggcatcagctccacagattttcggtacccatgctttgtttagccagtgattttgggaaatcattatccagtaattgtcaatttcggcgaggttttcattatcataagagaactgcatcttcttttcattatcataagggtttagggttgcctggctacggtcgatagtcatctatagccttgttttccgttttgcattctgtctggttgtgtatatatcttatgaacacgatttttggatgaacacattctatctgttttgctaggtttagaaatcatagaagtgccggtcaatgattttggcaaaccattatccaacaattgttgtaggattacgatcgatagtcatatgttttttctgttttgctaggtttctgaaatactgccaatagaaatcatagcagtgcattggacttaattaaagtatagaaatgaacctcatagcagtagcactaatggcattgctctctgtagcaatagaaatccccctaaccctcccacccacacaagttgcaattgccctcttaaatctattttttggtggaacaactaaattgacattgaagaagttttttggagtgtgcccgttctgcatttagaagacttctgtaagatcattcttctctttgttttttttcatttagcaacgtatgttggttttatgattttcatggaccacaaaaatagttatgtattctatttcatacattcatgtctatataacaatttatttgaagggcatttacctgtgtactgagagttttataattattctggttgtggaaataacttcaattgtaatcatcctgtaatccctggatttatagaggattgcttgaggtacaaatttgtatataacttctattaaattgctcctaatttcctttgtcggttgtcattctattagatggtgcaattgtttatacactaataactgagtttgatgttgcagatactgggtaacagaaatgcatgtttatggtgttcgttttgaccttgcattacatctacaatgaccagaggatgcagaacgccactgcagcaccgatggaattgtacggtgtcatcaggctcgactaaatctagatgggatggactctacttgtgttgaaggaaaggaagtatgtgcttggcttgcgaggagggggcatatttctgttcaacttttcttacgggtcatgttacttgtcatctcagattacacaactttaggtatttctgtctttgtgagaaaagtaccaaaatagtttcacatgtgtttaatttgaatattttgtgtgccgttgcaacgcacgggcacatacctagttatatttataattttagatacataattagacaaataatttcatat

SEQ ID NO: 55822 - DNA, 3273 bp, Zea Mays
caccaatctcgctctgtgacccctccccgcgcggcggtcgcggtcatcccgctgtcgacgctacttcggcaagatgagcttgcttgggacggggcttcagcctcggcctcgacccgcgtcaggtgaaggctgcggcacgcgtcccctcctccgcctccagtctccgcccaactcaaaaccctagcaaccgcgcctccatccctacccgaattccaatccaggtccgatcccccggtggcgaggacacccggcgccgattcgtccccgcagatcgaccgggcaggacatatttgggttcggggtccgctcgagtcgcctcgccggggtccaccgcggcggtcagggggtatggtgggcggcgggaggcggggcggagcggcggaggaggtcaagctttacaccggcaacgtgttcgcggcgctcgagtccctcaagaagaagaagaagaagggtgacaaaggcaaggcggtcgggaggaggacggcgagggggccgctgaaccctgggcaaacaggcgagcgagtacgccgactgcgaggagtaaacttgtgtcatctcgcgcggggccaacccgaggaccacgcacatcctcgccggcgagacggtggaggtgcgcaggggagacgtaggtggtggctgcacgaaggtggttttcagcattgagccgttggcattgagcgaccggcagcagcccgcgtcttcgtcttcgtcgccggcggcacccgccagagtcgtcgtgtccggtcgttgctgctgctgcatgaagaggctgctggaggaccgggacatcttcatctacctgggcaagaaggccttctgcagcgacgagtgcaggaacgggttcactatggaccgtttggctcgaattgtcttgagcccaaggaaatctgggcctttttaatcgtcgtcacctagctcgcggatggtccgcacacagtttccaccgtcagtatcgcattggagtgaaacaacacccatccttgccaccgattaggaacttaggaatggactcgccggtgcctgctacgctcgcccgcgcgccagcgagatcgcaagcgcgggcgggcgaggaggcttgcgcggatactcggcaggatgctccggcggaagcggagccacctccccgtcggccacccgcgttctacagctccgtgtttgcgtagatcgaagagatcgggtggaagcagctggtgagcgccacaggagacggagtgtcctgtctcaccttccgcgtcgtggatgaaccaggacagatgcatttactggagatcacactgcccatgggctatcccgaaagtcctccttcaatctctgcagttagtctctatcctgatatttttattatactttgccagggatgaactaggcatgtttttgattatagcccatatgtagccgccagggatgaactaggcctgtttttattatactttgcagttgcatgaaatttcagaaccataaccatatgggctataattgaacttgtctcattaacaggacgtaccatatctcccaaaaatacattggtcaaaaaactcaagactgaaagatgttatttgccatgtctcattaacaggacgtaccatatactcacatatttcctgcattgcattgtacacattttcttatatattaacgagtgcaggaacgagttcatcgaggaggcggcggaggaggagctcatgattctagatcctgctcgaaatctttgatcaagatttgttagttgtcgtggcaaaagtagagagtgtaatatttgcccgcaatattttgcttctaccttcaacttggggactacttggctgggagagtgagtgggggaaggacaaaggaaatgcctctcattcaagttttttgctgtaaggagaggtcgtcccggtttggccaaccagtgcaatggtcgagccagccaatttccgtggtttgttgagctccattttggctactgtcatattagctcttcggcatcaatttccgggaggaggatggcgagggggccgcgcagcggcaagagccaccgcagaaggagctattctcagccttctcagccttttccagtttattttattttttatttagtagcatttcgttaattccagttctatttgttacaatgattccagttcgttcttgtagcaatagctggctctggctgaattttatgatctatcaatttaatgtcatcatcatgattaatgtggacttatctagactgtttttggatagagtagtagttagtgatttctgatccgactattgtcgctgcaatctttcatgttctttttatgtagtctcactttgctcctttttcattaatggtttattcgtggacattttcaacttctaccatcaaaccttctgatgttggtactttgtgttctattcaattattttacccataaaagaacttgggattattttataccttttatctctactactacttaagtgtctattgtaggcgtccacaaaggcggatggtgcacggttctgccggttccgcatcccgccagattgggacgaattcggcatcggctccaccaaaggctccacggatttggcatcagctccacagattttcggggcatttacctgtgtactgagagttttataattattctggttgtggaaataacttcaattgtaatcatcctgtaatccctggatttatagaggattgcttgaggtacaaatttgtatataacttctattaaattgctcctaatttcctttgtcggttgtcattctattagatggtgcaattgtttatacactaataactgagtttgatgttgcagatactgggtaacagaaatgcatgtttatggtgttcgttttgaccttgcattacatctacaatgaccagaggatgcaggtggttcgaagttctatgatcataagacgcattcaggtcgatctcactcttcatgttcgtgctcgctgcgcagaacgccactgcagcaccgatggaattgtacggtgtcatcaggctcgactaaatctagatgggatggactctacttgtgttgaaggaaaggaagtatgtgcttggcttgcgaggagggggcatatttctgttcaacttttcttacgggtcatgttacttgtcatctcagattacacaactttaggtatttctgtctttgtgagaaaagtaccaaaatagtttcacatgtgtttaatttgaatattttgtgtgccgttgcaacgcacgggcacatacctagttatatttataattttagatacataattagacaaataatttcatat

SEQ ID NO: 55823 - DNA, 3882 bp, Zea Mays
cccaccaatctcgctctgtgacccctccccgcgcggcggtcgcggtcatcccgctgtcgacgctacttcggcaagatgagcttgcttgggacggggcttcagcctcggcctcgacccgcgtcaggtgaaggctgcggcacgcgtcccctcctccgcctccagtctccgcccaactcaaaaccctagcaaccgcgcctccatccctacccgaattccaatccaggtccgatcccccggtggcgaggacacccggcgccgattcgtccccgcagatcgaccgggcaggacatatttgggttcggggtccgctcgagtcgcctcgccggggtccaccgcggcggtcagggggtatggtgggcggcgggaggcggggcggagcggcggaggaggtcaagctttacaccggcaacgtgttcgcggcgctcgagtccctcaagaagaagaagaagaagggtgacaaaggcaaggcggtcgggaggaggacggcgagggggccgctgaaccctgggcaaacaggcgagcgagtacgccgactgcgaggagtaaacttgtgtcatctcgcgcggggccaacccgaggaccacgcacatcctcgccggcgagacggtggaggtgcgcaggggagacgtaggtggtggctgcacgaaggtggttttcagcattgagccgttggcattgagcgaccggcagcagcccgcgtcttcgtcttcgtcgccggcggcacccgccagagtcgtcgtgtccggtcgttgctgctgctgcatgaagaggctgctggaggaccgggacatcttcatctacctgggcaagaaggccttctgcagcgacgagtgcaggaacgggttcactatggaccgtttggctcgaattgtcttgagcccaaggaaatctgggcctttttaatcgtcgtcacctagctcgcggatggtccgcacacagtttccaccgtcagtatcgcattggagtgaaacaacacccatccttgccaccgattaggaacttaggaatggactcgccggtgcctgctacgctcgcccgcgcgccagcgagatcgcaagcgcgggcgggcgaggaggcttgcgcggatactcggcaggatgctccggcggaagcggagccacctccccgtcggccacccgcgttctacagctccgtgtttgcgtagatcgaagagatcgggtggaagcagctggtgagcgccacaggagacggagtgtcctgtctcaccttccgcgtcgtgacagatgcatttactggagatcacactgcccatgggctatcccgaaagtcctccttcaatctctgcagttagtctctatcctgatatttttattatactttgccagggatgaactaggcatgtttttgattatagcccatatgtagccgccagggatgaactaggcctgtttttattatactttgcagttgcatgaaatttcagaaccataaccatatgggctataattgaacttgtctcattaacaggacgtaccatatctcccaaaaatacattggtcaaaaaactcaagactgaaagatgttatttgccatgtctcattaacaggacgtaccatatactcacatatttcctgcattgcattgtacacattttcttatatattaacgagtgcaggaacgagttcatcgaggaggcggcggaggaggagctcatgattctagatcctgctcgaaatctttgatcaagatttgttagttgtcgtggcaaaagtagagagtgtaatatttgcccgcaatattttgcttctaccttcaacttggggactacttggctgggagagtgagtgggggaaggacaaaggaaatgcctctcattcaagttttttgctgtaaggagaggtcgtcccggtttggccaaccagtgcaatggtcgagccagccaatttccgtggtttgttgagctccattttggctactgtcatattagctcttcggcatcaatttccgggaggaggatggcgagggggccgcgcagcggcaagagccaccgcagaaggagctattctcagccttctcagccttttccagtttattttattttttatttagtagcatttcgttaattccagttctatttgttacaatgattccagttcgttcttgtagcaatagctggctctggctgaattttatgatctatcaatttaatgtcatcatcatgattaatgtggacttatctagactgtttttggatagagtagtagttagtgatttctgatccgactattgtcgctgcaatctttcatgttctttttatgtagtctcactttgctcctttttcattaatggtttattcgtggacattttcaacttctaccatcaaaccttctgatgttggcgtccacaaaggcggatggtgcacggttctgccggttccgcatcccgccagattgggacgaattcggcatcggctccaccaaaggctccacggatttggcatcagctccacagattttcggtacccatgctttgtttagccagtgattttgggaaatcattatccagtaattgtcaatttcggcgaggttttcattatcataagagaactgcatcttcttttcattatcataagggtttagggttgcctggctacggtcgatagtcatctatagccttgttttccgttttgcattctgtctggttgtgtatatatcttatgaacacgatttttggatgaacacattctatctgttttgctaggtttagaaatcatagaagtgccggtcaatgattttggcaaaccattatccaacaattgttgtaggattacgatcgatagtcatatgttttttctgttttgctaggtttctgaaatactgccaatagaaatcatagcagtgcattggacttaattaaagtatagaaatgaacctcatagcagtagcactaatggcattgctctctgtagcaatagaaatccccctaaccctcccacccacacaagttgcaattgccctcttaaatctattttttggtggaacaactaaattgacattgaagaagttttttggagtgtgcccgttctgcatttagaagacttctgtaagatcattcttctctttgttttttttcatttagcaacgtatgttggttttatgattttcatggaccacaaaaatagttatgtattctatttcatacattcatgtctatataacaatttatttgaagggcatttacctgtgtactgagagttttataattattctggttgtggaaataacttcaattgtaatcatcctgtaatccctggatttatagaggattgcttgaggtacaaatttgtatataacttctattaaattgctcctaatttcctttgtcggttgtcattctattagatggtgcaattgtttatacactaataactgagtttgatgttgcagatactgggtaacagaaatgcatgtttatggtgttcgttttgaccttgcattacatctacaatgaccagaggatgcaggtggttcgaagttctatgatcataagacgcattcaggtcgatctcactcttcatgttcgtgctcgctgcgcagaacgccactgcagcaccgatggaattgtacggtgtcatcaggctcgactaaatctagatgggatggactctacttgtgttgaaggaaaggaagtatgtgcttggcttgcgaggagggggcatatttctgttcaacttttcttacgggtcatgttacttgtcatctcagattacacaactttaggtatttctgtctttgtgagaaaagtaccaaaatagtttcacatgtgtttaatttgaatattttgtgtgccgttgcaacgcacgggcacatacctagttatatttataattttagatacataattagacaaataatttcatat

SEQ ID NO: 55824 - DNA, 3061 bp, Zea Mays
cccccaccaatctcgctctgtgacccctccccgcgcggcggtcgcggtcatcccgctgtcgacgctacttcggcaagatgagcttgcttgggacggggcttcagcctcggcctcgacccgcgtcaggtgaaggctgcggcacgcgtcccctcctccgcctccagtctccgcccaactcaaaaccctagcaaccgcgcctccatccctacccgaattccaatccaggtccgatcccccggtggcgaggacacccggcgccgattcgtccccgcagatcgaccgggcaggacatatttgggttcggggtccgctcgagtcgcctcgccggggtccaccgcggcggtcagggggtatggtgggcggcgggaggcggggcggagcggcggaggaggtcaagctttacaccggcaacgtgttcgcggcgctcgagtccctcaagaagaagaagaagaagggtgacaaaggcaaggcggtcgggaggaggacggcgagggggccgctgaaccctgggcaaacaggcgagcgagtacgccgactgcgaggagtaaacttgtgtcatctcgcgcggggccaacccgaggaccacgcacatcctcgccggcgagacggtggaggtgcgcaggggagacgtaggtggtggctgcacgaaggtggttttcagcattgagccgttggcattgagcgaccggcagcagcccgcgtcttcgtcttcgtcgccggcggcacccgccagagtcgtcgtgtccggtcgttgctgctgctgcatgaagaggctgctggaggaccgggacatcttcatctacctgggcaagaaggccttctgcagcgacgagtgcaggaacgggttcactatggaccgtttggctcgaattgtcttgagcccaaggaaatctgggcctttttaatcgtcgtcacctagctcgcggatggtccgcacacagtttccaccgtcagtatcgcattggagtgaaacaacacccatccttgccaccgattaggaacttaggaatggactcgccggtgcctgctacgctcgcccgcgcgccagcgagatcgcaagcgcgggcgggcgaggaggcttgcgcggatactcggcaggatgctccggcggaagcggagccacctccccgtcggccacccgcgttctacagctccgtgtttgcgtagatcgaagagatcgggtggaagcagctggtgagcgccacaggagacggagtgtcctgtctcaccttccgcgtcgtggatgaaccaggacagatgcatttactggagatcacactgcccatgggctatcccgaaagtcctccttcaatctctgcagttagtctctatcctgatatttttattatactttgccagggatgaactaggcatgtttttgattatagcccatatgtagccgccagggatgaactaggcctgtttttattatactttgcagttgcatgaaatttcagaaccataaccatatgggctataattgaacttgtctcattaacaggacgtaccatatctcccaaaaatacattggtcaaaaaactcaagactgaaagatgttatttgccatgtctcattaacaggacgtaccatatactcacatatttcctgcattgcattgtacacattttcttatatattaacgagtgcaggaacgagttcatcgaggaggcggcggaggaggagctcatgattctagatcctgctcgaaatctttgatcaagatttgttagttgtcgtggcaaaagtagagagtgtaatatttgcccgcaatattttgcttctaccttcaacttggggactacttggctgggagagtgagtgggggaaggacaaaggaaatgcctctcattcaagttttttgctgtaaggagaggtcgtcccggtttggccaaccagtgcaatggtcgagccagccaatttccgtggtttgttgagctccattttggctactgtcatattagctcttcggcatcaatttccgggaggaggatggcgagggggccgcgcagcggcaagagccaccgcagaaggagctattctcagccttctcagccttttccagtttattttattttttatttagtagcatttcgttaattccagttctatttgttacaatgattccagttcgttcttgtagcaatagctggctctggctgaattttatgatctatcaatttaatgtcatcatcatgattaatgtggacttatctagactgtttttggatagagtagtagttagtgatttctgatccgactattgtcgctgcaatctttcatgttctttttatgtagtctcactttgctcctttttcattaatggtttattcgtggacattttcaacttctaccatcaaaccttctgatgttggtactttgtgttctattcaattattttacccataaaagaacttgggattattttataccttttatctctactactacttaagtgtctattgtaggcgtccacaaaggcggatggtgcacggttctgccggttccgcatcccgccagattgggacgaattcggcatcggctccaccaaaggctccacggatttggcatcagctccacagattttcgatactgggtaacagaaatgcatgtttatggtgttcgttttgaccttgcattacatctacaatgaccagaggatgcaggtggttcgaagttctatgatcataagacgcattcaggtcgatctcactcttcatgttcgtgctcgctgcgcagaacgccactgcagcaccgatggaattgtacggtgtcatcaggctcgactaaatctagatgggatggactctacttgtgttgaaggaaaggaagtatgtgcttggcttgcgaggagggggcatatttctgttcaacttttcttacgggtcatgttacttgtcatctcagattacacaactttaggtatttctgtctttgtgagaaaagtaccaaaatagtttcacatgtgtttaatttgaatattttgtgtgccgttgcaacgcacgggcacatacctagttatatttataattttagatacataattagacaaataatttcatat

SEQ ID NO: 55825 - DNA, 4208 bp, Zea Mays
cacccccaccaatctcgctctgtgacccctccccgcgcggcggtcgcggtcatcccgctgtcgacgctacttcggcaagatgagcttgcttgggacggggcttcagcctcggcctcgacccgcgtcaggtgaaggctgcggcacgcgtcccctcctccgcctccagtctccgcccaactcaaaaccctagcaaccgcgcctccatccctacccgaattccaatccaggtccgatcccccggtggcgaggacacccggcgccgattcgtccccgcagatcgaccgggcaggacatatttgggttcggggtccgctcgagtcgcctcgccggggtccaccgcggcggtcagggggtatggtgggcggcgggaggcggggcggagcggcggaggaggtcaagctttacaccggcaacgtgttcgcggcgctcgagtccctcaagaagaagaagaagaagggtgacaaaggcaaggcggtcgggaggaggacggcgagggggccgctgaaccctgggcaaacaggcgagcgagtacgccgactgcgaggagtaaacttgtgtcatctcgcgcggggccaacccgaggaccacgcacatcctcgccggcgagacggtggaggtgcgcaggggagacgtaggtggtggctgcacgaaggtggttttcagcattgagccgttggcattgagcgaccggcagcagcccgcgtcttcgtcttcgtcgccggcggcacccgccagagtcgtcgtgtccggtcgttgctgctgctgcatgaagaggctgctggaggaccgggacatcttcatctacctgggcaagaaggccttctgcagcgacgagtgcaggaacgggttcactatggaccgtttggctcgaattgtcttgagcccaaggaaatctgggcctttttaatcgtcgtcacctagctcgcggatggtccgcacacagtttccaccgtcagtatcgcattggagtgaaacaacacccatccttgccaccgattaggaacttaggaatggactcgccggtgcctgctacgctcgcccgcgcgccagcgagatcgcaagcgcgggcgggcgaggaggcttgcgcggatactcggcaggatgctccggcggaagcggagccacctccccgtcggccacccgcgttctacagctccgtgtttgcgtagatcgaagagatcgggtggaagcagctggtgagcgccacaggagacggagtgtcctgtctcaccttccgcgtcgtgtaaggattcatgttgctgccagttggcactaacctctttctataggtttatattatacgactgtttggagaaaaaactattgccgttcaggtggttgagcaacgctggcgcattacatactgaattttgtcagtttaatagttgttcgaaaaggttatttcagaaacctatctaaacattgtaatacatatgaacaacaatcgcaattgtagcagcgtttctttggaggcacccctttaattctattctgttgtttgaatgttgaaactatggcttatgtatctgccagggatgaaccaggacagatgcatttactggagatcacactgcccatgggctatcccgaaagtcctccttcaatctctgcagttagtctctatcctgatatttttattatactttgccagggatgaactaggcatgtttttgattatagcccatatgtagccgccagggatgaactaggcctgtttttattatactttgcagttgcatgaaatttcagaaccataaccatatgggctataattgaacttgtctcattaacaggacgtaccatatctcccaaaaatacattggtcaaaaaactcaagactgaaagatgttatttgccatgtctcattaacaggacgtaccatatactcacatatttcctgcattgcattgtacacattttcttatatattaacgagtgcaggaacgagttcatcgaggaggcggcggaggaggagctcatgattctagatcctgctcgaaatctttgatcaagatttgttagttgtcgtggcaaaagtagagagtgtaatatttgcccgcaatattttgcttctaccttcaacttggggactacttggctgggagagtgagtgggggaaggacaaaggaaatgcctctcattcaagttttttgctgtaaggagaggtcgtcccggtttggccaaccagtgcaatggtcgagccagccaatttccgtggtttgttgagctccattttggctactgtcatattagctcttcggcatcaatttccgggaggaggatggcgagggggccgcgcagcggcaagagccaccgcagaaggagctattctcagccttctcagccttttccagtttattttattttttatttagtagcatttcgttaattccagttctatttgttacaatgattccagttcgttcttgtagcaatagctggctctggctgaattttatgatctatcaatttaatgtcatcatcatgattaatgtggacttatctagactgtttttggatagagtagtagttagtgatttctgatccgactattgtcgctgcaatctttcatgttctttttatgtagtctcactttgctcctttttcattaatggtttattcgtggacattttcaacttctaccatcaaaccttctgatgttggtactttgtgttctattcaattattttacccataaaagaacttgggattattttataccttttatctctactactacttaagtgtctattgtaggcgtccacaaaggcggatggtgcacggttctgccggttccgcatcccgccagattgggacgaattcggcatcggctccaccaaaggctccacggatttggcatcagctccacagattttcggtacccatgctttgtttagccagtgattttgggaaatcattatccagtaattgtcaatttcggcgaggttttcattatcataagagaactgcatcttcttttcattatcataagggtttagggttgcctggctacggtcgatagtcatctatagccttgttttccgttttgcattctgtctggttgtgtatatatcttatgaacacgatttttggatgaacacattctatctgttttgctaggtttagaaatcatagaagtgccggtcaatgattttggcaaaccattatccaacaattgttgtaggattacgatcgatagtcatatgttttttctgttttgctaggtttctgaaatactgccaatagaaatcatagcagtgcattggacttaattaaagtatagaaatgaacctcatagcagtagcactaatggcattgctctctgtagcaatagaaatccccctaaccctcccacccacacaagttgcaattgccctcttaaatctattttttggtggaacaactaaattgacattgaagaagttttttggagtgtgcccgttctgcatttagaagacttctgtaagatcattcttctctttgttttttttcatttagcaacgtatgttggttttatgattttcatggaccacaaaaatagttatgtattctatttcatacattcatgtctatataacaatttatttgaagggcatttacctgtgtactgagagttttataattattctggttgtggaaataacttcaattgtaatcatcctgtaatccctggatttatagaggattgcttgaggtacaaatttgtatataacttctattaaattgctcctaatttcctttgtcggttgtcattctattagatggtgcaattgtttatacactaataactgagtttgatgttgcagatactgggtaacagaaatgcatgtttatggtgttcgttttgaccttgcattacatctacaatgaccagaggatgcagaacgccactgcagcaccgatggaattgtacggtgtcatcaggctcgactaaatctagatgggatggactctacttgtgttgaaggaaaggaagtatgtgcttggcttgcgaggagggggcatatttctgttcaacttttcttacgggtcatgttacttgtcatctcagattacacaactttaggtatttctgtctttgtgagaaaagtaccaaaatagtttcacatgtgtttaatttgaatattttgtgtgccgttgcaacgcacgggcacatacctagttatatttataattttagatacataattagacaaataatttcatat

SEQ ID NO: 55826 - DNA, 3916 bp, Zea Mays
cccacccccaccaatctcgctctgtgacccctccccgcgcggcggtcgcggtcatcccgctgtcgacgctacttcggcaagatgagcttgcttgggacggggcttcagcctcggcctcgacccgcgtcaggtgaaggctgcggcacgcgtcccctcctccgcctccagtctccgcccaactcaaaaccctagcaaccgcgcctccatccctacccgaattccaatccaggtccgatcccccggtggcgaggacacccggcgccgattcgtccccgcagatcgaccgggcaggacatatttgggttcggggtccgctcgagtcgcctcgccggggtccaccgcggcggtcagggggtatggtgggcggcgggaggcggggcggagcggcggaggaggtcaagctttacaccggcaacgtgttcgcggcgctcgagtccctcaagaagaagaagaagaagggtgacaaaggcaaggcggtcgggaggaggacggcgagggggccgctgaaccctgggcaaacaggcgagcgagtacgccgactgcgaggagtaaacttgtgtcatctcgcgcggggccaacccgaggaccacgcacatcctcgccggcgagacggtggaggtgcgcaggggagacgtaggtggtggctgcacgaaggtggttttcagcattgagccgttggcattgagcgaccggcagcagcccgcgtcttcgtcttcgtcgccggcggcacccgccagagtcgtcgtgtccggtcgttgctgctgctgcatgaagaggctgctggaggaccgggacatcttcatctacctgggcaagaaggccttctgcagcgacgagtgcaggaacgggttcactatggaccgtttggctcgaattgtcttgagcccaaggaaatctgggcctttttaatcgtcgtcacctagctcgcggatggtccgcacacagtttccaccgtcagtatcgcattggagtgaaacaacacccatccttgccaccgattaggaacttaggaatggactcgccggtgcctgctacgctcgcccgcgcgccagcgagatcgcaagcgcgggcgggcgaggaggcttgcgcggatactcggcaggatgctccggcggaagcggagccacctccccgtcggccacccgcgttctacagctccgtgtttgcatcgaagagatcgggtggaagcagctggtgagcgccacaggagacggagtgtcctgtctcaccttccgcgtcgtggatgaaccaggacagatgcatttactggagatcacactgcccatgggctatcccgaaagtcctccttcaatctctgcagttagtctctatcctgatatttttattatactttgccagggatgaactaggcatgtttttgattatagcccatatgtagccgccagggatgaactaggcctgtttttattatactttgcagttgcatgaaatttcagaaccataaccatatgggctataattgaacttgtctcattaacaggacgtaccatatctcccaaaaatacattggtcaaaaaactcaagactgaaagatgttatttgccatgtctcattaacaggacgtaccatatactcacatatttcctgcattgcattgtacacattttcttatatattaacgagtgcaggaacgagttcatcgaggaggcggcggaggaggagctcatgattctagatcctgctcgaaatctttgatcaagatttgttagttgtcgtggcaaaagtagagagtgtaatatttgcccgcaatattttgcttctaccttcaacttggggactacttggctgggagagtgagtgggggaaggacaaaggaaatgcctctcattcaagttttttgctgtaaggagaggtcgtcccggtttggccaaccagtgcaatggtcgagccagccaatttccgtggtttgttgagctccattttggctactgtcatattagctcttcggcatcaatttccgggaggaggatggcgagggggccgcgcagcggcaagagccaccgcagaaggagctattctcagccttctcagccttttccagtttattttattttttatttagtagcatttcgttaattccagttctatttgttacaatgattccagttcgttcttgtagcaatagctggctctggctgaattttatgatctatcaatttaatgtcatcatcatgattaatgtggacttatctagactgtttttggatagagtagtagttagtgatttctgatccgactattgtcgctgcaatctttcatgttctttttatgtagtctcactttgctcctttttcattaatggtttattcgtggacattttcaacttctaccatcaaaccttctgatgttggtactttgtgttctattcaattattttacccataaaagaacttgggattattttataccttttatctctactactacttaagtgtctattgtaggcgtccacaaaggcggatggtgcacggttctgccggttccgcatcccgccagattgggacgaattcggcatcggctccaccaaaggctccacggatttggcatcagctccacagattttcggtacccatgctttgtttagccagtgattttgggaaatcattatccagtaattgtcaatttcggcgaggttttcattatcataagagaactgcatcttcttttcattatcataagggtttagggttgcctggctacggtcgatagtcatctatagccttgttttccgttttgcattctgtctggttgtgtatatatcttatgaacacgatttttggatgaacacattctatctgttttgctaggtttagaaatcatagaagtgccggtcaatgattttggcaaaccattatccaacaattgttgtaggattacgatcgatagtcatatgttttttctgttttgctaggtttctgaaatactgccaatagaaatcatagcagtgcattggacttaattaaagtatagaaatgaacctcatagcagtagcactaatggcattgctctctgtagcaatagaaatccccctaaccctcccacccacacaagttgcaattgccctcttaaatctattttttggtggaacaactaaattgacattgaagaagttttttggagtgtgcccgttctgcatttagaagacttctgtaagatcattcttctctttgttttttttcatttagcaacgtatgttggttttatgattttcatggaccacaaaaatagttatgtattctatttcatacattcatgtctatataacaatttatttgaagggcatttacctgtgtactgagagttttataattattctggttgtggaaataacttcaattgtaatcatcctgtaatccctggatttatagaggattgcttgaggtacaaatttgtatataacttctattaaattgctcctaatttcctttgtcggttgtcattctattagatggtgcaattgtttatacactaataactgagtttgatgttgcagatactgggtaacagaaatgcatgtttatggtgttcgttttgaccttgcattacatctacaatgaccagaggatgcagaacgccactgcagcaccgatggaattgtacggtgtcatcaggctcgactaaatctagatgggatggactctacttgtgttgaaggaaaggaagtatgtgcttggcttgcgaggagggggcatatttctgttcaacttttcttacgggtcatgttacttgtcatctcagattacacaactttaggtatttctgtctttgtgagaaaagtaccaaaatagtttcacatgtgtttaatttgaatattttgtgtgccgttgcaacgcacgggcacatacctagttatatttataattttagatacataattagacaaataatttcatat

SEQ ID NO: 55827 - DNA, 2993 bp, Zea Mays
ccccacccccaccaatctcgctctgtgacccctccccgcgcggcggtcgcggtcatcccgctgtcgacgctacttcggcaagatgagcttgcttgggacggggcttcagcctcggcctcgacccgcgtcaggtgaaggctgcggcacgcgtcccctcctccgcctccagtctccgcccaactcaaaaccctagcaaccgcgcctccatccctacccgaattccaatccaggtccgatcccccggtggcgaggacacccggcgccgattcgtccccgcagatcgaccgggcaggacatatttgggttcggggtccgctcgagtcgcctcgccggggtccaccgcggcggtcagggggtatggtgggcggcgggaggcggggcggagcggcggaggaggtcaagctttacaccggcaacgtgttcgcggcgctcgagtccctcaagaagaagaagaagaagggtgacaaaggcaaggcggtcgggaggaggacggcgagggggccgctgaaccctgggcaaacaggcgagcgagtacgccgactgcgaggagtaaacttgtgtcatctcgcgcggggccaacccgaggaccacgcacatcctcgccggcgagacggtggaggtgcgcaggggagacgtaggtggtggctgcacgaaggtggttttcagcattgagccgttggcattgagcgaccggcagcagcccgcgtcttcgtcttcgtcgccggcggcacccgccagagtcgtcgtgtccggtcgttgctgctgctgcatgaagaggctgctggaggaccgggacatcttcatctacctgggcaagaaggccttctgcagcgacgagtgcaggaacgggttcactatggaccgtttggctcgaattgtcttgagcccaaggaaatctgggcctttttaatcgtcgtcacctagctcgcggatggtccgcacacagtttccaccgtcagtatcgcattggagtgaaacaacacccatccttgccaccgattaggaacttaggaatggactcgccggtgcctgctacgctcgcccgcgcgccagcgagatcgcaagcgcgggcgggcgaggaggcttgcgcggatactcggcaggatgctccggcggaagcggagccacctccccgtcggccacccgcgttctacagctccgtgtttgcgtagatcgaagagatcgggtggaagcagctggtgagcgccacaggagacggagtgtcctgtctcaccttccgcgtcgtggatgaaccaggacagatgcatttactggagatcacactgcccatgggctatcccgaaagtcctccttcaatctctgcagttagtctctatcctgatatttttattatactttgccagggatgaactaggcatgtttttgattatagcccatatgtagccgccagggatgaactaggcctgtttttattatactttgcagttgcatgaaatttcagaaccataaccatatgggctataattgaacttgtctcattaacaggacgtaccatatctcccaaaaatacattggtcaaaaaactcaagactgaaagatgttatttgccatgtctcattaacaggacgtaccatatactcacatatttcctgcattgcattgtacacattttcttatatattaacgagtgcaggaacgagttcatcgaggaggcggcggaggaggagctcatgattctagatcctgctcgaaatctttgatcaagatttgttagttgtcgtggcaaaagtagagagtgtaatatttgcccgcaatattttgcttctaccttcaacttggggactacttggctgggagagtgagtgggggaaggacaaaggaaatgcctctcattcaagttttttgctgtaaggagaggtcgtcccggtttggccaaccagtgcaatggtcgagccagccaatttccgtggtttgttgagctccattttggctactgtcatattagctcttcggcatcaatttccgggaggaggatggcgagggggccgcgcagcggcaagagccaccgcagaaggagctattctcagccttctcagccttttccagtttattttattttttatttagtagcatttcgttaattccagttctatttgttacaatgattccagttcgttcttgtagcaatagctggctctggctgaattttatgatctatcaatttaatgtcatcatcatgattaatgtggacttatctagactgtttttggatagagtagtagttagtgatttctgatccgactattgtcgctgcaatctttcatgttctttttatgtagtctcactttgctcctttttcattaatggtttattcgtggacattttcaacttctaccatcaaaccttctgatgttggtactttgtgttctattcaattattttacccataaaagaacttgggattattttataccttttatctctactactacttaagtgtctattgtaggcgtccacaaaggcggatggtgcacggttctgccggttccgcatcccgccagattgggacgaattcggcatcggctccaccaaaggctccacggatttggcatcagctccacagattttcgatactgggtaacagaaatgcatgtttatggtgttcgttttgaccttgcattacatctacaatgaccagaggatgcagaacgccactgcagcaccgatggaattgtacggtgtcatcaggctcgactaaatctagatgggatggactctacttgtgttgaaggaaaggaagtatgtgcttggcttgcgaggagggggcatatttctgttcaacttttcttacgggtcatgttacttgtcatctcagattacacaactttaggtatttctgtctttgtgagaaaagtaccaaaatagtttcacatgtgtttaatttgaatattttgtgtgccgttgcaacgcacgggcacatacctagttatatttataattttagatacataattagacaaataatttcatat

SEQ ID NO: 55828 - DNA, 4271 bp, Zea Mays
gtcagaggtgatcactgatcagccagcggagacggcattggagttggaagttgggaacgcatgagagatggagagacgagagattcaaaacccggtctctgtcatcgtggacactcggatctccatccgacgtccacttcattgcctgaagctaaaccatatttcaggcacctgacatagagtgcctctcgaaaggaatagagtgcacgggaaacacaaaacacacacacagatagagactatgcattggctgtagaccaccccagaaataattgattgaatcctgttaacaacaaaatacgtcagcaatgattaattgaatatcaccaagcttgttaactatcttaaaccgccatgctttagagtatgcacagtgataacacctgctatggcaaagtgtccattttaaatttttatgtcaaaactttttaaaattcaaagtgaaattgtctattggcaggacagtaaaataccaaacaatggaaaaaccaaggcatttatagtacaacatgacagacagtataagattgtcatttcaacctggagaaactttaggagctggaagagtttaggtctgtgtgagagcaaaatattttttttatagtttctatgcaataccatggttttggacaataccgtagtattttatgtcatgaggtgtttagttgcactcctgaaaactatgttttcaaaaccattgtttatagataccatgatatttttagagtattggagattccactacaacctaaagtttttatggcatgactagcttttgcctaataccatggtttataatattgtctccaaacaatgtttctcaaaaccatgttatttttggagctaccaaaactacggtattatcatgtgtaaaacattgttgccaaacaggccctcagagtttttcaaaatggctctagctcctccctttttaatgaaaaagggccaaacaggccctcaagagttttttcaaaatggctctagctcctccctttttaatgaaaaagggccgtaaataactatttctaccgaaccatttgataaggctcaagagtttttcaaaatggctctagctcctccctttttaatgaaaaagggccgtaaataactatttctaccgaaccatttgataaggctcctatccaggagtcgaaggccaccaatacactcatttttgttccaaattatagttcacgtcgtttttaaagagccatttggaacctttgccgctccctctccttgcctagccaggtgaaaaaattggcacacggttgttgtttttttttggggggtggggggggggggggtggcgttggtctttgattgtgatttcaagatttccccacggctcgcacttggcaaggctggcctagcttggtagggacaggcaagcaaagctggcattagtgcatttttcatggaaatttagatactattttttcatggaaactacacgcacatgacagacagtataacatgctccaaacttctctagttttgagtgggatgaaaatggtaattcgaacggttagaacaaatttaatattttaaattagatatgtataaaatttaatattgatctttttttatgttatcaagcacattagtacaaatacgaataaaatattacataaattgctttatgtattatttgctccctacaacacaaaaagttgaaaaaattaccgaatttattttcgaatccataccgaagtttatatctattatttaaaaaaatatatgatgaatttgaggtttaccttttatgaatctttagaagctgaatgttaaaaacaagaatacaaatttgtattatagattctatatcctatttattcacaatcaaagaaaaatgactaaaaaacttattaccgaataaataccgtttctgaccgttttcatccctagttttgactaaagttttaaaaaatagcatctataagttaaattaaatgcaccatcgagatattttcatggaaatttagtaaaactaattcgaggatgcatgcgttagtgcatttttctatagacttatcaaagttagagaagttaagcttacatcaaatctaaatgaactataatctggaacatagggagtacccgcttcctaagcatccttccgactcaggtttgttgatgaatttcctttccaaatcacgattttcctttctagggacctacagatcacatggccatcagggtaatgttatgctttaaaggtgatggacagatgatattccaggaagaatcacaatagccacagatgtcaaactagtacagatgcacattgagaatgcaattgagaagccagtgtttaggaaaacagagaaaccaaacaaactttgccttgaaacgacattggggactataaatgtaacaaaaattactctactgatgttctgtcgattcagactacacgttgagaggtttgctaagattgtaaaaatgtttataatttcggtcattaaatttatattataacatggtaatagcttttggtgccatatatatttattttccttttctctttcttttctgtttattgtgctcatgtagaagttgcaactctaagctatgctaacttgcttaggactaaaaggctttgtttttttctcaaatggctgttcctaaggtattttttgttggtccaaatattagcatgtaaataaaacaggtatgttatccccaaatccaaagcatgaggaacttattgagtattgatttatctttaacaatgtattactagactttgttgtacatttctaaattatttttctaaacttatagcttgtttgtagctcggaaactgacagtacttcctgttttaccgatagctctggcaaagggaggcagcaagcttgaggcaacaactgcacaacttgcaagaaagccacaagtatgatcttgcaatggattctgcaacaaaaaaggaacactcatcaatagaaagttttttatgccacctgaaggactccataagaacattcaaaacacacacacacacaaaggaactcttccggaaaggatgaaataaatatccagtattgaagacatgaaactgatagtgactttctcctaacaaaataataagttcctttgcttccacctgtgtacccatgtaattttacgctgggtagttttagtatcctacctaagataatgtgagaaactcttttccaatgttgtaggcaactaatgggagaggagctttcaggcctaggtgtaagagacctccaaagtttagagaatcagattggaatgagcctgcatagtatcagaatgaggaaggtcattcattatccacttatttttcacgttttagttttctattcacttcaatctaatatgcagtaatgtcaaacaggaccatcttttgaaaagtgaaattgaagtgttacagaggaagggcagcctaattcaccaggaaaacatggagctcagtagaagagtacatttcatgtcacagcaaaaagaggaactatataggaaggtttgatgaatgatctttgcagaaactttaactaaataaagatgctttgtcaacaggaagctaaatgaattaattttagctccaggccagtgaaccaagaggtgctgctggtgcaagctctagcactccctacagcttttgtattgcaacacaacaagcagatgcccctgttaatcttgaacagaggcactcgcaaccaaaggagggaaatcggtgccaagaatttatggctcctgaactggggtaactattcttcccagtataaaaaaatgagttactccaagcatgaagaagcatactaaaaaaatctatgctttgatatgttacagacttcaactgccctaagaagatgcagtacaaggtggaaaataccattgtgtttcaccaattgcacacaatgcagagcactccggttgcatgaatatttatgatatataaccagctgtatgagcaaaatagtttgtgtacaaaatgtgtaggaccaataatgttacatgagggcatgaggctcctctgcatcaaaagtgtactgggtttcacttggcatttgcatgatgtatatggatttgcttcactgatgattgaactttgcaataaggaattgtataagtttcatggtttggaactgaaactggatgcacatttattcctaatgctactggaactctaatgggtaagggaggttggcaggctgtgggtcagatagcatcccaacagctagcagcccggcacgaaagtggactcattatttctttgataaatcctattagttggtccataa

SEQ ID NO: 55829 - DNA, 3732 bp, Zea Mays
gtcagaggtgatcactgatcagccagcggagacggcattggagttggaagttgggaacgcatgagagatggagagacgagagattcaaaacccggtctctgtcatcgtggacactcggatctccatccgacgtccacttcattgcctgaagctaaaccatatttcaggcacctgacatagagtgcctctcgaaaggaatagagtgcacgggaaacacaaaacacacacacagatagagactatgcattggctgtagaccaccccagaaataattgattgaatcctgttaacaacaaaatacgtcagcaatgattaattgaatatcaccaagcttgttaactatcttaaaccgccatgctttagagtatgcacagtgataacacctgctatggcaaagtgtccattttaaatttttatgtcaaaactttttaaaattcaaagtgaaattgtctattggcaggacagtaaaataccaaacaatggaaaaaccaaggcatttatagtacaacatgacagacagtataagattgtcatttcaacctggagaaactttaggagctggaagagtttaggtctgtgtgagagcaaaatattttttttatagtttctatgcaataccatggttttggacaataccgtagtattttatgtcatgaggtgtttagttgcactcctgaaaactatgttttcaaaaccattgtttatagataccatgatatttttagagtattggagattccactacaacctaaagtttttatggcatgactagcttttgcctaataccatggtttataatattgtctccaaacaatgtttctcaaaaccatgttatttttggagctaccaaaactacggtattatcatgtgtaaaacattgttgccaaacaggccctcagagtttttcaaaatggctctagctcctccctttttaatgaaaaagggccaaacaggccctcaagagttttttcaaaatggctctagctcctccctttttaatgaaaaagggccgtaaataactatttctaccgaaccatttgataaggctcaagagtttttcaaaatggctctagctcctccctttttaatgaaaaagggccgtaaataactatttctaccgaaccatttgataaggctcctatccaggagtcgaaggccaccaatacactcatttttgttccaaattatagttcacgtcgtttttaaagagccatttggaacctttgccgctccctctccttgcctagccaggtgaaaaaattggcacacggttgttgtttttttttggggggtggggggggggggggtggcgttggtctttgattgtgatttcaagatttccccacggctcgcacttggcaaggctggcctagcttggtagggacaggcaagcaaagctggcattagtgcatttttcatggaaatttagatactattttttcatggaaactacacgcacatgacagacagtataacatgctccaaacttctctagttttgagtgggatgaaaatggtaattcgaacggttagaacaaatttaatattttaaattagatatgtataaaatttaatattgatctttttttatgttatcaagcacattagtacaaatacgaataaaatattacataaattgctttatgtattatttgctccctacaacacaaaaagttgaaaaaattaccgaatttattttcgaatccataccgaagtttatatctattatttaaaaaaatatatgatgaatttgaggtttaccttttatgaatctttagaagctgaatgttaaaaacaagaatacaaatttgtattatagattctatatcctatttattcacaatcaaagaaaaatgactaaaaaacttattaccgaataaataccgtttctgaccgttttcatccctagttttgactaaagttttaaaaaatagcatctataagttaaattaaatgcaccatcgagatattttcatggaaatttagtaaaactaattcgaggatgcatgcgttagtgcatttttctatagacttatcaaagttagagaagttaagcttacatcaaatctaaatgaactataatctggaacatagggagtacccgcttcctaagcatccttccgactcaggtttgttgatgaatttcctttccaaatcacgattttcctttctagggacctacagatcacatggccatcagggtaatgttatgctttaaaggtgatggacagatgatattccaggaagaatcacaatagccacagatgtcaaactagtacagatgcacattgagaatgcaattgagaagccagtgtttaggaaaacagagaaaccaaacaaactttgccttgaaacgacattggggactataaatgtaacaaaaattactctactgatgttctgtcgattcagactacacgttgagaggtttgctaagattgtaaaaatgtttataatttcggtcattaaatttatattataacatggtaatagcttttggtgccatatatatttattttccttttctctttcttttctgtttattgtgctcatgtagaagttgcaactctaagctatgctaacttgcttaggactaaaaggctttgtttttttctcaaatggctgttcctaaggtattttttgttggtccaaatattagcatgtaaataaaacaggtatgttatccccaaatccaaagcatgaggaacttattgagtattgatttatctttaacaatgtattactagactttgttgtacatttctaaattatttttctaaacttatagcttgtttgtagctcggaaactgacagtacttcctgttttaccgatagctctggcaaagggaggcagcaagcttgaggcaacaactgcacaacttgcaagaaagccacaagcaactaatgggagaggagctttcaggcctaggtgtaagagacctccaaagtttagagaatcagattggaatgagcctgcatagtatcagaatgaggaaggaccatcttttgaaaagtgaaattgaagtgttacagaggaagggcagcctaattcaccaggaaaacatggagctcagtagaagagtacatttcatgtcacagcaaaaagaggaactatataggaaggccagtgaaccaagaggtgctgctggtgcaagctctagcactccctacagcttttgtattgcaacacaacaagcagatgcccctgttaatcttgaacagaggcactcgcaaccaaaggagggaaatcggtgccaagaatttatggctcctgaactgggacttcaactgccctaagaagatgcagtacaaggtggaaaataccattgtgtttcaccaattgcacacaatgcagagcactccggttgcatgaatatttatgatatataaccagctgtatgagcaaaatagtttgtgtacaaaatgtgtaggaccaataatgttacatgagggcatgaggctcctctgcatcaaaagtgtactgggtttcacttggcatttgcatgatgtatatggatttgcttcactgatgattgaactttgcaataaggaattgtataagtttcatggtttggaactgaaactggatgcacatttattcctaatgctactggaactctaatgggtaagggaggttggcaggctgtgggtcagatagcatcccaacagctagcagcccggcacgaaagtggactcattatttctttgataaatcctattagttggtccataa

SEQ ID NO: 55830 - DNA, 693 bp, Zea Mays
agttgcgctacttgcatctcaacttcgtgcgtgcataataaaacctaatcatcggcacttcccgttccgctctttggaaggtggctaggaatggaaccggcctctagtagctaggctatagcttccgcctttaattcccccatcagaccagtcatcgctcgtccccccggccgccggcgagctcttcgtcttcccgtgtgatccttccttcccatccggtccggcctagactagatctgagagatagaaggagggatggggagggggaagatagtgataaggaggatagacaactccacgagcaggcaggtgaccttctccaagaggcggagcgggctgctgaagaaggcgaaggagctctctatcctctgcgacgcggaggttggcctcatcatcttctccagcaccggcaggctctacgatttctccaacaccaacatgaaagctgtgatagaccgatatgggaaggcaaaagacgagcagcttggcaagaacgatgcaacttcagaactcatggtacggtgaggaaaatgtatacctatttctagctaactagcagttattggtcgtagtacacacgtgccatatgatgtatgttggtcggaccaagatcagaagtttagtccttcattactcacaaataatgacaatttgttgtgtttagctaatcagcttttcaaaaattttgcgaaa

SEQ ID NO: 55831 - DNA, 1497 bp, Zea Mays
cgagctcgcaatcacatctgcctcgttctcacttcctacccgctggccgcttgccggtaccacacacgcggcacgccgccgcgccagccatggacaccgctctaccttccgtcctcataggcggcggactctccgtgtccgtctccatttccaccgccactaaagccggcagccaatccatttcctcccacctctcgacctcctccctccgtttaaccgctcgccatcggaaccggcgccgtttgcccctccttgcatcatcttccgagtctcctcccgcgcaactagccgccgcttcgactgagagccagtcgcgttcctccaggtgggtggttgtgatggatacgccccctgccgccgcgggaggcagcggggtgtcccgcgcagaggccgtggattactacgcagccacactggcccaggttgttggaagtgagaaggaggcgcagatgcgcatatgtgaggcttcgtgggatgggacctacgagttccgctgcgagatcgacgaggatgcatcgaaggagcttgcaaagatgcctggagtgttatctgttcaactagatatgggtaacaaatcagagaaggataatcacagcttgagtctctcgacagctaaccttgtaagcattagtgatggtgcttctacatcttcaagtgggaaaaatgagttttggcttgtccggatggagaagcccggagttgaagttgtgacaaaggcccaaatggtggatcactacacccaaatccttatgaaagtgttggggaacgaacaggatgctcaggttagtatatatcacgtttcatgggatagggattatggtttctgttgtcatattgatgaagaatgcgcaaaagagttagctgatgttcctggagtgttatctgttcaacccgatacgaactttggatcagacaacaaaaattacaaagggctttcattttatacatctgagaagactctacgggcagcgtttgagcctttcggtgagctcgttgaagtgaagataattatggacaggatatcaaaaaggtcaaaaggttatgccttcgtagaatacactaccgaggaagctggaggtgctgctctaaaagcaatgaatggacagatcataaacggctggatgatagttgttgatgttgctaaaactagatcgagagaccgtctatctgggggatctaatcaagcatttcgaccacactatcaggctagatgactgttatatgtacagaacttacagctgtagagtagagataagcacgagagcgaggaattgctgggggatgccgagccgcctgatctgattgtagttcagtgcccttgtcttgtgctaattgctagaaaatgaatactcccagcaaaaaaatatgtaaatgcagctgaagtgtacgattactaacttctacttaattaaatcattctcagatacaggctttttcctgctcgtaagtttgaatatatatttaatatttatgatatgatggattttttattaacaa

SEQ ID NO: 55832 - DNA, 1556 bp, Zea Mays
cgagctcgcaatcacatctgcctcgttctcacttcctacccgctggccgcttgccggtaccacacacgcggcacgccgccgcgccagccatggacaccgctctaccttccgtcctcataggcggcggactctccgtgtccgtctccatttccaccgccactaaagccggcagccaatccatttcctcccacctctcgacctcctccctccgtttaaccgctcgccatcggaaccggcgccgtttgcccctccttgcatcatcttccgagtctcctcccgcgcaactagccgccgcttcgactgagagccagtcgcgttcctccaggtgggtggttgtgatggatacgccccctgccgccgcgggaggcagcggggtgtcccgcgcagaggccgtggattactacgcagccacactggcccaggttgttggaagtgagaaggaggcgcagatgcgcatatgtgaggcttcgtgggatgggacctacgagttccgctgcgagatcgacgaggatgcatcgaaggagcttgcaaagatgcctggagtgttatctgttcaactagatatgggtaacaaatcagagaaggataatcacagcttgagtctctcgacagctaaccttgtaagcattagtgatggtgcttctacatcttcaagtgggaaaaatgagttttggcttgtccggatggagaagcccggagttgaagttgtgacaaaggcccaaatggtggatcactacacccaaatccttatgaaagtgttggggaacgaacaggatgctcaggttagtatatatcacgtttcatgggatagggattatggtttctgttgtcatattgatgaagaatgcgcaaaagagttagctgatgttcctggagtgttatctgttcaacccgatacgaactttggatcagacaacaaaaattacaaagtttcaggtgatgatggcgtgaaatcatctgaagggactggagcggtcgatatcaaaactaaaaggctctttgttacagggctttcattttatacatctgagaagactctacgggcagcgtttgagcctttcggtgagctcgttgaaggatatcaaaaaggtcaaaaggttatgccttcgtagaatacactaccgaggaagctggaggtgctgctctaaaagcaatgaatggacagatcataaacggctggatgatagttgttgatgttgctaaaactagatcgagagaccgtctatctgggggatctaatcaagcatttcgaccacactatcaggctagatgactgttatatgtacagaacttacagctgtagagtagagataagcacgagagcgaggaattgctgggggatgccgagccgcctgatctgattgtagttcagtgcccttgtcttgtgctaattgctagaaaatgaatactcccagcaaaaaaatatgtaaatgcagctgaagtgtacgattactaacttctacttaattaaatcattctcagatacaggctttttcctgctcgtaagtttgaatatatatttaatatttatgatatgatggattttttattaacaa

SEQ ID NO: 55833 - DNA, 1554 bp, Zea Mays
cgagctcgcaatcacatctgcctcgttctcacttcctacccgctggccgcttgccggtaccacacacgcggcacgccgccgcgccagccatggacaccgctctaccttccgtcctcataggcggcggactctccgtgtccgtctccatttccaccgccactaaagccggcagccaatccatttcctcccacctctcgacctcctccctccgtttaaccgctcgccatcggaaccggcgccgtttgcccctccttgcatcatcttccgagtctcctcccgcgcaactagccgccgcttcgactgagagccagtcgcgttcctccaggtgggtggttgtgatggatacgccccctgccgccgcgggaggcagcggggtgtcccgcgcagaggccgtggattactacgcagccacactggcccaggttgttggaagtgagaaggaggcgcagatgcgcatatgtgaggcttcgtgggatgggacctacgagttccgctgcgagatcgacgaggatgcatcgaaggagcttgcaaagatgcctggagtgttatctgttcaactagatatgggtaacaaatcagagaaggataatcacagcttgagtctctcgacagctaaccttgtaagcattagtgatggtgcttctacatcttcaagtgggaaaaatgagttttggcttgtccggatggagaagcccggagttgaagttgtgacaaaggcccaaatggtggatcactacacccaaatccttatgaaagtgttggggaacgaacaggatgctcaggttagtatatatcacgtttcatgggatagggattatggtttctgttgtcatattgatgaagaatgcgcaaaagagttagctgatgttcctggagtgttatctgttcaacccgatacgaactttggatcagacaacaaaaattacaaaggtgatgatggcgtgaaatcatctgaagggactggagcggtcgatatcaaaactaaaaggctctttgttacagggctttcattttatacatctgagaagactctacgggcagcgtttgagcctttcgtgaagataattatggacaggatatcaaaaaggtcaaaaggttatgccttcgtagaatacactaccgaggaagctggaggtgctgctctaaaagcaatgaatggacagatcataaacggctggatgatagttgttgatgttgctaaaactagatcgagagaccgtctatctgggggatctaatcaagcatttcgaccacactatcaggctagatgactgttatatgtacagaacttacagctgtagagtagagataagcacgagagcgaggaattgctgggggatgccgagccgcctgatctgattgtagttcagtgcccttgtcttgtgctaattgctagaaaatgaatactcccagcaaaaaaatatgtaaatgcagctgaagtgtacgattactaacttctacttaattaaatcattctcagatacaggctttttcctgctcgtaagtttgaatatatatttaatatttatgatatgatggattttttattaacaa

SEQ ID NO: 55834 - DNA, 1562 bp, Zea Mays
cgagctcgcaatcacatctgcctcgttctcacttcctacccgctggccgcttgccggtaccacacacgcggcacgccgccgcgccagccatggacaccgctctaccttccgtcctcataggcggcggactctccgtgtccgtctccatttccaccgccactaaagccggcagccaatccatttcctcccacctctcgacctcctccctccgtttaaccgctcgccatcggaaccggcgccgtttgcccctccttgcatcatcttccgagtctcctcccgcgcaactagccgccgcttcgactgagagccagtcgcgttcctccaggtgggtggttgtgatggatacgccccctgccgccgcgggaggcagcggggtgtcccgcgcagaggccgtggattactacgcagccacactggcccaggttgttggaagtgagaaggaggcgcagatgcgcatatgtgaggcttcgtgggatgggacctacgagttccgctgcgagatcgacgaggatgcatcgaaggagcttgcaaagatgcctggagtgttatctgttcaactagatatgggtaacaaatcagagaaggataatcacagcttgagtctctcgacagctaaccttgtaagcattagtgatggtgcttctacatcttcaagtgggaaaaatgagttttggcttgtccggatggagaagcccggagttgaagttgtgacaaaggcccaaatggtggatcactacacccaaatccttatgaaagtgttggggaagatgctcaggttagtatatatcacgtttcatgggatagggattatggtttctgttgtcatattgatgaagaatgcgcaaaagagttagctgatgttcctggagtgttatctgttcaacccgatacgaactttggatcagacaacaaaaattacaaaggtgatgatggcgtgaaatcatctgaagggactggagcggtcgatatcaaaactaaaaggctctttgttacagggctttcattttatacatctgagaagactctacgggcagcgtttgagcctttcggtgagctcgttgaagtgaagataattatggacaggatatcaaaaaggtcaaaaggttatgccttcgtagaatacactaccgaggaagctggaggtgctgctctaaaagcaatgaatggacagatcataaacggctggatgatagttgttgatgttgctaaaactagatcgagagaccgtctatctgggggatctaatcaagcatttcgaccacactatcaggctagatgactgttatatgtacagaacttacagctgtagagtagagataagcacgagagcgaggaattgctgggggatgccgagccgcctgatctgattgtagttcagtgcccttgtcttgtgctaattgctagaaaatgaatactcccagcaaaaaaatatgtaaatgcagctgaagtgtacgattactaacttctacttaattaaatcattctcagatacaggctttttcctgctcgtaagtttgaatatatatttaatatttatgatatgatggattttttattaacaa

SEQ ID NO: 55835 - DNA, 673 bp, Zea Mays
aatcacgttgggtatgtatctgatgtgttgtatcggctaaggccatattcgtttgatcccaaaaccatagcgattggagaggattttgacttgtaggggatttaatcccccgcaatcccaatggattgacacaaaactaacagggtctaagtgtgaaatttgccaagagtgtactgttggctgaggaacgtctctggctcgatgttcgacaagaagaaacatcttcgtctctgcgttggagagattgcagccgtctcctccagatccgttgttccccgtcttggatccgtgcttaagtcatctgctccaggccgcacgctgtccatcgcagagggagattctgctgctgggtgcacaccgtccattcgaccagggatcttcacccaccggtgaacaccgctcattcttcaacatctccggcgaccatggggtcggcggcgctggtgtgcgcagccccttcgtggccccagggcgttggtttcatatgtgtatggttaatttatgtgacctgttctgcagcaagctggggtttagtaaagtgcatgtttcagtttcaagtttcagttatagcaatcttcagttatagcagtatctgaaattttatctattctgtatctaaaattttatccagttctatatctaaatgcaagtttcagttatagcaatttgaaat

SEQ ID NO: 55836 - DNA, 1518 bp, Zea Mays
taaaaaaaggtgtcaatccaatctgtgctactttgatgcttatgcaatggtatccaattttgtcaagatagcaggccaaagcttgttgctggttctccagaaggatttcctggtcatgttgatgggaagctgcgagaggcgaggatgaaccatccaaagggatttacagtggacgacaggggtaacatctatgtggctgatgccatgaacatggccattagaaagatcagtgatacaggggttacaactattgctggggggaaatcaggcagaggagggcatgttgacggaccaagtgatgaggcaaaattttctactgattttgaagtccgttacattggcagtagctgctcccttctggtgattgacagaggaaaccaagcaattagagagattcagctccactttgatgactgtgtgtaccagtatgaagctggttttcctctaggagtcgcactgcttctcgctgccgctttctttggctacatgcttgcactgctccaacgccgagttttagggatgtattcaaatggagatgaccacgagagcccagtaaaagcaaaattaaccagcattccacctccataccagaagccactgaagccttatgttcaccccctgctaattccaaatgacgacgaacctgtgaaacaagaggaggaagaagggctcttcacgtcaattggcaagcttgtgggtggagcaaaatcatcaattgcagagatcattggcgccgcattctccagaaagaagcgagtgaacgttcatcatcatcagctgggtaggccaacctcctggccagcacaagaaagctatgccatcccgcgggacgagaccccaccgccgctggacacaagggcgcccacccctcgcaaaaactacgccttcatgtccaaggagccggagaagatccaccacatccggcacggccggcctcagttacatggctggaccggagaggcagcacctcagcagcagcagccgcagcaggtgcgtcaccaacagtacgtgcaacaccacaggcagtactcggccgggccgcagacctactacgagccgagctgcgatgcaacgaaggagatcgtcttcggagccgtgcaggaaggggacaccagccgccgtcccgtggagatcaaggccgtgaaccatggggacgcggcgccgtacgagcagaacgggctgcgattccgcagtagttatagcgtgcgctacaatggcaataactagtcgaggagcacttctgtagctgtaactgtaaggagaggagcgatagagagagcagtcgaggggagtacaatctcctcattgacaagtgcaacagaaaagctggaattttggtagaagagcttggtgataatggtcattggactctttactggcggtgacatatataaatatagcgtgtatttttcttgttcttcttgggtctacttctatttttaataaatcaccttgcgtataggcctatctttaataaacaaagtgtgtatttattattttatcaactgtttttcgttt

SEQ ID NO: 55837 - DNA, 1500 bp, Zea Mays
attcttttgatggcgatgtctttgttagcttgcagcctgcacagtctacatagcaggccaaagcttgttgctggttctccagaaggatttcctggtcatgttgatgggaagctgcgagaggcgaggatgaaccatccaaagggatttacagtggacgacaggggtaacatctatgtggctgatgccatgaacatggccattagaaagatcagtgatacaggggttacaactattgctggggggaaatcaggcagaggagggcatgttgacggaccaagtgatgaggcaaaattttctactgattttgaagtccgttacattggcagtagctgctcccttctggtgattgacagaggaaaccaagcaattagagagattcagctccactttgatgactgtgtgtaccagtatgaagctggttttcctctaggagtcgcactgcttctcgctgccgctttctttggctacatgcttgcactgctccaacgccgagttttagggatgtattcaaatggagatgaccacgagagcccagtaaaagcaaaattaaccagcattccacctccataccagaagccactgaagccttatgttcaccccctgctaattccaaatgacgacgaacctgtgaaacaagaggaggaagaagggctcttcacgtcaattggcaagcttgtgggtggagcaaaatcatcaattgcagagatcattggcgccgcattctccagaaagaagcgagtgaacgttcatcatcatcagctgggtaggccaacctcctggccagcacaagaaagctatgccatcccgcgggacgagaccccaccgccgctggacacaagggcgcccacccctcgcaaaaactacgccttcatgtccaaggagccggagaagatccaccacatccggcacggccggcctcagttacatggctggaccggagaggcagcacctcagcagcagcagccgcagcaggtgcgtcaccaacagtacgtgcaacaccacaggcagtactcggccgggccgcagacctactacgagccgagctgcgatgcaacgaaggagatcgtcttcggagccgtgcaggaaggggacaccagccgccgtcccgtggagatcaaggccgtgaaccatggggacgcggcgccgtacgagcagaacgggctgcgattccgcagtagttatagcgtgcgctacaatggcaataactagtcgaggagcacttctgtagctgtaactgtaaggagaggagcgatagagagagcagtcgaggggagtacaatctcctcattgacaagtgcaacagaaaagctggaattttggtagaagagcttggtgataatggtcattggactctttactggcggtgacatatataaatatagcgtgtatttttcttgttcttcttgggtctacttctatttttaataaatcaccttgcgtataggcctatctttaataaacaaagtgtgtatttattattttatcaactgtttttcgttt

SEQ ID NO: 55838 - DNA, 2227 bp, Zea Mays
gtgaacatctgcatcaccctccgcacgtgacccgctccactcccctgcacggcactctctctcatcagtcatcgccaccccgaccaccgtcacgcggacctctctcctcttcccctcaaaaccccacgaaatcgccgaaagcaagttgcggccgcagcccgcagtgaacacagccccgcttctctttcccccaacttgttcaatcccccttctcccctcccggagcgcaagagaagctcgcattcctggtggtttctcctcccatcatccgtcctcgatctgagcgttgtctgcttccctgcctccctccctccccttgcccagatggccgccttccgtgtcttctaaatcttccgccgcatcaagcttccctcacctgtcggctgtcctgctgctgctgctgccaatggcgaccaagggaggcaacgcgaggggcgtcccggtgggggtgctgctggtggccgcgctcctcctttgctccttggctccggcttccgcgtcctcgtaccccgcaagggtggtgagcgggttcctctccaatgcggcttcggcggtggtgaagcggctgtggtcgctcaaatccaccaccaagatagcagcgagcgggggcaagtcgatggtgaagtacgagggcggctacaccgtggagacggtcttcgacggcagcaagctggggatcgagccctactccgtggaggtcacccagggtggcgagctactcgtaatggactccatgaacagcaacatctacaggatggcgctgccgctgtcccgatatagcaggccaaagcttgttgctggttctccagaaggatttcctggtcatgttgatgggaagctgcgagaggcgaggatgaaccatccaaagggatttacagtggacgacaggggtaacatctatgtggctgatgccatgaacatggccattagaaagatcagtgatacaggggttacaactattgctggggggaaatcaggcagaggagggcatgttgacggaccaagtgatgaggcaaaattttctactgattttgaagtccgttacattggcagtagctgctcccttctggtgattgacagaggaaaccaagcaattagagagattcagctccactttgatgactgtgtgtaccagtatgaagctggttttcctctaggagtcgcactgcttctcgctgccgctttctttggctacatgcttgcactgctccaacgccgagttttagggatgtattcaaatggagatgaccacgagagcccagtaaaagcaaaattaaccagcattccacctccataccagaagccactgaagccttatgttcaccccctgctaattccaaatgacgacgaacctgtgaaacaagaggaggaagaagggctcttcacgtcaattggcaagcttgtgggtggagcaaaatcatcaattgcagagatcattggcgccgcattctccagaaagaagcgagtgaacgttcatcatcatcagctgggtaggccaacctcctggccagcacaagaaagctatgccatcccgcgggacgagaccccaccgccgctggacacaagggcgcccacccctcgcaaaaactacgccttcatgtccaaggagccggagaagatccaccacatccggcacggccggcctcagttacatggctggaccggagaggcagcacctcagcagcagcagccgcagcaggtgcgtcaccaacagtacgtgcaacaccacaggcagtactcggccgggccgcagacctactacgagccgagctgcgatgcaacgaaggagatcgtcttcggagccgtgcaggaaggggacaccagccgccgtcccgtggagatcaaggccgtgaaccatggggacgcggcgccgtacgagcagaacgggctgcgattccgcagtagttatagcgtgcgctacaatggcaataactagtcgaggagcacttctgtagctgtaactgtaaggagaggagcgatagagagagcagtcgaggggagtacaatctcctcattgacaagtgcaacagaaaagctggaattttggtagaagagcttggtgataatggtcattggactctttactggcggtgacatatataaatatagcgtgtatttttcttgttcttcttgggtctacttctatttttaataaatcaccttgcgtataggcctatctttaataaacaaagtgtgtatttattattttatcaactgtttttcgttt

SEQ ID NO: 55839 - DNA, 3529 bp, Zea Mays
cctcccgcgggccgcggctacaagaacggaagctgcgtgcttcgcttcacttcactccacttcatccagggaaataaaaaagcagggtggtttggaatccacatccgtagggcgagcggcacggcagcggaggggagcccacggcaaacggcatcccgcatccctatcttcctccctccctctctcgctcgcgtcgcgtggttgtctgcctggctggttgccctctcctccagagacctctcctgtctccacccctttggcctttgctcgtcgtggcgctctcgtacgcgcccaacgaggggagttaccgcccggtttcgcttcgtacggacggttgatacttgatagcgagttaatactctaagacttaaaggaggcgcggcgggcgtgggggcgagcgagcttgcttccgggggttggttcttgcgggaagctactagaaggaggggggacgaggaggagtgtggagtgtgtcttgctttgcctcgcctgtcctggtttgttagcctcccgctcgctcgaggccaagccgacggacaaatcttggtttgggacgcgccgccgcggtaggattcgggtgcccctattccctgtttctttccgaggattccgcgaggttcgctgccatggagccagcaggcgtggcgcattgaggcgtgcgtgcagggccggagagggacatggatctggagtccgcggacggagcggaggcggctgacgggaagcggcgtggggagtcattgcgcgcgacgctgctgctcgcgtaccagagcctcggggtggtgtacggcgacgtggccacgtccccgctctacgtctacaagagcgccttcgctggcaacgacatccagcactcggagggcaacgaggagatctacggcgtgctctcgttcgtcttctggacgctgaccctcatcaccctcatcaagtacgtgctcatcgtgctccgtgccgacgacggcggagagggcggcaccttcgcgctctactccctcatctgccgccacgtccgcgccggcctcctgcctggcggcggcaccagagatgagctcatggaggaagagaaggtcaccgggcgtcgtggtgagcggcctgtgtccagggtcagggcggtgctggagaagtacagagtgctgcagcggctgctgctgctgttcgcactgctcggaacatgtatggtcatcggggatggcgtgctcacccctgcagtctcagtgttttctgcggtatctgggcttgagttgtcgttggaaaaggaacagcacaaataacttccagtggcctgtgccatacttatatgcttgtttgcgctgcaacactacggcacacacaaagttgggtttctttttgcaccaatcgtatgcatttggcttgtctgcataagtgcgattggcctctacaatatcatccgttgggatccccatgtttatcgagccctctcgccatactacatgtatcaattcctcaggaagactcaaactggtggctggatgtcactgggtggaatccttctttgtgtaacaggctctgaagctatgtatgcagatcttggacatttttcgcaatcatcaatccagattgcatttatatccgtggtttatcctgcacttgtattggcttatatgggacaagcggcttttatttcacaacatcacagctttgagagcagttatcatattggattttatgtgtcagtaccagaaacactcagatggcctgttctggtgattgctatactagcagctgtagttgggagtcaggcaattattactggaaccttttcaatcatcaaacagtgctcttcattaagttgtttccctggagtgaagattgtgcacacatcctcaacactgcatggtcagatatacataccagaaatcaattggatgctgatgatactctgcctggctgttactattggtttcagagacacaaaacacttggcaaatgcacaagggttggcagtaataactgtcatgcttgttaccacttgcttaatgtcactcgttattgttctttgctggaacaagagtatcttccttgcccttggtttcctacttttctttggcacgatcgaagtaatctacttctcagcttcccttgtcaagtttcatgaaggtgcttgggttcctattagtctctccttcatatttatggtgatcatgagtgtctggcactatggcacaataaagaagtacgagttcgatgtgcaaaacaaggtttcagtaaactggctcttaaaccttggcccttcactgggcattgtacgagttcgaggcattggactaatacatacagaactaatgtctggaatcccagctatcttctcccactttgtcaccaatctgcctgcgtttcaccaggtactggtattcctatgtgtcaaatcagttcctgtgccacatgtgcaaccggaggaacgatttctggtgggtcgcattggtccaaaagagtataggctatacagggtcattgtcagatatggttatcgcgatgtgcagaaggatgacctggagttcgagaaggagctagtcagcaacattgcagagttcatccgcagcagtggggaatatgacaagaatggcttcgtcgaggacgcagataagcccttcgagaagctgtccaccatcagtactggaatcaatatgttggaagaggatggagaagttgatgcacatgtatcccctcataaggagatagacccacacaatgcggcacccaagcgaaagaaagccaggttcatgataccaaagagtgctcaggtggacagtgaggtgcgccgcgagctgcaggagctcatggacgctagggaggcaggcatgtccttcatcctggggcactcgtacatgaaggcgaagagcgggtcgagtttcataaagcgggttgtgataaacttcttctacgagttcttgaggaagaacagccgtggccctgcatacgccgcaaacataccccacgcctccactctggaggtaggaatggtctaccaggtctgacaacagttagcagctgtgtaaaggtagagagagatgagacgacgcctgtcagcgccacctgtatatatccacttgttgctgccgataccgttaacacaatcacaggatgacacgagtagtgagtggcccttgagcacagccaatgctgaggaagcagctgaagatgagatcatctgtggagagcccagccagaagtatgcattttttgtttgtagagccttttgttgtgccggtagttgttaagtttcgtatgtttgctgctgttgtttagtttcgtacttgtgagctgtaattgtctgtaagagtgactagcaaaatactgtagcatttttgacgttcagcagcggcctctgtagttctgtcacttgtctataattgaggactgtataggtagcagctaaacattctagtaggggctgatgtcgttgggccgcctgtattatagactgggccgtaaagcacagcttctttcgggcctaagaacgtctggaagacaaaccacaaaggaaaaaatgtctctcttgtaccttctt

SEQ ID NO: 55840 - DNA, 3480 bp, Zea Mays
cctcccgcgggccgcggctacaagaacggaagctgcgtgcttcgcttcacttcactccacttcatccagggaaataaaaaagcagggtggtttggaatccacatccgtagggcgagcggcacggcagcggaggggagcccacggcaaacggcatcccgcatccctatcttcctccctccctctctcgctcgcgtcgcgtggttgtctgcctggctggttgccctctcctccagagacctctcctgtctccacccctttggcctttgctcgtcgtggcgctctcgtacgcgcccaacgaggggagttaccgcccggtttcgcttcgtacggacggttgatacttgatagcgagttaatactctaagacttaaaggaggcgcggcgggcgtgggggcgagcgagcttgcttccgggggttggttcttgcgggaagctactagaaggaggggggacgaggaggagtgtggagtgtgtcttgctttgcctcgcctgtcctggtttgttagcctcccgctcgctcgaggccaagccgacggacaaatcttggtttgggacgcgccgccgcggtaggattcgggtgcccctattccctgtttctttccgaggattccgcgaggttcgctgccatggagccagcaggcgtggcgcattgaggcgtgcgtgcagggccggagagggacatggatctggagtccgcggacggagcggaggcggctgacgggaagcggcgtggggagtcattgcgcgcgacgctgctgctcgcgtaccagagcctcggggtggtgtacggcgacgtggccacgtccccgctctacgtctacaagagcgccttcgctggcaacgacatccagcactcggagggcaacgaggagatctacggcgtgctctcgttcgtcttctggacgctgaccctcatcaccctcatcaagtacgtgctcatcgtgctccgtgccgacgacggcggagagggcggcaccttcgcgctctactccctcatctgccgccacgtccgcgccggcctcctgcctggcggcggcaccagagatgagctcatggaggaagagaaggtcaccgggcgtcgtggtgagcggcctgtgtccagggtcagggcggtgctggagaagtacagagtgctgcagcggctgctgctgctgttcgcactgctcggaacatgtatggtcatcggggatggcgtgctcacccctgcagtctcagtgttttctgcggtatctgggcttgagttgtcgttggaaaaggaacagcacaaatatatagaacttccagtggcctgtgccatacttatatgcttgtttgcgctgcaacactacggcacacacaaagttgggtttctttttgcaccaatcgtatgcatttggcttgtctgcataagtgcgattggcctctacaatatcatccgttgggatccccatgtttatcgagccctctcgccatactacatgtatcaattcctcaggaagactcaaactggtggctggatgtcactgggtggaatccttctttgtgtaacaggctctgaagctatgtatgcagatcttggacatttttcgcaatcatcaatccagcggcttttatttcacaacatcacagctttgagagcagttatcatattggattttatgtgtcagtaccagaaacactcagatggcctgttctggtgattgctatactagcagctgtagttgggagtcaggcaattattactggaaccttttcaatcatcaaacagtgctcttcattaagttgtttccctggagtgaagattgtgcacacatcctcaacactgcatggtcagatatacataccagaaatcaattggatgctgatgatactctgcctggctgttactattggtttcagagacacaaaacacttggcaaatgcacaagggttggcagtaataactgtcatgcttgttaccacttgcttaatgtcactcgttattgttctttgctggaacaagagtatcttccttgcccttggtttcctacttttctttggcacgatcgaagtaatctacttctcagcttcccttgtcaagtttcatgaaggtgcttgggttcctattagtctctccttcatatttatggtgatcatgagtgtctggcactatggcacaataaagaagtacgagttcgatgtgcaaaacaaggtttcagtaaactggctcttaaaccttggcccttcactgggcattgtacgagttcgaggcattggactaatacatacagaactaatgtctggaatcccagctatcttctcccactttgtcaccaatctgcctgcgtttcaccaggtactggtattcctatgtgtcaaatcagttcctgtgccacatgtgcaaccggaggaacgatttctggtgggtcgcattggtccaaaagagtataggctatacagggtcattgtcagatatggttatcgcgatgtgcagaaggatgacctggagttcgagaaggagctagtcagcaacattgcagagttcatccgcagcagtggggaatatgacaagaatggcttcgtcgaggacgcagataagcccttcgagaagctgtccaccatcagtactggaatcaatatgttggaagaggatggagaagttgatgcacatgtatcccctcataaggagatagacccacacaatgcggcacccaagcgaaagaaagccaggttcatgataccaaagagtgctcaggtggacagtgaggtgcgccgcgagctgcaggagctcatggacgctagggaggcaggcatgtccttcatcctggggcactcgtacatgaaggcgaagagcgggtcgagtttcataaagcgggttgtgataaacttcttctacgagttcttgaggaagaacagccgtggccctgcatacgccgcaaacataccccacgcctccactctggaggtaggaatggtctaccaggtctgacaacagttagcagctgtgtaaaggtagagagagatgagacgacgcctgtcagcgccacctgtatatatccacttgttgctgccgataccgttaacacaatcacaggatgacacgagtagtgagtggcccttgagcacagccaatgctgaggaagcagctgaagatgagatcatctgtggagagcccagccagaagtatgcattttttgtttgtagagccttttgttgtgccggtagttgttaagtttcgtatgtttgctgctgttgtttagtttcgtacttgtgagctgtaattgtctgtaagagtgactagcaaaatactgtagcatttttgacgttcagcagcggcctctgtagttctgtcacttgtctataattgaggactgtataggtagcagctaaacattctagtaggggctgatgtcgttgggccgcctgtattatagactgggccgtaaagcacagcttctttcgggcctaagaacgtctggaagacaaaccacaaaggaaaaaatgtctctcttgtaccttctt

SEQ ID NO: 55841 - DNA, 264 bp, Zea Mays
gtcgaatggtaactacatcggcaacctctcacaacccttgccgccgccggctgctccaccctgctgtcgccatgggtaaattccgcaagctcgaccgcggttactcccaccgcctctccatgctcaggacgatggtgtcgcagctggtgaagcacgagcgcatcgagactaccgttgccaaggcgtaggaggtccggcagaaggtggatcagatggtgcagctagggaaggaggttcgtggacagggagaatgagcttcgagag

SEQ ID NO: 55842 - DNA, 536 bp, Zea Mays
gtcgaatggtaactacatcggcaacctctcacaacccttgccgccgccggctgctccaccctgctgtcgccatgggtaaattccgcaagctcgaccgcggttactcccaccgcctctccatgctcaggacgatggtgtcgcagctggtgaagcacgagcgcatcgagactaccgttgccaaggtactttctttcgcggcgtttcttcgagcaagggcgtgtggcgtaggaggtccggcagaaggtggatcagatggtgcagctagggaaggagatctcggtgggcagcaggctcctcattgtgaagggcaatctcagcgtggaagggaactcagtgcagagggcaagcttgccatgcgtgggagctcaacacggagggcaagctcgctgtggaagagatatcagcgtggagggcaagctcgctgtggaagagagctcagcggtactcagcatgcagcgacacgtgctgctgcctttgttcggggtgatgatgtcgttcataagctgttcactgatctggcctaccgctacagttaa

SEQ ID NO: 55843 - DNA, 537 bp, Zea Mays
gtcgaatggtaactacatcggcaacctctcacaacccttgccgccgccggctgctccaccctgctgtcgccatgggtaaattccgcaagctcgaccgcggttactcccaccgcctctccatgctcaggacgatggtgtcgcagctggtgaagcacgagcgcatcgagactaccgttgccaaggcgtaggaggtccggcagaaggtggatcagatggtgcagctagggaaggaggtgatttgaacacaagtcccctgacactaattaaattccaacgtgaaatgtcaggccatttcgtggcatccattaatctatgcagggcagtggcagtaaacaacctagcggacatttttgcgaagtatgctcataggttagaagtatttgcaagaaagaaattagtgttcctacttcctatatttagtaggattcacctctacaattcagattgcttctccacatggcctgtatgcattgctacctgaactggagttggacactattggccactgattgtctgattaccacttcagaaataatg

SEQ ID NO: 55844 - DNA, 2351 bp, Zea Mays
gcagtcgcctgtcctgtgtcctccggtcccggacctctgtgccgcactgcccacagcgacagcatcgacatcgccccggtcccgtgtcgcttcgcttcgtagctcgccgccttccccgcgccccagcagcaacggattcccctcccctcgagagatccgacccttggcccggtcgctggggagagcggcatggggctctgggattcgctcctcaactggctgcggagaatgctgggaagacatcgctggtcaatgctgttgctacaggtggctacagtgaggacatgattccaactgtaggcttcaatatgcggaaaatcaccaaggggaatgtcacaattaaactttgggatcttggtgggcaacgaagattccgcactatgtgggagcgctactgccgtggagtttctgctattctgtaattcctgctcttctaaaatactattcaatattgaatattttatattcagttttttgttagtgagataggattacaacattaacatacaactcagaatctccaattggaggtttggagcactttatggctggtgttcatttcttaaagataatcaaatccttagagataaacccaacattccctgtagcaaggagatattaaactatagattgctgtctaacattatattcattttcataccctgattaaacatgttttcttcccttacaagcagtatagatatatttcttctgcgttctgtttacccctgtattctgcgttctgtttaccctgtatgcagacatgcttgaaggataactgtaacttagaaactgacacatacatagagagtgcaggaggacgggactgttgggtgacgctttatcaaataaacaataaaggaactcaagtacactacagtgaatatcatcaaatatatatgttgtggacgctgctgaccgagatagcatcccaatagcgaaaagtgaattgcttgatctgctgacaaaacagtctttagctgggattcccttgcttgtccttggcaacaaaattgacaagtcagaagtgctttcgaagcaggcattggttgatcaacttggactggaatcgataaaggaccgcgaagtttgttgctacatgatctcctgtaaggattctgtgaacatagacattgtcatcgactggcttatcaagcactctagaacagcaaagtaggctttatgtgtgtttgtatcacttgatgcatggtaatttgaatttacctttgtgaatcagtactcccagaatcctggtttcttgtccagatgttaaaagcgttcacctcgtaatttatgatccctttggtctcacagacgaattgtatggtatctagaagaccagaaccttgtatttcctttgcaattcccttgaatcttttattattcttactgtgaatgtcgtccagtgtttttattctgcacataccaaaccagacctatggccatgcaaaattttcttcagagattctgggagagtagagtatggtgttaaatatatcaaggcccataatatgttgtaggcccatatggcatgtgaagactgaagacaggatactacgggaacgtattttcctctcaaatcctctcaaggtaactgttctaacatcgaatcaaagtgggaattggtctaatcaatacatgtgatccatttttttccgtcgctgccatggctcccgtcgcggatcctgtcgtccttcttcctcggctggcactcgtccgcctggtgcccatccgccttgactggcacccccgtctacctccttccgccttggctcaccgtggtcgcctccttctgcatcggatgaccgttgagttcgaggtatttattatagcccccatgtctaaactagaatttgtgaacaacacataaattatgcgcagtcaccggacacgtccggtgactacacattatctagttgttggaactagttgttgtcgacagttgagctcgatgtatccggtgttaatgtccgatgagtataacctagctcggttgcatttgcaacatctctgagtaccatgtccattgtggagtccgctgcaccaccgaaaacatgtggtgcattgtaaatcttcgtgtacatgctacagatctctgtgagtgccctgtccaattggcgtctggtgcaatgtttgggtcacacctgtgtttctagtgtgcttagtttttttagccctttgtttagcataggcacgatacatgtatggtgcttcatccagtacaccatcgtacacgtctagtgctgctatgtagaatgtttcttcattccttcatgtttcttcatttaggcttcttttgtgttgtgtcttggactctttaatgttcttcataggtcttcaatggatcttcg

SEQ ID NO: 55845 - DNA, 1918 bp, Zea Mays
gcagtcgcctgtcctgtgtcctccggtcccggacctctgtgccgcactgcccacagcgacagcatcgacatcgccccggtcccgtgtcgcttcgcttcgtagctcgccgccttccccgcgccccagcagcaacggattcccctcccctcgagagatccgacccttggcccggtcgctggggagagcggcatggggctctgggattcgctcctcaactggctgcggagcttgttttttaagcaagaaatggaactctccctggttgggttgcagaatgctgggaagacatcgctggtcaatgctgttgctacaggtggctacagtgaggacatgattccaactgtaggcttcaatatgcggaaaatcaccaaggggaatgtcacaattaaactttgggatcttggtgggcaacgaagattccgcactatgtgggagcgctactgccgtggagtttctgctattctatatgttgtggacgctgctgaccgagatagcatcccaatagcgaaaagtgaattgcttgatctgctgacaaaacagtctttagctgggattcccttgcttgtccttggcaacaaaattgacaagtcagaagtgctttcgaagcaggcattggttgatcaacttggactggaatcgataaaggaccgcgaagtttgttgctacatgatctcctgtaaggattctgtgaacatagacattgtcatcgactggcttatcaagcactctagaacagcaaagtaggctttatgtgtgtttgtatcacttgatgcatggtaatttgaatttacctttgtgaatcagtactcccagaatcctggtttcttgtccagatgttaaaagcgttcacctcgtaatttatgatccctttggtctcacagacgaattgtatggtatctagaagaccagaaccttgtatttcctttgcaattcccttgaatcttttattattcttactgtgaatgtcgtccagtgtttttattctgcacataccaaaccagacctatggccatgcaaaattttcttcagagattctgggagagtagagtatggtgttaaatatatcaaggcccataatatgttgtaggcccatatggcatgtgaagactgaagacaggatactacgggaacgtattttcctctcaaatcctctcaaggtaactgttctaacatcgaatcaaagtgggaattggtctaatcaatacatgtgatccatttttttccgtcgctgccatggctcccgtcgcggatcctgtcgtccttcttcctcggctggcactcgtccgcctggtgcccatccgccttgactggcacccccgtctacctccttccgccttggctcaccgtggtcgcctccttctgcatcggatgaccgttgagttcgaggtatttattatagcccccatgtctaaactagaatttgtgaacaacacataaattatgcgcagtcaccggacacgtccggtgactacacattatctagttgttggaactagttgttgtcgacagttgagctcgatgtatccggtgttaatgtccgatgagtataacctagctcggttgcatttgcaacatctctgagtaccatgtccattgtggagtccgctgcaccaccgaaaacatgtggtgcattgtaaatcttcgtgtacatgctacagatctctgtgagtgccctgtccaattggcgtctggtgcaatgtttgggtcacacctgtgtttctagtgtgcttagtttttttagccctttgtttagcataggcacgatacatgtatggtgcttcatccagtacaccatcgtacacgtctagtgctgctatgtagaatgtttcttcattccttcatgtttcttcatttaggcttcttttgtgttgtgtcttggactctttaatgttcttcataggtcttcaatggatcttcg

SEQ ID NO: 55846 - DNA, 2164 bp, Zea Mays
gcagtcgcctgtcctgtgtcctccggtcccggacctctgtgccgcactgcccacagcgacagcatcgacatcgccccggtcccgtgtcgcttcgcttcgtagctcgccgccttccccgcgccccagcagcaacggattcccctcccctcgagagatccgacccttggcccggtcgctggggagagcggcatggggctctgggattcgctcctcaactggctgcggagcttgttttttaagcaagaaatggaactctccctggttgggttgcagaatgctgggaagacatcgctggtcaatgctgttgctacaggtggctacagtgaggacatgattccaactgtaggcttcaatatgcggaaaatcaccaaggggaatgtcacaattaaactttgggatcttggtgggcaacgaagattccgcactatgtgggagcgctactgccgtggagtttctgctattctgtaattcctgctcttctaaaatactattcaatattgaatattttatattcagttttttgttagtgagataggattacaacattaacatacaactcagaatctccaattggaggtttggagcactttatggctggtgttcatttcttaaagataatcaaatccttagagataaacccaacattccctgtagcaaggagatattaaactatagattgctgtctaacattatattcattttcataccctgattaaacatgttttcttcccttacaagcagtatagatatatttcttctgcgttctgtttacccctgtattctgcgttctgtttaccctgtatgcagacatgcttgaaggataactgtaacttagaaactgacacatacatagagagtgcaggaggacgggactgttgggtgacgctttatcaaataaacaataaaggaactcaagtacactacagtgaatatcatcaaatatgtatattcattttcttcattctcttgaaacttaaaaatttaaaccatgatgtttgttcctgcatttatcatgttatcttgtgcgtgtatgactgttgttacccagatatttttcagttatatagctttactggatatccttgatgggtcatgatttgataattttgtgacaattgcagatatgttgtggacgctgctgaccgagatagcatcccaatagcgaaaagtgaattgcttgatctgctgacaaaacagtctttagctgggattcccttgcttgtccttggcaacaaaattgacaagtcagaagtgctttcgaagcaggcattggttgatcaacttggactggaatcgataaaggaccgcgaagtttgttgctacatgatctcctgcccatatggcatgtgaagactgaagacaggatactacgggaacgtattttcctctcaaatcctctcaaggtaactgttctaacatcgaatcaaagtgggaattggtctaatcaatacatgtgatccatttttttccgtcgctgccatggctcccgtcgcggatcctgtcgtccttcttcctcggctggcactcgtccgcctggtgcccatccgccttgactggcacccccgtctacctccttccgccttggctcaccgtggtcgcctccttctgcatcggatgaccgttgagttcgaggtatttattatagcccccatgtctaaactagaatttgtgaacaacacataaattatgcgcagtcaccggacacgtccggtgactacacattatctagttgttggaactagttgttgtcgacagttgagctcgatgtatccggtgttaatgtccgatgagtataacctagctcggttgcatttgcaacatctctgagtaccatgtccattgtggagtccgctgcaccaccgaaaacatgtggtgcattgtaaatcttcgtgtacatgctacagatctctgtgagtgccctgtccaattggcgtctggtgcaatgtttgggtcacacctgtgtttctagtgtgcttagtttttttagccctttgtttagcataggcacgatacatgtatggtgcttcatccagtacaccatcgtacacgtctagtgctgctatgtagaatgtttcttcattccttcatgtttcttcatttaggcttcttttgtgttgtgtcttggactctttaatgttcttcataggtcttcaatggatcttcg

SEQ ID NO: 55847 - DNA, 2232 bp, Zea Mays
gcagtcgcctgtcctgtgtcctccggtcccggacctctgtgccgcactgcccacagcgacagcatcgacatcgccccggtcccgtgtcgcttcgcttcgtagctcgccgccttccccgcgccccagcagcaacggattcccctcccctcgagagatccgacccttggcccggtcgctggggagagcggcatggggctctgggattcgctcctcaactggctgcggagcttgttttttaagcaagaaatggaactctccctggttgggttgcagaatgctgggaagacatcgctggtcaatgctgttgctacaggtggctacagtgaggacatgattccaactgtaggcttcaatatgcggaaaatcaccaaggggaatgtcacaattaaactttgggatcttggtgggcaacgaagattccgcactatgtgggagcgctactgccgtggagtttctgctattctacatgcttgaaggataactgtaacttagaaactgacacatacatagagagtgcaggaggacgggactgttgggtgacgctttatcaaataaacaataaaggaactcaagtacactacagtgaatatcatcaaatatgtatattcattttcttcattctcttgaaacttaaaaatttaaaccatgatgtttgttcctgcatttatcatgttatcttgtgcgtgtatgactgttgttacccagatatttttcagttatatagctttactggatatccttgatgggtcatgatttgataattttgtgacaattgcagatatgttgtggacgctgctgaccgagatagcatcccaatagcgaaaagtgaattgcttgatctgctgacaaaacagtctttagctgggattcccttgcttgtccttggcaacaaaattgacaagtcagaagtgctttcgaagcaggcattggttgatcaacttggactggaatcgataaaggaccgcgaagtttgttgctacatgatctcctgtaaggattctgtgaacatagacattgtcatcgactggcttatcaagcactctagaacagcaaagtaggctttatgtgtgtttgtatcacttgatgcatggtaatttgaatttacctttgtgaatcagtactcccagaatcctggtttcttgtccagatgttaaaagcgttcacctcgtaatttatgatccctttggtctcacagacgaattgtatggtatctagaagaccagaaccttgtatttcctttgcaattcccttgaatcttttattattcttactgtgaatgtcgtccagtgtttttattctgcacataccaaaccagacctatggccatgcaaaattttcttcagagattctgggagagtagagtatggtgttaaatatatcaaggcccataatatgttgtaggcccatatggcatgtgaagactgaagacaggatactacgggaacgtattttcctctcaaatcctctcaaggtaactgttctaacatcgaatcaaagtgggaattggtctaatcaatacatgtgatccatttttttccgtcgctgccatggctcccgtcgcggatcctgtcgtccttcttcctcggctggcactcgtccgcctggtgcccatccgccttgactggcacccccgtctacctccttccgccttggctcaccgtggtcgcctccttctgcatcggatgaccgttgagttcgaggtatttattatagcccccatgtctaaactagaatttgtgaacaacacataaattatgcgcagtcaccggacacgtccggtgactacacattatctagttgttggaactagttgttgtcgacagttgagctcgatgtatccggtgttaatgtccgatgagtataacctagctcggttgcatttgcaacatctctgagtaccatgtccattgtggagtccgctgcaccaccgaaaacatgtggtgcattgtaaatcttcgtgtacatgctacagatctctgtgagtgccctgtccaattggcgtctggtgcaatgtttgggtcacacctgtgtttctagtgtgcttagtttttttagccctttgtttagcataggcacgatacatgtatggtgcttcatccagtacaccatcgtacacgtctagtgctgctatgtagaatgtttcttcattccttcatgtttcttcatttaggcttcttttgtgttgtgtcttggactctttaatgttcttcataggtcttcaatggatcttcg

SEQ ID NO: 55848 - DNA, 2397 bp, Zea Mays
gcagtcgcctgtcctgtgtcctccggtcccggacctctgtgccgcactgcccacagcgacagcatcgacatcgccccggtcccgtgtcgcttcgcttcgtagctcgccgccttccccgcgccccagcagcaacggattcccctcccctcgagagatccgacccttggcccggtcgctggggagagcggcatggggctctgggattcgctcctcaactggctgcggagcttgttttttaagcaagaaatggaactctccctggttgggttgcagaatgctgggaagacatcgctggtcaatgctgttgctacaggtggctacagtgaggacatgattccaactgtaggcttcaatatgcggaaaatcaccaaggggaatgtcacaattaaactttgggatcttggtgggcaacgaagattccgcactatgtgggagcgctactgccgtggagtttctgctattctgtaattcctgctcttctaaaatactattcaatattgaatattttatattcagttttttgttagtgagataggattacaacattaacatacaactcagaatctccaattggaggtttggagcactttatggctggtgttcatttcttaaagataatcaaatccttagagataaacccaacattccctgtagcaaggagatattaaactatagattgctgtctaacattatattcattttcataccctgattaaacatgttttcttcccttacaagcagtatagatatatttcttctgcgttctgtttacccctgtattctgcgttctgtttaccctgtatgcagacatgcttgaaggataactgtaacttagaaactgacacatacatagagagtgcaggaggacgggactgttgggtgacgctttatcaaataaacaataaaggaactcaagtacactacagtgaatatcatcaaatatatatgttgtggacgctgctgaccgagatagcatcccaatagcgaaaagtgaattgcttgatctgctgacaaaacagtctttagctgggattcccttgcttgtccttggcaacaaaattgacaagtcagaagtgctttcgaagcaggcattggttgatcaacttggactggaatcgataaaggaccgcgaagtttgttgctacatgatctcctgtaaggattctgtgaacatagacattgtcatcgactggcttatcaagcactctagaacagcaaagtaggctttatgtgtgtttgtatcacttgatgcatggtaatttgaatttacctttgtgaatcagtactcccagaatcctggtttcttgtccagatgttaaaagcgttcacctcgtaatttatgatccctttggtctcacagacgaattgtatggtatctagaagaccagaaccttgtatttcctttgcaattcccttgaatcttttattattcttactgtgaatgtcgtccagtgtttttattctgcacataccaaaccagacctatggccatgcaaaattttcttcagagattctgggagagtagagtatggtgttaaatatatcaaggcccataatatgttgtaggcccatatggcatgtgaagactgaagacaggatactacgggaacgtattttcctctcaaatcctctcaaggtaactgttctaacatcgaatcaaagtgggaattggtctaatcaatacatgtgatccatttttttccgtcgctgccatggctcccgtcgcggatcctgtcgtccttcttcctcggctggcactcgtccgcctggtgcccatccgccttgactggcacccccgtctacctccttccgccttggctcaccgtggtcgcctccttctgcatcggatgaccgttgagttcgaggtatttattatagcccccatgtctaaactagaatttgtgaacaacacataaattatgcgcagtcaccggacacgtccggtgactacacattatctagttgttggaactagttgttgtcgacagttgagctcgatgtatccggtgttaatgtccgatgagtataacctagctcggttgcatttgcaacatctctgagtaccatgtccattgtggagtccgctgcaccaccgaaaacatgtggtgcattgtaaatcttcgtgtacatgctacagatctctgtgagtgccctgtccaattggcgtctggtgcaatgtttgggtcacacctgtgtttctagtgtgcttagtttttttagccctttgtttagcataggcacgatacatgtatggtgcttcatccagtacaccatcgtacacgtctagtgctgctatgtagaatgtttcttcattccttcatgtttcttcatttaggcttcttttgtgttgtgtcttggactctttaatgttcttcataggtcttcaatggatcttcg

SEQ ID NO: 55849 - DNA, 2866 bp, Zea Mays
aatcttcaaggagaagaattcttgctcttttcaacgcatacttctggtgagaggatgatagactttacgaacttggacgaacgagcaacaggcatgttctgggttctctccttcaccatggcgcaaccagcttgtgaagcagtaatgaattggtttacgtcagctggaatggcagatttaattcaagggcctaatatgcagccaagtgaaagaataatgatgatgcgtgaaacttaccctctgtcaatgtcattgctttctggcttgtctatcaatctttgtctgaagcttgcttaccagcttgaagagaccatatttcttggccaggctgtccctagcattgctatggtggaaacctatgtgaggttactgcttatagcaccccattcattgtttcgtccccattttacggcattaacccaaagatctccatctattttgagcaaatctggtgtgtcattgctcctacttgagatactaaattacagattgctgcctttgtataggtatcatggtaaaagcaaggcgttgatgtatgatgtcacaaagataatatcaatgattaagggtaaacgtggagaacatcgtctttttcgattagcagaaaatttgtgcatgaatttgattctctcactgaaagacttcttttttgtgaaaaaggaattgaagggcccgactgagtttactgaaactctaaaccgcataacaataataagtcttgcaatcactatcaagacgcgtggaattgctgaagttgaacacatgatttatcttcaaccattgttagagcaaattatggcaaccagtcagcatacctggtcagaaaagacactgcgttattttcctcctctcattcgtgattttttaatggggagagtggataagaggggtctagctatccaagcatggcagcaggcagaaacgactgttattaaccaatgtaatcagctgctctcaccatctgctgagccaaactatgtcatgacttatttgagccacagtttccctcagcatcgtcaatatctttgtgctggtgcttggatgctgatgaatggacatcttgagatcaacagtgcaaatcttgctcgcgtcttaagagagttttcacctgaggaagttacagcaaatatctatacagtggttgatgtgcttctgcatcatatccaatgcgaggtgcaaagggggcatctagcacaggatttactatccaaagcaatcacaaatctttctttttttatatggacacatgaactccttccgctggatattctattgctagctcttattgacagggatgatgatccttatgctttacgccttgtgataagtctgcttgaaaaaccagaacttcagcaaagagtcaagaatttctgtaatactcgttctccagagcattggctgaaaaatcaacatccaaaaagagctgagctccagaaagctcttggcagccatctttcatggaaggaccgctatccacccttcttcgatgacattgctgcacgtctgcttcctgttattccactgattatttataggcttattgagaatgatgcaactgacattgcagacagagttcttgcattctattcttccttgcttgccttccacccgctaagatttacatttgtacgtgatattcttgcgtatttctatggtcatcttccaatcaaactaattggtaggatcctcaacctgctgggtgttagcactaaggtaacattgttgcccttctgcattccttttttagcaatcttccacaagagtggctggaatctactcatactgtcatcaaacaccttcggccagtcaattcagttgccatgttaagaatcgccttccgcatattgggtcccttgttacctcgtctagcctttgctcgacctttgttcatgaagaccttggctttactcttcaatgttttgggtgacgtgtttggtaagaaccctcaggtctcaaatccaaatcctgtggaggcgtcagaaattgcagacataattgacttcttgcatcatgcggtgatgtatgagggccaaggcggtcctgttcagagcacgagcaaacccaagctggagatactgacattatgcgggaaagtaatagagattttgaggccagacgtgcaacatcttctctcccacctcaagattgaccccacctcttcaatctatgctgcaacgcatccaaagctcgttcaaaacccatcctaataatgttatagcttacaagtgtattctaatgatgcaagatgcttcgaaccactgcagaagtctcaacatgtgatgctgttggatgagtagaattgcagtaactgtaacatgtgattcaggggcgtattctcaagtgattcgccgttgtcagttgtatcctttagttagaatgttgtaaatgctatctgcttagtgcatattaggacataactacatagtgtaagcagtaaccatggaggttatcttgccaggctaagaattttggctgccttgcctgtgagccatgcgacatatgtatcctgtcgcattaggatgagcgacaaccgacacggtcgcatgatgcaagatttgtgccggttggccgattgtcaccgtgcagatctcttcgtaacagtgctgcacgtggaaggtttgaccgagtgactgcatcaccagttaatagtgtgaactgtatcaaattcttgatcatcttgcttattatgaaatgcctacgttgtgtcaatcactcttgcattgtatagtcgctcatcaagtgttcaaacttaattgtgggtaaaattgtttggttcttcttgcatgacattcatccaatctgattccgtaagaacttcatctatgcatgttgacacaatgaaataaacaaatgagtgatatttaac

SEQ ID NO: 55850 - DNA, 4942 bp, Zea Mays
ctccggactcgaggattcggagtttcggacaaccgacaacatcgctcgccggcgacgagcgcggcgcggcggcggcgatggatgggggacacacgacgaggcatccgatgtctccagcgatctcggcttcgactgtgctaccgcagcagcggcagatgcagcctcaccaccacccggcgcggccggcaatcgccgatctcttcaccctatacctcggcgtgcgtgcatccctcgcccctaaattcctaatctccagtcgagtgggcgtgtccctgctagtactgaccctgggtgttgttggcttgcagatgaactcgaagcagcgagcggaagacccattgagagagagctcgaataagctgcagaagagagtgactgctctgaacagagacctgcctccccgtgatgagcagttcatttcagattatgagcagttgcgcatgcagtttccttttcttgaaaacattcctgatgatgaagcactggttagtataatcatggagattcataggaggagagatatggtgtgtatgcacatgcaaatgttggatcaacatcttcattgtccgacatttggaactcatcgtttcttatcacaatcatacccaagcatagctggagaatctgttactaatctgcgttattctcccattacttaccctagtgtattgggagagccactacatggagaggaccttgcaaactccattcctaagggtggtttagactgggaacgtgctcttcgttgtttgaggcatgctctccgcacaaccccatcaccagactggtggagacgcgttcttcttgttgccccttgttacagatcacagtctcagcaatcatcaactcctggagctgttttctcacctgatatgattggtgaggcagttgcggacaggacaattgaactactgaagctcactaactcagagactcaatgctggcaagattggcttttgtttgctgacatctttttcttcctaatgaaaagtggatgcattgactttcttgattttgtggacaaacttgcttctcgagtcacaaatagtgatcaacagattctccggagtaaccatgtcacttggttgcttgcgcagattatccgcattgagattgttatgaacactctaagttcagatccaaggaaggttgataccacaagaaagataatttcattccacaaagaagacaaaagccttgacgccaataatattggccctcaaagtattcttcttgatttcatcagtagtagtcagactctgcgcatttggtctttcaacacttcgattagagaacatttgaacagtgatcagcttcaaaaaggaaaacagattgacgaatggtggaaacagatgatgaaagcttctggtgagaggatgatagactttacgaacttggacgaacgagcaacaggcatgttctgggttctctccttcaccatggcgcaaccagcttgtgaagcagtaatgaattggtttacgtcagctggaatggcagatttaattcaagggcctaatatgcagccaagtgaaagaataatgatgatgcgtgaaacttaccctctgtcaatgtcattgctttctggcttgtctatcaatctttgtctgaagcttgcttaccagcttgaagagaccatatttcttggccaggctgtccctagcattgctatggtggaaacctatgtgaggttactgcttatagcaccccattcattgtttcgtccccattttacggcattaacccaaagatctccatctattttgagcaaatctggtgtgtcattgctcctacttgagatactaaattacagattgctgcctttgtataggtatcatggtaaaagcaaggcgttgatgtatgatgtcacaaagataatatcaatgattaagggtaaacgtggagaacatcgtctttttcgattagcagaaaatttgtgcatgaatttgattctctcactgaaagacttcttttttgtgaaaaaggaattgaagggcccgactgagtttactgaaactctaaaccgcataacaataataagtcttgcaatcactatcaagacgcgtggaattgctgaagttgaacacatgatttatcttcaaccattgttagagcaaattatggcaaccagtcagcatacctggtcagaaaagacactgcgttattttcctcctctcattcgtgattttttaatggggagagtggataagaggggtctagctatccaagcatggcagcaggcagaaacgactgttattaaccaatgtaatcagctgctctcaccatctgctgagccaaactatgtcatgacttatttgagccacagtttccctcagcatcgtcaatatctttgtgctggtgcttggatgctgatgaatggacatcttgagatcaacagtgcaaatcttgctcgcgtcttaagagagttttcacctgaggaagttacagcaaatatctatacagtggttgatgtgcttctgcatcatatccaatgcgaggtgcaaagggggcatctagcacaggatttactatccaaagcaatcacaaatctttctttttttatatggacacatgaactccttccgctggatattctattgctagctcttattgacagggatgatgatccttatgctttacgccttgtgataagtctgcttgaaaaaccagaacttcagcaaagagtcaagaatttctgtaatactcgttctccagagcattggctgaaaaatcaacatccaaaaagagctgagctccagaaagctcttggcagccatctttcatggaaggaccgctatccacccttcttcgatgacattgctgcacgtctgcttcctgttattccactgattatttataggcttattgagaatgatgcaactgacattgcagacagagttcttgcattctattcttccttgcttgccttccacccgctaagatttacatttgtacgtgatattcttgcgtatttctatggtcatcttccaatcaaactaattggtaggatcctcaacctgctgggtgttagcactaagacccccttttcagaatcttttgctaaatatttagtgtcatcaaattcttcaatatgtccaccaccagaatactttgccaacctgttgctaaacctcgttaataatgttatacctcctttaagtagcaaatcgaaatcaaacccagcagacacaacacgctcgactttcaacaaacatcatgcatcttcacaacctggtggagttggtaacaccgatggccagagggcattttatcagaatcaggatcctgggtcgtatacacagcttgttttggaaacagcagctattgagattctctcacttcctgtgcctgctgctcaaatagtgtcctctttggtccaaataatagcacatgtacaagcaatacttatacagtcaaatagtggccaaggaatgtcaggtggtttggggcaaagttctgggctgccaacttctccttcaggggctgctgaatcctcaggtcccaaccaagcgaacagtgctgcaactggcatcaatgccactaactttgtttctaggagtggttactcctgccaacaattgtctgttttgatgattcaagcatgtggtcttctgctggcacaactcccaccagaattccacatgcaactatactcagaagcagctcgagtcataaaagactgctggtggcttgctgatggttccaggcctgttaaagagcttgactctgctgttggatatgcactgttggatcctacatgggcttcccaagacaatacatcaacagccattggtaacattgttgcccttctgcattccttttttagcaatcttccacaagagtggctggaatctactcatactgtcatcaaacaccttcggccagtcaattcagttgccatgttaagaatcgccttccgcatattgggtcccttgttacctcgtctagcctttgctcgacctttgttcatgaagaccttggctttactcttcaatgttttgggtgacgtgtttggtaagaaccctcaggtctcaaatccaaatcctgtggaggcgtcagaaattgcagacataattgacttcttgcatcatgcggtgatgtatgagggccaaggcggtcctgttcagagcacgagcaaacccaagctggagatactgacattatgcgggaaagtaatagagattttgaggccagacgtgcaacatcttctctcccacctcaagattgaccccacctcttcaatctatgctgcaacgcatccaaagctcgttcaaaacccatcctaataatgttatagcttacaagtgtattctaatgatgcaagatgcttcgaaccactgcagaagtctcaacatgtgatgctgttggatgagtagaattgcagtaactgtaacatgtgattcaggggcgtattctcaagtgattcgccgttgtcagttgtatcctttagttagaatgttgtaaatgctatctgcttagtgcatattaggacataactacatagtgtaagcagtaaccatggaggttatcttgccaggctaagaattttggctgccttgcctgtgagccatgcgacatatgtatcctgtcgcattaggatgagcgacaaccgacacggtcgcatgatgcaagatttgtgccggttggccgattgtcaccgtgcagatctcttcgtaacagtgctgcacgtggaaggtttgaccgagtgactgcatcaccagttaatagtgtgaactgtatcaaattcttgatcatcttgcttattatgaaatgcctacgttgtgtcaatcactcttgcattgtatagtcgctcatcaagtgttcaaacttaattgtgggtaaaattgtttggttcttcttgcatgacattcatccaatctgattccgtaagaacttcatctatgcatgttgacacaatgaaataaacaaatgagtgatatttaac

SEQ ID NO: 55851 - DNA, 4585 bp, Zea Mays
ctccggactcgaggattcggagtttcggacaaccgacaacatcgctcgccggcgacgagcgcggcgcggcggcggcgatggatgggggacacacgacgaggcatccgatgtctccagcgatctcggcttcgactgtgctaccgcagcagcggcagatgcagcctcaccaccacccggcgcggccggcaatcgccgatctcttcaccctatacctcggcatgaactcgaagcagcgagcggaagacccattgagagagagctctttcttgaaaacattcctgatgatgaagcactggttagtataatcatggagattcataggaggagagatatggtgtgtatgcacatgcaaatgttggatcaacatcttcattgtccgacatttggaactcatcgtttcttatcacaatcatacccaagcatagctggagaatctgttactaatctgcgttattctcccattacttaccctagtgtattgggagagccactacatggagaggaccttgcaaactccattcctaagggtggtttagactgggaacgtgctcttcgttgtttgaggcatgctctccgcacaaccccatcaccagactggtggagacgcgttcttcttgttgccccttgttacagatcacagtctcagcaatcatcaactcctggagctgttttctcacctgatatgattggtgaggcagttgcggacaggacaattgaactactgaagctcactaactcagattatccgcattgagattgttatgaacactctaagttcagatccaaggaaggttgataccacaagaaagataatttcattccacaaagaagacaaaagccttgacgccaataatattggccctcaaagtattcttcttgatttcatcagtagtagtcagactctgcgcatttggtctttcaacacttcgattagagaacatttgaacagtgatcagcttcaaaaaggaaaacagattgacgaatggtggaaacagatgatgaaagcttctggtgagaggatgatagactttacgaacttggacgaacgagcaacaggcatgttctgggttctctccttcaccatggcgcaaccagcttgtgaagcagtaatgaattggtttacgtcagctggaatggcagatttaattcaagggcctaatatgcagccaagtgaaagaataatgatgatgcgtgaaacttaccctctgtcaatgtcattgctttctggcttgtctatcaatctttgtctgaagcttgcttaccagcttgaagagaccatatttcttggccaggctgtccctagcattgctatggtggaaacctatgtgaggttactgcttatagcaccccattcattgtttcgtccccattttacggcattaacccaaagatctccatctattttgagcaaatctggtgtgtcattgctcctacttgagatactaaattacagattgctgcctttgtataggtatcatggtaaaagcaaggcgttgatgtatgatgtcacaaagataatatcaatgattaagggtaaacgtggagaacatcgtctttttcgattagcagaaaatttgtgcatgaatttgattctctcactgaaagacttcttttttgtgaaaaaggaattgaagggcccgactgagtttactgaaactctaaaccgcataacaataataagtcttgcaatcactatcaagacgcgtggaattgctgaagttgaacacatgatttatcttcaaccattgttagagcaaattatggcaaccagtcagcatacctggtcagaaaagacactgcgttattttcctcctctcattcgtgattttttaatggggagagtggataagaggggtctagctatccaagcatggcagcaggcagaaacgactgttattaaccaatgtaatcagctgctctcaccatctgctgagccaaactatgtcatgacttatttgagccacagtttccctcagcatcgtcaatatctttgtgctggtgcttggatgctgatgaatggacatcttgagatcaacagtgcaaatcttgctcgcgtcttaagagagttttcacctgaggaagttacagcaaatatctatacagtggttgatgtgcttctgcatcatatccaatgcgaggtgcaaagggggcatctagcacaggatttactatccaaagcaatcacaaatctttctttttttatatggacacatgaactccttccgctggatattctattgctagctcttattgacagggatgatgatccttatgctttacgccttgtgataagtctgcttgaaaaaccagaacttcagcaaagagtcaagaatttctgtaatactcgttctccagagcattggctgaaaaatcaacatccaaaaagagctgagctccagaaagctcttggcagccatctttcatggaaggaccgctatccacccttcttcgatgacattgctgcacgtctgcttcctgttattccactgattatttataggcttattgagaatgatgcaactgacattgcagacagagttcttgcattctattcttccttgcttgccttccacccgctaagatttacatttgtacgtgatattcttgcgtatttctatggtcatcttccaatcaaactaattggtaggatcctcaacctgctgggtgttagcactaagacccccttttcagaatcttttgctaaatatttagtgtcatcaaattcttcaatatgtccaccaccagaatactttgccaacctgttgctaaacctcgttaataatgttatacctcctttaagtagcaaatcgaaatcaaacccagcagacacaacacgctcgactttcaacaaacatcatgcatcttcacaacctggtggagttggtaacaccgatggccagagggcattttatcagaatcaggatcctgggtcgtatacacagcttgttttggaaacagcagctattgagattctctcacttcctgtgcctgctgctcaaatagtgtcctctttggtccaaataatagcacatgtacaagcaatacttatacagtcaaatagtggccaaggaatgtcaggtggtttggggcaaagttctgggctgccaacttctccttcaggggctgctgaatcctcaggtcccaaccaagcgaacagtgctgcaactggcatcaatgccactaactttgtttctaggagtggttactcctgccaacaattgtctgttttgatgattcaagcatgtggtcttctgctggcacaactcccaccagaattccacatgcaactatactcagaagcagctcgagtcataaaagactgctggtggcttgctgatggttccaggcctgttaaagagcttgactctgctgttggatatgcactgttggatcctacatgggcttcccaagacaatacatcaacagccattggtaacattgttgcccttctgcattccttttttagcaatcttccacaagagtggctggaatctactcatactgtcatcaaacaccttcggccagtcaattcagttgccatgttaagaatcgccttccgcatattgggtcccttgttacctcgtctagcctttgctcgacctttgttcatgaagaccttggctttactcttcaatgttttgggtgacgtgtttggtaagaaccctcaggtctcaaatccaaatcctgtggaggcgtcagaaattgcagacataattgacttcttgcatcatgcggtgatgtatgagggccaaggcggtcctgttcagagcacgagcaaacccaagctggagatactgacattatgcgggaaagtaatagagattttgaggccagacgtgcaacatcttctctcccacctcaagattgaccccacctcttcaatctatgctgcaacgcatccaaagctcgttcaaaacccatcctaataatgttatagcttacaagtgtattctaatgatgcaagatgcttcgaaccactgcagaagtctcaacatgtgatgctgttggatgagtagaattgcagtaactgtaacatgtgattcaggggcgtattctcaagtgattcgccgttgtcagttgtatcctttagttagaatgttgtaaatgctatctgcttagtgcatattaggacataactacatagtgtaagcagtaaccatggaggttatcttgccaggctaagaattttggctgccttgcctgtgagccatgcgacatatgtatcctgtcgcattaggatgagcgacaaccgacacggtcgcatgatgcaagatttgtgccggttggccgattgtcaccgtgcagatctcttcgtaacagtgctgcacgtggaaggtttgaccgagtgactgcatcaccagttaatagtgtgaactgtatcaaattcttgatcatcttgcttattatgaaatgcctacgttgtgtcaatcactcttgcattgtatagtcgctcatcaagtgttcaaacttaattgtgggtaaaattgtttggttcttcttgcatgacattcatccaatctgattccgtaagaacttcatctatgcatgttgacacaatgaaataaacaaatgagtgatatttaac

SEQ ID NO: 55852 - DNA, 4655 bp, Zea Mays
ctccggactcgaggattcggagtttcggacaaccgacaacatcgctcgccggcgacgagcgcggcgcggcggcggcgatggatgggggacacacgacgaggcatccgatgtctccagcgatctcggcttcgactgtgctaccgcagcagcggcagatgcagcctcaccaccacccggcgcggccggcaatcgccgatctcttcaccctatacctcggcatgaactcgaagcagcgagcggaagacccattgagagagagctctttcttgaaaacattcctgatgatgaagcactggttagtataatcatggagattcataggaggagagatatggtgtgtatgcacatgcaaatgttggatcaacatcttcattgtccgacatttggaactcatcgtttcttatcacaatcatacccaagcatagctggagaatctgttactaatctgcgttattctcccattacttaccctagtgtattgggagagccactacatggagaggaccttgcaaactccattcctaagggtggtttagactgggaacgtgctcttcgttgtttgaggcatgctctccgcacaaccccatcaccagactggtggagacgcgttcttcttgttgccccttgttacagatcacagtctcagcaatcatcaactcctggagctgttttctcacctgatatgattggtgaggcagttgcggacaggacaattgaactactgaagctcactaactcagagactcaatgctggcaagattggcttttgtttgctgacatctttttcttcctaatgaaaagtggatgcattgactttcttgattttgtggacaaacttgcttctcgagtcacaaatagtgatcaacagattctccggagtaaccatgtcacttggttgcttgcgcagattatccgcattgagattgttatgaacactctaagttcagatccaaggaaggttgataccacaagaaagataatttcattccacaaagaagacaaaagccttgacgccaataatattggccctcaaagtattcttcttgatttcatcagtagtagtcagactctgcgcatttggtctttcaacacttcgattagagaacatttgaacagtgatcagcttcaaaaaggaaaacagattgacgaatggtggaaacagatgatgaaagcttctggtgagaggatgatagactttacgaacttggacgaacgagcaacaggcatgttctgggttctctccttcaccatggcgcaaccagcttgtgaagcagtaatgaattggtttacgtcagctggaatggcagatttaattcaagggcctaatatgcagccaagtgaaagaataatgatgatgcgtgaaacttaccctctgtcaatgtcattgctttctggcttgtctatcaatctttgtctgaagcttgcttaccagcttgaagagaccatatttcttggccaggctgtccctagcattgctatggtggaaacctatgtgaggttactgcttatagcaccccattcattgtttcgtccccattttacggcattaacccaaagatctccatctattttgagcaaatctggtgtgtcattgctcctacttgagatactaaattacagattgctgcctttgtataggtatcatggtaaaagcaaggcgttgatgtatgatgtcacaaagataatatcaatgattaagggtaaacgtggagaacatcgtctttttcgattagcagaaaatttgtgcatgaatttgattctctcactgaaagacttcttttttgtgaaaaaggaattgaagggcccgactgagtttactgaaactctaaaccgcataacaataataagtcttgcaatcactatcaagacgcgtggaattgctgaagttgaacacatgatttatcttcaaccattgttagagcaaattatggcaaccagtcagcatacctggcagaaacgactgttattaaccaatgtaatcagctgctctcaccatctgctgagccaaactatgtcatgacttatttgagccacagtttccctcagcatcgtcaatatctttgtgctggtgcttggatgctgatgaatggacatcttgagatcaacagtgcaaatcttgctcgcgtcttaagagagttttcacctgaggaagttacagcaaatatctatacagtggttgatgtgcttctgcatcatatccaatgcgaggtgcaaagggggcatctagcacaggatttactatccaaagcaatcacaaatctttctttttttatatggacacatgaactccttccgctggatattctattgctagctcttattgacagggatgatgatccttatgctttacgccttgtgataagtctgcttgaaaaaccagaacttcagcaaagagtcaagaatttctgtaatactcgttctccagagcattggctgaaaaatcaacatccaaaaagagctgagctccagaaagctcttggcagccatctttcatggaaggaccgctatccacccttcttcgatgacattgctgcacgtctgcttcctgttattccactgattatttataggcttattgagaatgatgcaactgacattgcagacagagttcttgcattctattcttccttgcttgccttccacccgctaagatttacatttgtacgtgatattcttgcgtatttctatggtcatcttccaatcaaactaattggtaggatcctcaacctgctgggtgttagcactaagacccccttttcagaatcttttgctaaatatttagtgtcatcaaattcttcaatatgtccaccaccagaatactttgccaacctgttgctaaacctcgttaataatgttatacctcctttaagtagcaaatcgaaatcaaacccagcagacacaacacgctcgactttcaacaaacatcatgcatcttcacaacctggtggagttggtaacaccgatggccagagggcattttatcagaatcaggatcctgggtcgtatacacagcttgttttggaaacagcagctattgagattctctcacttcctgtgcctgctgctcaaatagtgtcctctttggtccaaataatagcacatgtacaagcaatacttatacagtcaaatagtggccaaggaatgtcaggtggtttggggcaaagttctgggctgccaacttctccttcaggggctgctgaatcctcaggtcccaaccaagcgaacagtgctgcaactggcatcaatgccactaactttgtttctaggagtggttactcctgccaacaattgtctgttttgatgattcaagcatgtggtcttctgctggcacaactcccaccagaattccacatgcaactatactcagaagcagctcgagtcataaaagactgctggtggcttgctgatggttccaggcctgttaaagagcttgactctgctgttggatatgcactgttggatcctacatgggcttcccaagacaatacatcaacagccattggtaacattgttgcccttctgcattccttttttagcaatcttccacaagagtggctggaatctactcatactgtcatcaaacaccttcggccagtcaattcagttgccatgttaagaatcgccttccgcatattgggtcccttgttacctcgtctagcctttgctcgacctttgttcatgaagaccttggctttactcttcaatgttttgggtgacgtgtttggtaagaaccctcaggtctcaaatccaaatcctgtggaggcgtcagaaattgcagacataattgacttcttgcatcatgcggtgatgtatgagggccaaggcggtcctgttcagagcacgagcaaacccaagctggagatactgacattatgcgggaaagtaatagagattttgaggccagacgtgcaacatcttctctcccacctcaagattgaccccacctcttcaatctatgctgcaacgcatccaaagctcgttcaaaacccatcctaataatgttatagcttacaagtgtattctaatgatgcaagatgcttcgaaccactgcagaagtctcaacatgtgatgctgttggatgagtagaattgcagtaactgtaacatgtgattcaggggcgtattctcaagtgattcgccgttgtcagttgtatcctttagttagaatgttgtaaatgctatctgcttagtgcatattaggacataactacatagtgtaagcagtaaccatggaggttatcttgccaggctaagaattttggctgccttgcctgtgagccatgcgacatatgtatcctgtcgcattaggatgagcgacaaccgacacggtcgcatgatgcaagatttgtgccggttggccgattgtcaccgtgcagatctcttcgtaacagtgctgcacgtggaaggtttgaccgagtgactgcatcaccagttaatagtgtgaactgtatcaaattcttgatcatcttgcttattatgaaatgcctacgttgtgtcaatcactcttgcattgtatagtcgctcatcaagtgttcaaacttaattgtgggtaaaattgtttggttcttcttgcatgacattcatccaatctgattccgtaagaacttcatctatgcatgttgacacaatgaaataaacaaatgagtgatatttaac

SEQ ID NO: 55853 - DNA, 4588 bp, Zea Mays
ctccggactcgaggattcggagtttcggacaaccgacaacatcgctcgccggcgacgagcgcggcgcggcggcggcgatggatgggggacacacgacgaggcatccgatgtctccagcgatctcggcttcgactgtgctaccgcagcagcggcagatgcagcctcaccaccacccggcgcggccggcaatcgccgatctcttcaccctatacctcggcatgaactcgaagcagcgagcggaagacccattgagagagagctctttcttgaaaacattcctgatgatgaagcactggttagtataatcatggagattcataggaggagagatatggtgtgtatgcacatgcaaatgttggatcaacatcttcattgtccgacatttggaactcatcgtttcttatcacaatcatacccaagcatagctggagaatctgttactaatctgcgttattctcccattacttaccctagtgtattgggagagccactacatggagaggaccttgcaaactccattcctaagggtggtttagactgggaacgtgctcttcgttgtttgaggcatgctctccgcacaaccccatcaccagactggtggagacgcgttcttcttgttgccccttgttacagatcacagtctcagcaatcatcaactcctggagctgttttctcacctgatatgattggtgaggcagttgcggacaggacaattgaactactgaagctcactaactcagcagattatccgcattgagattgttatgaacactctaagttcagatccaaggaaggttgataccacaagaaagataatttcattccacaaagaagacaaaagccttgacgccaataatattggccctcaaagtattcttcttgatttcatcagtagtagtcagactctgcgcatttggtctttcaacacttcgattagagaacatttgaacagtgatcagcttcaaaaaggaaaacagattgacgaatggtggaaacagatgatgaaagcttctggtgagaggatgatagactttacgaacttggacgaacgagcaacaggcatgttctgggttctctccttcaccatggcgcaaccagcttgtgaagcagtaatgaattggtttacgtcagctggaatggcagatttaattcaagggcctaatatgcagccaagtgaaagaataatgatgatgcgtgaaacttaccctctgtcaatgtcattgctttctggcttgtctatcaatctttgtctgaagcttgcttaccagcttgaagagaccatatttcttggccaggctgtccctagcattgctatggtggaaacctatgtgaggttactgcttatagcaccccattcattgtttcgtccccattttacggcattaacccaaagatctccatctattttgagcaaatctggtgtgtcattgctcctacttgagatactaaattacagattgctgcctttgtataggtatcatggtaaaagcaaggcgttgatgtatgatgtcacaaagataatatcaatgattaagggtaaacgtggagaacatcgtctttttcgattagcagaaaatttgtgcatgaatttgattctctcactgaaagacttcttttttgtgaaaaaggaattgaagggcccgactgagtttactgaaactctaaaccgcataacaataataagtcttgcaatcactatcaagacgcgtggaattgctgaagttgaacacatgatttatcttcaaccattgttagagcaaattatggcaaccagtcagcatacctggtcagaaaagacactgcgttattttcctcctctcattcgtgattttttaatggggagagtggataagaggggtctagctatccaagcatggcagcaggcagaaacgactgttattaaccaatgtaatcagctgctctcaccatctgctgagccaaactatgtcatgacttatttgagccacagtttccctcagcatcgtcaatatctttgtgctggtgcttggatgctgatgaatggacatcttgagatcaacagtgcaaatcttgctcgcgtcttaagagagttttcacctgaggaagttacagcaaatatctatacagtggttgatgtgcttctgcatcatatccaatgcgaggtgcaaagggggcatctagcacaggatttactatccaaagcaatcacaaatctttctttttttatatggacacatgaactccttccgctggatattctattgctagctcttattgacagggatgatgatccttatgctttacgccttgtgataagtctgcttgaaaaaccagaacttcagcaaagagtcaagaatttctgtaatactcgttctccagagcattggctgaaaaatcaacatccaaaaagagctgagctccagaaagctcttggcagccatctttcatggaaggaccgctatccacccttcttcgatgacattgctgcacgtctgcttcctgttattccactgattatttataggcttattgagaatgatgcaactgacattgcagacagagttcttgcattctattcttccttgcttgccttccacccgctaagatttacatttgtacgtgatattcttgcgtatttctatggtcatcttccaatcaaactaattggtaggatcctcaacctgctgggtgttagcactaagacccccttttcagaatcttttgctaaatatttagtgtcatcaaattcttcaatatgtccaccaccagaatactttgccaacctgttgctaaacctcgttaataatgttatacctcctttaagtagcaaatcgaaatcaaacccagcagacacaacacgctcgactttcaacaaacatcatgcatcttcacaacctggtggagttggtaacaccgatggccagagggcattttatcagaatcaggatcctgggtcgtatacacagcttgttttggaaacagcagctattgagattctctcacttcctgtgcctgctgctcaaatagtgtcctctttggtccaaataatagcacatgtacaagcaatacttatacagtcaaatagtggccaaggaatgtcaggtggtttggggcaaagttctgggctgccaacttctccttcaggggctgctgaatcctcaggtcccaaccaagcgaacagtgctgcaactggcatcaatgccactaactttgtttctaggagtggttactcctgccaacaattgtctgttttgatgattcaagcatgtggtcttctgctggcacaactcccaccagaattccacatgcaactatactcagaagcagctcgagtcataaaagactgctggtggcttgctgatggttccaggcctgttaaagagcttgactctgctgttggatatgcactgttggatcctacatgggcttcccaagacaatacatcaacagccattggtaacattgttgcccttctgcattccttttttagcaatcttccacaagagtggctggaatctactcatactgtcatcaaacaccttcggccagtcaattcagttgccatgttaagaatcgccttccgcatattgggtcccttgttacctcgtctagcctttgctcgacctttgttcatgaagaccttggctttactcttcaatgttttgggtgacgtgtttggtaagaaccctcaggtctcaaatccaaatcctgtggaggcgtcagaaattgcagacataattgacttcttgcatcatgcggtgatgtatgagggccaaggcggtcctgttcagagcacgagcaaacccaagctggagatactgacattatgcgggaaagtaatagagattttgaggccagacgtgcaacatcttctctcccacctcaagattgaccccacctcttcaatctatgctgcaacgcatccaaagctcgttcaaaacccatcctaataatgttatagcttacaagtgtattctaatgatgcaagatgcttcgaaccactgcagaagtctcaacatgtgatgctgttggatgagtagaattgcagtaactgtaacatgtgattcaggggcgtattctcaagtgattcgccgttgtcagttgtatcctttagttagaatgttgtaaatgctatctgcttagtgcatattaggacataactacatagtgtaagcagtaaccatggaggttatcttgccaggctaagaattttggctgccttgcctgtgagccatgcgacatatgtatcctgtcgcattaggatgagcgacaaccgacacggtcgcatgatgcaagatttgtgccggttggccgattgtcaccgtgcagatctcttcgtaacagtgctgcacgtggaaggtttgaccgagtgactgcatcaccagttaatagtgtgaactgtatcaaattcttgatcatcttgcttattatgaaatgcctacgttgtgtcaatcactcttgcattgtatagtcgctcatcaagtgttcaaacttaattgtgggtaaaattgtttggttcttcttgcatgacattcatccaatctgattccgtaagaacttcatctatgcatgttgacacaatgaaataaacaaatgagtgatatttaac

SEQ ID NO: 55854 - DNA, 5802 bp, Zea Mays
ctccggactcgaggattcggagtttcggacaaccgacaacatcgctcgccggcgacgagcgcggcgcggcggcggcgatggatgggggacacacgacgaggcatccgatgtctccagcgatctcggcttcgactgtgctaccgcagcagcggcagatgcagcctcaccaccacccggcgcggccggcaatcgccgatctcttcaccctatacctcggcgtgcgtgcatccctcgcccctaaattcctaatctccagtcgagtgggcgtgtccctgctagtactgaccctgggtgttgttggcttgcagatgaactcgaagcagcgagcggaagacccattgagagagagctcgaataagctgcagaagagagtgactgctctgaacagagacctgcctccccgtgatgagcagttcatttcagattatgagcagttgcgcatgcagtttcctgacgctgagcagttgcaggcaatcacagaatcagttctcatctcctttgtgctgcagtgcagtagccacgcaccacaatctgagttcttgctctttgctacacggtgcctatgtgctcgaggccatcttagatgggatagcctccttccatctctgcttaatactgtttcctccatagaggcacctatggtgcaaggagtttctgtgactggtggtggttctgtaaccccttcgtcagctattacaatgccaaatgctccaaactttcaccaatcaaacccagcctcacctttgtcagtaatgaacaccataggatctcctactcagtctggtattgaccaacctgtaggtgcaaatgtgtcgccaatcaaggcagctgaattctccagctctgcgcagcttggtactgcagcaagaggtgaccagtctcgcaggggagcagaagctagctatctgcatcatctatcctgcaggataattctagcagggctggagttcaatttgaagccagctacccatgctgtaattttccagcatatggtaaattggttagttaactgggaccagaggccccaaggcatggatgaaactgacacaatgcaaacatgcaggctagaaaaacctttgcatgaatggatgcatctatgcttggatgttatatggattctagttaatgaagataaatgtcgcattccattttatgagcttgttcgctgtaacttgcagtttcttgaaaacattcctgatgatgaagcactggttagtataatcatggagattcataggaggagagatatggtgtgtatgcacatgcaaatgttggatcaacatcttcattgtccgacatttggaactcatcgtttcttatcacaatcatacccaagcatagctggagaatctgttactaatctgcgttattctcccattacttaccctagtgtattgggagagccactacatggagaggaccttgcaaactccattcctaagggtggtttagactgggaacgtgctcttcgttgtttgaggcatgctctccgcacaaccccatcaccagactggtggagacgcgttcttcttgttgccccttgttacagatcacagtctcagcaatcatcaactcctggagctgttttctcacctgatatgattggtgaggcagttgcggacaggacaattgaactactgaagctcactaactcagagactcaatgctggcaagattggcttttgtttgctgacatctttttcttcctaatgaaaagtggatgcattgactttcttgattttgtggacaaacttgcttctcgagtcacaaatagtgatcaacagattctccggagtaaccatgtcacttggttgcttgcgcagattatccgcattgagattgttatgaacactctaagttcagatccaaggaaggttgataccacaagaaagataatttcattccacaaagaagacaaaagccttgacgccaataatattggccctcaaagtattcttcttgatttcatcagtagtagtcagactctgcgcatttggtctttcaacacttcgattagagaacatttgaacagtgatcagcttcaaaaaggaaaacagattgacgaatggtggaaacagatgatgaaagcttctggtgagaggatgatagactttacgaacttggacgaacgagcaacaggcatgttctgggttctctccttcaccatggcgcaaccagcttgtgaagcagtaatgaattggtttacgtcagctggaatggcagatttaattcaagggcctaatatgcagccaagtgaaagaataatgatgatgcgtgaaacttaccctctgtcaatgtcattgctttctggcttgtctatcaatctttgtctgaagcttgcttaccagcttgaagagaccatatttcttggccaggctgtccctagcattgctatggtggaaacctatgtgaggttactgcttatagcaccccattcattgtttcgtccccattttacggcattaacccaaagatctccatctattttgagcaaatctggtgtgtcattgctcctacttgagatactaaattacagattgctgcctttgtataggtatcatggtaaaagcaaggcgttgatgtatgatgtcacaaagataatatcaatgattaagggtaaacgtggagaacatcgtctttttcgattagcagaaaatttgtgcatgaatttgattctctcactgaaagacttcttttttgtgaaaaaggaattgaagggcccgactgagtttactgaaactctaaaccgcataacaataataagtcttgcaatcactatcaagacgcgtggaattgctgaagttgaacacatgatttatcttcaaccattgttagagcaaattatggcaaccagtcagcatacctggtcagaaaagacactgcgttattttcctcctctcattcgtgattttttaatggggagagtggataagaggggtctagctatccaagcatggcagcaggcagaaacgactgttattaaccaatgtaatcagctgctctcaccatctgctgagccaaactatgtcatgacttatttgagccacagtttccctcagcatcgtcaatatctttgtgctggtgcttggatgctgatgaatggacatcttgagatcaacagtgcaaatcttgctcgcgtcttaagagagttttcacctgaggaagttacagcaaatatctatacagtggttgatgtgcttctgcatcatatccaatgcgaggtgcaaagggggcatctagcacaggatttactatccaaagcaatcacaaatctttctttttttatatggacacatgaactccttccgctggatattctattgctagctcttattgacagggatgatgatccttatgctttacgccttgtggatcaattctaaagagagatgaggatattgatgaagattttagccttaagaagttaagatcaaagaagggtggaggaagtgacaccaagcatctggcgttctatgtgacaagaggatattatagaagttaaaagataagtctgcttgaaaaaccagaacttcagcaaagagtcaagaatttctgtaatactcgttctccagagcattggctgaaaaatcaacatccaaaaagagctgagctccagaaagctcttggcagccatctttcatggaaggaccgctatccacccttcttcgatgacattgctgcacgtctgcttcctgttattccactgattatttataggcttattgagaatgatgcaactgacattgcagacagagttcttgcattctattcttccttgcttgccttccacccgctaagatttacatttgtacgtgatattcttgcgtatttctatggtcatcttccaatcaaactaattggtaggatcctcaacctgctgggtgttagcactaagacccccttttcagaatcttttgctaaatatttagtgtcatcaaattcttcaatatgtccaccaccagaatactttgccaacctgttgctaaacctcgttaataatgttatacctcctttaagtagcaaatcgaaatcaaacccagcagacacaacacgctcgactttcaacaaacatcatgcatcttcacaacctggtggagttggtaacaccgatggccagagggcattttatcagaatcaggatcctgggtcgtatacacagcttgttttggaaacagcagctattgagattctctcacttcctgtgcctgctgctcaaatagtgtcctctttggtccaaataatagcacatgtacaagcaatacttatacagtcaaatagtggccaaggaatgtcaggtggtttggggcaaagttctgggctgccaacttctccttcaggggctgctgaatcctcaggtcccaaccaagcgaacagtgctgcaactggcatcaatgccactaactttgtttctaggagtggttactcctgccaacaattgtctgttttgatgattcaagcatgtggtcttctgctggcacaactcccaccagaattccacatgcaactatactcagaagcagctcgagtcataaaagactgctggtggcttgctgatggttccaggcctgttaaagagcttgactctgctgttggatatgcactgttggatcctacatgggcttcccaagacaatacatcaacagccattggtaacattgttgcccttctgcattccttttttagcaatcttccacaagagtggctggaatctactcatactgtcatcaaacaccttcggccagtcaattcagttgccatgttaagaatcgccttccgcatattgggtcccttgttacctcgtctagcctttgctcgacctttgttcatgaagaccttggctttactcttcaatgttttgggtgacgtgtttggtaagaaccctcaggtctcaaatccaaatcctgtggaggcgtcagaaattgcagacataattgacttcttgcatcatgcggtgatgtatgagggccaaggcggtcctgttcagagcacgagcaaacccaagctggagatactgacattatgcgggaaagtaatagagattttgaggccagacgtgcaacatcttctctcccacctcaagattgaccccacctcttcaatctatgctgcaacgcatccaaagctcgttcaaaacccatcctaataatgttatagcttacaagtgtattctaatgatgcaagatgcttcgaaccactgcagaagtctcaacatgtgatgctgttggatgagtagaattgcagtaactgtaacatgtgattcaggggcgtattctcaagtgattcgccgttgtcagttgtatcctttagttagaatgttgtaaatgctatctgcttagtgcatattaggacataactacatagtgtaagcagtaaccatggaggttatcttgccaggctaagaattttggctgccttgcctgtgagccatgcgacatatgtatcctgtcgcattaggatgagcgacaaccgacacggtcgcatgatgcaagatttgtgccggttggccgattgtcaccgtgcagatctcttcgtaacagtgctgcacgtggaaggtttgaccgagtgactgcatcaccagttaatagtgtgaactgtatcaaattcttgatcatcttgcttattatgaaatgcctacgttgtgtcaatcactcttgcattgtatagtcgctcatcaagtgttcaaacttaattgtgggtaaaattgtttggttcttcttgcatgacattcatccaatctgattccgtaagaacttcatctatgcatgttgacacaatgaaataaacaaatgagtgatatttaac

SEQ ID NO: 55855 - DNA, 5263 bp, Zea Mays
ctccggactcgaggattcggagtttcggacaaccgacaacatcgctcgccggcgacgagcgcggcgcggcggcggcgatggatgggggacacacgacgaggcatccgatgtctccagcgatctcggcttcgactgtgctaccgcagcagcggcagatgcagcctcaccaccacccggcgcggccggcaatcgccgatctcttcaccctatacctcggcgtgcgtgcatccctcgcccctaaattcctaatctccagtcgagtgggcgtgtccctgctagtactgaccctgggtgttgttggcttgcagatgaactcgaagcagcgagcggaagacccattgagagagagctcgaataagctgcagaagagagtgactgctctgaacagagacctgcctccccgtgatgagcagttcatttcagattatgagcagttgcgcatgcagtttcctgacgctgagcagttgcaggcaatcacagaatcagttctcatctcctttgtgctgcagtgcagtagccacgcaccacaatctgagttcttgctctttgctacacggtgcctatgtgctcgaggccatcttagatgggatagcctccttccatctctgcttaatactgtttcctccatagaggcacctatggtgcaaggagtttctgtgactggtggtggttctgtaaccccttcgtcagctattacaatgccaaatgctccaaactttcaccaatcaaacccagcctcacctttgtcagtaatgaacaccataggatctcctactcagtctggtattgaccaacctgtaggtgcaaatgtgtcgccaatcaaggcagctgaattctccagctctgcgcagcttggtactgcagcaagaggtgaccagtctcgcaggggagcagaagctagctatctgcatcatctatcctgcaggataattctagcagggctggagttcaatttgaagccagctacccatgctgtaattttccagcatatggtaaattggttagttaactgggaccagaggccccaaggcatggatgaaactgacacaatgcaaacatgcaggctagaaaaacctttgcatgaatggatgcatctatgcttggatgttatatggattctagttaatgaagataaatgtcgcattccattttatgagcttgttcgctgtaacttgcagtttcttgaaaacattcctgatgatgaagcactggttagtataatcatggagattcataggaggagagatatggtgtgtatgcacatgcaaatgttggatcaacatcttcattgtccgacatttggaactcatcgtttcttatcacaatcatacccaagcatagctggagaatctgttactaatctgcgttattctcccattacttaccctagtgtattgggagagccactacatggagagattatccgcattgagattgttatgaacactctaagttcagatccaaggaaggttgataccacaagaaagataatttcattccacaaagaagacaaaagccttgacgccaataatattggccctcaaagtattcttcttgatttcatcagtagtagtcagactctgcgcatttggtctttcaacacttcgattagagaacatttgaacagtgatcagcttcaaaaaggaaaacagattgacgaatggtggaaacagatgatgaaagcttctggtgagaggatgatagactttacgaacttggacgaacgagcaacaggcatgttctgggttctctccttcaccatggcgcaaccagcttgtgaagcagtaatgaattggtttacgtcagctggaatggcagatttaattcaagggcctaatatgcagccaagtgaaagaataatgatgatgcgtgaaacttaccctctgtcaatgtcattgctttctggcttgtctatcaatctttgtctgaagcttgcttaccagcttgaagagaccatatttcttggccaggctgtccctagcattgctatggtggaaacctatgtgaggttactgcttatagcaccccattcattgtttcgtccccattttacggcattaacccaaagatctccatctattttgagcaaatctggtgtgtcattgctcctacttgagatactaaattacagattgctgcctttgtataggtatcatggtaaaagcaaggcgttgatgtatgatgtcacaaagataatatcaatgattaagggtaaacgtggagaacatcgtctttttcgattagcagaaaatttgtgcatgaatttgattctctcactgaaagacttcttttttgtgaaaaaggaattgaagggcccgactgagtttactgaaactctaaaccgcataacaataataagtcttgcaatcactatcaagacgcgtggaattgctgaagttgaacacatgatttatcttcaaccattgttagagcaaattatggcaaccagtcagcatacctggtcagaaaagacactgcgttattttcctcctctcattcgtgattttttaatggggagagtggataagaggggtctagctatccaagcatggcagcaggcagaaacgactgttattaaccaatgtaatcagctgctctcaccatctgctgagccaaactatgtcatgacttatttgagccacagtttccctcagcatcgtcaatatctttgtgctggtgcttggatgctgatgaatggacatcttgagatcaacagtgcaaatcttgctcgcgtcttaagagagttttcacctgaggaagttacagcaaatatctatacagtggttgatgtgcttctgcatcatatccaatgcgaggtgcaaagggggcatctagcacaggatttactatccaaagcaatcacaaatctttctttttttatatggacacatgaactccttccgctggatattctattgctagctcttattgacagggatgatgatccttatgctttacgccttgtgataagtctgcttgaaaaaccagaacttcagcaaagagtcaagaatttctgtaatactcgttctccagagcattggctgaaaaatcaacatccaaaaagagctgagctccagaaagctcttggcagccatctttcatggaaggaccgctatccacccttcttcgatgacattgctgcacgtctgcttcctgttattccactgattatttataggcttattgagaatgatgcaactgacattgcagacagagttcttgcattctattcttccttgcttgccttccacccgctaagatttacatttgtacgtgatattcttgcgtatttctatggtcatcttccaatcaaactaattggtaggatcctcaacctgctgggtgttagcactaagacccccttttcagaatcttttgctaaatatttagtgtcatcaaattcttcaatatgtccaccaccagaatactttgccaacctgttgctaaacctcgttaataatgttatacctcctttaagtagcaaatcgaaatcaaacccagcagacacaacacgctcgactttcaacaaacatcatgcatcttcacaacctggtggagttggtaacaccgatggccagagggcattttatcagaatcaggatcctgggtcgtatacacagcttgttttggaaacagcagctattgagattctctcacttcctgtgcctgctgctcaaatagtgtcctctttggtccaaataatagcacatgtacaagcaatacttatacagtcaaatagtggccaaggaatgtcaggtggtttggggcaaagttctgggctgccaacttctccttcaggggctgctgaatcctcaggtcccaaccaagcgaacagtgctgcaactggcatcaatgccactaactttgtttctaggagtggttactcctgccaacaattgtctgttttgatgattcaagcatgtggtcttctgctggcacaactcccaccagaattccacatgcaactatactcagaagcagctcgagtcataaaagactgctggtggcttgctgatggttccaggcctgttaaagagcttgactctgctgttggatatgcactgttggatcctacatgggcttcccaagacaatacatcaacagccattggtaacattgttgcccttctgcattccttttttagcaatcttccacaagagtggctggaatctactcatactgtcatcaaacaccttcggccagtcaattcagttgccatgttaagaatcgccttccgcatattgggtcccttgttacctcgtctagcctttgctcgacctttgttcatgaagaccttggctttactcttcaatgttttgggtgacgtgtttggtaagaaccctcaggtctcaaatccaaatcctgtggaggcgtcagaaattgcagacataattgacttcttgcatcatgcggtgatgtatgagggccaaggcggtcctgttcagagcacgagcaaacccaagctggagatactgacattatgcgggaaagtaatagagattttgaggccagacgtgcaacatcttctctcccacctcaagattgaccccacctcttcaatctatgctgcaacgcatccaaagctcgttcaaaacccatcctaataatgttatagcttacaagtgtattctaatgatgcaagatgcttcgaaccactgcagaagtctcaacatgtgatgctgttggatgagtagaattgcagtaactgtaacatgtgattcaggggcgtattctcaagtgattcgccgttgtcagttgtatcctttagttagaatgttgtaaatgctatctgcttagtgcatattaggacataactacatagtgtaagcagtaaccatggaggttatcttgccaggctaagaattttggctgccttgcctgtgagccatgcgacatatgtatcctgtcgcattaggatgagcgacaaccgacacggtcgcatgatgcaagatttgtgccggttggccgattgtcaccgtgcagatctcttcgtaacagtgctgcacgtggaaggtttgaccgagtgactgcatcaccagttaatagtgtgaactgtatcaaattcttgatcatcttgcttattatgaaatgcctacgttgtgtcaatcactcttgcattgtatagtcgctcatcaagtgttcaaacttaattgtgggtaaaattgtttggttcttcttgcatgacattcatccaatctgattccgtaagaacttcatctatgcatgttgacacaatgaaataaacaaatgagtgatatttaac

SEQ ID NO: 55856 - DNA, 5373 bp, Zea Mays
aaccctttcccctctccggactcgaggattcggagtttcggacaaccgacaacatcgctcgccggcgacgagcgcggcgcggcggcggcgatggatgggggacacacgacgaggcatccgatgtctccagcgatctcggcttcgactgtgctaccgcagcagcggcagatgcagcctcaccaccacccggcgcggccggcaatcgccgatctcttcaccctatacctcggcgtgcgtgcatccctcgcccctaaattcctaatctccagtcgagtgggcgtgtccctgctagtactgaccctgggtgttgttggcttgcagatgaactcgaagcagcgagcggaagacccattgagagagagctcgaataagctgcagaagagagtgactgctctgaacagagacctgcctccccgtgatgagcagttcatttcagattatgagcagttgcgcatgcagtttcctgacgctgagcagttgcaggcaatcacagaatcagttctcatctcctttgtgctgcagtgcagtagccacgcaccacaatctgagttcttgctctttgctacacggtgcctatgtgctcgaggccatcttagatgggatagcctccttccatctctgcttaatactgtttcctccatagaggcacctatggtgcaaggagtttctgtgactggtggtggttctgtaaccccttcgtcagctattacaatgccaaatgctccaaactttcaccaatcaaacccagcctcacctttgtcagtaatgaacaccataggatctcctactcagtctggtattgaccaacctgtaggtgcaaatgtgtcgccaatcaaggcagctgaattctccagctctgcgcagcttggtactgcagcaagagtttcttgaaaacattcctgatgatgaagcactggttagtataatcatggagattcataggaggagagatatggtgtgtatgcacatgcaaatgttggatcaacatcttcattgtccgacatttggaactcatcgtttcttatcacaatcatacccaagcatagctggagaatctgttactaatctgcgttattctcccattacttaccctagtgtattgggagagccactacatggagaggaccttgcaaactccattcctaagggtggtttagactgggaacgtgctcttcgttgtttgaggcatgctctccgcacaaccccatcaccagactggtggagacgcgttcttcttgttgccccttgttacagatcacagtctcagcaatcatcaactcctggagctgttttctcacctgatatgattggtgaggcagttgcggacaggacaattgaactactgaagctcactaactcagagactcaatgctggcaagattggcttttgtttgctgacatctttttcttcctaatgaaaagtggatgcattgactttcttgattttgtggacaaacttgcttctcgagtcacaaatagtgatcaacagattctccggagtaaccatgtcacttggttgcttgcgcagattatccgcattgagattgttatgaacactctaagttcagatccaaggaaggttgataccacaagaaagataatttcattccacaaagaagacaaaagccttgacgccaataatattggccctcaaagtattcttcttgatttcatcagtagtagtcagactctgcgcatttggtctttcaacacttcgattagagaacatttgaacagtgatcagcttcaaaaaggaaaacagattgacgaatggtggaaacagatgatgaaagcttctggtgagaggatgatagactttacgaacttggacgaacgagcaacaggcatgttctgggttctctccttcaccatggcgcaaccagcttgtgaagcagtaatgaattggtttacgtcagctggaatggcagatttaattcaagggcctaatatgcagccaagtgaaagaataatgatgatgcgtgaaacttaccctctgtcaatgtcattgctttctggcttgtctatcaatctttgtctgaagcttgcttaccagcttgaagagaccatatttcttggccaggctgtccctagcattgctatggtggaaacctatgtgaggttactgcttatagcaccccattcattgtttcgtccccattttacggcattaacccaaagatctccatctattttgagcaaatctggtgtgtcattgctcctacttgagatactaaattacagattgctgcctttgtataggtatcatggtaaaagcaaggcgttgatgtatgatgtcacaaagataatatcaatgattaagggtaaacgtggagaacatcgtctttttcgattagcagaaaatttgtgcatgaatttgattctctcactgaaagacttcttttttgtgaaaaaggaattgaagggcccgactgagtttactgaaactctaaaccgcataacaataataagtcttgcaatcactatcaagacgcgtggaattgctgaagttgaacacatgatttatcttcaaccattgttagagcaaattatggcaaccagtcagcatacctggtcagaaaagacactgcgttattttcctcctctcattcgtgattttttaatggggagagtggataagaggggtctagctatccaagcatggcagcaggcagaaacgactgttattaaccaatgtaatcagctgctctcaccatctgctgagccaaactatgtcatgacttatttgagccacagtttccctcagcatcgtcaatatctttgtgctggtgcttggatgctgatgaatggacatcttgagatcaacagtgcaaatcttgctcgcgtcttaagagagttttcacctgaggaagttacagcaaatatctatacagtggttgatgtgcttctgcatcatatccaatgcgaggtgcaaagggggcatctagcacaggatttactatccaaagcaatcacaaatctttctttttttatatggacacatgaactccttccgctggatattctattgctagctcttattgacagggatgatgatccttatgctttacgccttgtgataagtctgcttgaaaaaccagaacttcagcaaagagtcaagaatttctgtaatactcgttctccagagcattggctgaaaaatcaacatccaaaaagagctgagctccagaaagctcttggcagccatctttcatggaaggaccgctatccacccttcttcgatgacattgctgcacgtctgcttcctgttattccactgattatttataggcttattgagaatgatgcaactgacattgcagacagagttcttgcattctattcttccttgcttgccttccacccgctaagatttacatttgtacgtgatattcttgcgtatttctatggtcatcttccaatcaaactaattggtaggatcctcaacctgctgggtgttagcactaagacccccttttcagaatcttttgctaaatatttagtgtcatcaaattcttcaatatgtccaccaccagaatactttgccaacctgttgctaaacctcgttaataatgttatacctcctttaagtagcaaatcgaaatcaaacccagcagacacaacacgctcgactttcaacaaacatcatgcatcttcacaacctggtggagttggtaacaccgatggccagagggcattttatcagaatcaggatcctgggtcgtatacacagcttgttttggaaacagcagctattgagattctctcacttcctgtgcctgctgctcaaatagtgtcctctttggtccaaataatagcacatgtacaagcaatacttatacagtcaaatagtggccaaggaatgtcaggtggtttggggcaaagttctgggctgccaacttctccttcaggggctgctgaatcctcaggtcccaaccaagcgaacagtgctgcaactggcatcaatgccactaactttgtttctaggagtggttactcctgccaacaattgtctgttttgatgattcaagcatgtggtcttctgctggcacaactcccaccagaattccacatgcaactatactcagaagcagctcgagtcataaaagactgctggtggcttgctgatggttccaggcctgttaaagagcttgactctgctgttggatatgcactgttggatcctacatgggcttcccaagacaatacatcaacagccattggtaacattgttgcccttctgcattccttttttagcaatcttccacaagagtggctggaatctactcatactgtcatcaaacaccttcggccagtcaattcagttgccatgttaagaatcgccttccgcatattgggtcccttgttacctcgtctagcctttgctcgacctttgttcatgaagaccttggctttactcttcaatgttttgggtgacgtgtttggtaagaaccctcaggtctcaaatccaaatcctgtggaggcgtcagaaattgcagacataattgacttcttgcatcatgcggtgatgtatgagggccaaggcggtcctgttcagagcacgagcaaacccaagctggagatactgacattatgcgggaaagtaatagagattttgaggccagacgtgcaacatcttctctcccacctcaagattgaccccacctcttcaatctatgctgcaacgcatccaaagctcgttcaaaacccatcctaataatgttatagcttacaagtgtattctaatgatgcaagatgcttcgaaccactgcagaagtctcaacatgtgatgctgttggatgagtagaattgcagtaactgtaacatgtgattcaggggcgtattctcaagtgattcgccgttgtcagttgtatcctttagttagaatgttgtaaatgctatctgcttagtgcatattaggacataactacatagtgtaagcagtaaccatggaggttatcttgccaggctaagaattttggctgccttgcctgtgagccatgcgacatatgtatcctgtcgcattaggatgagcgacaaccgacacggtcgcatgatgcaagatttgtgccggttggccgattgtcaccgtgcagatctcttcgtaacagtgctgcacgtggaaggtttgaccgagtgactgcatcaccagttaatagtgtgaactgtatcaaattcttgatcatcttgcttattatgaaatgcctacgttgtgtcaatcactcttgcattgtatagtcgctcatcaagtgttcaaacttaattgtgggtaaaattgtttggttcttcttgcatgacattcatccaatctgattccgtaagaacttcatctatgcatgttgacacaatgaaataaacaaatgagtgatatttaac

SEQ ID NO: 55857 - DNA, 5425 bp, Zea Mays
aaaccctttcccctctccggactcgaggattcggagtttcggacaaccgacaacatcgctcgccggcgacgagcgcggcgcggcggcggcgatggatgggggacacacgacgaggcatccgatgtctccagcgatctcggcttcgactgtgctaccgcagcagcggcagatgcagcctcaccaccacccggcgcggccggcaatcgccgatctcttcaccctatacctcggcatgaactcgaagcagcgagcggaagacccattgagagagagctcgaataagctgcagaagagagtgactgctctgaacagagacctgcctccccgtgatgagcagttcatttcagattatgagcagttgcgcatgcagtttcctgacgctgagcagttgcaggcaatcacagaatcagttctcatctcctttgtgctgcagtgcagtagccacgcaccacaatctgagttcttgctctttgctacacggtgcctatgtgctcgaggccatcttagatgggatagcctccttccatctctgcttaatactgtttcctccatagaggcacctatggtgcaaggagtttctgtgactggtggtggttctgtaaccccttcgtcagctattacaatgccaaatgctccaaactttcaccaatcaaacccagcctcacctttgtcagtaatgaacaccataggatctcctactcagtctggtattgaccaacctgtaggtgcaaatgtgtcgccaatcaaggcagctgaattctccagctctgcgcagcttggtactgcagcaagaggtgaccagtctcgcaggggagcagaagctagctatctgcatcatctatcctgcaggataattctagcagggctggagttcaatttgaagccagctacccatgctgtaattttccagcatatggtaaattggttagttaactgggaccagaggccccaaggcatggatgaaactgacacaatgcaaacatgcaggctagaaaaacctttgcatgaatggatgcatctatgcttggatgttatatggattctagttaatgaagataaatgtcgcattccattttatgagcttgttcgctgtaacttgcagtttcttgaaaacattcctgatgatgaagcactggttagtataatcatggagattcataggaggagagatatggtgtgtatgcacatgcaaatgttggatcaacatcttcattgtccgacatttggaactcatcgtttcttatcacaatcatacccaagcatagctggagaatctgttactaatctgcgttattctcccattacttaccctagtgtattgggagagccactacatggagaggaccttgcaaactccattcctaagggtggtttagactgggaacgtgctcttcgttgtttgaggcatgctctccgcacaaccccatcaccagactggtggagacgcgttcttcttgttgccccttgttacagatcacagtctcagcaatcatcaactcctggagctgttttctcacctgatatgattggtgaggcagttgcggacaggacaattgaactactgaagctcactaactcagattatccgcattgagattgttatgaacactctaagttcagatccaaggaaggttgataccacaagaaagataatttcattccacaaagaagacaaaagccttgacgccaataatattggccctcaaagtattcttcttgatttcatcagtagtagtcagactctgcgcatttggtctttcaacacttcgattagagaacatttgaacagtgatcagcttcaaaaaggaaaacagattgacgaatggtggaaacagatgatgaaagcttctggtgagaggatgatagactttacgaacttggacgaacgagcaacaggcatgttctgggttctctccttcaccatggcgcaaccagcttgtgaagcagtaatgaattggtttacgtcagctggaatggcagatttaattcaagggcctaatatgcagccaagtgaaagaataatgatgatgcgtgaaacttaccctctgtcaatgtcattgctttctggcttgtctatcaatctttgtctgaagcttgcttaccagcttgaagagaccatatttcttggccaggctgtccctagcattgctatggtggaaacctatgtgaggttactgcttatagcaccccattcattgtttcgtccccattttacggcattaacccaaagatctccatctattttgagcaaatctggtgtgtcattgctcctacttgagatactaaattacagattgctgcctttgtataggtatcatggtaaaagcaaggcgttgatgtatgatgtcacaaagataatatcaatgattaagggtaaacgtggagaacatcgtctttttcgattagcagaaaatttgtgcatgaatttgattctctcactgaaagacttcttttttgtgaaaaaggaattgaagggcccgactgagtttactgaaactctaaaccgcataacaataataagtcttgcaatcactatcaagacgcgtggaattgctgaagttgaacacatgatttatcttcaaccattgttagagcaaattatggcaaccagtcagcatacctggtcagaaaagacactgcgttattttcctcctctcattcgtgattttttaatggggagagtggataagaggggtctagctatccaagcatggcagcaggcagaaacgactgttattaaccaatgtaatcagctgctctcaccatctgctgagccaaactatgtcatgacttatttgagccacagtttccctcagcatcgtcaatatctttgtgctggtgcttggatgctgatgaatggacatcttgagatcaacagtgcaaatcttgctcgcgtcttaagagagttttcacctgaggaagttacagcaaatatctatacagtggttgatgtgcttctgcatcatatccaatgcgaggtgcaaagggggcatctagcacaggatttactatccaaagcaatcacaaatctttctttttttatatggacacatgaactccttccgctggatattctattgctagctcttattgacagggatgatgatccttatgctttacgccttgtgataagtctgcttgaaaaaccagaacttcagcaaagagtcaagaatttctgtaatactcgttctccagagcattggctgaaaaatcaacatccaaaaagagctgagctccagaaagctcttggcagccatctttcatggaaggaccgctatccacccttcttcgatgacattgctgcacgtctgcttcctgttattccactgattatttataggcttattgagaatgatgcaactgacattgcagacagagttcttgcattctattcttccttgcttgccttccacccgctaagatttacatttgtacgtgatattcttgcgtatttctatggtcatcttccaatcaaactaattggtaggatcctcaacctgctgggtgttagcactaagacccccttttcagaatcttttgctaaatatttagtgtcatcaaattcttcaatatgtccaccaccagaatactttgccaacctgttgctaaacctcgttaataatgttatacctcctttaagtagcaaatcgaaatcaaacccagcagacacaacacgctcgactttcaacaaacatcatgcatcttcacaacctggtggagttggtaacaccgatggccagagggcattttatcagaatcaggatcctgggtcgtatacacagcttgttttggaaacagcagctattgagattctctcacttcctgtgcctgctgctcaaatagtgtcctctttggtccaaataatagcacatgtacaagcaatacttatacagtcaaatagtggccaaggaatgtcaggtggtttggggcaaagttctgggctgccaacttctccttcaggggctgctgaatcctcaggtcccaaccaagcgaacagtgctgcaactggcatcaatgccactaactttgtttctaggagtggttactcctgccaacaattgtctgttttgatgattcaagcatgtggtcttctgctggcacaactcccaccagaattccacatgcaactatactcagaagcagctcgagtcataaaagactgctggtggcttgctgatggttccaggcctgttaaagagcttgactctgctgttggatatgcactgttggatcctacatgggcttcccaagacaatacatcaacagccattggtaacattgttgcccttctgcattccttttttagcaatcttccacaagagtggctggaatctactcatactgtcatcaaacaccttcggccagtcaattcagttgccatgttaagaatcgccttccgcatattgggtcccttgttacctcgtctagcctttgctcgacctttgttcatgaagaccttggctttactcttcaatgttttgggtgacgtgtttggtaagaaccctcaggtctcaaatccaaatcctgtggaggcgtcagaaattgcagacataattgacttcttgcatcatgcggtgatgtatgagggccaaggcggtcctgttcagagcacgagcaaacccaagctggagatactgacattatgcgggaaagtaatagagattttgaggccagacgtgcaacatcttctctcccacctcaagattgaccccacctcttcaatctatgctgcaacgcatccaaagctcgttcaaaacccatcctaataatgttatagcttacaagtgtattctaatgatgcaagatgcttcgaaccactgcagaagtctcaacatgtgatgctgttggatgagtagaattgcagtaactgtaacatgtgattcaggggcgtattctcaagtgattcgccgttgtcagttgtatcctttagttagaatgttgtaaatgctatctgcttagtgcatattaggacataactacatagtgtaagcagtaaccatggaggttatcttgccaggctaagaattttggctgccttgcctgtgagccatgcgacatatgtatcctgtcgcattaggatgagcgacaaccgacacggtcgcatgatgcaagatttgtgccggttggccgattgtcaccgtgcagatctcttcgtaacagtgctgcacgtggaaggtttgaccgagtgactgcatcaccagttaatagtgtgaactgtatcaaattcttgatcatcttgcttattatgaaatgcctacgttgtgtcaatcactcttgcattgtatagtcgctcatcaagtgttcaaacttaattgtgggtaaaattgtttggttcttcttgcatgacattcatccaatctgattccgtaagaacttcatctatgcatgttgacacaatgaaataaacaaatgagtgatatttaac

SEQ ID NO: 55858 - DNA, 4766 bp, Zea Mays
aaaccctttcccctctccggactcgaggattcggagtttcggacaaccgacaacatcgctcgccggcgacgagcgcggcgcggcggcggcgatggatgggggacacacgacgaggcatccgatgtctccagcgatctcggcttcgactgtgctaccgcagcagcggcagatgcagcctcaccaccacccggcgcggccggcaatcgccgatctcttcaccctatacctcggcatgaactcgaagcagcgagcggaagacccattgagagagagctctttcttgaaaacattcctgatgatgaagcactggttagtataatcatggagattcataggaggagagatatggtgtgtatgcacatgcaaatgttggatcaacatcttcattgtccgacatttggaactcatcgtttcttatcacaatcatacccaagcatagctggagaatctgttactaatctgcgttattctcccattacttaccctagtgtattgggagagccactacatggagaggaccttgcaaactccattcctaagggtggtttagactgggaacgtgctcttcgttgtttgaggcatgctctccgcacaaccccatcaccagactggtggagacgcgttcttcttgttgccccttgttacagatcacagtctcagcaatcatcaactcctggagctgttttctcacctgatatgattggtgaggcagttgcggacaggacaattgaactactgaagctcactaactcagagactcaatgctggcaagattggcttttgtttgctgacatctttttcttcctaatgaaaagtggatgcattgactttcttgattttgtggacaaacttgcttctcgagtcacaaatagtgatcaacagattctccggagtaaccatgtcacttggttgcttgcgcagattatccgcattgagattgttatgaacactctaagttcagatccaaggaaggttgataccacaagaaagataatttcattccacaaagaagacaaaagccttgacgccaataatattggccctcaaagtattcttcttgatttcatcagtagtagtcagactctgcgcatttggtctttcaacacttcgattagagaacatttgaacagtgatcagcttcaaaaaggaaaacagattgacgaatggtggaaacagatgatgaaagcttctggtgagaggatgatagactttacgaacttggacgaacgagcaacaggcatgttctgggttctctccttcaccatggcgcaaccagcttgtgaagcagtaatgaattggtttacgtcagctggaatggcagatttaattcaagggcctaatatgcagccaagtgaaagaataatgatgatgcgtgaaacttaccctctgtcaatgtcattgctttctggcttgtctatcaatctttgtctgaagcttgcttaccagcttgaagagaccatatttcttggccaggctgtccctagcattgctatggtggaaacctatgtgaggttactgcttatagcaccccattcattgtttcgtccccattttacggcattaacccaaagatctccatctattttgagcaaatctggtgtgtcattgctcctacttgagatactaaattacagattgctgcctttgtataggtatcatggtaaaagcaaggcgttgatgtatgatgtcacaaagataatatcaatgattaagggtaaacgtggagaacatcgtctttttcgattagcagaaaatttgtgcatgaatttgattctctcactgaaagacttcttttttgtgaaaaaggaattgaagggcccgactgagtttactgaaactctaaaccgcataacaataataagtcttgcaatcactatcaagacgcgtggaattgctgaagttgaacacatgatttatcttcaaccattgttagagcaaattatggcaaccagtcagcatacctggtcagaaaagacactgcgttattttcctcctctcattcgtgattttttaatggggagagtggataagaggggtctagctatccaagcatggcagcaggcagaaacgactgttattaaccaatgtaatcagctgctctcaccatctgctgagccaaactatgtcatgacttatttgagccacagtttccctcagcatcgtcaatatctttgtgctggtgcttggatgctgatgaatggacatcttgagatcaacagtgcaaatcttgctcgcgtcttaagagagttttcacctgaggaagttacagcaaatatctatacagtggttgatgtgcttctgcatcatatccaatgcgaggtgcaaagggggcatctagcacaggatttactatccaaagcaatcacaaatctttctttttttatatggacacatgaactccttccgctggatattctattgctagctcttattgacagggatgatgatccttatgctttacgccttgtgataagtctgcttgaaaaaccagaacttcagcaaagagtcaagaatttctgtaatactcgttctccagagcattggctgaaaaatcaacatccaaaaagagctgagctccagaaagctcttggcagccatctttcatggaaggaccgctatccacccttcttcgatgacattgctgcacgtctgcttcctgttattccactgattatttataggcttattgagaatgatgcaactgacattgcagacagagttcttgcattctattcttccttgcttgccttccacccgctaagatttacatttgtacgtgatattcttgcgtatttctatggtcatcttccaatcaaactaattggtaggatcctcaacctgctgggtgttagcactaagacccccttttcagaatcttttgctaaatatttagtgtcatcaaattcttcaatatgtccaccaccagaatactttgccaacctgttgctaaacctcgttaataatgttatacctcctttaagtagcaaatcgaaatcaaacccagcagacacaacacgctcgactttcaacaaacatcatgcatcttcacaacctggtggagttggtaacaccgatggccagagggcattttatcagaatcaggatcctgggtcgtatacacagcttgttttggaaacagcagctattgagattctctcacttcctgtgcctgctgctcaaatagtgtcctctttggtccaaataatagcacatgtacaagcaatacttatacagtcaaatagtggccaaggaatgtcaggtggtttggggcaaagttctgggctgccaacttctccttcaggggctgctgaatcctcaggtcccaaccaagcgaacagtgctgcaactggcatcaatgccactaactttgtttctaggagtggttactcctgccaacaattgtctgttttgatgattcaagcatgtggtcttctgctggcacaactcccaccagaattccacatgcaactatactcagaagcagctcgagtcataaaagactgctggtggcttgctgatggttccaggcctgttaaagagcttgactctgctgttggatatgcactgttggatcctacatgggcttcccaagacaatacatcaacagccattggtaacattgttgcccttctgcattccttttttagcaatcttccacaagagtggctggaatctactcatactgtcatcaaacaccttcggccagtcaattcagttgccatgttaagaatcgccttccgcatattgggtcccttgttacctcgtctagcctttgctcgacctttgttcatgaagaccttggctttactcttcaatgttttgggtgacgtgtttggtaagaaccctcaggtctcaaatccaaatcctgtggaggcgtcagaaattgcagacataattgacttcttgcatcatgcggtgatgtatgagggccaaggcggtcctgttcagagcacgagcaaacccaagctggagatactgacattatgcgggaaagtaatagagattttgaggccagacgtgcaacatcttctctcccacctcaagattgaccccacctcttcaatctatgctgcaacgcatccaaagctcgttcaaaacccatcctaataatgttatagcttacaagtgtattctaatgatgcaagatgcttcgaaccactgcagaagtctcaacatgtgatgctgttggatgagtagaattgcagtaactgtaacatgtgattcaggggcgtattctcaagtgattcgccgttgtcagttgtatcctttagttagaatgttgtaaatgctatctgcttagtgcatattaggacataactacatagtgtaagcagtaaccatggaggttatcttgccaggctaagaattttggctgccttgcctgtgagccatgcgacatatgtatcctgtcgcattaggatgagcgacaaccgacacggtcgcatgatgcaagatttgtgccggttggccgattgtcaccgtgcagatctcttcgtaacagtgctgcacgtggaaggtttgaccgagtgactgcatcaccagttaatagtgtgaactgtatcaaattcttgatcatcttgcttattatgaaatgcctacgttgtgtcaatcactcttgcattgtatagtcgctcatcaagtgttcaaacttaattgtgggtaaaattgtttggttcttcttgcatgacattcatccaatctgattccgtaagaacttcatctatgcatgttgacacaatgaaataaacaaatgagtgatatttaac

SEQ ID NO: 55859 - DNA, 3857 bp, Zea Mays
ctgactagtaaaccctttcccctctccggactcgaggattcggagtttcggacaaccgacaacatcgctcgccggcgacgagcgcggcgcggcggcggcgatggatgggggacacacgacgaggcatccgatgtctccagcgatctcggcttcgactgtgctaccgcagcagcggcagatgcagcctcaccaccacccggcgcggccggcaatcgccgatctcttcaccctatacctcggcatgaactcgaagcagcgagcggaagacccattgagagagagctctttcttgaaaacattcctgatgatgaagcactggttagtataatcatggagattcataggaggagagatatggtgtgtatgcacatgcaaatgttggatcaacatcttcattgtccgacatttggaactcatcgtttcttatcacaatcatacccaagcatagctggagaatctgttactaatctgcgttattctcccattacttaccctagtgtattgggagagccactacatggagaggaccttgcaaactccattcctaagggtggtttagactgggaacgtgctcttcgttgtttgaggcatgctctccgcacaaccccatcaccagactggtggagacgcgttcttcttgttgccccttgttacagatcacagtctcagcaatcatcaactcctggagctgttttctcacctgatatgattggtgaggcagttgcggacaggacaattgaactactgaagctcactaactcagcagattatccgcattgagattgttatgaacactctaagttcagatccaaggaaggttgataccacaagaaagataatttcattccacaaagaagacaaaagccttgacgccaataatattggccctcaaagtattcttcttgatttcatcagtagtagtcagactctgcgcatttggtctttcaacacttcgattagagaacatttgaacagtgatcagcttcaaaaaggaaaacagattgacgaatggtggaaacagatgatgaaagcttctggtgagaggatgatagactttacgaacttggacgaacgagcaacaggcatgttctgggttctctccttcaccatggcgcaaccagcttgtgaagcagtaatgaattggtttacgtcagctggaatggcagatttaattcaagggcctaatatgcagccaagtgaaagaataatgatgatgcgtgaaacttaccctctgtcaatgtcattgctttctggcttgtctatcaatctttgtctgaagcttgcttaccagcttgaagagaccatatttcttggccaggctgtccctagcattgctatggtggaaacctatgtgaggttactgcttatagcaccccattcattgtttcgtccccattttacggcattaacccaaagatctccatctattttgagcaaatctggtgtgtcattgctcctacttgagatactaaattacagattgctgcctttgtataggtatcatggtaaaagcaaggcgttgatgtatgatgtcacaaagataatatcaatgattaagggtaaacgtggagaacatcgtctttttcgattagcagaaaatttgtgcatgaatttgattctctcactgaaagacttcttttttgtgaaaaaggaattgaagggcccgactgagtttactgaaactctaaaccgcataacaataataagtcttgcaatcactatcaagacgcgtggaattgctgaagttgaacacatgatttatcttcaaccattgttagagcaaattatggcaaccagtcagcatacctggtcagaaaagacactgcgttattttcctcctctcattcgtgattttttaatggggagagtggataagaggggtctagctatccaagcatggcagcaggcagaaacgactgttattaaccaatgtaatcagctgctctcaccatctgctgagccaaactatgtcatgacttatttgagccacagtttccctcagcatcgtcaatatctttgtgctggtgcttggatgctgatgaatggacatcttgagatcaacagtgcaaatcttgctcgcgtcttaagagagttttcacctgaggaagttacagcaaatatctatacagtggttgatgtgcttctgcatcatatccaatgcgaggtgcaaagggggcatctagcacaggatttactatccaaagcaatcacaaatctttctttttttatatggacacatgaactccttccgctggatattctattgctagctcttattgacagggatgatgatccttatgctttacgccttgtgataagtctgcttgaaaaaccagaacttcagcaaagagtcaagaatttctgtaatactcgttctccagagcattggctgaaaaatcaacatccaaaaagagctgagctccagaaagctcttggcagccatctttcatggaaggaccgctatccacccttcttcgatgacattgctgcacgtctgcttcctgttattccactgattatttataggcttattgagaatgatgcaactgacattgcagacagagttcttgcattctattcttccttgcttgccttccacccgctaagatttacatttgtacgtgatattcttgcgtatttctatggtcatcttccaatcaaactaattggtaggatcctcaacctgctgggtgttagcactaaggtaacattgttgcccttctgcattccttttttagcaatcttccacaagagtggctggaatctactcatactgtcatcaaacaccttcggccagtcaattcagttgccatgttaagaatcgccttccgcatattgggtcccttgttacctcgtctagcctttgctcgacctttgttcatgaagaccttggctttactcttcaatgttttgggtgacgtgtttggtaagaaccctcaggtctcaaatccaaatcctgtggaggcgtcagaaattgcagacataattgacttcttgcatcatgcggtgatgtatgagggccaaggcggtcctgttcagagcacgagcaaacccaagctggagatactgacattatgcgggaaagtaatagagattttgaggccagacgtgcaacatcttctctcccacctcaagattgaccccacctcttcaatctatgctgcaacgcatccaaagctcgttcaaaacccatcctaataatgttatagcttacaagtgtattctaatgatgcaagatgcttcgaaccactgcagaagtctcaacatgtgatgctgttggatgagtagaattgcagtaactgtaacatgtgattcaggggcgtattctcaagtgattcgccgttgtcagttgtatcctttagttagaatgttgtaaatgctatctgcttagtgcatattaggacataactacatagtgtaagcagtaaccatggaggttatcttgccaggctaagaattttggctgccttgcctgtgagccatgcgacatatgtatcctgtcgcattaggatgagcgacaaccgacacggtcgcatgatgcaagatttgtgccggttggccgattgtcaccgtgcagatctcttcgtaacagtgctgcacgtggaaggtttgaccgagtgactgcatcaccagttaatagtgtgaactgtatcaaattcttgatcatcttgcttattatgaaatgcctacgttgtgtcaatcactcttgcattgtatagtcgctcatcaagtgttcaaacttaattgtgggtaaaattgtttggttcttcttgcatgacattcatccaatctgattccgtaagaacttcatctatgcatgttgacacaatgaaataaacaaatgagtgatatttaac

SEQ ID NO: 55860 - DNA, 4024 bp, Zea Mays
gctctgactagtaaaccctttcccctctccggactcgaggattcggagtttcggacaaccgacaacatcgctcgccggcgacgagcgcggcgcggcggcggcgatggatgggggacacacgacgaggcatccgatgtctccagcgatctcggcttcgactgtgctaccgcagcagcggcagatgcagcctcaccaccacccggcgcggccggcaatcgccgatctcttcaccctatacctcggcatgaactcgaagcagcgagcggaagacccattgagagagagctctttcttgaaaacattcctgatgatgaagcactggttagtataatcatggagattcataggaggagagatatggtgtgtatgcacatgcaaatgttggatcaacatcttcattgtccgacatttggaactcatcgtttcttatcacaatcatacccaagcatagctggagaatctgttactaatctgcgttattctcccattacttaccctagtgtattgggagagccactacatggagaggaccttgcaaactccattcctaagggtggtttagactgggaacgtgctcttcgttgtttgaggcatgctctccgcacaaccccatcaccagactggtggagacgcgttcttcttgttgccccttgttacagatcacagtctcagcaatcatcaactcctggagctgttttctcacctgatatgattggtgaggcagttgcggacaggacaattgaactactgaagctcactaactcagagactcaatgctggcaagattggcttttgtttgctgacatctttttcttcctaatgaaaagtggatgcattgactttcttgattttgtggacaaacttgcttctcgagtcacaaatagtgatcaacagattctccggagtaaccatgtcacttggttgcttgcgcagattatccgcattgagattgttatgaacactctaagttcagatccaaggaaggttgataccacaagaaagataatttcattccacaaagaagacaaaagccttgacgccaataatattggccctcaaagtattcttcttgatttcatcagtagtagtcagactctgcgcatttggtctttcaacacttcgattagagaacatttgaacagtgatcagcttcaaaaaggaaaacagattgacgaatggtggaaacagatgatgaaagcttctggtgagaggatgatagactttacgaacttggacgaacgagcaacaggcatgttctgggttctctccttcaccatggcgcaaccagcttgtgaagcagtaatgaattggtttacgtcagctggaatggcagatttaattcaagggcctaatatgcagccaagtgaaagaataatgatgatgcgtgaaacttaccctctgtcaatgtcattgctttctggcttgtctatcaatctttgtctgaagcttgcttaccagcttgaagagaccatatttcttggccaggctgtccctagcattgctatggtggaaacctatgtgaggttactgcttatagcaccccattcattgtttcgtccccattttacggcattaacccaaagatctccatctattttgagcaaatctggtgtgtcattgctcctacttgagatactaaattacagattgctgcctttgtataggtatcatggtaaaagcaaggcgttgatgtatgatgtcacaaagataatatcaatgattaagggtaaacgtggagaacatcgtctttttcgattagcagaaaatttgtgcatgaatttgattctctcactgaaagacttcttttttgtgaaaaaggaattgaagggcccgactgagtttactgaaactctaaaccgcataacaataataagtcttgcaatcactatcaagacgcgtggaattgctgaagttgaacacatgatttatcttcaaccattgttagagcaaattatggcaaccagtcagcatacctggtcagaaaagacactgcgttattttcctcctctcattcgtgattttttaatggggagagtggataagaggggtctagctatccaagcatggcagcaggcagaaacgactgttattaaccaatgtaatcagctgctctcaccatctgctgagccaaactatgtcatgacttatttgagccacagtttccctcagcatcgtcaatatctttgtgctggtgcttggatgctgatgaatggacatcttgagatcaacagtgcaaatcttgctcgcgtcttaagagagttttcacctgaggaagttacagcaaatatctatacagtggttgatgtgcttctgcatcatatccaatgcgaggtgcaaagggggcatctagcacaggatttactatccaaagcaatcacaaatctttctttttttatatggacacatgaactccttccgctggatattctattgctagctcttattgacagggatgatgatccttatgctttacgccttgtgataagtctgcttgaaaaaccagaacttcagcaaagagtcaagaatttctgtaatactcgttctccagagcattggctgaaaaatcaacatccaaaaagagctgagctccagaaagctcttggcagccatctttcatggaaggaccgctatccacccttcttcgatgacattgctgcacgtctgcttcctgttattccactgattatttataggcttattgagaatgatgcaactgacattgcagacagagttcttgcattctattcttccttgcttgccttccacccgctaagatttacatttgtacgtgatattcttgcgtatttctatggtcatcttccaatcaaactaattggtaggatcctcaacctgctgggtgttagcactaaggtaacattgttgcccttctgcattccttttttagcaatcttccacaagagtggctggaatctactcatactgtcatcaaacaccttcggccagtcaattcagttgccatgttaagaatcgccttccgcatattgggtcccttgttacctcgtctagcctttgctcgacctttgttcatgaagaccttggctttactcttcaatgttttgggtgacgtgtttggtaagaaccctcaggtctcaaatccaaatcctgtggaggcgtcagaaattgcagacataattgacttcttgcatcatgcggtgatgtatgagggccaaggcggtcctgttcagagcacgagcaaacccaagctggagatactgacattatgcgggaaagtaatagagattttgaggccagacgtgcaacatcttctctcccacctcaagattgaccccacctcttcaatctatgctgcaacgcatccaaagctcgttcaaaacccatcctaataatgttatagcttacaagtgtattctaatgatgcaagatgcttcgaaccactgcagaagtctcaacatgtgatgctgttggatgagtagaattgcagtaactgtaacatgtgattcaggggcgtattctcaagtgattcgccgttgtcagttgtatcctttagttagaatgttgtaaatgctatctgcttagtgcatattaggacataactacatagtgtaagcagtaaccatggaggttatcttgccaggctaagaattttggctgccttgcctgtgagccatgcgacatatgtatcctgtcgcattaggatgagcgacaaccgacacggtcgcatgatgcaagatttgtgccggttggccgattgtcaccgtgcagatctcttcgtaacagtgctgcacgtggaaggtttgaccgagtgactgcatcaccagttaatagtgtgaactgtatcaaattcttgatcatcttgcttattatgaaatgcctacgttgtgtcaatcactcttgcattgtatagtcgctcatcaagtgttcaaacttaattgtgggtaaaattgtttggttcttcttgcatgacattcatccaatctgattccgtaagaacttcatctatgcatgttgacacaatgaaataaacaaatgagtgatatttaac

SEQ ID NO: 55861 - DNA, 5765 bp, Zea Mays
ctgctctgactagtaaaccctttcccctctccggactcgaggattcggagtttcggacaaccgacaacatcgctcgccggcgacgagcgcggcgcggcggcggcgatggatgggggacacacgacgaggcatccgatgtctccagcgatctcggcttcgactgtgctaccgcagcagcggcagatgcagcctcaccaccacccggcgcggccggcaatcgccgatctcttcaccctatacctcggcgtgcgtgcatccctcgcccctaaattcctaatctccagtcgagtgggcgtgtccctgctagtactgaccctgggtgttgttggcttgcagatgaactcgaagcagcgagcggaagacccattgagagagagctcgaataagctgcagaagagagtgactgctctgaacagagacctgcctccccgtgatgagcagttcatttcagattatgagcagttgcgcatgcagtttcctgacgctgagcagttgcaggcaatcacagaatcagttctcatctcctttgtgctgcagtgcagtagccacgcaccacaatctgagttcttgctctttgctacacggtgcctatgtgctcgaggccatcttagatgggatagcctccttccatctctgcttaatactgtttcctccatagaggcacctatggtgcaaggagtttctgtgactggtggtggttctgtaaccccttcgtcagctattacaatgccaaatgctccaaactttcaccaatcaaacccagcctcacctttgtcagtaatgaacaccataggatctcctactcagtctggtattgaccaacctgtaggtgcaaatgtgtcgccaatcaaggcagctgaattctccagctctgcgcagcttggtactgcagcaagaggtgaccagtctcgcaggggagcagaagctagctatctgcatcatctatcctgcaggataattctagcagggctggagttcaatttgaagccagctacccatgctgtaattttccagcatatggtaaattggttagttaactgggaccagaggccccaaggcatggatgaaactgacacaatgcaaacatgcaggctagaaaaacctttgcatgaatggatgcatctatgcttggatgttatatggattctagttaatgaagataaatgtcgcattccattttatgagcttgttcgctgtaacttgcagtttcttgaaaacattcctgatgatgaagcactggttagtataatcatggagattcataggaggagagatatggtgtgtatgcacatgcaaatgttggatcaacatcttcattgtccgacatttggaactcatcgtttcttatcacaatcatacccaagcatagctggagaatctgttactaatctgcgttattctcccattacttaccctagtgtattgggagagccactacatggagaggaccttgcaaactccattcctaagggtggtttagactgggaacgtgctcttcgttgtttgaggcatgctctccgcacaaccccatcaccagactggtggagacgcgttcttcttgttgccccttgttacagatcacagtctcagcaatcatcaactcctggagctgttttctcacctgatatgattggtgaggcagttgcggacaggacaattgaactactgaagctcactaactcagagactcaatgctggcaagattggcttttgtttgctgacatctttttcttcctaatgaaaagtggatgcattgactttcttgattttgtggacaaacttgcttctcgagtcacaaatagtgatcaacagattctccggagtaaccatgtcacttggttgcttgcgcagattatccgcattgagattgttatgaacactctaagttcagatccaaggaaggttgataccacaagaaagataatttcattccacaaagaagacaaaagccttgacgccaataatattggccctcaaagtattcttcttgatttcatcagtagtagtcagactctgcgcatttggtctttcaacacttcgattagagaacatttgaacagtgatcagcttcaaaaaggaaaacagattgacgaatggtggaaacagatgatgaaagcttctggtgagaggatgatagactttacgaacttggacgaacgagcaacaggcatgttctgggttctctccttcaccatggcgcaaccagcttgtgaagcagtaatgaattggtttacgtcagctggaatggcagatttaattcaagggcctaatatgcagccaagtgaaagaataatgatgatgcgtgaaacttaccctctgtcaatgtcattgctttctggcttgtctatcaatctttgtctgaagcttgcttaccagcttgaagagaccatatttcttggccaggctgtccctagcattgctatggtggaaacctatgtgaggttactgcttatagcaccccattcattgtttcgtccccattttacggcattaacccaaagatctccatctattttgagcaaatctggtgtgtcattgctcctacttgagatactaaattacagattgctgcctttgtataggtatcatggtaaaagcaaggcgttgatgtatgatgtcacaaagataatatcaatgattaagggtaaacgtggagaacatcgtctttttcgattagcagaaaatttgtgcatgaatttgattctctcactgaaagacttcttttttgtgaaaaaggaattgaagggcccgactgagtttactgaaactctaaaccgcataacaataataagtcttgcaatcactatcaagacgcgtggaattgctgaagttgaacacatgatttatcttcaaccattgttagagcaaattatggcaaccagtcagcatacctggtcagaaaagacactgcgttattttcctcctctcattcgtgattttttaatggggagagtggataagaggggtctagctatccaagcatggcagcagaaacgactgttattaaccaatgtaatcagctgctctcaccatctgctgagccaaactatgtcatgacttatttgagccacagtttccctcagcatcgtcaatatctttgtgctggtgcttggatgctgatgaatggacatcttgagatcaacagtgcaaatcttgtatgttttaattattcttttattgtggatgtcatttgtttctctctatgtttctctcatgatcttcatgcaggctcgcgtcttaagagagttttcacctgaggaagttacagcaaatatctatacagtggttgatgtgcttctgcatcatatccaatgcgaggtgcaaagggggcatctagcacaggatttactatccaaagcaatcacaaatctttctttttttatatggacacatgaactccttccgctggatattctattgctagctcttattgacagggatgatgatccttatgctttacgccttgtgataagtctgcttgaaaaaccagaacttcagcaaagagtcaagaatttctgtaatactcgttctccagagcattggctgaaaaatcaacatccaaaaagagctgagctccagaaagctcttggcagccatctttcatggaaggaccgctatccacccttcttcgatgacattgctgcacgtctgcttcctgttattccactgattatttataggcttattgagaatgatgcaactgacattgcagacagagttcttgcattctattcttccttgcttgccttccacccgctaagatttacatttgtacgtgatattcttgcgtatttctatggtcatcttccaatcaaactaattggtaggatcctcaacctgctgggtgttagcactaagacccccttttcagaatcttttgctaaatatttagtgtcatcaaattcttcaatatgtccaccaccagaatactttgccaacctgttgctaaacctcgttaataatgttatacctcctttaagtagcaaatcgaaatcaaacccagcagacacaacacgctcgactttcaacaaacatcatgcatcttcacaacctggtggagttggtaacaccgatggccagagggcattttatcagaatcaggatcctgggtcgtatacacagcttgttttggaaacagcagctattgagattctctcacttcctgtgcctgctgctcaaatagtgtcctctttggtccaaataatagcacatgtacaagcaatacttatacagtcaaatagtggccaaggaatgtcaggtggtttggggcaaagttctgggctgccaacttctccttcaggggctgctgaatcctcaggtcccaaccaagcgaacagtgctgcaactggcatcaatgccactaactttgtttctaggagtggttactcctgccaacaattgtctgttttgatgattcaagcatgtggtcttctgctggcacaactcccaccagaattccacatgcaactatactcagaagcagctcgagtcataaaagactgctggtggcttgctgatggttccaggcctgttaaagagcttgactctgctgttggatatgcactgttggatcctacatgggcttcccaagacaatacatcaacagccattggtaacattgttgcccttctgcattccttttttagcaatcttccacaagagtggctggaatctactcatactgtcatcaaacaccttcggccagtcaattcagttgccatgttaagaatcgccttccgcatattgggtcccttgttacctcgtctagcctttgctcgacctttgttcatgaagaccttggctttactcttcaatgttttgggtgacgtgtttggtaagaaccctcaggtctcaaatccaaatcctgtggaggcgtcagaaattgcagacataattgacttcttgcatcatgcggtgatgtatgagggccaaggcggtcctgttcagagcacgagcaaacccaagctggagatactgacattatgcgggaaagtaatagagattttgaggccagacgtgcaacatcttctctcccacctcaagattgaccccacctcttcaatctatgctgcaacgcatccaaagctcgttcaaaacccatcctaataatgttatagcttacaagtgtattctaatgatgcaagatgcttcgaaccactgcagaagtctcaacatgtgatgctgttggatgagtagaattgcagtaactgtaacatgtgattcaggggcgtattctcaagtgattcgccgttgtcagttgtatcctttagttagaatgttgtaaatgctatctgcttagtgcatattaggacataactacatagtgtaagcagtaaccatggaggttatcttgccaggctaagaattttggctgccttgcctgtgagccatgcgacatatgtatcctgtcgcattaggatgagcgacaaccgacacggtcgcatgatgcaagatttgtgccggttggccgattgtcaccgtgcagatctcttcgtaacagtgctgcacgtggaaggtttgaccgagtgactgcatcaccagttaatagtgtgaactgtatcaaattcttgatcatcttgcttattatgaaatgcctacgttgtgtcaatcactcttgcattgtatagtcgctcatcaagtgttcaaacttaattgtgggtaaaattgtttggttcttcttgcatgacattcatccaatctgattccgtaagaacttcatctatgcatgttgacacaatgaaataaacaaatgagtgatatttaac

SEQ ID NO: 55862 - DNA, 4866 bp, Zea Mays
cccagtccaagacgctgctctgactagtaaaccctttcccctctccggactcgaggattcggagtttcggacaaccgacaacatcgctcgccggcgacgagcgcggcgcggcggcggcgatggatgggggacacacgacgaggcatccgatgtctccagcgatctcggcttcgactgtgctaccgcagcagcggcagatgcagcctcaccaccacccggcgcggccggcaatcgccgatctcttcaccctatacctcggcatgaactcgaagcagcgagcggaagacccattgagagagagctcgaataagctgcagaagagagtgactgctctgaacagagacctgcctccccgtgatgagcagttcatttcagattatgagcagttgcgcatgcagtttcctgacgctgagcagttgcaggcaatcacagaatcagttctcatctcctttgtgctgcagtgcagtagccacgcaccacaatctgagttcttgctctttgctacacggtgcctatgtgctcgaggccatcttagatgggatagcctccttccatctctgcttaatactgtttcctccatagaggcacctatggtgcaaggagtttctgtgactggtggtggttctgtaaccccttcgtcagctattacaatgccaaatgctccaaactttcaccaatcaaacccagcctcacctttgtcagtaatgaacaccataggatctcctactcagtctggtattgaccaacctgtaggtgcaaatgtgtcgccaatcaaggcagctgaattctccagctctgcgcagcttggtactgcagcaagaggtgaccagtctcgcaggggagcagaagctagctatctgcatcatctatcctgcaggataattctagcagggctggagttcaatttgaagccagctacccatgctgtaattttccagcatatggtaaattggttagttaactgggaccagaggccccaaggcatggatgaaactgacacaatgcaaacatgcaggctagaaaaacctttgcatgaatggatgcatctatgcttggatgttatatggattctagttaatgaagataaatgtcgcattccattttatgagcttgttcgctgtaacttgcagtttcttgaaaacattcctgatgatgaagcactggttagtataatcatggagattcataggaggagagatatggtgtgtatgcacatgcaaatgttggatcaacatcttcattgtccgacatttggaactcatcgtttcttatcacaatcatacccaagcatagctggagaatctgttactaatctgcgttattctcccattacttaccctagtgtattgggagagccactacatggagaggaccttgcaaactccattcctaagggtggtttagactgggaacgtgctcttcgttgtttgaggcatgctctccgcacaaccccatcaccagactggtggagacgcgttcttcttgttgccccttgttacagatcacagtctcagcaatcatcaactcctggagctgttttctcacctgatatgattggtgaggcagttgcggacaggacaattgaactactgaagctcactaactcagagactcaatgctggcaagattggcttttgtttgctgacatctttttcttcctaatgaaaagtggatgcattgactttcttgattttgtggacaaacttgcttctcgagtcacaaatagtgatcaacagattctccggagtaaccatgtcacttggttgcttgcgcagattatccgcattgagattgttatgaacactctaagttcagatccaaggaaggttgataccacaagaaagataatttcattccacaaagaagacaaaagccttgacgccaataatattggccctcaaagtattcttcttgatttcatcagtagtagtcagactctgcgcatttggtctttcaacacttcgattagagaacatttgaacagtgatcagcttcaaaaaggaaaacagattgacgaatggtggaaacagatgatgaaagcttctggtgagaggatgatagactttacgaacttggacgaacgagcaacaggcatgttctgggttctctccttcaccatggcgcaaccagcttgtgaagcagtaatgaattggtttacgtcagctggaatggcagatttaattcaagggcctaatatgcagccaagtgaaagaataatgatgatgcgtgaaacttaccctctgtcaatgtcattgctttctggcttgtctatcaatctttgtctgaagcttgcttaccagcttgaagagaccatatttcttggccaggctgtccctagcattgctatggtggaaacctatgtgaggttactgcttatagcaccccattcattgtttcgtccccattttacggcattaacccaaagatctccatctattttgagcaaatctggtgtgtcattgctcctacttgagatactaaattacagattgctgcctttgtataggtatcatggtaaaagcaaggcgttgatgtatgatgtcacaaagataatatcaatgattaagggtaaacgtggagaacatcgtctttttcgattagcagaaaatttgtgcatgaatttgattctctcactgaaagacttcttttttgtgaaaaaggaattgaagggcccgactgagtttactgaaactctaaaccgcataacaataataagtcttgcaatcactatcaagacgcgtggaattgctgaagttgaacacatgatttatcttcaaccattgttagagcaaattatggcaaccagtcagcatacctggtcagaaaagacactgcgttattttcctcctctcattcgtgattttttaatggggagagtggataagaggggtctagctatccaagcatggcagcaggcagaaacgactgttattaaccaatgtaatcagctgctctcaccatctgctgagccaaactatgtcatgacttatttgagccacagtttccctcagcatcgtcaatatctttgtgctggtgcttggatgctgatgaatggacatcttgagatcaacagtgcaaatcttgctcgcgtcttaagagagttttcacctgaggaagttacagcaaatatctatacagtggttgatgtgcttctgcatcatatccaatgcgaggtgcaaagggggcatctagcacaggatttactatccaaagcaatcacaaatctttctttttttatatggacacatgaactccttccgctggatattctattgctagctcttattgacagggatgatgatccttatgctttacgccttgtgataagtctgcttgaaaaaccagaacttcagcaaagagtcaagaatttctgtaatactcgttctccagagcattggctgaaaaatcaacatccaaaaagagctgagctccagaaagctcttggcagccatctttcatggaaggaccgctatccacccttcttcgatgacattgctgcacgtctgcttcctgttattccactgattatttataggcttattgagaatgatgcaactgacattgcagacagagttcttgcattctattcttccttgcttgccttccacccgctaagatttacatttgtacgtgatattcttgcgtatttctatggtcatcttccaatcaaactaattggtaggatcctcaacctgctgggtgttagcactaaggtaacattgttgcccttctgcattccttttttagcaatcttccacaagagtggctggaatctactcatactgtcatcaaacaccttcggccagtcaattcagttgccatgttaagaatcgccttccgcatattgggtcccttgttacctcgtctagcctttgctcgacctttgttcatgaagaccttggctttactcttcaatgttttgggtgacgtgtttggtaagaaccctcaggtctcaaatccaaatcctgtggaggcgtcagaaattgcagacataattgacttcttgcatcatgcggtgatgtatgagggccaaggcggtcctgttcagagcacgagcaaacccaagctggagatactgacattatgcgggaaagtaatagagattttgaggccagacgtgcaacatcttctctcccacctcaagattgaccccacctcttcaatctatgctgcaacgcatccaaagctcgttcaaaacccatcctaataatgttatagcttacaagtgtattctaatgatgcaagatgcttcgaaccactgcagaagtctcaacatgtgatgctgttggatgagtagaattgcagtaactgtaacatgtgattcaggggcgtattctcaagtgattcgccgttgtcagttgtatcctttagttagaatgttgtaaatgctatctgcttagtgcatattaggacataactacatagtgtaagcagtaaccatggaggttatcttgccaggctaagaattttggctgccttgcctgtgagccatgcgacatatgtatcctgtcgcattaggatgagcgacaaccgacacggtcgcatgatgcaagatttgtgccggttggccgattgtcaccgtgcagatctcttcgtaacagtgctgcacgtggaaggtttgaccgagtgactgcatcaccagttaatagtgtgaactgtatcaaattcttgatcatcttgcttattatgaaatgcctacgttgtgtcaatcactcttgcattgtatagtcgctcatcaagtgttcaaacttaattgtgggtaaaattgtttggttcttcttgcatgacattcatccaatctgattccgtaagaacttcatctatgcatgttgacacaatgaaataaacaaatgagtgatatttaac

SEQ ID NO: 55863 - DNA, 5647 bp, Zea Mays
ctttcttctggctggcccacttgacagcccagtccaagacgctgctctgactagtaaaccctttcccctctccggactcgaggattcggagtttcggacaaccgacaacatcgctcgccggcgacgagcgcggcgcggcggcggcgatggatgggggacacacgacgaggcatccgatgtctccagcgatctcggcttcgactgtgctaccgcagcagcggcagatgcagcctcaccaccacccggcgcggccggcaatcgccgatctcttcaccctatacctcggcatgaactcgaagcagcgagcggaagacccattgagagagagctcgaataagctgcagaagagagtgactgctctgaacagagacctgcctccccgtgatgagcagttcatttcagattatgagcagttgcgcatgcagtttcctgacgctgagcagttgcaggcaatcacagaatcagttctcatctcctttgtgctgcagtgcagtagccacgcaccacaatctgagttcttgctctttgctacacggtgcctatgtgctcgaggccatcttagatgggatagcctccttccatctctgcttaatactgtttcctccatagaggcacctatggtgcaaggagtttctgtgactggtggtggttctgtaaccccttcgtcagctattacaatgccaaatgctccaaactttcaccaatcaaacccagcctcacctttgtcagtaatgaacaccataggatctcctactcagtctggtattgaccaacctgtaggtgcaaatgtgtcgccaatcaaggcagctgaattctccagctctgcgcagcttggtactgcagcaagaggtgaccagtctcgcaggggagcagaagctagctatctgcatcatctatcctgcaggataattctagcagggctggagttcaatttgaagccagctacccatgctgtaattttccagcatatggtaaattggttagttaactgggaccagaggccccaaggcatggatgaaactgacacaatgcaaacatgcaggctagaaaaacctttgcatgaatggatgcatctatgcttggatgttatatggattctagttaatgaagataaatgtcgcattccattttatgagcttgttcgctgtaacttgcagtttcttgaaaacattcctgatgatgaagcactggttagtataatcatggagattcataggaggagagatatggtgtgtatgcacatgcaaatgttggatcaacatcttcattgtccgacatttggaactcatcgtttcttatcacaatcatacccaagcatagctggagaatctgttactaatctgcgttattctcccattacttaccctagtgtattgggagagccactacatggagaggaccttgcaaactccattcctaagggtggtttagactgggaacgtgctcttcgttgtttgaggcatgctctccgcacaaccccatcaccagactggtggagacgcgttcttcttgttgccccttgttacagatcacagtctcagcaatcatcaactcctggagctgttttctcacctgatatgattggtgaggcagttgcggacaggacaattgaactactgaagctcactaactcagagactcaatgctggcaagattggcttttgtttgctgacatctttttcttcctaatgaaaagtggatgcattgactttcttgattttgtggacaaacttgcttctcgagtcacaaatagtgatcaacagattctccggagtaaccatgtcacttggttgcttgcgcagattatccgcattgagattgttatgaacactctaagttcagatccaaggaaggttgataccacaagaaagataatttcattccacaaagaagacaaaagccttgacgccaataatattggccctcaaagtattcttcttgatttcatcagtagtagtcagactctgcgcatttggtctttcaacacttcgattagagaacatttgaacagtgatcagcttcaaaaaggaaaacagattgacgaatggtggaaacagatgatgaaagcttctggtgagaggatgatagactttacgaacttggacgaacgagcaacaggcatgttctgggttctctccttcaccatggcgcaaccagcttgtgaagcagtaatgaattggtttacgtcagctggaatggcagatttaattcaagggcctaatatgcagccaagtgaaagaataatgatgatgcgtgaaacttaccctctgtcaatgtcattgctttctggcttgtctatcaatctttgtctgaagcttgcttaccagcttgaagagaccatatttcttggccaggctgtccctagcattgctatggtggaaacctatgtgaggttactgcttatagcaccccattcattgtttcgtccccattttacggcattaacccaaagatctccatctattttgagcaaatctggtgtgtcattgctcctacttgagatactaaattacagattgctgcctttgtataggtatcatggtaaaagcaaggcgttgatgtatgatgtcacaaagataatatcaatgattaagggtaaacgtggagaacatcgtctttttcgattagcagaaaatttgtgcatgaatttgattctctcactgaaagacttcttttttgtgaaaaaggaattgaagggcccgactgagtttactgaaactctaaaccgcataacaataataagtcttgcaatcactatcaagacgcgtggaattgctgaagttgaacacatgatttatcttcaaccattgttagagcaaattatggcaaccagtcagcatacctggtcagaaaagacactgcgttattttcctcctctcattcgtgattttttaatggggagagtggataagaggggtctagctatccaagcatggcagcaggcagaaacgactgttattaaccaatgtaatcagctgctctcaccatctgctgagccaaactatgtcatgacttatttgagccacagtttccctcagcatcgtcaatatctttgtgctggtgcttggatgctgatgaatggacatcttgagatcaacagtgcaaatcttgctcgcgtcttaagagagttttcacctgaggaagttacagcaaatatctatacagtggttgatgtgcttctgcatcatatccaatgcgaggtgcaaagggggcatctagcacaggatttactatccaaagcaatcacaaatctttctttttttatatggacacatgaactccttccgctggatattctattgctagctcttattgacagggatgatgatccttatgctttacgccttgtgataagtctgcttgaaaaaccagaacttcagcaaagagtcaagaatttctgtaatactcgttctccagagcattggctgaaaaatcaacatccaaaaagagctgagctccagaaagctcttggcagccatctttcatggaaggaccgctatccacccttcttcgatgacattgctgcacgtctgcttcctgttattccactgattatttataggcttattgagaatgatgcaactgacattgcagacagagttcttgcattctattcttccttgcttgccttccacccgctaagatttacatttgtacgtgatattcttgcgtatttctatggtcatcttccaatcaaactaattggtaggatcctcaacctgctgggtgttagcactaagacccccttttcagaatcttttgctaaatatttagtgtcatcaaattcttcaatatgtccaccaccagaatactttgccaacctgttgctaaacctcgttaataatgttatacctcctttaagtagcaaatcgaaatcaaacccagcagacacaacacgctcgactttcaacaaacatcatgcatcttcacaacctggtggagttggtaacaccgatggccagagggcattttatcagaatcaggatcctgggtcgtatacacagcttgttttggaaacagcagctattgagattctctcacttcctgtgcctgctgctcaaatagtgtcctctttggtccaaataatagcacatgtacaagcaatacttatacagtcaaatagtggccaaggaatgtcaggtggtttggggcaaagttctgggctgccaacttctccttcaggggctgctgaatcctcaggtcccaaccaagcgaacagtgctgcaactggcatcaatgccactaactttgtttctaggagtggttactcctgccaacaattgtctgttttgatgattcaagcatgtggtcttctgctggcacaactcccaccagaattccacatgcaactatactcagaagcagctcgagtcataaaagactgctggtggcttgctgatggttccaggcctgttaaagagcttgactctgctgttggatatgcactgttggatcctacatgggcttcccaagacaatacatcaacagccattggtaacattgttgcccttctgcattccttttttagcaatcttccacaagagtggctggaatctactcatactgtcatcaaacaccttcggccagtcaattcagttgccatgttaagaatcgccttccgcatattgggtcccttgttacctcgtctagcctttgctcgacctttgttcatgaagaccttggctttactcttcaatgttttgggtgacgtgtttggtaagaaccctcaggtctcaaatccaaatcctgtggaggcgtcagaaattgcagacataattgacttcttgcatcatgcggtgatgtatgagggccaaggcggtcctgttcagagcacgagcaaacccaagctggagatactgacattatgcgggaaagtaatagagattttgaggccagacgtgcaacatcttctctcccacctcaagattgaccccacctcttcaatctatgctgcaacgcatccaaagctcgttcaaaacccatcctaataatgttatagcttacaagtgtattctaatgatgcaagatgcttcgaaccactgcagaagtctcaacatgtgatgctgttggatgagtagaattgcagtaactgtaacatgtgattcaggggcgtattctcaagtgattcgccgttgtcagttgtatcctttagttagaatgttgtaaatgctatctgcttagtgcatattaggacataactacatagtgtaagcagtaaccatggaggttatcttgccaggctaagaattttggctgccttgcctgtgagccatgcgacatatgtatcctgtcgcattaggatgagcgacaaccgacacggtcgcatgatgcaagatttgtgccggttggccgattgtcaccgtgcagatctcttcgtaacagtgctgcacgtggaaggtttgaccgagtgactgcatcaccagttaatagtgtgaactgtatcaaattcttgatcatcttgcttattatgaaatgcctacgttgtgtcaatcactcttgcattgtatagtcgctcatcaagtgttcaaacttaattgtgggtaaaattgtttggttcttcttgcatgacattcatccaatctgattccgtaagaacttcatctatgcatgttgacacaatgaaataaacaaatgagtgatatttaac

SEQ ID NO: 55864 - DNA, 3323 bp, Zea Mays
aaaccctttcccctctccggactcgaggattcggagtttcggacaaccgacaacatcgctcgccggcgacgagcgcggcgcggcggcggcgatggatgggggacacacgacgaggcatccgatgtctccagcgatctcggcttcgactgtgctaccgcagcagcggcagatgcagcctcaccaccacccggcgcggccggcaatcgccgatctcttcaccctatacctcggcatgaactcgaagcagcgagcggaagacccattgagagagagctcgaataagctgcagaagagagtgactgctctgaacagagacctgcctccccgtgatgagcagttcatttcagattatgagcagttgcgcatgcagtttcctgacgctgagcagttgcaggcaatcacagaatcagttctcatctcctttgtgctgcagtgcagtagccacgcaccacaatctgagttcttgctctttgctacacggtgcctatgtgctcgaggccatcttagatgggatagcctccttccatctctgcttaatactgtttcctccatagaggcacctatggtgcaaggagtttctgtgactggtggtggttctgtaaccccttcgtcagctattacaatgccaaatgctccaaactttcaccaatcaaacccagcctcacctttgtcagtaatgaacaccataggatctcctactcagtctggtattgaccaacctgtaggtgcaaatgtgtcgccaatcaaggcagctgaattctccagctctgcgcagcttggtactgcagcaagaggtgaccagtctcgcaggggagcagaagctagctatctgcatcatctatcctgcaggataattctagcagggctggagttcaatttgaagccagctacccatgctgtaattttccagcatatggtaaattggttagttaactgggaccagaggccccaaggcatggatgaaactgacacaatgcaaacatgcaggctagaaaaacctttgcatgaatggatgcatctatgcttggatgttatatggattctagttaatgaagataaatgtcgcattccattttatgagcttgttcgctgtaacttgcagtttcttgaaaacattcctgatgatgaagcactggttagtataatcatggagattcataggaggagagatatggtgtgtatgcacatgcaaatgttggatcaacatcttcattgtccgacatttggaactcatcgtttcttatcacaatcatacccaagcatagctggagaatctgttactaatctgcgttattctcccattacttaccctagtgtattgggagagccactacatggagaggaccttgcaaactccattcctaagggtggtttagactgggaacgtgctcttcgttgtttgaggcatgctctccgcacaaccccatcaccagactggtggagacgcgttcttcttgttgccccttgttacagatcacagtctcagcaatcatcaactcctggagctgttttctcacctgatatgattggtgaggcagttgcggacaggacaattgaactactgaagctcactaactcagagactcaatgctggcaagattggcttttgtttgctgacatctttttcttcctaatgaaaagtggatgcattgactttcttgattttgtggacaaacttgcttctcgagtcacaaatagtgatcaacagattctccggagtaaccatgtcacttggttgcttgcgcagattatccgcattgagattgttatgaacactctaagttcagatccaaggaaggttgataccacaagaaagataatttcattccacaaagaagacaaaagccttgacgccaataatattggccctcaaagtattcttcttgatttcatcagtagtagtcagactctgcgcatttggtctttcaacacttcgattagagaacatttgaacagtgatcagcttcaaaaaggaaaacagattgacgaatggtggaaacagatgatgaaagcttctggtgagaggatgatagactttacgaacttggacgaacgagcaacaggcatgttctgggttctctccttcaccatggcgcaaccagcttgtgaagcagtaatgaattggtttacgtcagctggaatggcagatttaattcaagggcctaatatgcagccaagtgaaagaataatgatgatgcgtgaaacttaccctctgtcaatgtcattgctttctggcttgtctatcaatctttgtctgaagcttgcttaccagcttgaagagaccatatttcttggccaggctgtccctagcattgctatggtggaaacctatgtgaggttactgcttatagcaccccattcattgtttcgtccccattttacggcattaacccaaagatctccatctattttgagcaaatctggtgtgtcattgctcctacttgagatactaaattacagattgctgcctttgtataggtatcatggtaaaagcaaggcgttgatgtatgatgtcacaaagataatatcaatgattaagggtaaacgtggagaacatcgtctttttcgattagcagaaaatttgtgcatgaatttgattctctcactgaaagacttcttttttgtgaaaaaggaattgaagggcccgactgagtttactgaaactctaaaccgcataacaataataagtcttgcaatcactatcaagacgcgtggaattgctgaagttgaacacatgatttatcttcaaccattgttagagcaaattatggcaaccagtcagcatacctggtcagaaaagacactgcgttattttcctcctctcattcgtgattttttaatggggagagtggataagaggggtctagctatccaagcatggcagcaggcagaaacgactgttattaaccaatgtaatcagctgctctcaccatctgctgagccaaactatgtcatgacttatttgagccacagtttccctcagcatcgtcaatatctttgtgctggtgcttggatgctgatgaatggacatcttgagatcaacagtgcaaatcttgctcgcgtcttaagagagttttcacctgaggaagttacagcaaatatctatacagtggttgatgtgcttctgcatcatatccaatgcgaggtgcaaagggggcatctagcacaggatttactatccaaagcaatcacaaatctttctttttttatatggacacatgaactccttccgctggatattctattgctagctcttattgacagggatgatgatccttatgctttacgccttgtgggctgctcactggatgccgatcataaca

SEQ ID NO: 55865 - DNA, 3337 bp, Zea Mays
ctccggactcgaggattcggagtttcggacaaccgacaacatcgctcgccggcgacgagcgcggcgcggcggcggcgatggatgggggacacacgacgaggcatccgatgtctccagcgatctcggcttcgactgtgctaccgcagcagcggcagatgcagcctcaccaccacccggcgcggccggcaatcgccgatctcttcaccctatacctcggcgtgcgtgcatccctcgcccctaaattcctaatctccagtcgagtgggcgtgtccctgctagtactgaccctgggtgttgttggcttgcagatgaactcgaagcagcgagcggaagacccattgagagagagctcgaataagctgcagaagagagtgactgctctgaacagagacctgcctccccgtgatgagcagttcatttcagattatgagcagttgcgcatgcagtttcctgacgctgagcagttgcaggcaatcacagaatcagttctcatctcctttgtgctgcagtgcagtagccacgcaccacaatctgagttcttgctctttgctacacggtgcctatgtgctcgaggccatcttagatgggatagcctccttccatctctgcttaatactgtttcctccatagaggcacctatggtgcaaggagtttctgtgactggtggtggttctgtaaccccttcgtcagctattacaatgccaaatgctccaaactttcaccaatcaaacccagcctcacctttgtcagtaatgaacaccataggatctcctactcagtctggtattgaccaacctgtaggtgcaaatgtgtcgccaatcaaggcagctgaattctccagctctgcgcagcttggtactgcagcaagaggtgaccagtctcgcaggggagcagaagctagctatctgcatcatctatcctgcaggataattctagcagggctggagttcaatttgaagccagctacccatgctgtaattttccagcatatggtaaattggttagttaactgggaccagaggccccaaggcatggatgaaactgacacaatgcaaacatgcaggctagaaaaacctttgcatgaatggatgcatctatgcttggatgttatatggattctagttaatgaagataaatgtcgcattccattttatgagcttgttcgctgtaacttgcagtttcttgaaaacattcctgatgatgaagcactggttagtataatcatggagattcataggaggagagatatggtgtgtatgcacatgcaaatgttggatcaacatcttcattgtccgacatttggaactcatcgtttcttatcacaatcatacccaagcatagctggagaatctgttactaatctgcgttattctcccattacttaccctagtgtattgggagagccactacatggagaggaccttgcaaactccattcctaagggtggtttagactgggaacgtgctcttcgttgtttgaggcatgctctccgcacaaccccatcaccagactggtggagacgcgttcttcttgttgccccttgttacagatcacagtctcagcaatcatcaactcctggagctgttttctcacctgatatgattggtgaggcagttgcggacaggacaattgaactactgaagctcactaactcagagactcaatgctggcaagattggcttttgtttgctgacatctttttcttcctaatgaaaagtggatgcattgactttcttgattttgtggacaaacttgcttctcgagtcacaaatagtgatcaacagattctccggagtaaccatgtcacttggttgcttgcgcagattatccgcattgagattgttatgaacactctaagttcagatccaaggaaggttgataccacaagaaagataatttcattccacaaagaagacaaaagccttgacgccaataatattggccctcaaagtattcttcttgatttcatcagtagtagtcagactctgcgcatttggtctttcaacacttcgattagagaacatttgaacagtgatcagcttcaaaaaggaaaacagattgacgaatggtggaaacagatgatgaaagcttctggtgagaggatgatagactttacgaacttggacgaacgagcaacaggcatgttctgggttctctccttcaccatggcgcaaccagcttgtgaagcagtaatgaattggtttacgtcagctggaatggcagatttaattcaagggcctaatatgcagccaagtgaaagaataatgatgatgcgtgaaacttaccctctgtcaatgtcattgctttctggcttgtctatcaatctttgtctgaagcttgcttaccagcttgaagagaccatatttcttggccaggctgtccctagcattgctatggtggaaacctatgtgaggttactgcttatagcaccccattcattgtttcgtccccattttacggcattaacccaaagatctccatctattttgagcaaatctggtatcatggtaaaagcaaggcgttgatgtatgatgtcacaaagataatatcaatgattaagggtaaacgtggagaacatcgtctttttcgattagcagaaaatttgtgcatgaatttgattctctcactgaaagacttcttttttgtgaaaaaggaattgaagggcccgactgagtttactgaaactctaaaccgcataacaataataagtcttgcaatcactatcaagacgcgtggaattgctgaagttgaacacatgatttatcttcaaccattgttagagcaaattatggcaaccagtcagcatacctggtcagaaaagacactgcgttattttcctcctctcattcgtgattttttaatggggagagtggataagaggggtctagctatccaagcatggcagcaggcagaaacgactgttattaaccaatgtaatcagctgctctcaccatctgctgagccaaactatgtcatgacttatttgagccacagtttccctcagcatcgtcaatatctttgtgctggtgcttggatgctgatgaatggacatcttgagatcaacagtgcaaatcttgctcgcgtcttaagagagttttcacctgaggaagttacagcaaatatctatacagtggttgatgtgcttctgcatcatatccaatgcgaggtgcaaagggggcatctagcacaggatttactatccaaagcaatcacaaatctttctttttttatatggacacatgaactccttccgctggatattctattgctagctcttattgacagggatgatgatccttatgctttacgccttgtgactgcactatttacagagtga

SEQ ID NO: 55866 - DNA, 2326 bp, Zea Mays
ctccggactcgaggattcggagtttcggacaaccgacaacatcgctcgccggcgacgagcgcggcgcggcggcggcgatggatgggggacacacgacgaggcatccgatgtctccagcgatctcggcttcgactgtgctaccgcagcagcggcagatgcagcctcaccaccacccggcgcggccggcaatcgccgatctcttcaccctatacctcggcgtgcgtgcatccctcgcccctaaattcctaatctccagtcgagtgggcgtgtccctgctagtactgaccctgggtgttgttggcttgcagatgaactcgaagcagcgagcggaagacccattgagagagagctcgaccttgcaaactccattcctaagggtggtttagactgggaacgtgctcttcgttgtttgaggcatgctctccgcacaaccccatcaccagactggtggagacgcgttcttcttgttgccccttgttacagatcacagtctcagcaatcatcaactcctggagctgttttctcacctgatatgattggtgaggcagttgcggacaggacaattgaactactgaagctcactaactcagagactcaatgctggcaagattggcttttgtttgctgacatctttttcttcctaatgaaaagtggatgcattgactttcttgattttgtggacaaacttgcttctcgagtcacaaatagtgatcaacagattctccggagtaaccatgtcacttggttgcttgcgcagattatccgcattgagattgttatgaacactctaagttcagatccaaggaaggttgataccacaagaaagataatttcattccacaaagaagacaaaagccttgacgccaataatattggccctcaaagtattcttcttgatttcatcagtagtagtcagactctgcgcatttggtctttcaacacttcgattagagaacatttgaacagtgatcagcttcaaaaaggaaaacagattgacgaatggtggaaacagatgatgaaagcttctggtgagaggatgatagactttacgaacttggacgaacgagcaacaggcatgttctgggttctctccttcaccatggcgcaaccagcttgtgaagcagtaatgaattggtttacgtcagctggaatggcagatttaattcaagggcctaatatgcagccaagtgaaagaataatgatgatgcgtgaaacttaccctctgtcaatgtcattgctttctggcttgtctatcaatctttgtctgaagcttgcttaccagcttgaagagaccatatttcttggccaggctgtccctagcattgctatggtggaaacctatgtgaggttactgcttatagcaccccattcattgtttcgtccccattttacggcattaacccaaagatctccatctattttgagcaaatctggtgtgtcattgctcctacttgagatactaaattacagattgctgcctttgtataggtatcatggtaaaagcaaggcgttgatgtatgatgtcacaaagataatatcaatgattaagggtaaacgtggagaacatcgtctttttcgattagcagaaaatttgtgcatgaatttgattctctcactgaaagacttcttttttgtgaaaaaggaattgaagggcccgactgagtttactgaaactctaaaccgcataacaataataagtcttgcaatcactatcaagacgcgtggaattgctgaagttgaacacatgatttatcttcaaccattgttagagcaaattatggcaaccagtcagcatacctggtcagaaaagacactgcgttattttcctcctctcattcgtgattttttaatggggagagtggataagaggggtctagctatccaagcatggcagcaggcagaaacgactgttattaaccaatgtaatcagctgctctcaccatctgctgagccaaactatgtcatgacttatttgagccacagtttccctcagcatcgtcaatatctttgtgctggtgcttggatgctgatgaatggacatcttgagatcaacagtgcaaatcttgctcgcgtcttaagagagttttcacctgaggaagttacagcaaatatctatacagtggttgatgtgcttctgcatcatatccaatgcgaggtgcaaagggggcatctagcacaggatttactatccaaagcaatcacaaatctttctttttttatatggacacatgaactccttccgctggatattctattgctagctcttattgacagggatgatgatccttatgctttacgccttgtgactgcactatttacagagtga

SEQ ID NO: 55867 - DNA, 425 bp, Zea Mays
aactgtcctaagccatccttgtgcaatctatggagttcgatgctgcttacgggccagcttggcactgcatcgtggggacgagtttcggttcatatgtcacgcacgcccggggtggattcttgtatttttccgtcgataaggtctacatcctgctcttcaggacagccgtggagccctagccgcattgacggccaccagcctaccagcaatggacaaatggttcataaaaatgcccagttcttgggatagctcacaccaaattcagttgttcagtcagctaggccgaggccttgtaacttgtaaattgcattgtttcttcgaaggcaaatggaaactccttgtgtttctgataaaatttctgatttgttcgggatcatctgtttcagctcaatttgttcaagactgctaatggttttttgtttttg

SEQ ID NO: 55868 - DNA, 900 bp, Zea Mays
tcggagaagacccgtagctagccatgcttggacttgcgtagtcctattgggcagttcacttactagtcgctaattagagtatcggagatgctgcttagtcttggaccgaggacatcagattgcgttcttgcttgtttttacaaaatggtttgctccgtcgcccccatgaatcaaggattcttggagcggcattgctgctataggcctatagtgtgattgcacttgttcagttgttcttataccctcaatccctcatagtgcacttgcgccttctcaccggaatgcagtcataagaattggtacatgatccattcatatccgttctcatttgattgccattggtgtattattggactgtcttcgtgagtccaaaatccaaatccaaaatgtttttgtcgttcgtttgcatttcagctcatttggaaggttccggccttccgggagttgctggaccccaccactggcagttcaagtatcagtttctgagcaaccaggcgatggggtcaggagttcgatgctgcttacgggccagcttggcactgcatcgtggggacgagtttcggttcatatgtcacgcacgcccggggtggattcttgtatttttccgtcgataaggtctacatcctgctcttcaggacagccgtggagccctagccgcattgacggccaccagcctaccagcaatggacaaatggttcataaaaatgcccagttcttgggatagctcacaccaaattcagttgttcagtcagctaggccgaggccttgtaacttgtaaattgcattgtttcttcgaaggcaaatggaaactccttgtgtttctgataaaatttctgatttgttcgggatcatctgtttcagctcaatttgttcaagactgctaatggttttttgtttttg

SEQ ID NO: 55869 - DNA, 354 bp, Zea Mays
cggatcttctgtggcgtatgttgctgccttcgcctcagcctcaaactcagaattgttagagacttcaatggatcttttggatgggcgccgctgggatagacgactgttgtaagatatagcttggcagtggacgtccctaatttgctgatctgccccaaattctggaggagccactgatgtcattctgcgtcgaatatctgcaaatcagttgctttctagcttgcatttgcttgttatagttcccgtcgttaagcgtcctgaacgctgggacctcgtgggttccgttcgctgatagtttgtattcagagtacgtttctggatagtctagacttggtattcagccttcagatgttt

SEQ ID NO: 55870 - DNA, 1337 bp, Zea Mays
gtaatcgtacgtgtaaagcgtacgcctacgtatttttactgcgatcaagggcgagccggctggacgccaacttgtttcgtatccctcggtcgtcgccaatatatatagccgccctcctcccggccgatcccttcgtcctcaatctcaatcccacaccaccaccaccacctcctccggtccccaacccctgtcgcaccgcagccgccggccatggcctgcctcaccgacctcgtcaacctcaacctctcggacaacaccgagaagatcatcgcggaatacatatggatcggtggatctggcatggatctcaggagcaaagcaaggaccctctccggcccggtgaccgatcccagcaagctgcccaagtggaactacgacggctccagcacgggccaggcccccggcgaggacagcgaggtcatcctgtacccgcaggccatcttcaaggacccattcaggaggggcaacaacatccttgtgatgtgcgattgctacaccccagccggcgagccaatccccaccaacaagaggtacaacgccgccaagatcttcagcagccctgaggtcgccgccgaggagccgtggtatggtattgagcaggagtacaccctcctccagaaggacaccaactggccccttgggtggcccatcggtggcttccccggccctcagggtccttactactgtggaatcggcgccgaaaagtcgttcggccgcgacatcgtggacgcccactacaaggcctgcttgtatgcgggcatcaacatcagtggcatcaacggggaggtgatgccagggcagtgggagttccaagtcgggccttccgtgggtatttcttcaggcgaccaggtctgggtcgctcgctacattcttgagaggatcacggagatcgccggtgtggtggtgacgttcgacccgaagccgatcccgggcgactggaacggcgccggcgcgcacaccaactacagcacggagtcgatgaggaaggagggcgggtacgaggtgatcaaggcggccatcgagaagctgaagctgcggcacagggagcaccatcatctggaagccctgagcgccgcggccgttgcgttgcagggtccccgaagcgattgcaaagccattgttccttccgttccgtttgcttattattgttattatctagctagatcatctgggggtcaggtcgtcgtggtgtgccaaaacagaacacagaaagaggaagaagaaaaaaaaaacaagacgtgtggcgtttatgttatatcatccaataatggccgtaccacacttgtggtacctttcagtacgtatgcttgcattgtatgaggggtcgctttcctacg

SEQ ID NO: 55871 - DNA, 1642 bp, Zea Mays
gtggcgtggagtggagtggagctggccgccgaagagagaccccgagaggccgagagaaagagagagaggccgtgctaggtgtggtgagtggtgacccagatggaggtggccgccacgtcgccgtggccggaggagccgctgctgcggcccccatctccgcagcccaatctccgtgccgacgccgccagctccggcgacccggcttcccctcctccatcagcggtgaggccgagtcgcctcgcggcgctcatcgggcgcgcggcggggcggcgcggtccctcgatgctggtgcgcgagacggcggcgctgcaactgcagcggaggcgcgcggactgggcgcactcccgccccgtcctcgcgctcgacatcgcctggaacgtcgccttcgccgcggccgccgccgccgtgctctcgtcctctgccgaggagagccccgtcaagccgctccgcctgtgggtcgtcgggtacgccgcccagtgcctggtccacgtcgggctcgtctgcgccgacacccgccgcgagacgcggcgcgcccggagatcggcgtctgacgtcgagtctgccggcgctgggacagacagctcggacgccgacagcgaagatgacgaaagggcggaagggaggagcagctatacaggtcgttgcgagacgatgaacacgttgatatcatttctgtggtggatcattggattctactggatattctcaggtggggaggtgctcgagcacggcgctccaaggctgtattggagggtgcatcagatgcagatattagtgttcttctgagatatagatattctgatccaagcgaagatggtgagaagggggtcgatgaaggactgatgatccctatcctgaataatagtggaatgtcaacaagtgagcgtattctccttcgcgaggatgctgaatgctgtatctgtctatcatcatatgaagatggagctgagttatctgctctcccctgcaatcatcacttccactggccttgtattaccaaatggctgcgcatgaatgcgacgtgtccactctgcaagtataacattctcaaaggcagtgacagtgcatgaccaacttattctgacataacttccgtacacagcttcctttcaagtggcgttctcaaagcaatgctgttttcacagctgtgttattaagtgacagtgatctgtgtttttctgtttaggatgtggtgataacctgtagatggatgaaaccttatttacaattgtccttgttaatatcgcttgtaaatacctttcgagttgttttctacgtatgatggaattggaattgctgaaatactttgtgattctggtttgactttatgctgttttaacagctgtgtttttaagtgacagtgatgtgtgttctgctgtttaggatgtggtgagtggtgacaacctgtaaatggatgaaacctaactcagtcaccctaatatcgtttgtaaatatctttggagttgttttctgcgtttgatctttgatgtaattggaattatcgaaatactttgtgataggctcactgtttgcacagttatgaataatattgagaataatgcagcgcttgcccatctaaaatctcgggtaggttctctggcctgcataacattgctgatgaattcagacaacaaaaaaaaaa

SEQ ID NO: 55872 - DNA, 1735 bp, Zea Mays
gtggcgtggagtggagtggagctggccgccgaagagagaccccgagaggccgagagaaagagagagaggccgtgctaggtgtggtgagtggtgacccagatggaggtggccgccacgtcgccgtggccggaggagccgctgctgcggcccccatctccgcagcccaatctccgtgccgacgccgccagctccggcgacccggcttcccctcctccatcagcggtgaggccgagtcgcctcgcggcgctcatcgggcgcgcggcggggcggcgcggtccctcgatgctggtgcgcgagacggcggcgctgcaactgcagcggaggcgcgcggactgggcgcactcccgccccgtcctcgcgctcgacatcgcctggaacgtcgccttcgccgcggccgccgccgccgtgctctcgtcctctgccgaggagagccccgtcaagccgctccgcctgtgggtcgtcgggtacgccgcccagtgcctggtccacgtcgggctcgtctgcgccgacacccgccgcgagacgcggcgcgcccggagatcggcgtctgacgtcgagtctgccggcgctgggacagacagctcggacgccgacagcgaagatgacgaaagggcggaagggaggagcagctatacaggtcgttgcgagacgatgaacacgttgatatcatttctgtggtggatcattggattctactggatattctcaggttaaccattgtgtttctggccttcgatgtgttttttgctgtgttttgtgttgctgtggcctgtttcattgggattgcactgtgttgctgcttgccttgtgtcattgctattctgtatgctctggctggccaggagggtgcatcagatgcagatattagtgttcttctgagatatagatattctgatccaagcgaagatggtgagaagggggtcgatgaaggactgatgatccctatcctgaataatagtggaatgtcaacaagtgagcgtattctccttcgcgaggatgctgaatgctgtatctgtctatcatcatatgaagatggagctgagttatctgctctcccctgcaatcatcacttccactggccttgtattaccaaatggctgcgcatgaatgcgacgtgtccactctgcaagtataacattctcaaaggcagtgacagtgcatgaccaacttattctgacataacttccgtacacagcttcctttcaagtggcgttctcaaagcaatgctgttttcacagctgtgttattaagtgacagtgatctgtgtttttctgtttaggatgtggtgataacctgtagatggatgaaaccttatttacaattgtccttgttaatatcgcttgtaaatacctttcgagttgttttctacgtatgatggaattggaattgctgaaatactttgtgattctggtttgactttatgctgttttaacagctgtgtttttaagtgacagtgatgtgtgttctgctgtttaggatgtggtgagtggtgacaacctgtaaatggatgaaacctaactcagtcaccctaatatcgtttgtaaatatctttggagttgttttctgcgtttgatctttgatgtaattggaattatcgaaatactttgtgataggctcactgtttgcacagttatgaataatattgagaataatgcagcgcttgcccatctaaaatctcgggtaggttctctggcctgcataacattgctgatgaattcagacaacaaaaaaaaaa

SEQ ID NO: 55873 - DNA, 1473 bp, Zea Mays
gtggcgtggagtggagtggagctggccgccgaagagagaccccgagaggccgagagaaagagagagaggccgtgctaggtgtggtgagtggtgacccagatggaggtggccgccacgtcgccgtggccggaggagccgctgctgcggcccccatctccgcagcccaatctccgtgccgacgccgccagctccggcgacccggcttcccctcctccatcagcggtgaggccgagtcgcctcgcggcgctcatcgggcgcgcggcggggcggcgcggtccctcgatgctggtgcgcgagacggcggcgctgcaactgcagcggaggcgcgcggactgggcgcactcccgccccgtcctcgcgctcgacatcgcctggaacgtcgccttcgccgcggccgccgccgccgtgctctcgtcctctgccgaggagagccccgtcaagccgctccgcctgtgggtcgtcgggtacgccgcccagtgcctggtccacgtcgggctcgtctgcgccgacacccgccgcgagacgcggcgcgcccggagatcggcgtctgacgtcgagtctgccggcgctgggacagacagctcggacgccgacagcgaagatgacgaaagggcggaagggaggagcagctatacaggtcgttgcgagacgatgaacacgttgatatcatttctgtggtggatcattggattctactggatattctcaggtggggaggtgctcgagcacggcgctccaaggctgtattggttaaccattgtgtttctggccttcgatgtgttttttgctgtgttttgtgttgctgtggcctgtttcattgggattgcactgtgttgctgcttgccttgtgtcattgctattctgtatgctctggctggccaggagggtgcatcagatgcagatattagtgttcttctgagatatagatattctgatccaagcgaagatggtgagaagggggtcgatgaaggactgatgatccctatcctgaataatagtggaatgtcaacaagaatgctgtatctgtctatcatcatatgaagatggagctgagttatctgctctcccctgcaatcatcacttccactggccttgtattaccaaatggctgcgcatgaatgcgacgtgtccactctgcaagtataacattctcaaaggcagtgacagtgcatgaccaacttattctgacataacttccgtacacagcttcctttcaagtggcgttctcaaagcaatgctgttttcacagctgtgttattaagtgacagtgatctgtgtttttctgtttaggatgtggtgataacctgtagatggatgaaaccttatttacaattgtccttgttaatatcgcttgtaaatacctttcgagttgttttctacgtatgatggaattggaattgctgaaatactttgtgattctggtttgactttatgctgttttaacagctgtgtttttaaacaacaaaaaaaaaa

SEQ ID NO: 55874 - DNA, 1806 bp, Zea Mays
gtggcgtggagtggagtggagctggccgccgaagagagaccccgagaggccgagagaaagagagagaggccgtgctaggtgtggtgagtggtgacccagatggaggtggccgccacgtcgccgtggccggaggagccgctgctgcggcccccatctccgcagcccaatctccgtgccgacgccgccagctccggcgacccggcttcccctcctccatcagcggtgaggccgagtcgcctcgcggcgctcatcgggcgcgcggcggggcggcgcggtccctcgatgctggtgcgcgagacggcggcgctgcaactgcagcggaggcgcgcggactgggcgcactcccgccccgtcctcgcgctcgacatcgcctggaacgtcgccttcgccgcggccgccgccgccgtgctctcgtcctctgccgaggagagccccgtcaagccgctccgcctgtgggtcgtcgggtacgccgcccagtgcctggtccacgtcgggctcgtctgcgccgacacccgccgcgagacgcggcgcgcccggagatcggcgtctgacgtcgagtctgccggcgctgggacagacagctcggacgccgacagcgaagatgacgaaagggcggaagggaggagcagctatacaggtcgttgcgagacgatgaacacgttgatatcatttctgtggtggatcattggattctactggatattctcaggtggggaggtgctcgagcacggcgctccaaggctgtattggtatgccaccttcatttttgttgcatcttgattcaccaatgacaacatgcaattagtttggtttgattataccaaggtttgaataagaatgtcatactgggttttgacgagaatatggaaagtgcaatatactatatcttatggaaggtataaaaaccgttaaatatgtatctaagcttctttgtttccatttcaagtacttttcagtcaatacatgcatctatactttcccataattaagatgtgagctgttctacttgtcatcataagttcctaactacctgctctgcaattcattctgcaggttaaccattgtgtttctggccttcgatgtgttttttgctgtgttttgtgttgctgtggcctgtttcattgggattgcactgtgttgctgcttgccttgtgtcattgctattctgtatgctctggctggccaggagggtgcatcagatgcagatattagtgttcttctgagatatagatattctgatccaagcgaagatggtgagaagggggtcgatgaaggactgatgatccctatcctgaataatagtggaatgtcaacaagtgagcgtattctccttcgcgaggatgctgaatgctgtatctgtctatcatcatatgaagatggagctgagttatctgctctcccctgcaatcatcacttccactggccttgtattaccaaatggctgcgcatgaatgcgacgtgtccactctgcaagtataacattctcaaaggcagtgacagtgcatgaccaacttattctgacataacttccgtacacagcttcctttcaagtggcgttctcaaagcaatgctgttttcacagctgtgttattaagtgacagtgatctgtgtttttctgtttaggatgtggtgataacctgtagatggatgaaaccttatttacaattgtccttgttaatatcgcttgtaaatacctttcgagttgttttctacgtatgatggaattggaattgctgaaatactttgtgattctggtttgactttatgctgttttaacagctgtgtttttaaacaacaaaaaaaaaa

SEQ ID NO: 55875 - DNA, 2082 bp, Zea Mays
cctgccactactaccatggccgcggcggcaaagcatatatagcacaccagcaggccggccgggcagagagctcgacgaccggctcggcaaagtcgcgcgcgacgatggccgtggcggcggccgagaaggcggtgaggtgcctgggccggggcttcgacatgacctgcgacatgaggctcaagtactgtaagcacgccggcgggtgcctcgtcgacaggggcggcgtcgagacggcgccgctcgccgtgcccggcgtcgggaccatcggcggcgtgcccgtcgacgttaagtgcggcaagggcgaccgcgtccggatcaagtccggcgtgctcgagttcaacaagatgtcggagctgttcaaccagcggagctcggtggaagggaagatcccgtcggggctgttcaacgcctgcttcgacctggacagcggcgcctgggcgcaggacgcggccgccacgaaatgcctcgccatggacggctacttcatctccctcttcgacctccgcctggaccgccgcccgctcgcgctcgccgaccgcgtcctccgcgacgccccggccgcctgggaccccgccgccatcgccaggttcatcgacaagtacgggacgcacgtggtggtggggctgagcgtgggcgggcaggacgtggtctacgtcaagcaggacggctcgtcggcgctgccgccggcggagatcaaggagcatctggacaggctcggggaccagctcttcaccggggcctgcgccatgcctcccctccgctgcaagtccaaagacaagctcaagatgccggaggccttcaacgtgttcgatgcccagctggtggcgcagcagcggctccaagcagcagggatgatcaccacgctggtctcctccaaagagggcgtgacggtgatatactccaagaggggaggcgacacgacggcgggcagccactcggagtggctcctcacggtgccggcgacgcccgacgtgatcagcatcgaggccgtgcccatcacctccctcctcaagggcgtgcctggcgccggctacctttcgcacgccatcaacctctacctcagatataagcctcctgtagctgacctcaagtacttcctggatttccagcatcacaagatgtgggcgccggcgctcggcgagctgcccctcggcccgtgctccaaccggcagcagggctccagcccggcgcttcatttcagcccgctcagtgccaagctctatgtcagcccaacacaggcgattgtccctaagttgccggtcactgggatgcggctgcacctggagggcaagaaacacaaccggttagccgtccacctgcagcacctatcgaccaccccgacgttcatcgccgccgcgcggcacgacaaaccgccggtgtggcgaggttcggacgcggcctccgacgacaggtactacgagccggttcagtggcggatgttcgcgcgcgtgtgcaccgcgccggtcaagtacgacacagggtggcgcggcgccggagaccgcgacccgagcgcggcctgtgtcgtgacgggcgcgcagctccacgtcgcggcgcacgacgccacccacgtgctgcacctcaggctcctctacgccgagctccccggctgcgccgtcgtgcagtccaggtgggcgcgcggcgtggcgaggctgtctgggaagtccagcggcttcctgtcgccctcctcctccccgggctcttccggtggtggcagtggcagtggcggatcgcagaaggagaggcacccgccggagggcgtcgtcaacatcaactccggcgtgctcgccggcggaccgcctgtgcccgtcgccgcgcagaagatgctcaggctcgtggacacctcgcaggtgaccatggggccgcaggacagccccgggtactggctcgtcaccggtgcaaggctcgacgtcgacaatgggaggatctcgctgcacgtcaagttttccctgcttgccccggcttcctgacaggccgttcatgcatacagagttgtacagctttctgatgctcagaactacgcaattgatgatggtgcagggcgaatgcattttttttttgagaaaaaaggtgaatgcaactacg

SEQ ID NO: 55876 - DNA, 1919 bp, Zea Mays
caatttgagtttttcttttacagttaccgtaagctctagtcaatgaaaatcccaaacacactttataagaatgggtctgcctttcttcctcatccgtgatactccctcagattcttaccaaaacagaggagcccgtcggccgtcgcaaaaaaaaaaaaaaaacaaaacaagaccaccgcaccatggaatcgctgacgcttcgcgcttcgacggccgcctcgccgctgcagcgacgccggctgctccccggacggcagcgcgcgacgtacgtccgcgccacggcctccgccggcgagccggacctctccgtgcgcgtgaacgggctgcagatgcccaacccgttcgtgatcgggtcggggccaccgggcaccaactacaccgtcatgaagcgcgccttcgacgagggctggggcgccgtcatcgccaagactgtgtcattggatgctgaaaaagttatcaacgttactcctcgttatgcaaagcttcgggcagaaccaaatggggctgccatggggcgcatcattggctggcagaacattgaactcatcagtgacaggcctctggagaccatgctgaatgagttcaagcagttgaagaaagagtatcctgacaggatacttatcggttcaattatggaggagtacaacaaagctgcatggcatgagcttattgaacgtgttgaagagtctggagtggatgctcttgaaattaatttctcatgtccacatggcatgccagagagaaaaatgggtgccgctgtggggcaagattgtgatttgctagaggaagtttgtggttggattaatgagaaggccactgttcctgtttgggcaaagatgactcctaacattacagacattacacagtctggatgtgaaggagtttctgcaattaacacaattatgagtgtaatggggattaatctcaaaacactgcgtccggaaccttgtgttgaagggtattctacacctgggggttattctgcaagagctgtgcaccctatagcacttgctaaagtcatgcagatagcaaggatgatgaaagaagagtttgctgatggacagtctctctctgccattggtggtgtggagactggcaatgatgctgctgagtttattcttcttggtgctgatacagtacaggtatgtaccggtgtgatgattcatggttatccccttgtgaagaagctttgcgcagagttacaggatttcatgagagagcacaacttttcatcaattgaagagtttcgaggggcctcgcttccgtatttcacgacgcacacagatctggttcaccggcaacaagaggcggtcaggcagaggaaggccatcaagaagggccttcaatcagacaaggaatggacgggtgatgggttcgtcaaggagaccgaaagcatggtatccaactgatgcatctctgccaccccccaccgggccattccttacaccatgctccaacttcatctttttaataaacgcgcaccagaaatgccacacaccaagcatctagtcctcatctgtacatggttctgaaccttgggccttcagtctatagaacaggccatgaatccacacaaagtcgtgacaacgggtgacattgagcgatatatttgtcatgtgaacattaatttgtagcactgagctgagggcttgaccttgtaaaatcttggagacttcaatctcgcacaggttttctcaggagtttataattatacgtgagtgatgtgtgaggacatgctggcctcagcttcaagtcaggtccgacttcaagtcttctccaaagcccaaaagctcgtcccagcactgatgggcgatcgcgtagctgacgaacatgctgcagttgcgagcgatccacggcgttgctctgttggacgggtactcagatccagtcttctctaacaagtcaagttcacatcaaac

SEQ ID NO: 55877 - DNA, 1406 bp, Zea Mays
cgagctttttcccacggccgaggcccagagcggacaggtggcgcgcctggccggcaggcggcagcccgcggcctccttccctgcaacttttccacgctccgccccaaatcccaagaaactgacggggcatcggcgcacccacccacgcagacgcaggtaaaagaagcttccactcactcactcactcactcccagttgccccgtatcagccagtatcttcagatcatcaccattcaccacttcaccgcccagcccagccagactctcatcaggcgaacccgtccgtccaccacccgtcggccgtcgccatcgcgcgccacttccgctgcagttctcgcccttttctccctcctttcgcccgctgccggctcggcctcgatgtgcaccctcggcgcgcacgccactacgccagggcgggagccagcagcagcgctcagcttcagcccgccgctctccaaggtcgccagcgccatgacccctaaaggtgggcgcgtgggggacgtcggcagcaagaagccgactccgcgagcacatccgcgctacgtccccaggagagggtcggtgctgaaggggatcgttcgaggcgtgctgggcctcgtcttcactctgatcagcgcgccggcgaactccggcggccaccgcgtgcgcccggcgccgccgcccgcgcccggagaagggggtgaaagtgatgatggcgcggagcaggggaagtaggtgggtgctggtggggtttatctgcgcactcactctgcggtggcgatcggctctcgacgacccaaacttttatctgggccgtccgttcactgcttgtttgatgtttgtgtcgtcgtagcaactttgcaatggtttttgagcagctgagcagatatatctcaggtgctagtcactccaatttccttctgttaagagtttcttgtttttctcagatgtttttttttttggacaagaagcttgcaggactacttaacgtaaaaacgaatgaaaaaagcaaaatctacatgttgaagatgatatccaggaagaagtcatgcgacatacatgcattttcacggacacgatttttaggtccagacgaccagatcatggattcactttttttccttcttttcttttcttctttggaagacttgggtccagataatctcttccggagctcgtaattctcaagtttaacataagatgtcacagcttgtatgtggagttagtttgtccaatgctaattgcatcggcaacgaaaattaaatcactccaacttgtcccaccatgactcaacaattgctagtgtcgcagtaacttgtaaaggtttagcccgttgagacaatctaatcttactggaattcaattttacatgcagaccaaagttcatgcaagcatgccagaggggtaatttgttttcttgaactgag

SEQ ID NO: 55878 - DNA, 3426 bp, Zea Mays
cccgtctcggctctcaaaacaaaccccggctcgcctcgcggaatccacgagtccgccacgccagtgcgcctccaatttctccgcagtccgcagttccgcacccgtacctccccaaccccccagctcaccaccccgagatctcccccgaccggcctcgagatccctgcggccatgtcgtcgtcggcagccatggaagcaatcgacgagctcgtccagctctccgagtccatgcggcaggccgcctcgctccttgcggacgatgacccgtccgacgagaccgcctcgcgccgcccctccacctttctcaacgccgtcgcgctcggcaacgtcggagctggcaagtcggctgtgctgaacagcctcatcggccaccctgtgctgcccacgggggaaaacggcgcgacgcgggcgccgatagtcgtcgacctggcgagggatccagggctcagcagcaagtccatcgtcctacagatcgacagcaagtcccagcaggtgtcggcaagtgcactccggcattcactgcaggataggcttagcaaaggggcatccagtggatctgggagaagccgaagcgatgagatttaccttaagttgcggacaagtacagctcctccgttgaaattgattgatttacctggcatagaccaacgagttatggatgattcaacaatcagtgaatatgctgggcacaatgatgcactattgattgttgtgataccagcaatgcaagcggctgatgttgcatcttctcgagctcttagactagcaaaggacattgatccagatggaactagaacaataggtgtcttaagcaaaatcgatcaggcagctgcagatgcaaaaaccgtttcttgtgttcagtccattttgtccaataagggtgccccacgagcagcagctgatattgagtgggttgctctaattgggcagtctgtctcaattgcatctgctcaatcaggatcagttgggtctgataattcactggaaacagcttggcgagctgaggctgagacccttaaatctatcctaactggtgcacctcagagtaagctgggaagaattgctctcgtggataccatcgctaagcagatacgtaaacggatgaaagttcgtctgccaaatttgttgaccggacttcagggtaaatcccagatagtgcaagatgaacttgcaaggctaggagaacagatggtacaaagtgctgaaggaacaagagcagttgctctggagctatgtcgagaatttgaagataaatttcttgctcacattacttctggggtccggttggaaaatagttgcaagttttgagggcaagttcccagataggatcaaacaacttccattggacaggcattttgatttgaacaacgtgaagaggattgtgttggaagcggatggctatcaaccctatttgatatctccagagaagggtttacgttccttaataaaaggagttcttgaaatggccaaggagccatcacgactctgtgttgaagaggtacaccgagttttgttagacatagtaaatgctgctgcaaatgctacaccaggactaggaagataccctccattcaagcgggaggtcattgcaattgcatctaatgcattagatgctttcaaaagtgatgcaaaaaagatggtggttgcacttgttgatatggagcgagcttttgttcctccacaacacttcatccgattagtacagaggagaatggaaagacagcgccgtgaggatgagttgaaaaataacagatcatctaagaaaggacaagatgcagagctatccaagatgaaccgggcttcaagccctcaaactggatccgatgaagctggtggtaacctgaaatcaatgaaggataaatccaataagcaagataatgatacaaaagagggaccaaatttgcaggttgctgggcctggcggcgaaataactgcaggttaccttttgaagaaaagtgcaaaaaataatgaatggagtaaaaggtggtttgttctaaacgagaagagtgggaagcttggatacactaagaagcaagaggagagacattttcgaggtgtcattgtcctggaggaatgtaacctggaagagatagaggaggaagagatatcgaagagttctaaggattcgaagaaggcaaatggacaagagaaaggcccaagtcttgtttttaagattactaacagggtttcctacaaaactgtcttaaaagctcacagtgccgttatattgaaggctgagagtatggctgacaaaattgaatggatcaagaagataaaaggtgttattcaaagcagagggggctctgttaagggtcccactgaagatggtcctatgagacaaagccgttcagatggatcccttgatacaatggctcggaggcctgctgatcctgaagaagaacttcgatggatgtctcaagaagtccgtggttatgttgaagctgttttgaacagtttggctgcaaatgttccaaaggctattgtactttgccaagtggagaaatcaaaagaagatatgctaaacaaactgtacaactcaataagtgcacaaagcaatgcaaagatcgaagagctactccaagaggaccacaatgctaaacgtaggcgggaaaaataccaaaaacaatcatccctcttgtcaaagctcactcgccaactcagcattcatgacaatagagcagcttcatatgggaacgatagttctggagctgagggtagcccccggtctcctggccactctggtgaggattggaagtctgccttcgactcagcaacaaatggctctgttgaccggtccagttcacagcatgagacaaggtcaaaaagtgctgacagtcgaggccggcgccatgaaaacggggatgccaactctggcagccgacgcacacctaaccggttgccaccggcaccaccaaatggggggagatactaagtatgttgattgatcattacctgtgaccaatcatcatcatatgctcttgccaggttctcatcctctactgatactggttattggtggaagaaaacatatgggaccggagaacggaaagcttactggaagatttggatggacggtgtgtatcaagagaaccaaagttgtttatagaaaattagaatcatataggtcattgatgattgtcatttcccgatcgttttggtgtatttgatcttttggatcctcattgccagtgggattttgttgccacggatcagttaattttggttttgtacgcttcttctgtaagtctccccatcaaactggcaaatgtattctttacacacagtcatgtatcgttgttcttcccattcttttagactgaaccacatgttcagtggttgtgccatactgctgtatgattatattgtacaattcattattgggctggagtacacacatgcttgttgatacggcccacatgttcatat

SEQ ID NO: 55879 - DNA, 3408 bp, Zea Mays
cccgtctcggctctcaaaacaaaccccggctcgcctcgcggaatccacgagtccgccacgccagtgcgcctccaatttctccgcagtccgcagttccgcacccgtacctccccaaccccccagctcaccaccccgagatctcccccgaccggcctcgagatccctgcggccatgtcgtcgtcggcagccatggaagcaatcgacgagctcgtccagctctccgagtccatgcggcaggccgcctcgctccttgcggacgatgacccgtccgacgagaccgcctcgcgccgcccctccacctttctcaacgccgtcgcgctcggcaacgtcggagctggcaagtcggctgtgctgaacagcctcatcggccaccctgtgctgcccacgggggaaaacggcgcgacgcgggcgccgatagtcgtcgacctggcgagggatccagggctcagcagcaagtccatcgtcctacagatcgacagcaagtcccagcaggtgtcggcaagtgcactccggcattcactgcaggataggcttagcaaaggggcatccagtggatctgggagaagccgaagcgatgagatttaccttaagttgcggacaagtacagctcctccgttgaaattgattgatttacctggcatagaccaacgagttatggatgattcaacaatcagtgaatatgctgggcacaatgatgcactattgattgttgtgataccagcaatgcaagcggctgatgttgcatcttctcgagctcttagactagcaaaggacattgatccagatggaactagaacaataggtgtcttaagcaaaatcgatcaggcagctgcagatgcaaaaaccgtttcttgtgttcagtccattttgtccaataagggtgccccacgagcagcagctgatattgagtgggttgctctaattgggcagtctgtctcaattgcatctgctcaatcaggatcagttgggtctgataattcactggaaacagcttggcgagctgaggctgagacccttaaatctatcctaactggtgcacctcagagtaagctgggaagaattgctctcgtggataccatcgctaagcagatacgtaaacggatgaaagttcgtctgccaaatttgttgaccggacttcagggtaaatcccagatagtgcaagatgaacttgcaaggctaggagaacagatggtacaaagtgctgaaggaacaagagcagttgctctggagctatgtcgagaatttgaagataaatttcttgctcacattacttctggtgaggggtccggttggaaaatagttgcaagttttgagggcaagttcccagataggatcaaacaacttccattggacaggcattttgatttgaacaacgtgaagaggattgtgttggaagcggatggctatcaaccctatttgatatctccagagaagggtttacgttccttaataaaaggagttcttgaaatggccaaggagccatcacgactctgtgttgaagaggtacaccgagttttgttagacatagtaaatgctgctgcaaatgctacaccaggactaggaagataccctccattcaagcgggaggtcattgcaattgcatctaatgcattagatgctttcaaaagtgatgcaaaaaagatggtggttgcacttgttgatatggagcgagcttttgttcctccacaacacttcatccgattagtacagaggagaatggaaagacagcgccgtgaggatgagttgaaaaataacagatcatctaagaaaggacaagatgcagagctatccaagatgaaccgggcttcaagccctcaaactggatccgatgaagctggtggtaacctgaaatcaatgaaggataaatccaataagcaagataatgatacaaaagagggaccaaatttgcaggttgctgggcctggcggcgaaataactgcaggttaccttttgaagaaaagtgcaaaaaataatgaatggagtaaaaggtggtttgttctaaacgagaagagtgggaagcttggatacactaagaagcaagaggagagacattttcgaggtgtcattgtcctggaggaatgtaacctggaagagatagaggaggaagagatatcgaagagttctaaggattcgaagaaggcaaatggacaagagaaaggcccaagtcttgtttttaagattactaacagggtttcctacaaaactgtcttaaaaggctgagagtatggctgacaaaattgaatggatcaagaagataaaaggtgttattcaaagcagagggggctctgttaagggtcccactgaagatggtcctatgagacaaagccgttcagatggatcccttgatacaatggctcggaggcctgctgatcctgaagaagaacttcgatggatgtctcaagaagtccgtggttatgttgaagctgttttgaacagtttggctgcaaatgttccaaaggctattgtactttgccaagtggagaaatcaaaagaagatatgctaaacaaactgtacaactcaataagtgcacaaagcaatgcaaagatcgaagagctactccaagaggaccacaatgctaaacgtaggcgggaaaaataccaaaaacaatcatccctcttgtcaaagctcactcgccaactcagcattcatgacaatagagcagcttcatatgggaacgatagttctggagctgagggtagcccccggtctcctggccactctggtgaggattggaagtctgccttcgactcagcaacaaatggctctgttgaccggtccagttcacagcatgagacaaggtcaaaaagtgctgacagtcgaggccggcgccatgaaaacggggatgccaactctggcagccgacgcacacctaaccggttgccaccggcaccaccaaatggggggagatactaagtatgttgattgatcattacctgtgaccaatcatcatcatatgctcttgccaggttctcatcctctactgatactggttattggtggaagaaaacatatgggaccggagaacggaaagcttactggaagatttggatggacggtgtgtatcaagagaaccaaagttgtttatagaaaattagaatcatataggtcattgatgattgtcatttcccgatcgttttggtgtatttgatcttttggatcctcattgccagtgggattttgttgccacggatcagttaattttggttttgtacgcttcttctgtaagtctccccatcaaactggcaaatgtattctttacacacagtcatgtatcgttgttcttcccattcttttagactgaaccacatgttcagtggttgtgccatactgctgtatgattatattgtacaattcattattgggctggagtacacacatgcttgttgatacggcccacatgttcatat

SEQ ID NO: 55880 - DNA, 3392 bp, Zea Mays
gttccaccacttgaaaagcagtcaggaaacgactacccttgtgcccgactgcccgtctcggctctcaaaacaaaccccggctcgcctcgcggaatccacgagtccgccacgccagtgcgcctccaatttctccgcagtccgcagttccgcacccgtacctccccaaccccccagctcaccaccccgagatctcccccgaccggcctcgagatccctgcggccatgtcgtcgtcggcagccatggaagcaatcgacgagctcgtccagctctccgagtccatgcggcaggccgcctcgctccttgcggacgatgacccgtccgacgagaccgcctcgcgccgcccctccacctttctcaacgccgtcgcgctcggcaacgtcggagctggcaagtcggctgtgctgaacagcctcatcggccaccctgtgctgcccacgggggaaaacggcgcgacgcgggcgccgatagtcgtcgacctggcgagggatccagggctcagcagcaagtccatcgtcctacagatcgacagcaagtcccagcaggtgtcggcaagtgcactccggcattcactgcaggataggcttagcaaaggggcatccagtggatctgggagaagccgaagcgatgagatttaccttaagttgcggacaagtacagctcctccgttgaaattgattgatttacctggcatagaccaacgagttatggatgattcaacaatcagtgaatatgctgggcacaatgatgcactattgattgttgtgataccagcaatgcaagcggctgatgttgcatcttctcgagctcttagactagcaaaggacattgatccagatggaactagaacaataggtgtcttaagcaaaatcgatcaggcagctgcagatgcaaaaaccgtttcttgtgttcagtccattttgtccaataagggtgccccacgagcagcagctgatattgagtgggttgctctaattgggcagtctgtctcaattgcatctgctcaatcaggatcagttgggtctgataattcactggaaacagcttggcgagctgaggctgagacccttaaatctatcctaactggtgcacctcagagtaagctgggaagaattgctctcgtggataccatcgctaagcagatacgtaaacggatgaaagttcgtctgccaaatttgttgaccggacttcagggtaaatcccagatagtgcaagatgaacttgcaaggctaggagaacagatggtacaaagtgctgaaggaacaagagcagttgctctggagctatgtcgagaatttgaagataaatttcttgctcacattacttctggtgaggggtccggttggaaaatagttgcaagttttgagggcaagttcccagataggatcaaacaacttccattggacaggcattttgatttgaacaacgtgaagaggattgtgttggaagcggatggctatcaaccctatttgatatctccagagaagggtttacgttccttaataaaaggagttcttgaaatggccaaggagccatcacgactctgtgttgaagaggtacaccgagttttgttagacatagtaaatgctgctgcaaatgctacaccaggactaggaagataccctccattcaagcgggaggtcattgcaattgcatctaatgcattagatgctttcaaaagtgatgcaaaaaagatggtggttgcacttgttgatatggagcgagcttttgttcctccacaacacttcatccgattagtacagaggagaatggaaagacagcgccgtgaggatgagttgaaaaataacagatcatctaagaaaggacaagatgcagagctatccaagatgaaccgggcttcaagccctcaaactggatccgatgaagctggtggtaacctgaaatcaatgaaggataaatccaataagcaagataatgatacaaaagagggaccaaatttgcaggttgctgggcctggcggcgaaataactgcaggttaccttttgaagaaaagtgcaaaaaataatgaatggagtaaaaggtggtttgttctaaacgagaagagtgggaagcttggatacactaagaagcaagaggagagacattttcgaggtgtcattgtcctggaggaatgtaacctggaagagatagaggaggaagagatatcgaagagttctaaggattcgaagaaggcaaatggacaagagaaaggcccaagtcttgtttttaagattactaacagggtttcctacaaaactgtcttaaaagctcacagtgccgttatattgaaggctgagagtatggctgacaaaattgaatggatcaagaagataaaaggtgttattcaaagcagagggggctctgttaagggtcccactgaagatggtcctatgagacaaagccgttcagatggatcccttgatacaatggctcggaggcctgctgatcctgaagaagaacttcgatggatgtctcaagaagtccgtggttatgttgaagctgttttgaacagtttggctgcaaatgttccaaaggctattgtactttgccaagtggagaaatcaaaagaagatatgctaaacaaactgtacaactcaataagtgcacaaagcaatgcaaagatcgaagagctactccaagaggaccacaatgctaaacgtaggcgggaaaaataccaaaaacaatcatccctcttgtcaaagctcactcgccaactcagcattcatgacaatagagcagcttcatatgggaacgatagttctggagctgagggtagcccccggtctcctggccactctggtgaggattggaagtctgccttcgactcagcaacaaatggctctgttgaccggtccagttcacagcatgagacaaggtcaaaaagtgctgacagtcgaggccggcgccatgaaaacggggatgccaactctggcagccgacgcacacctaaccggttgccaccggcaccaccaaatggggggagatactaaaaaacatatgggaccggagaacggaaagcttactggaagatttggatggacggtgtgtatcaagagaaccaaagttgtttatagaaaattagaatcatataggtcattgatgattgtcatttcccgatcgttttggtgtatttgatcttttggatcctcattgccagtgggattttgttgccacggatcagttaattttggttttgtacgcttcttctgtaagtctccccatcaaactggcaaatgtattctttacacacagtcatgtatcgttgttcttcccattcttttagactgaaccacatgttcagtggttgtgccatactgctgtatgattatattgtacaattcattattgggctggagtacacacatgcttgttgatacggcccacatgttcatat

SEQ ID NO: 55881 - DNA, 769 bp, Zea Mays
atgtcggctgaacaaaggaatgagtacaataacaagcgtcgtcaaatgcgtcaacgaaataagggacaaaatgtgatgccagctatttcaggagatggcgacaaaaaagtaaatgtggatccagatgatgatagcgactggctgcatcggaacgagacattccagtcaaatgactatgtcgcaacgacagaccttctgccaccaggcagtgtgcatgaatctgttggtaccattggggaatcgggtatcggcgtgagggagtataggcttgaacgccttaggttgtataatcagacaccaaagcggaaagaggcaaagatagagtacatgagaaaacgtagagtgctacaggctgacactttgaatgttgtgtccatcgccatggaagacccaacatatacccctgaggttgtgcaccctgcaacggaaccttcaacagttatcgcctgtgactgggtcatccctgaattcgttaggacacctttcctaccagctcaaacacagaccgaggatgtcggttcatttgatatgtctactgaagcaataaaacgtaaacatcatgtgccgcgtggggaaagacaagctatcttagcccgtcgaaaccagcaatttcaagcatccattgcaaggaacgtgactactttgaatggggatactatcggtgacgccaacaacaatgcacaatgtagtgttccatgccaagccgctaccttgccaacaaatggaagtgaaggcataaccgaacaagcaagtggggtggagcatacac

SEQ ID NO: 55882 - DNA, 717 bp, Zea Mays
atggcgcccgatttggctatggcgttcatgatttggaaaccgcacaatctacattgccgatttggaaagcacgatctcggtactgcaatcacaacaactatcccccaaatgtcgcgcccaccaacgaccaggacccccagatttggcaatgcaccattcggaacaatcgcactcgatctggcaattgtgtgcatgatcttcgtcgccgatttggaaagcgcacgatctacgacgctgatttggaaagtgccttgccaaacgattccagcacaaatcccccaaatcgtgcacccaccatcgttaaaaaggtcacaattgccatcctgctccaaccttcctacaacgacggaaatcctgcgctcacactcctccagaaacccaaatcaatgccgtctcaccgctacgacgcgccctgtggattttatctcccctgaagtttgtgttcctgatgttaactatatgctgctcatagtggtgagactgaggacactttcgtcgttgatctggcagttggtttgtccacgtgtaaggtgctcctgtaaggaaaaaagtgaataaaagtgacataagattattcttacccaaggtgcaggaaagactcgagcttcaacaagggtcagattaagactggagcacaccctgccgatcagagcgtcttgccaaatacaaccagattttctgatgtgaaaacaaagaaccaacagaaacgaatctaat

SEQ ID NO: 55883 - DNA, 621 bp, Zea Mays
atggcgcccgatttggctatggcgttcatgatttggaaaccgcacaatctacattgccgatttggaaagcacgatctcggtactgcaatcacaacaactatcccccaaatgtcgcgcccaccaacgaccagctgacttaggaacgtccaagcaggagcctactcctcatttgcccctgttcagaggacccccagatttggcaatgcaccattcggaacaatcgcactcgatctggcaattgtgtgcatgatcttcgtcgccgatttggaaagcgcacgatctacgacgctgatttggaaagtgccttgccaaacgattccagcacaaatcccccaaatcgtgcacccaccatcgttaaaaaggtcacaattgccatcctgctccaaccttcctacaacgacggaaatcctgcgctcacactcctccagtgtaaggtgctcctgtaaggaaaaaagtgaataaaagtgacataagattattcttacccaaggtgcaggaaagactcgagcttcaacaagggtcagattaagactggagcacaccctgccgatcagagcgtcttgccaaatacaaccagattttctgatgtgaaaacaaagaaccaacagaaacgaatctaat

SEQ ID NO: 55884 - DNA, 3122 bp, Zea Mays
cgcaacgcaacccaaacccaacagcccaacaataacgtagccagcagcccagcagcagcgcgtcacgcccaccacgtcccccccggtcaaatttccattccatctcatctccccccacctcacctcgtcacggcgatggcgccgcgtccgtgcccgctctccctcctcctgctcgccgtcgccgtcgccgtggccctctccccgctcgcggccgcgcagccgcagcgaaacatcctcacgacgttcccctccacccgcacgccggccttcgccaccccgccgccgccgaccgtatccccgccgccgtcccccgtcaccgtcccgccctcctcgccgccgccgccgccgtcgtccgtgaagcgcagcgacatcgcggtggcggtggtgagcacggcgctcagcagcttcgcggtctcgggcctcgccttctttctcttcctccgccacgggaggaggaaggagctgacggccggggacggcaatgggtatcctggccgtcctctggatggcgccttcgcggggaagcggtcggagagggagccgacgcggccgtctcggggcgggggcggcttcggcatggtggacgagaacggcctcgacgcgatatactggagggagttcgaaaaggacggcgaagccggcggcagaggccgagagaagaagccgcctacgacggggactgggagcaggcgcccgccgcagccgcctccgcttcggcagcagcagcagcgcgcggagatgtggccggagccccagccgtcgtcgtcgccgccgccgtccccgccgcgacggtccaggaggaacaggatagatcaggagccgctcatcccggcgggctccctcgactccgcgtccgctgtgttcgacgactcgctgcacccgcccagcgccggctccagctcgtccttctccgtgtccgcgcgtccgccgccgccgaccccggcagtcgctgtcagctccgtgccccgcccgactccgcggcctgcgcctgccgcctcgccgggtctgccgctgccgcctgggagagcaagcccgccacctgcgccacccatggttgctgcctctgtcgcgtcgcctccaccgccacctccaaaaccagccgccgcgtcgccgccgccgccgccaccactggccaagggcccacctccaccgccacctccgaagggcggcccacctccgccgccaccgcccagaggtggcccgcctccaccgccaccgcccaaaggcccgtcccctccgccgccgccaccaccaggaggaaagaaaggaggtccgcctccgcctcctccaaaaggtggggcatcgacgtcctcttctaggccgccgacagcgccgggcatgccatccggtgccggcgagcagcaggcgaagcttaagccgttgcattgggacaaggtcaatgtgcaggccaccgaccactccatggtgtgggacaagatcaccggcggttcattcaacttggacgaaggcatcatcgaggctctcttcggcactgcagcagcaaaccgcaagccgaaaccttcagacaaggaatcgggcgaatcgtcggccagcctcgggcgctcaaacacaccggagcaaatattcctgctcgagccgcgcaagtcacacaatatttccatcatcctcaagtccctcacggtggggcgggatgaaataatcgacgctctccgtgacgggcaaacagaactcggcactgacgtcctggagaagctttcgcggctccacatctccaaggaagaagagtccaccatcttgaggttctccggggaccccgacaggctcgcccccacggaggccttcctcctccgcctcctcctcgacgtgcccaatccgatcgcgcgcgtcaatgcgctgcttttcaaggtgaactatggtgcggaggtcgcgcagctcaagcactcgcttcggacgttggaattggcgagccaggagctgaggacaaagggcctgttctttaagctgcttgaggcagtgctcaaggcgggaaacaggatgaatgccggaacggcacgtggcaacgctcaggccttcaaccttacggcgctccgcaagctctctgacgtgaagagcactgatgggagcaccacgttgctgcacttcgtcgtcgaggaagtcgtccgctccgagggtaagcggctcgccatcaatcgcaactacagcatccgccgctcgggcagtctcgcgaggtctggccacgagggaggcagctcggcagcaggcttcgcaagccaggggccatcgcgggaggaaaggcagagcgaatacatgaacctggggctaccaattgttggaggtctcagcacagagttcgccaacgtgaagagggccgcactggtcgactacgacgcagttgtcagcgagtgcgccattctagacggccgactcaatgagatcaagagactcttggagacctgcagtgatgatggatttgcgcgggggctgcgaggatttgtcagggctgcagaacaggagctgaaggcgctaagaggggagcaggaaagagtacttgagctggtccagaagacaacagagtactaccatgccggtgccaccaaggaacggaacgcacatccccttcagctgttcatcgtagtgagggacttcctgggtatggttgatcaggcatgtgtggacatcaagaggaaagtgcagcagaagaaaccagcgccgtcgtcatcgcagccaaacacagctgctgcccccaccgtggcggctgtggcagcggctgcggccacaacagcagcgacagcgtcagcgaccgatggtcaaacagcaccagctcagaaaccacccgaagcagatagcaaaagaaagagggtcatgccaagatttccaaacctgccagcgcacttcatgaaggatagtgcagattctgattcaagtagtgacgaggaatagattgaacgggtggctgtagatgattgtttgcgttgttttgaattctttgttgtagaggtataggatagcttcagactgtacatagagcaatttttgcattggttcttttgtccatttcttcaatcaagatccatatcgaagcaccgaaataattctaaagaaatttgtaaaaatatgacgtgaagatctcaattgcttgaaaaatgatatctttgtttgag

SEQ ID NO: 55885 - DNA, 1876 bp, Zea Mays
ctccacggcccacgcccacgcccaccgccccatccaccccgaaaccctagcggatcgtcgccatggccgcggccgcgctccttcgccgcatccccgccgcgcgggccccggccacggccttcatggcggcgcgtccggtctccgattccacggcggcgctcaccatcgagacatctgtccctttcacctcccacctcgtcgacccgccctcgcgcgatgtcaccaccacccccgccgagctcgtcaccttcttccgcgacatgtccctcatgcgccgcatggagatcgccgccgactccctctataaggccaagctcatccgcgggttctgccacctctacgacggccaggaggccgtcgccgtcggcatggaggccgccatcacccgctccgattccatcatcaccgcctaccgcgaccactgtacctaccttgcccgaggaggtgacctcgtctccgccttctccgagctgatgggccgcgaggccggctgctcccgcgggaagggtggatccatgcatttctataagaaggatgccaatttctatggcgggcacggcatcgtcggcgcgcaggtgcccctcggatgcggcctagccttcgctcagaagtacaagaaggaggagacggccacgtttgcgctctatggtgacggtgcggctaaccagggacagctctttgaggctctcaacatttcggccctctggaagctgcccgccatattggtttgcgagaacaaccattatggtatgggaacagcggaatggagggcagcgaagagtcctgcttactacaagcgtggcgactatgtgcctggattgaaggttgatggaatggatgttcttgctgtgaagcaagcgtgcaaatttgcaaaagatcatgctgttgcaaatggcccaattgtccttgagatggatacctacaggtaccatggccactctatgtcagatccaggaagcacttaccgcaccagggatgagatttcaggtgtcaggcaggaacgggacccaattgaaagggttagaaagttgcttttggctcacgacttggcaactgctgctgagctcaaggatatggagaaagaaatcaggaaacaagtagatgacgccattgcaaaagcaaaggaaagttctatgcctgatacttctgagctcttcacaaatgtttataagaagggattcaacgtggagtgtttgatatgaaaatgctcaataatcaaaaacatttaattttttttggtaatgtcatttgggcccgacaggaaggagttgagagctactcttccgtaggttgggagaatggcagtcctcaatatgatatgatatccaggagaaataaacattgatgaagaaggcctcagacattgctggaattcttttgttggcaaatgaacctatgtagagatccgttgtcaggaggatctgcttagggcttgttcggttagccttcaatccatgtggattgagtgggattggatgggtttgaatcccacgcaagtcaaacttcttcataattttttccaaacccattcaatccatgtgtattgggaataagcgaacaaggccttatttgttttgcttcccttttccatttctacaattcagctttaactgctgctggttggcttcttattgaagctaatatcgtctgcaattgcttcggtccaaggaaatcgaagcaggagattataaatttgctcacgcctctcgtctatacctgccactcttagctttagttcggtaatggtacatgtaggactgcgtcgttacacttcgactggtcgattaattttatttaataaatgtggtgcatggatcggacagtgtgtaactcagaatatggtgcatgcaattgccgtgtttggtttctagaccct

SEQ ID NO: 55886 - DNA, 5348 bp, Zea Mays
cgcatccgcgcacaggcaccatgggtccacggcccggcccggtcacccgctcctcctcctcctcctcctctcggctcgcccgcgcgcgtgagccgcttaaatttcagttcaaactgcccaaggcaagccatcacgcggctcacgcacgccacgcatcccccaccaggccaccatgcgcctgcgagccacgccaagccgatctctcaagcgaaacggccctccagattacattcgacggcagaggcagacgcacgggagcagacagagaaaattttgaaacgcgggcaggccgccaccaccgcgccaaatcaagccctccagtcacattccattcgacggccggagcggcgcctcctacctccgacctccttctacaagtcagatccgtccacatatacaacactctcaggaattccctcctctaccaccgcaccgtccacgcgaactcaaatcctgcaaactcctcgcgaccacctcacgcggatcggcgacggcgatggtggcggcctcctctaccgtcgtcgaggtagcggtggcagcagctgcggcggcggcgtcagctttgccgcaggagcagcaggcgcagccgcggccgcggccgatgcacgcgggtggcgccaatggccgccaccacgcgtacagccgcaaggacaagtcgctcggcctcctctgctccaatttcgtggttctctacaaccgcgaggacgtggagtccgtcggcctggacgaagcggccaaacggctcggcgtggagaggcgccggatctacgacattgtcaatgtgcttgagagtgtcgggaagattctttcgaggaaagccaagaatcgctacacatggataggtttcggcggaatcccaatggcgttgctagaactcaaggaaagggcgttaagggacaagtctggtttggcttctcagcaaaccgagcagcaatctgctgccacaatttctgatgacgaggatgatgatacattgggcaaagaagttgctaatatcgagaatgagaaactgagtcagactgttaacaatccttctgacaaacctggtgcaccccgttgtcgccttagatctgatcataggaaagaaaagtcacttgggttgctcacacagaatttcgtgaagctctttctcaccatggagcaggttgacacgatctcacttgatgaagctgcaaagctgctccttggggaaggccacgaggagaccaatatgagaactaaagttcggaggttatatgacattgccaatgtcctgtcttcactgaatctaattgagaagatacagcaaggggactcaagaaagcctgcgtttcgttggttgggtagggccacaacgccggacacagaaaatggtgtcacagttgttgtacccccaccagggaagactaaatcgaacaaaagagcatttggaactgaactcactaacatcgacatgcatagaagtaatctagattcaaaagttcagaagaaagcaaaactggcaaagagtggtggcgatgtcttgataaattgcaaattggatagtggtggcgatgtcttgataaattgcaaattggatgtacggaatcggcttggacagggtaaacaaagtggcattgtttatggtcctttccaccctgctggcgcaaggaaacatgaacttgctggtggcaataaccccgggcaaagggagatggccgaggactggaagagcctttctgctccatttcgaccacagtacaagaaccaagcactcagtgatctttttgcccattatgttgatgcgtggaagacatggtattctgaatttgctcaaggcagcaacatcatgcaacaacactttggccattttggtaaccattttttgtaggcaaattatagggtcaagcattgcagttcttagtgcacgcttgtgtattttacctgtacaacctgttaaaaggggagagaacaagacatgattaggcctagggttcattgtatttactcaatgcaggacatctttaggctattttaggtggaaaactagagtggaactattagagagagatgttccccaatctctctaatagaaacatcattatcatctcacctttaagttctctattgttaattgttgtttatgtgcttacctttgtgggttctacaactgtctgtcactagccattcttatgaaacttctcataactaagtatatcttgcacttgtctatcgcaaccaaaaataaaataaaattctgttcaaattatatttcagatacaatcacaatgtcatcaattctttcctttccgctgtgatcataattcttgctacaattcagatgctacaaaatagggaaagcctcgaggcctggcctgtagatgtctgtactcagattatgcaaagccagctgatcccatcgtcttgctttaatttaaccgtaaagacaattatggtcgcgtaacgacaccaggactccaggagtacataggagtggtggtctcagcatggtctacagtacaagcaagagtttcaggctgcaaaattgtgatcccaatattttggttgtatgggttgttgtcagtgtttggggaataccatatctccaaaggacatcaagacgtattcaaatatccctgtaactgtcatgcgctagatgccttgacccaccgagcgctatgcaaagcttgagaaggatggttcgtcgaaacatgtcccaagtgattgactcctcgccattgcttgggttgttctgaataaatatgtttagttggctacttgccttttggtttgtctagctaacacaatttaaatcaaatatttccccaacgtcatcgacaggaacactgtatctactgaccattcgtgattttttttcttggactatggagagcatctgagctacaaagctgttctcttggctacaacttgatatatcaaattgattttgtttgtcccttagtaaatttcagatcttagtgcagataatgatgcgctaatctatttacagttgcagccacttgcgctactaattttccaagaatgaaaaaaacacactgtcctgctttaaacataattctgctaactagcaacatgtttcataatcgaagaaaacctgtggagaggagataccatgcgaaaatagtattagaatgtcaatcagatgcacttgttctccaaataaaatgctgttgtcagttgtcgtgtgtcatttgttaaccatattgcaaatctattgggatgtattattattatattatacggagtaacatatactagttctttattactccctccgtttctttttatttgtcgctggatagtgcaaaattgcactatccagcgacaaataaaaagaaacggaggaagtagtacgtatcagttaaatgtcgaaccaatttacagaatcgcgcacgaccgcacgcacgggacaatctcggtctgcgccgccagcctgtcaagttcagcggctgcaggccaaccaacccagctccttgtcaagaatgcaacaactacgcgaataaaaatctcgcgtctttcttcctccattcctcctctccctctccctctccacggcccacgcccacgcccaccgccccatccaccccgaaaccctagcggatcgtcgccatggccgcggccgcgctccttcgccgcatccccgccgcgcgggccccggccacggccttcatggcggcgcgtccggtctccgattccacggcggcgctcaccatcgagacatctgtccctttcacctcccacctcgtcgacccgccctcgcgcgatgtcaccaccacccccgccgagctcgtcaccttcttccgcgacatgtccctcatgcgccgcatggagatcgccgccgactccctctataaggccaagctcatccgcgggttctgccacctctacgacggccaggaggccgtcgccgtcggcatggaggccgccatcacccgctccgattccatcatcaccgcctaccgcgaccactgtacctaccttgcccgaggaggtgacctcgtctccgccttctccgagctgatgggccgcgaggccggctgctcccgcgggaagggtggatccatgcatttctataagaaggatgccaatttctatggcgggcacggcatcgtcggcgcgcaggtgcccctcggatgcggcctagccttcgctcagaagtacaagaaggaggagacggccacgtttgcgctctatggtgacggtgcggctaaccagggacagctctttgaggctctcaacatttcggccctctggaagctgcccgccatattggtttgcgagaacaaccattatggtatgggaacagcggaatggagggcagcgaagagtcctgcttactacaagcgtggcgactatgtgcctggattgaaggttgatggaatggatgttcttgctgtgaagcaagcgtgcaaatttgcaaaagatcatgctgttgcaaatggcccaattgtccttgagatggatacctacaggtaccatggccactctatgtcagatccaggaagcacttaccgcaccagggatgagatttcaggtgtcaggcaggaacgggacccaattgaaagggttagaaagttgcttttggctcacgacttggcaactgctgctgagctcaaggatatggagaaagaaatcaggaaacaagtagatgacgccattgcaaaagcaaaggaaagttctatgcctgatacttctgagctcttcacaaatgtttataagaagggattcaacgtggagtcatttgggcccgacaggaaggagttgagagctactcttccgtaggttgggagaatggcagtcctcaatatgatatgatatccaggagaaataaacattgatgaagaaggcctcagacattgctggaattcttttgttggcaaatgaacctatgtagagatccgttgtcaggaggatctgcttagggcttgttcggttagccttcaatccatgtggattgagtgggattggatgggtttgaatcccacgcaagtcaaacttcttcataattttttccaaacccattcaatccatgtgtattgggaataagcgaacaaggccttatttgttttgcttcccttttccatttctacaattcagctttaactgctgctggttggcttcttattgaagctaatatcgtctgcaattgcttcggtccaaggaaatcgaagcaggagattataaatttgctcacgcctctcgtctatacctgccactcttagctttagttcggtaatggtacatgtaggactgcgtcgttacacttcgactggtcgattaattttatttaataaatgtggtgcatggatcggacagtgtgtaactcagaatatggtgcatgcaattgccgtgtttggtttctagaccct

SEQ ID NO: 55887 - DNA, 2720 bp, Zea Mays
gtacgacctcttactttaccttacatttgaactgatgtatctgattctggtccacaacgatttgtactgtcttcgtcctgaaaaagatgcagttctaggtctgcctctagtcaaactattcaaaaattgaccaaatttatagaatataacgttgttatttaatatttataatgcaagataggtatactatgaaaacacgttctgcggagaatttaataacgcttatctggtaacataaatattgatatttttttttaaaaaaaactcagacgtggagataatgactgccctcccggtattaatgtctaggatccgcacataagaatgtacacagcctactgatggctaagatgagatcgaaacattgatcctagccaagaaaatttctgaaccctgggcaacctgagagcagatgagacaacgaggagatttttttaaccaaatcggaaatttgcctccttgggaaatcgaacatgggacttggaggtgctaccagaagcacttaatcactaggctagaggctctttctcaatattgatattttatgcatacgtttggtcaaatttaaaatgatccgacttggtaacatgctagaatcgcgttcttttatatggattggttcctaacaaaagggtttctcctcctatgttttttgtggagatttctgatgacgaggatgatgatacattgggcaaagaagttgctaatatcgagaatgagaaactgagtcagactgttaacaatccttctgacaaacctggtgcaccccgttgtcgccttagatctgatcataggaaagaaaagtcacttgggttgctcacacagaatttcgtgaagctctttctcaccatggagcaggttgacacgatctcacttgatgaagctgcaaagctgctccttggggaaggccacgaggagaccaatatgagaactaaagttcggaggttatatgacattgccaatgtcctgtcttcactgaatctaattgagaagatacagcaaggggactcaagaaagcctgcgtttcgttggttgggtagggccacaacgccggacacagaaaatggtgtcacagttgttgtacccccaccagggaagactaaatcgaacaaaagagcatttggaactgaactcactaacatcgacatgcatagaagtaatctagattcaaaagttcagaagaaagcaaaactggcaaagagtggtggcgatgtcttgataaattgcaaattggatagtggtggcgatgtcttgataaattgcaaattggatgtacggaatcggcttggacagggtaaacaaagtggcattgtttatggtcctttccaccctgctggcgcaaggaaacatgaacttgctggtggcaataaccccgggcaaagggagatggccgaggactggaagagcctttctgctccatttcgaccacagtacaagaaccaagcactcagtgatctttttgcccattatgttgatgcgtggaagacatggtattctgaatttgctcaaggcagcaacatcatgcaacaacactttggccattttggtaaccattttttgtaggcaaattatagggtcaagcattgcagttcttagtgcacgcttgtgtattttacctgtacaacctgttaaaaggggagagaacaagacatgattaggcctagggttcattgtatttactcaatgcaggacatctttaggctattttaggtggaaaactagagtggaactattagagagagatgttccccaatctctctaatagaaacatcattatcatctcacctttaagttctctattgttaattgttgtttatgtgcttacctttgtgggttctacaactgtctgtcactagccattcttatgaaacttctcataactaagtatatcttgcacttgtctatcgcaaccaaaaataaaataaaattctgttcaaattatatttcagatacaatcacaatgtcatcaattctttcctttccgctgtgatcataattcttgctacaattcagatgctacaaaatagggaaagcctcgaggcctggcctgtagatgtctgtactcagattatgcaaagccagctgatcccatcgtcttgctttaatttaaccgtaaagacaattatggtcgcgtaacgacaccaggactccaggagtacataggagtggtggtctcagcatggtctacagtacaagcaagagtttcaggctgcaaaattgtgatcccaatattttggttgtatgggttgttgtcagtgtttggggaataccatatctccaaaggacatcaagacgtattcaaatatccctgtaactgtcatgcgctagatgccttgacccaccgagcgctatgcaaagcttgagaaggatggttcgtcgaaacatgtcccaagtgattgactcctcgccattgcttgggttgttctgaataaatatgtttagttggctacttgccttttggtttgtctagctaacacaatttaaatcaaatatttccccaacgtcatcgacaggaacactgtatctactgaccattcgtgattttttttcttggactatggagagcatctgagctacaaagctgttctcttggctacaacttgatatatcaaattgattttgtttgtcccttagtaaatttcagatcttagtgcagataatgatgcgctaatctatttacagttgcagccacttgcgctactaattttccaagaatgaaa

SEQ ID NO: 55888 - DNA, 2507 bp, Zea Mays
atggtggcggcctcctctaccgtcgtcgaggtagcggtggcagcagctgcggcggcggcgtcagctttgccgcaggagcagcaggcgcagccgcggccgcggccgatgcacgcgggtggcgccaatggccgccaccacgcgtacagccgcaaggacaagtcgctcggcctcctctgctccaatttcgtggttctctacaaccgcgaggacgtggagtccgtcggcctggacgaagcggccaaacggctcggcgtggagaggcgccggatctacgacattgtcaatgtgcttgagagtgtcgggattctttcgaggaaagccaagaatcgctacacatggataggtttcggcggaatcccaatggcgttgctagaactcaaggaaagggcgttaagggacaagtctggtttggcttctcagcaaaccgagcagcaatctgctgccacaatttctgatgacgaggatgatgatacattgggcaaagaagttgctaatatcgagaatgagaaactgagtcagactgttaacaatccttctgacaaacctggtgcaccccgttgtcgccttagatctgatcataggaaagaaaagtcacttgggttgctcacacagaatttcgtgaagctctttctcaccatggagcaggttgacacgatctcacttgatgaagctgcaaagctgctccttggggaaggccacgaggagaccaatatgagaactaaagttcggaggttatatgacattgccaatgtcctgtcttcactgaatctaattgagaagatacagcaaggggactcaagaaagcctgcgtttcgttggttgggtagggccacaacgccggacacagaaaatggtgtcacagttgttgtacccccaccagggaagactaaatcgaacaaaagagcatttggaactgaactcactaacatcgacatgcatagaagtaatctagattcaaaagttcagaagaaagcaaaactggcaaagagtggtggcgatgtcttgataaattgcaaattggatagtggtggcgatgtcttgataaattgcaaattggatgtacggaatcggcttggacagggtaaacaaagtggcattgtttatggtcctttccaccctgctggcgcaaggaaacatgaacttgctggtggcaataaccccgggcaaagggagatggccgaggactggaagagcctttctgctccatttcgaccacagtacaagaaccaagcactcagtgatctttttgcccattatgttgatgcgtggaagacatggtattctgaatttgctcaaggcagcaacatcatgcaacaacactttggccattttggtaaccattttttgtaggcaaattatagggtcaagcattgcagttcttagtgcacgcttgtgtattttacctgtacaacctgttaaaaggggagagaacaagacatgattaggcctagggttcattgtatttactcaatgcaggacatctttaggctattttaggtggaaaactagagtggaactattagagagagatgttccccaatctctctaatagaaacatcattatcatctcacctttaagttctctattgttaattgttgtttatgtgcttacctttgtgggttctacaactgtctgtcactagccattcttatgaaacttctcataactaagtatatcttgcacttgtctatcgcaaccaaaaataaaataaaattctgttcaaattatatttcagatacaatcacaatgtcatcaattctttcctttccgctgtgatcataattcttgctacaattcagatgctacaaaatagggaaagcctcgaggcctggcctgtagatgtctgtactcagattatgcaaagccagctgatcccatcgtcttgctttaatttaaccgtaaagacaattatggtcgcgtaacgacaccaggactccaggagtacataggagtggtggtctcagcatggtctacagtacaagcaagagtttcaggctgcaaaattgtgatcccaatattttggttgtatgggttgttgtcagtgtttggggaataccatatctccaaaggacatcaagacgtattcaaatatccctgtaactgtcatgcgctagatgccttgacccaccgagcgctatgcaaagcttgagaaggatggttcgtcgaaacatgtcccaagtgattgactcctcgccattgcttgggttgttctgaataaatatgtttagttggctacttgccttttggtttgtctagctaacacaatttaaatcaaatatttccccaacgtcatcgacaggaacactgtatctactgaccattcgtgattttttttcttggactatggagagcatctgagctacaaagctgttctcttggctacaacttgatatatcaaattgattttgtttgtcccttagtaaatttcagatcttagtgcagataatgatgcgctaatctatttacagttgcagccacttgcgctactaattttccaagaatgaaa

SEQ ID NO: 55889 - DNA, 2231 bp, Zea Mays
aagccctccagtcacattccattcgacggccggagcggcgcctcctacctccgacctccttctacaagtcagatccgtccacatatacaacactctcaggaattccctcctctaccaccgcaccgtccacgcgaactcaaatcctgcaaactcctcgcgaccacctcacgcggatcggcgacggcgatggtggcggcctcctctaccgtcgtcgaggtagcggtggcagcagctgcggcggcggcgtcagctttgccgcaggagcagcaggcgcagccgcggccgcggccgatgcacgcgggtggcgccaatggccgccaccacgcgtacagccgcaaggacaagtcgctcggcctcctctgctccaatttcgtggttctctacaaccgcgaggacgtggagtccgtcggcctggacgaagcggccaaacggctcggcgtggagaggcgccggatctacgacattgtcaatgtgcttgagagtgtcgggaagattctttcgaggaaagccaagaatcgctacacatggataggtttcggcggaatcccaatggcgttgctagaactcaaggaaagggcgttaagggacaagtctggtttggcttctcagcaaaccgagcagcaatctgctgccacaatttctgatgacgaggatgatgatacattgggcaaagaagttgctaatatcgagaatgagaaactgagtcagactgttaacaatccttctgacaaacctggtgcaccccgttgtcgccttagatctgatcataggaaagaaaagtcacttgggttgctcacacagaatttcgtgaagctctttctcaccatggagcaggttgacacgatctcacttgatgaagctgcaaagctgctccttggggaaggccacgaggagaccaatatgagaactaaagttcggaggttatatgacattgccaatgtcctgtcttcactgaatctaattgagaagatacagcaaggggactcaagaaagcctgcgtttcgttggttgggtagggccacaacgccggacacagaaaatggtgtcacagttgttgtacccccaccagggaagactaaatcgaacaaaagagcatttggaactgaactcactaacatcgacatgcatagaagtaatctagattcaaaagttcagaagaaagcaaaactggcaaagagtggtggcgatgtcttgataaattgcaaattggatagtggtggcgatgtcttgataaattgcaaattggatgtacggaatcggcttggacagggtaaacaaagtggcattgtttatggtcctttccaccctgctggcgcaaggaaacatgaacttgctggtggcaataaccccgggcaaagggagatggccgaggactggaagagcctttctgctccatttcgaccacagtacaagaaccaagcactcagtgatctttttgcccattatgttgatgcgtggaagacatggtattctgaatttgctcaaggcagcaacatcatgcaacaacactttggccattttgagatgctacaaaatagggaaagcctcgaggcctggcctgtagatgtctgtactcagattatgcaaagccagctgatcccatcgtcttgctttaatttaaccgtaaagacaattatggtcgcgtaacgacaccaggactccaggagtacataggagtggtggtctcagcatggtctacagtacaagcaagagtttcaggctgcaaaattgtgatcccaatattttggttgtatgggttgttgtcagtgtttggggaataccatatctccaaaggacatcaagacgtattcaaatatccctgtaactgtcatgcgctagatgccttgacccaccgagcgctatgcaaagcttgagaaggatggttcgtcgaaacatgtcccaagtgattgactcctcgccattgcttgggttgttctgaataaatatgtttagttggctacttgccttttggtttgtctagctaacacaatttaaatcaaatatttccccaacgtcatcgacaggaacactgtatctactgaccattcgtgattttttttcttggactatggagagcatctgagctacaaagctgttctcttggctacaacttgatatatcaaattgattttgtttgtcccttagtaaatttcagatcttagtgcagataatgatgcgctaatctatttacagttgcagccacttgcgctactaattttccaagaatgaaa

SEQ ID NO: 55890 - DNA, 2327 bp, Zea Mays
gccaaatcaagccctccagtcacattccattcgacggccggagcggcgcctcctacctccgacctccttctacaagtcagatccgtccacatatacaacactctcaggaattccctcctctaccaccgcaccgtccacgcgaactcaaatcctgcaaactcctcgcgaccacctcacgcggatcggcgacggcgatggtggcggcctcctctaccgtcgtcgaggtagcggtggcagcagctgcggcggcggcgtcagctttgccgcaggagcagcaggcgcagccgcggccgcggccgatgcacgcgggtggcgccaatggccgccaccacgcgtacagccgcaaggacaagtcgctcggcctcctctgctccaatttcgtggttctctacaaccgcgaggacgtggagtccgtcggcctggacgaagcggccaaacggctcggcgtggagaggcgccggatctacgacattgtcaatgtgcttgagagtgtcgggattctttcgaggaaagccaagaatcgctacacatggataggtttcggcggaatcccaatggcgttgctagaactcaaggaaagggcgttaagggacaagtctggtttggcttctcagcaaaccgagcagcaatctgctgccacaatttctgatgacgaggatgatgatacattgggcaaagaagttgctaatatcgagaatgagaaactgagtcagactgttaacaatccttctgacaaacctggtgcaccccgttgtcgccttagatctggtacattgctgtttgcttcattttgatttagcatgtgttacatgtgattttcgattttgtctatctggttcagaattccggttgttacattttcagatcataggaaagaaaagtcacttgggttgctcacacagaatttcgtgaagctctttctcaccatggaggttgacacgatctcacttgatgaagctgcaaagctgctccttggggaaggccacgaggagaccaatatgagaactaaagttcggaggttatatgacattgccaatgtcctgtcttcactgaatctaattgagaagatacagcaaggggactcaagaaagcctgcgtttcgttggttgggtagggccacaacgccggacacagaaaatggtgtcacagttgttgtacccccaccagggaagactaaatcgaacaaaagagcatttggaactgaactcactaacatcgacatgcatagaagtaatctagattcaaaagttcagaagaaagcaaaactggcaaagagtggtggcgatgtcttgataaattgcaaattggatagtggtggcgatgtcttgataaattgcaaattggatgtacggaatcggcttggacagggtaaacaaagtggcattgtttatggtcctttccaccctgctggcgcaaggaaacatgaacttgctggtggcaataaccccgggcaaagggagatggccgaggactggaagagcctttctgctccatttcgaccacagtacaagaaccaagcactcagtgatctttttgcccattatgttgatgcgtggaagacatggtattctgaatttgctcaaggcagcaacatcatgcaacaacactttggccattttgatgctacaaaatagggaaagcctcgaggcctggcctgtagatgtctgtactcagattatgcaaagccagctgatcccatcgtcttgctttaatttaaccgtaaagacaattatggtcgcgtaacgacaccaggactccaggagtacataggagtggtggtctcagcatggtctacagtacaagcaagagtttcaggctgcaaaattgtgatcccaatattttggttgtatgggttgttgtcagtgtttggggaataccatatctccaaaggacatcaagacgtattcaaatatccctgtaactgtcatgcgctagatgccttgacccaccgagcgctatgcaaagcttgagaaggatggttcgtcgaaacatgtcccaagtgattgactcctcgccattgcttgggttgttctgaataaatatgtttagttggctacttgccttttggtttgtctagctaacacaatttaaatcaaatatttccccaacgtcatcgacaggaacactgtatctactgaccattcgtgattttttttcttggactatggagagcatctgagctacaaagctgttctcttggctacaacttgatatatcaaattgattttgtttgtcccttagtaaatttcagatcttagtgcagataatgatgcgctaatctatttacagttgcagccacttgcgctactaattttccaagaatgaaa

SEQ ID NO: 55891 - DNA, 2392 bp, Zea Mays
cgcggctcacgcacgccacgcatcccccaccaggccaccatgcgcctgcgagccacgccaagccgatctctcaagcgaaacggccctccagattacattcgacggcagaggcagacgcacgggagcagacagagaaaattttgaaacgcgggcaggccgccaccaccgcgccaaatcaagccctccagtcacattccattcgacggccggagcggcgcctcctacctccgacctccttctacaagtcagatccgtccacatatacaacactctcaggaattccctcctctaccaccgcaccgtccacgcgaactcaaatcctgcaaactcctcgcgaccacctcacgcggatcggcgacggcgatggtggcggcctcctctaccgtcgtcgaggtagcggtggcagcagctgcggcggcggcgtcagctttgccgcaggagcagcaggcgcagccgcggccgcggccgatgcacgcgggtggcgccaatggccgccaccacgcgtacagccgcaaggacaagtcgctcggcctcctctgctccaatttcgtggttctctacaaccgcgaggacgtggagtccgtcggcctggacgaagcggccaaacggctcggcgtggagaggcgccggatctacgacattgtcaatgtgcttgagagtgtcgggaagattctttcgaggaaagccaagaatcgctacacatggataggtttcggcggaatcccaatggcgttgctagaactcaaggaaagggcgttaagggacaagtctggtttggcttctcagcaaaccgagcagcaatctgctgccacaatttctgatgacgaggatgatgatacattgggcaaagaagttgctaatatcgagaatgagaaactgagtcagactgttaacaatccttctgacaaacctggtgcaccccgttgtcgccttagatctgatcataggaaagaaaagtcacttgggttgctcacacagaatttcgtgaagctctttctcaccatggagcaggttgacacgatctcacttgatgaagctgcaaagctgctccttggggaaggccacgaggagaccaatatgagaactaaagttcggaggttatatgacattgccaatgtcctgtcttcactgaatctaattgagaagatacagcaaggggactcaagaaagcctgcgtttcgttggttgggtagggccacaacgccggacacagaaaatggtgtcacagttgttgtacccccaccagggaagactaaatcgaacaaaagagcatttggaactgaactcactaacatcgacatgcatagaagtaatctagattcaaaagttcagaagaaagcaaaactggcaaagagtggtggcgatgtcttgataaattgcaaattggatagtggtggcgatgtcttgataaattgcaaattggatgtacggaatcggcttggacagggtaaacaaagtggcattgtttatggtcctttccaccctgctggcgcaaggaaacatgaacttgctggtggcaataaccccgggcaaagggagatggccgaggactggaagagcctttctgctccatttcgaccacagtacaagaaccaagcactcagtgatctttttgcccattatgttgatgcgtggaagacatggtattctgaatttgctcaaggcagcaacatcatgcaacaacactttggccattttgggaaagcctcgaggcctggcctgtagatgtctgtactcagattatgcaaagccagctgatcccatcgtcttgctttaatttaaccgtaaagacaattatggtcgcgtaacgacaccaggactccaggagtacataggagtggtggtctcagcatggtctacagtacaagcaagagtttcaggctgcaaaattgtgatcccaatattttggttgtatgggttgttgtcagtgtttggggaataccatatctccaaaggacatcaagacgtattcaaatatccctgtaactgtcatgcgctagatgccttgacccaccgagcgctatgcaaagcttgagaaggatggttcgtcgaaacatgtcccaagtgattgactcctcgccattgcttgggttgttctgaataaatatgtttagttggctacttgccttttggtttgtctagctaacacaatttaaatcaaatatttccccaacgtcatcgacaggaacactgtatctactgaccattcgtgattttttttcttggactatggagagcatctgagctacaaagctgttctcttggctacaacttgatatatcaaattgattttgtttgtcccttagtaaatttcagatcttagtgcagataatgatgcgctaatctatttacagttgcagccacttgcgctactaattttccaagaatgaaa

SEQ ID NO: 55892 - DNA, 2870 bp, Zea Mays
cgcggctcacgcacgccacgcatcccccaccaggccaccatgcgcctgcgagccacgccaagccgatctctcaagcgaaacggccctccagattacattcgacggcagaggcagacgcacgggagcagacagagaaaattttgaaacgcgggcaggccgccaccaccgcgccaaatcaagccctccagtcacattccattcgacggccggagcggcgcctcctacctccgacctccttctacaagtcagatccgtccacatatacaacactctcaggaattccctcctctaccaccgcaccgtccacgcgaactcaaatcctgcaaactcctcgcgaccacctcacgcggatcggcgacggcgatggtggcggcctcctctaccgtcgtcgaggtagcggtggcagcagctgcggcggcggcgtcagctttgccgcaggagcagcaggcgcagccgcggccgcggccgatgcacgcgggtggcgccaatggccgccaccacgcgtacagccgcaaggacaagtcgctcggcctcctctgctccaatttcgtggttctctacaaccgcgaggacgtggagtccgtcggcctggacgaagcggccaaacggctcggcgtggagaggcgccggatctacgacattgtcaatgtgcttgagagtgtcgggaagattctttcgaggaaagccaagaatcgctacacatggataggtttcggcggaatcccaatggcgttgctagaactcaaggaaagggcgttaagggacaagtctggtttggcttctcagcaaaccgagcagcaatctgctgccacaatttctgatgacgaggatgatgatacattgggcaaagaagttgctaatatcgagaatgagaaactgagtcagactgttaacaatccttctgacaaacctggtgcaccccgttgtcgccttagatctgatcataggaaagaaaagtcacttgggttgctcacacagaatttcgtgaagctctttctcaccatggaggttgacacgatctcacttgatgaagctgcaaagctgctccttggggaaggccacgaggagaccaatatgagaactaaagttcggaggttatatgacattgccaatgtcctgtcttcactgaatctaattgagaagatacagcaaggggactcaagaaagcctgcgtttcgttggttgggtagggccacaacgccggacacagaaaatggtgtcacagttgttgtacccccaccagggaagactaaatcgaacaaaagagcatttggaactgaactcactaacatcgacatgcatagaagtaatctagattcaaaagttcagaagaaagcaaaactggcaaagagtggtggcgatgtcttgataaattgcaaattggatagtggtggcgatgtcttgataaattgcaaattggatgtacggaatcggcttggacagggtaaacaaagtggcattgtttatggtcctttccaccctgctggcgcaaggaaacatgaacttgctggtggcaataaccccgggcaaagggagatggccgaggactggaagagcctttctgctccatttcgaccacagtacaagaaccaagcactcagtgatctttttgcccattatgttgatgcgtggaagacatggtattctgaatttgctcaaggcagcaacatcatgcaacaacactttggccattttggtaaccattttttgtaggcaaattatagggtcaagcattgcagttcttagtgcacgcttgtgtattttacctgtacaacctgttaaaaggggagagaacaagacatgattaggcctagggttcattgtatttactcaatgcaggacatctttaggctattttaggtggaaaactagagtggaactattagagagagatgttccccaatctctctaatagaaacatcattatcatctcacctttaagttctctattgttaattgttgtttatgtgcttacctttgtgggttctacaactgtctgtcactagccattcttatgaaacttctcataactaagtatatcttgcacttgtctatcgcaaccaaaaataaaataaaattctgttcaaattatatttcagatacaatcacaatgtcatcaattctttcctttccgctgtgatcataattcttgctacaattcagatgctacaaaatagggaaagcctcgaggcctggcctgtagatgtctgtactcagattatgcaaagccagctgatcccatcgtcttgctttaatttaaccgtaaagacaattatggtcgcgtaacgacaccaggactccaggagtacataggagtggtggtctcagcatggtctacagtacaagcaagagtttcaggctgcaaaattgtgatcccaatattttggttgtatgggttgttgtcagtgtttggggaataccatatctccaaaggacatcaagacgtattcaaatatccctgtaactgtcatgcgctagatgccttgacccaccgagcgctatgcaaagcttgagaaggatggttcgtcgaaacatgtcccaagtgattgactcctcgccattgcttgggttgttctgaataaatatgtttagttggctacttgccttttggtttgtctagctaacacaatttaaatcaaatatttccccaacgtcatcgacaggaacactgtatctactgaccattcgtgattttttttcttggactatggagagcatctgagctacaaagctgttctcttggctacaacttgatatatcaaattgattttgtttgtcccttagtaaatttcagatcttagtgcagataatgatgcgctaatctatttacagttgcagccacttgcgctactaattttccaagaatgaaa

SEQ ID NO: 55893 - DNA, 2483 bp, Zea Mays
tcctcctcctcctctcggctcgcccgcgcgcgtgagccgcttaaatttcagttcaaactgcccaaggcaagccatcacgcggctcacgcacgccacgcatcccccaccaggccaccatgcgcctgcgagccacgccaagccgatctctcaagcgaaacggccctccagattacattcgacggcagaggcagacgcacgggagcagacagagaaaattttgaaacgcgggcaggccgccaccaccgcgccaaatcaagccctccagtcacattccattcgacggccggagcggcgcctcctacctccgacctccttctacaagtcagatccgtccacatatacaacactctcaggaattccctcctctaccaccgcaccgtccacgcgaactcaaatcctgcaaactcctcgcgaccacctcacgcggatcggcgacggcgatggtggcggcctcctctaccgtcgtcgaggtagcggtggcagcagctgcggcggcggcgtcagctttgccgcaggagcagcaggcgcagccgcggccgcggccgatgcacgcgggtggcgccaatggccgccaccacgcgtacagccgcaaggacaagtcgctcggcctcctctgctccaatttcgtggttctctacaaccgcgaggacgtggagtccgtcggcctggacgaagcggccaaacggctcggcgtggagaggcgccggatctacgacattgtcaatgtgcttgagagtgtcgggaagattctttcgaggaaagccaagaatcgctacacatggataggtttcggcggaatcccaatggcgttgctagaactcaaggaaagggcgttaagggacaagtctggtttggcttctcagcaaaccgagcagcaatctgctgccacaatttctgatgacgaggatgatgatacattgggcaaagaagttgctaatatcgagaatgagaaactgagtcagactgttaacaatccttctgacaaacctggtgcaccccgttgtcgccttagatctgatcataggaaagaaaagtcacttgggttgctcacacagaatttcgtgaagctctttctcaccatggagcaggttgacacgatctcacttgatgaagctgcaaagctgctccttggggaaggccacgaggagaccaatatgagaactaaagttcggaggttatatgacattgccaatgtcctgtcttcactgaatctaattgagaagatacagcaaggggactcaagaaagcctgcgtttcgttggttgggtagggccacaacgccggacacagaaaatggtgtcacagttgttgtacccccaccagggaagactaaatcgaacaaaagagcatttggaactgaactcactaacatcgacatgcatagaagtaatctagattcaaaagttcagaagaaagcaaaactggcaaagagtggtggcgatgtcttgataaattgcaaattggatagtggtggcgatgtcttgataaattgcaaattggatgtacggaatcggcttggacagggtaaacaaagtggcattgtttatggtcctttccaccctgctggcgcaaggaaacatgaacttgctggtggcaataaccccgggcaaagggagatggccgaggactggaagagcctttctgctccatttcgaccacagtacaagaaccaagcactcagtgatctttttgcccattatgttgatgcgtggaagacatggtattctgaatttgctcaaggcagcaacatcatgcaacaacactttggccattttgatgctacaaaatagggaaagcctcgaggcctggcctgtagatgtctgtactcagattatgcaaagccagctgatcccatcgtcttgctttaatttaaccgtaaagacaattatggtcgcgtaacgacaccaggactccaggagtacataggagtggtggtctcagcatggtctacagtacaagcaagagtttcaggctgcaaaattgtgatcccaatattttggttgtatgggttgttgtcagtgtttggggaataccatatctccaaaggacatcaagacgtattcaaatatccctgtaactgtcatgcgctagatgccttgacccaccgagcgctatgcaaagcttgagaaggatggttcgtcgaaacatgtcccaagtgattgactcctcgccattgcttgggttgttctgaataaatatgtttagttggctacttgccttttggtttgtctagctaacacaatttaaatcaaatatttccccaacgtcatcgacaggaacactgtatctactgaccattcgtgattttttttcttggactatggagagcatctgagctacaaagctgttctcttggctacaacttgatatatcaaattgattttgtttgtcccttagtaaatttcagatcttagtgcagataatgatgcgctaatctatttacagttgcagccacttgcgctactaattttccaagaatgaaa

SEQ ID NO: 55894 - DNA, 613 bp, Zea Mays
tgctgaagttagaagctgacaataacaatgcaacataaagggcgggttaggcatgatgaagacattctgttccaagcgtgaactgctcgagtttgcttattatcatggaggcggctgtagttctcttttccaccgcgacctcttttttttcctaaggaacgtacattgtcatttttggaagcttctgaaagcatggcgtgcgcgtgaactatggatgtatgagtcactccgaagctaaactgtttgagtactatgctaagctgaggagctgcattcacatcatgtggtggagcgcgagggaggcttctttatcggacagcctcacttgtcaccgacgcaatcaggcacccccccaagccgtggactacgctgggtttggctttggcatgagaacgaccgctgtgtttgtcataagtcatatcgtaactagagaaacaagtagctttataatcacaatgtatcaccatcctacagaactatggatgcgtcttgtacataggccggataaagcgcttctatgttcccgagcgtcttttctttaccatgattccaaagtgtgtttttttccccttagtattaagaagaaaaataaggaggtagaagaaagtctgat

SEQ ID NO: 55895 - DNA, 1428 bp, Zea Mays
ctacttgctactagttcatcatgtacagatctggaagtgcaagtgatgggcgatatccagctgcttcgctgggctcaaactcagttccatcagcaacaaggaggagcagattacctgtgagcagatcatctccacctgatgtgtcacccagtgtcaccaaaacatatagtccttcatccatcaggaacaagaagctgtcaccgccttcatatcggaaagcgcgccaagcaaataattgtaactacaaggttgagatagctgttgctccggatgctacaccaatcaaagtggtgacggaggagaagctgctggaaggaggcaatgtgagaggcagactggaggctaggagggcactcttccaaggcagccaggataggtcggccaagctggctggatacaaagcagggtcacgagttgttccatacgagggtggtggtaatttggaagagatttcagaagttgaaggtagatcggaaaggtatgcagttcagaaagacgagagcttgtcagaaataaggacgcagctccttcagattgaaaatcagcaaagcagtttactggatcttctccaggaaggatgtcaagcagagagcctgatgcaaagacgtgctgcattccgagcccaaaattctggagaaggcacaatggtggtaggtcttcctcaaggttttctgtctcagacgcagcaaacagctcagatgggagcagaacttcttacaagtgggagaggcagaggtttgggcttcagggtgggtttgtcacaaacccattagccgagccgaacatttcatctgcagggaaaacaatggttactcatgaaggcaggaagaaggataaaactttacaaaagtgaagggcgggttaggcatgatgaagacattctgttccaagcgtgaactgctcgagtttgcttattatcatggaggcggctgtagttctcttttccaccgcgacctcttttttttcctaaggaacgtacattgtcatttttggaagcttctgaaagcatggcgtgcgcgtgaactatggatgtatgagtcactccgaagctaaactgtttgagtactatgctaagctgaggagctgcattcacatcatgtggtggagcgcgagggaggcttctttatcggacagcctcacttgtcaccgacgcaatcaggcacccccccaagccgtggactacgctgggtttggctttggcatgagaacgaccgctgtgtttgtcataagtcatatcgtaactagagaaacaagtagctttataatcacaatgtatcaccatcctacagaactatggatgcgtcttgtacataggccggataaagcgcttctatgttcccgagcgtcttttctttaccatgattccaaagtgtgtttttttccccttagtattaagaagaaaaataaggaggtagaagaaagtctgat

SEQ ID NO: 55896 - DNA, 759 bp, Zea Mays
cttgaattcaaccttcacatctggatgtcaggaagagatatcagggatgtgtgccaacaagctgaaagacactgggcgtcaaagttaataagggggcaggttccaaaagatgagaagggggagccgagtcttcctccaattgacgaatacctttcctgtgctgaacagagacgtaagtccttgcctggtagaacgagccagacatccaggtcccctgcccttaagttagcatgaggaatgtacctaccagtttacctttacatgttcatatatcacatatagtattaccgaatgtagttcagatggaagtatgtaggcggttctaaacagtttttgttatgcgacatatgctaatacttaggaaatgtgacatctatgatctatccaaattttgacgtcagcacacctaaaatttttggagaggaaagcttaagtgacagatacatggatttcttgtgttgttttttctaaactaacgtacagagattatcaacgtacaagtgaatatcatgtttgagtgccagtttcatctcttaagatgaacatttggtacaaatttgtattgcccaagcaactctgaagctagtaattttgacatactgtgtttttctggtcaaattttgtagtcatcgctcatatgtctttatttatagttttgtacatattagattggatataaagatgatagctatggacatgtctcgagaagtaattcctggtgatcatcttaatttggagacttgtgagttgcaaaaggta

SEQ ID NO: 55897 - DNA, 1646 bp, Zea Mays
taattgcaatgtatcacaccttatcgttgatcttgtaacacatattggacttgaggcagaacaacatggtggtggctcagaggttttagtgcgtgcttgggacaggaaattgaattcatcaagcctgggagttttagtttgaaagaacttgaggctttgataagtgctttaaaaatagcctctgaaaaggggtcatcagggaaaaacacaccaagaaaaggaaatggtcaaagatccaagcatttgccctctttggagaaagttgtatctgatttagaggctatgggtgttagagtctatggatttgatgaaacatcaagtgttccaatggatggcactgtaatctgggagaaccttgcaggatatgaacctcagaaaagggaaatagaggatactgtactcttagctttacagagtcctgaagtgtatgatgatattgctcgcggcacgcgctgcaaatttgagacaaatagacctcgcgctgttctttttgagggcccacctgggacaggcaagacatcttcagctcgagttattgccaaacaagcaggaattccactactatatgtgccacttgaagttgttatgtcaaaatattatggcgaaagtgagcgtctattgggatctgttttttcacttgcaaatgatcttcctgaaggaggtggattcttttgctattgctcgagacagtgaaattcatgaagctacacgaagaatcttgtcagtaattctgcgacagatcgatgggtttgagcaggatagacgggtggtagtcattgctgcaacaaatagaaaggaggaccttgatccagctctcatcagatcagcaaactcgtgtggaaatagctgcacagtatgccaagcatttgactagatcagaattggttcaattttcattggccactcaagagatgtcaggaagagatatcagggatgtgtgccaacaagctgaaagacactgggcgtcaaagttaataagggggcaggttccaaaagatgagaagggggagccgagtcttcctccaattgacgaatacctttcctgtgctgaacagagacgtaagtccttgcctggtagaacgagccagacatccaggtcccctgcccttaagttagcatgaggaatgtacctaccagtttacctttacatgttcatatatcacatatagtattaccgaatgtagttcagatggaagtatgtaggcggttctaaacagtttttgttatgcgacatatgctaatacttaggaaatgtgacatctatgatctatccaaattttgacgtcagcacacctaaaatttttggagaggaaagcttaagtgacagatacatggatttcttgtgttgttttttctaaactaacgtacagagattatcaacgtacaagtgaatatcatgtttgagtgccagtttcatctcttaagatgaacatttggtacaaatttgtattgcccaagcaactctgaagctagtaattttgacatactgtgtttttctggtcaaattttgtagtcatcgctcatatgtctttatttatagttttgtacatattagattggatataaagatgatagctatggacatgtctcgagaagtaattcctggtgatcatcttaatttggagacttgtgagttgcaaaaggta

SEQ ID NO: 55898 - DNA, 1958 bp, Zea Mays
gagcggtcgacacagtagcgagtgccgatcccgcggttggggaggatttggcccgcaaggagaggaagaggatattggagcttgtccagagccgagggatgcagcgcgggtcatacccgaagtttgatgttgcagtgaagggccagaagaggtggttgttaaattcaacatgccatctaattgcaatgtatcacaccttatcgttgatcttgtaacacatattggacttgaggcagaacaacatggtggtggctcagaggttttagtgcgtgcttgggacagtccagctgcacgtcaaatcacactgaaccctcccaagaagactagcactggagatcacaatgaagatggtctctgtgttctgatatttgaaccacttattggatcagattattctgaaattgaattcatcaagcctgggagttttagtttgaaagaacttgaggctttgataagtgctttaaaaatagcctctgaaaaggggtcatcagggaaaaacacaccaagaaaaggaaatggtcaaagatccaagcatttgccctctttggagaaagttgtatctgatttagaggctatgggtgttagagtctatggatttgatgaaacatcaagtgttccaatggatggcactgtaatctgggagaaccttgcaggatatgaacctcagaaaagggaaatagaggatactgtactcttagctttacagagtcctgaagtgtatgatgatattgctcgcggcacgcgctgcaaatttgagacaaatagacctcgcgctgttctttttgagggcccacctgggacaggcaagacatcttcagctcgagttattgccaaacaagcaggaattccactactatatgtgccacttgaagttgttatgtcaaaatattatggcgaaagtgagcgtctattgggatctgttttttcacttgcaaatgatcttcctgaaggaggtattatattcctagatgaggtggattcttttgctattgctcgagacagtgaaattcatgaagctacacgaagaatcttgtcagtaattctgcgacagatcgatgggtttgagcaggatagacgggtggtagtcattgctgcaacaaatagaaaggaggaccttgatccagctctcatcagatcagcaaactcgtgtggaaatagctgcacagtatgccaagcatttgactagatcagaattggttcaattttcattggccactcaagagatgtcaggaagagatatcagggatgtgtgccaacaagctgaaagacactgggcgtcaaagttaataagggggcaggttccaaaagatgagaagggggagccgagtcttcctccaattgacgaatacctttcctgtgctgaacagagacgtaagtccttgcctggtagaacgagccagacatccaggtcccctgcccttaagttagcatgaggaatgtacctaccagtttacctttacatgttcatatatcacatatagtattaccgaatgtagttcagatggaagtatgtaggcggttctaaacagtttttgttatgcgacatatgctaatacttaggaaatgtgacatctatgatctatccaaattttgacgtcagcacacctaaaatttttggagaggaaagcttaagtgacagatacatggatttcttgtgttgttttttctaaactaacgtacagagattatcaacgtacaagtgaatatcatgtttgagtgccagtttcatctcttaagatgaacatttggtacaaatttgtattgcccaagcaactctgaagctagtaattttgacatactgtgtttttctggtcaaattttgtagtcatcgctcatatgtctttatttatagttttgtacatattagattggatataaagatgatagctatggacatgtctcgagaagtaattcctggtgatcatcttaatttggagacttgtgagttgcaaaaggta

SEQ ID NO: 55899 - DNA, 2290 bp, Zea Mays
ctggcatcgccgtcccggcctcgagccatccacgttccacggtctcgaactcgaagcccagcaccacgcgaccacgagccgcccttctccggcggcgtcgcagtgagcccggcatggccatgctactccgccgccgactcccgctgctccgcctcctccggccgctgcatactggatcgatggcttcgatctcttcgtcctccacacctccccctccccctccccctcctcttcagaaacctcacgccgccttcgtggggccaagatcacgccgcctgcggttccccaatgccgcgcccgttgagtcggggcggggggctgggaaatcatctcccgctgccgcctatctcgctatgggcgcggccgccgccctcgcgtcactgccggtggcctacgcagacagcaatgagcagggagcggtcgacacagtagcgagtgccgatcccgcggttggggaggatttggcccgcaaggagaggaagaggatattggagcttgtccagagccgagggatgcagcgcgggtcatacccgaagtttgatgttgcagtgaagggccagaaggtggttgttaaattcaacatgccatctaattgcaatgtatcacaccttatcgttgatcttgtaacacatattggacttgaggcagaacaacatggtggtggctcagaggttttagtgcgtgcttgggacaggaaattgaattcatcaagcctgggagttttagtttgaaagaacttgaggctttgataagtgctttaaaaatagcctctgaaaaggggtcatcagggaaaaacacaccaagaaaaggaaatggtcaaagatccaagcatttgccctctttggagaaagttgtatctgatttagaggctatgggtgttagagtctatggatttgatgaaacatcaagtgttccaatggatggcactgtaatctgggagaaccttgcaggatatgaacctcagaaaagggaaatagaggatactgtactcttagctttacagagtcctgaagtgtatgatgatattgctcgcggcacgcgctgcaaatttgagacaaatagacctcgcgctgttctttttgagggcccacctgggacaggcaagacatcttcagctcgagttattgccaaacaagcaggaattccactactatatgtgccacttgaagttgttatgtcaaaatattatggcgaaagtgagcgtctattgggatctgttttttcacttgcaaatgatcttcctgaaggaggtattatattcctagatgaggtggattcttttgctattgctcgagacagtgaaattcatgaagctacacgaagaatcttgtcagtaattctgcgacagatcgatgggtttgagcaggatagacgggtggtagtcattgctgcaacaaatagaaaggaggaccttgatccagctctcatcagccgttttgattcaatcatctgttttggcttaccagatcagcaaactcgtgtggaaatagctgcacagtatgccaagcatttgactagatcagaattggttcaattttcattggccactcaagagatgtcaggaagagatatcagggatgtgtgccaacaagctgaaagacactgggcgtcaaagttaataagggggcaggttccaaaagatgagaagggggagccgagtcttcctccaattgacgaatacctttcctgtgctgaacagagacgtaagtccttgcctggtagaacgagccagacatccaggtcccctgcccttaagttagcatgaggaatgtacctaccagtttacctttacatgttcatatatcacatatagtattaccgaatgtagttcagatggaagtatgtaggcggttctaaacagtttttgttatgcgacatatgctaatacttaggaaatgtgacatctatgatctatccaaattttgacgtcagcacacctaaaatttttggagaggaaagcttaagtgacagatacatggatttcttgtgttgttttttctaaactaacgtacagagattatcaacgtacaagtgaatatcatgtttgagtgccagtttcatctcttaagatgaacatttggtacaaatttgtattgcccaagcaactctgaagctagtaattttgacatactgtgtttttctggtcaaattttgtagtcatcgctcatatgtctttatttatagttttgtacatattagattggatataaagatgatagctatggacatgtctcgagaagtaattcctggtgatcatcttaatttggagacttgtgagttgcaaaaggta

SEQ ID NO: 55900 - DNA, 2255 bp, Zea Mays
ctggcatcgccgtcccggcctcgagccatccacgttccacggtctcgaactcgaagcccagcaccacgcgaccacgagccgcccttctccggcggcgtcgcagtgagcccggcatggccatgctactccgccgccgactcccgctgctccgcctcctccggccgctgcatactggatcgatggcttcgatctcttcgtcctccacacctccccctccccctccccctcctcttcagaaacctcacgccgccttcgtggggccaagatcacgccgcctgcggttccccaatgccgcgcccgttgagtcggggcggggggctgggaaatcatctcccgctgccgcctatctcgctatgggcgcggccgccgccctcgcgtcactgccggtggcctacgcagacagcaatgagcagggagcggtcgacacagtagcgagtgccgatcccgcggttggggaggatttggcccgcaaggagaggaagaggatattggagcttgtccagagccgagggatgcagcgcgggtcatacccgaagtttgatgttgcagtgaagggccagaaggtggttgttaaattcaacatgccatctaattgcaatgtatcacaccttatcgttgatcttgtaacacatattggacttgaggcagaacaacatggtggtggctcagaggttttagtgcgtgcttgggacaggaaattgaattcatcaagcctgggagttttagtttgaaagaacttgaggctttgataagtgctttaaaaatagcctctgaaaaggggtcatcagggaaaaacacaccaagaaaaggaaatggtcaaagatccaagcatttgccctctttggagaaagttgtatctgatttagaggctatgggtgttagagtctatggatttgatgaaacatcaagtgttccaatggatggcactgtaatctgggagaaccttgcaggatatgaacctcagaaaagggaaatagaggatactgtactcttagctttacagagtcctgaagtgtatgatgatattgctcgcggcacgcgctgcaaatttgagacaaatagacctcgcgctgttctttttgagggcccacctgggacaggcaagacatcttcagctcgagttattgccaaacaagcaggaattccactactatatgtgccacttgaagttgttatgtcaaaatattatggcgaaagtgagcgtctattgggatctgttttttcacttgcaaatgatcttcctgaaggaggtattatattcctagatgaggtggattcttttgctattgctcgagacagtgaaattcatgaagctacacgaagaatcttgtcagtaattctgcgacagatcgatgggtttgagcaggatagacgggtggtagtcattgctgcaacaaatagaaaggaggaccttgatccagctctcatcagatcagcaaactcgtgtggaaatagctgcacagtatgccaagcatttgactagatcagaattggttcaattttcattggccactcaagagatgtcaggaagagatatcagggatgtgtgccaacaagctgaaagacactgggcgtcaaagttaataagggggcaggttccaaaagatgagaagggggagccgagtcttcctccaattgacgaatacctttcctgtgctgaacagagacgtaagtccttgcctggtagaacgagccagacatccaggtcccctgcccttaagttagcatgaggaatgtacctaccagtttacctttacatgttcatatatcacatatagtattaccgaatgtagttcagatggaagtatgtaggcggttctaaacagtttttgttatgcgacatatgctaatacttaggaaatgtgacatctatgatctatccaaattttgacgtcagcacacctaaaatttttggagaggaaagcttaagtgacagatacatggatttcttgtgttgttttttctaaactaacgtacagagattatcaacgtacaagtgaatatcatgtttgagtgccagtttcatctcttaagatgaacatttggtacaaatttgtattgcccaagcaactctgaagctagtaattttgacatactgtgtttttctggtcaaattttgtagtcatcgctcatatgtctttatttatagttttgtacatattagattggatataaagatgatagctatggacatgtctcgagaagtaattcctggtgatcatcttaatttggagacttgtgagttgcaaaaggta

SEQ ID NO: 55901 - DNA, 2365 bp, Zea Mays
ctggcatcgccgtcccggcctcgagccatccacgttccacggtctcgaactcgaagcccagcaccacgcgaccacgagccgcccttctccggcggcgtcgcagtgagcccggcatggccatgctactccgccgccgactcccgctgctccgcctcctccggccgctgcatactggatcgatggcttcgatctcttcgtcctccacacctccccctccccctccccctcctcttcagaaacctcacgccgccttcgtggggccaagatcacgccgcctgcggttccccaatgccgcgcccgttgagtcggggcggggggctgggaaatcatctcccgctgccgcctatctcgctatgggcgcggccgccgccctcgcgtcactgccggtggcctacgcagacagcaatgagcagggagcggtcgacacagtagcgagtgccgatcccgcggttggggaggatttggcccgcaaggagaggaagaggatattggagcttgtccagagccgagggatgcagcgcgggtcatacccgaagtttgatgttgcagtgaagggccagaaggtggttgttaaattcaacatgccatctaattgcaatgtatcacaccttatcgttgatcttgtaacacatattggacttgaggcagaacaacatggtggtggctcagaggttttagtgcgtgcttgggacagctgcacgtcaaatcacactgaaccctcccaagaagactagcactggagatcacaatgaagatggtctctgtgttctgatatttgaaccacttattggatcagattattctgaaattgaattcatcaagcctgggagttttagtttgaaagaacttgaggctttgataagtgctttaaaaatagcctctgaaaaggggtcatcagggaaaaacacaccaagaaaaggaaatggtcaaagatccaagcatttgccctctttggagaaagttgtatctgatttagaggctatgggtgttagagtctatggatttgatgaaacatcaagtgttccaatggatggcactgtaatctgggagaaccttgcaggatatgaacctcagaaaagggaaatagaggatactgtactcttagctttacagagtcctgaagtgtatgatgatattgctcgcggcacgcgctgcaaatttgagacaaatagacctcgcgctgttctttttgagggcccacctgggacaggcaagacatcttcagctcgagttattgccaaacaagcaggaattccactactatatgtgccacttgaagttgttatgtcaaaatattatggcgaaagtgagcgtctattgggatctgttttttcacttgcaaatgatcttcctgaaggaggtattatattcctagatgaggtggattcttttgctattgctcgagacagtgaaattcatgaagctacacgaagaatcttgtcagtaattctgcgacagatcgatgggtttgagcaggatagacgggtggtagtcattgctgcaacaaatagaaaggaggaccttgatccagctctcatcagatcagcaaactcgtgtggaaatagctgcacagtatgccaagcatttgactagatcagaattggttcaattttcattggccactcaagagatgtcaggaagagatatcagggatgtgtgccaacaagctgaaagacactgggcgtcaaagttaataagggggcaggttccaaaagatgagaagggggagccgagtcttcctccaattgacgaatacctttcctgtgctgaacagagacgtaagtccttgcctggtagaacgagccagacatccaggtcccctgcccttaagttagcatgaggaatgtacctaccagtttacctttacatgttcatatatcacatatagtattaccgaatgtagttcagatggaagtatgtaggcggttctaaacagtttttgttatgcgacatatgctaatacttaggaaatgtgacatctatgatctatccaaattttgacgtcagcacacctaaaatttttggagaggaaagcttaagtgacagatacatggatttcttgtgttgttttttctaaactaacgtacagagattatcaacgtacaagtgaatatcatgtttgagtgccagtttcatctcttaagatgaacatttggtacaaatttgtattgcccaagcaactctgaagctagtaattttgacatactgtgtttttctggtcaaattttgtagtcatcgctcatatgtctttatttatagttttgtacatattagattggatataaagatgatagctatggacatgtctcgagaagtaattcctggtgatcatcttaatttggagacttgtgagttgcaaaaggta

SEQ ID NO: 55902 - DNA, 2422 bp, Zea Mays
gggaaagcccagctgcgaaactctggccgcgaactctctggcatcgccgtcccggcctcgagccatccacgttccacggtctcgaactcgaagcccagcaccacgcgaccacgagccgcccttctccggcggcgtcgcagtgagcccggcatggccatgctactccgccgccgactcccgctgctccgcctcctccggccgctgcatactggatcgatggcttcgatctcttcgtcctccacacctccccctccccctccccctcctcttcagaaacctcacgccgccttcgtggggccaagatcacgccgcctgcggttccccaatgccgcgcccgttgagtcggggcggggggctgggaaatcatctcccgctgccgcctatctcgctatgggcgcggccgccgccctcgcgtcactgccggtggcctacgcagacagcaatgagcagggagcggtcgacacagtagcgagtgccgatcccgcggttggggaggatttggcccgcaaggagaggaagaggatattggagcttgtccagagccgagggatgcagcgcgggtcatacccgaagtttgatgttgcagtgaagggccagaaggtggttgttaaattcaacatgccatctaattgcaatgtatcacaccttatcgttgatcttgtaacacatattggacttgaggcagaacaacatggtggtggctcagaggttttagtgcgtgcttgggacagtccagctgcacgtcaaatcacactgaaccctcccaagaagactagcactggagatcacaatgaagatggtctctgtgttctgatatttgaaccacttattggatcagattattctgaaattgaattcatcaagcctgggagttttagtttgaaagaacttgaggctttgataagtgctttaaaaatagcctctgaaaaggggtcatcagggaaaaacacaccaagaaaaggaaatggtcaaagatccaagcatttgccctctttggagaaagttgtatctgatttagaggctatgggtgttagagtctatggatttgatgaaacatcaagtgttccaatggatggcactgtaatctgggagaaccttgcaggatatgaacctcagaaaagggaaatagaggatactgtactcttagctttacagagtcctgaagtgtatgatgatattgctcgcggcacgcgctgcaaatttgagacaaatagacctcgcgctgttctttttgagggcccacctgggacaggcaagacatcttcagctcgagttattgccaaacaagcaggaattccactactatatgtgccacttgaagttgttatgtcaaaatattatggcgaaagtgagcgtctattgggatctgttttttcacttgcaaatgatcttcctgaaggaggtggattcttttgctattgctcgagacagtgaaattcatgaagctacacgaagaatcttgtcagtaattctgcgacagatcgatgggtttgagcaggatagacgggtggtagtcattgctgcaacaaatagaaaggaggaccttgatccagctctcatcagccgttttgattcaatcatctgttttggcttaccagatcagcaaactcgtgtggaaatagctgcacagtatgccaagcatttgactagatcagaattggttcaattttcattggccactcaagagatgtcaggaagagatatcagggatgtgtgccaacaagctgaaagacactgggcgtcaaagttaataagggggcaggttccaaaagatgagaagggggagccgagtcttcctccaattgacgaatacctttcctgtgctgaacagagacgtaagtccttgcctggtagaacgagccagacatccaggtcccctgcccttaagttagcatgaggaatgtacctaccagtttacctttacatgttcatatatcacatatagtattaccgaatgtagttcagatggaagtatgtaggcggttctaaacagtttttgttatgcgacatatgctaatacttaggaaatgtgacatctatgatctatccaaattttgacgtcagcacacctaaaatttttggagaggaaagcttaagtgacagatacatggatttcttgtgttgttttttctaaactaacgtacagagattatcaacgtacaagtgaatatcatgtttgagtgccagtttcatctcttaagatgaacatttggtacaaatttgtattgcccaagcaactctgaagctagtaattttgacatactgtgtttttctggtcaaattttgtagtcatcgctcatatgtctttatttatagttttgtacatattagattggatataaagatgatagctatggacatgtctcgagaagtaattcctggtgatcatcttaatttggagacttgtgagttgcaaaaggta

SEQ ID NO: 55903 - DNA, 2825 bp, Zea Mays
ggggggaaagcccagctgcgaaactctggccgcgaactctctggcatcgccgtcccggcctcgagccatccacgttccacggtctcgaactcgaagcccagcaccacgcgaccacgagccgcccttctccggcggcgtcgcagtgagcccggcatggccatgctactccgccgccgactcccgctgctccgcctcctccggccgctgcatactggatcgatggcttcgatctcttcgtcctccacacctccccctccccctccccctcctcttcagaaacctcacgccgccttcgtggggccaagatcacgccgcctgcggttccccaatgccgcgcccgttgagtcggggcggggggctgggaaatcatctcccgctgccgcctatctcgctatgggcgcggccgccgccctcgcgtcactgccggtggcctacgcagacagcaatgagcagggagcggtcgacacagtagcgagtgccgatcccgcggttggggaggatttggcccgcaaggagaggaagaggatattggagcttgtccagagccgagggatgcagcgcgggtcatacccgaagtttgatgttgcagtgaagggccagaaggtggttgttaaattcaacatgccatctaattgcaatgtatcacaccttatcgttgatcttgtaacacatattggacttgaggcagaacaacatggtggtggctcagaggttttagtgcgtgcttgggacagtccagctgcacgtcaaatcacactgaaccctcccaagaagactagcactggagatcacaatgaagatggtctctgtgttctgatatttgaaccacttattggatcagattattctgaaattgaattcatcaagcctgggagttttagtttgaaagaacttgaggctttgataagtgctttaaaaatagcctctgaaaaggggtcatcagggaaaaacacaccaagaaaaggaaatggtcaaagatccaagcatttgccctctttggagaaagttgtatctgatttagaggctatgggtgttagagtctatggatttgatgaaacatcaagtgttccaatggatggcactgtaatctgggagaaccttgcaggatatgaacctcagaaaaggcacgtgccaccagtttgctattccttcccttttcttaaccagttgtttaatgtaccattaggataactgacaaatttccaataaccaaaaaccgctgtggtttacacacaaaaaatatataacatatttttgagaacagtaaagttcaaatattacccaattgccaatttaatgtgtatatacatctgtgtctaatcagaaggaacaatttattgacacatttatgttttttttgctaatttttagagatgaagcctcaaattcattgttgttatattttggcttcctgttagtcttattacttactagacaaatgattttgtgtactctattctgaaatcattgtctttaagcttgaaaagtttttcttctaatatagggaaatagaggatactgtactcttagctttacagagtcctgaagtgtatgatgatattgctcgcggcacgcgctgcaaatttgagacaaatagacctcgcgctgttctttttgagggcccacctgggacaggcaagacatcttcagctcgagttattgccaaacaagcaggaattccactactatatgtgccacttgaagttgttatgtcaaaatattatggcgaaagtgagcgtctattgggatctgttttttcacttgcaaatgatcttcctgaaggaggtattatattcctagatgaggtggattcttttgctattgctcgagacagtgaaattcatgaagctacacgaagaatcttgtcagtaattctgcgacagatcgatgggtttgagcaggatagacgggtggtagtcattgctgcaacaaatagaaaggaggaccttgatccagctctcatcagccgttttgattcaatcatctgttttggcttaccagatcagcaaactcgtgtggaaatagctgcacagtatgccaagcatttgactagatcagaattggttcaattttcattggccactcaagagatgtcaggaagagatatcagggatgtgtgccaacaagctgaaagacactgggcgtcaaagttaataagggggcaggttccaaaagatgagaagggggagccgagtcttcctccaattgacgaatacctttcctgtgctgaacagagacgtaagtccttgcctggtagaacgagccagacatccaggtcccctgcccttaagttagcatgaggaatgtacctaccagtttacctttacatgttcatatatcacatatagtattaccgaatgtagttcagatggaagtatgtaggcggttctaaacagtttttgttatgcgacatatgctaatacttaggaaatgtgacatctatgatctatccaaattttgacgtcagcacacctaaaatttttggagaggaaagcttaagtgacagatacatggatttcttgtgttgttttttctaaactaacgtacagagattatcaacgtacaagtgaatatcatgtttgagtgccagtttcatctcttaagatgaacatttggtacaaatttgtattgcccaagcaactctgaagctagtaattttgacatactgtgtttttctggtcaaattttgtagtcatcgctcatatgtctttatttatagttttgtacatattagattggatataaagatgatagctatggacatgtctcgagaagtaattcctggtgatcatcttaatttggagacttgtgagttgcaaaaggta

SEQ ID NO: 55904 - DNA, 2790 bp, Zea Mays
ggggggaaagcccagctgcgaaactctggccgcgaactctctggcatcgccgtcccggcctcgagccatccacgttccacggtctcgaactcgaagcccagcaccacgcgaccacgagccgcccttctccggcggcgtcgcagtgagcccggcatggccatgctactccgccgccgactcccgctgctccgcctcctccggccgctgcatactggatcgatggcttcgatctcttcgtcctccacacctccccctccccctccccctcctcttcagaaacctcacgccgccttcgtggggccaagatcacgccgcctgcggttccccaatgccgcgcccgttgagtcggggcggggggctgggaaatcatctcccgctgccgcctatctcgctatgggcgcggccgccgccctcgcgtcactgccggtggcctacgcagacagcaatgagcagggagcggtcgacacagtagcgagtgccgatcccgcggttggggaggatttggcccgcaaggagaggaagaggatattggagcttgtccagagccgagggatgcagcgcgggtcatacccgaagtttgatgttgcagtgaagggccagaaggtggttgttaaattcaacatgccatctaattgcaatgtatcacaccttatcgttgatcttgtaacacatattggacttgaggcagaacaacatggtggtggctcagaggttttagtgcgtgcttgggacagtccagctgcacgtcaaatcacactgaaccctcccaagaagactagcactggagatcacaatgaagatggtctctgtgttctgatatttgaaccacttattggatcagattattctgaaattgaattcatcaagcctgggagttttagtttgaaagaacttgaggctttgataagtgctttaaaaatagcctctgaaaaggggtcatcagggaaaaacacaccaagaaaaggaaatggtcaaagatccaagcatttgccctctttggagaaagttgtatctgatttagaggctatgggtgttagagtctatggatttgatgaaacatcaagtgttccaatggatggcactgtaatctgggagaaccttgcaggatatgaacctcagaaaaggcacgtgccaccagtttgctattccttcccttttcttaaccagttgtttaatgtaccattaggataactgacaaatttccaataaccaaaaaccgctgtggtttacacacaaaaaatatataacatatttttgagaacagtaaagttcaaatattacccaattgccaatttaatgtgtatatacatctgtgtctaatcagaaggaacaatttattgacacatttatgttttttttgctaatttttagagatgaagcctcaaattcattgttgttatattttggcttcctgttagtcttattacttactagacaaatgattttgtgtactctattctgaaatcattgtctttaagcttgaaaagtttttcttctaatatagggaaatagaggatactgtactcttagctttacagagtcctgaagtgtatgatgatattgctcgcggcacgcgctgcaaatttgagacaaatagacctcgcgctgttctttttgagggcccacctgggacaggcaagacatcttcagctcgagttattgccaaacaagcaggaattccactactatatgtgccacttgaagttgttatgtcaaaatattatggcgaaagtgagcgtctattgggatctgttttttcacttgcaaatgatcttcctgaaggaggtattatattcctagatgaggtggattcttttgctattgctcgagacagtgaaattcatgaagctacacgaagaatcttgtcagtaattctgcgacagatcgatgggtttgagcaggatagacgggtggtagtcattgctgcaacaaatagaaaggaggaccttgatccagctctcatcagatcagcaaactcgtgtggaaatagctgcacagtatgccaagcatttgactagatcagaattggttcaattttcattggccactcaagagatgtcaggaagagatatcagggatgtgtgccaacaagctgaaagacactgggcgtcaaagttaataagggggcaggttccaaaagatgagaagggggagccgagtcttcctccaattgacgaatacctttcctgtgctgaacagagacgtaagtccttgcctggtagaacgagccagacatccaggtcccctgcccttaagttagcatgaggaatgtacctaccagtttacctttacatgttcatatatcacatatagtattaccgaatgtagttcagatggaagtatgtaggcggttctaaacagtttttgttatgcgacatatgctaatacttaggaaatgtgacatctatgatctatccaaattttgacgtcagcacacctaaaatttttggagaggaaagcttaagtgacagatacatggatttcttgtgttgttttttctaaactaacgtacagagattatcaacgtacaagtgaatatcatgtttgagtgccagtttcatctcttaagatgaacatttggtacaaatttgtattgcccaagcaactctgaagctagtaattttgacatactgtgtttttctggtcaaattttgtagtcatcgctcatatgtctttatttatagttttgtacatattagattggatataaagatgatagctatggacatgtctcgagaagtaattcctggtgatcatcttaatttggagacttgtgagttgcaaaaggta

SEQ ID NO: 55905 - DNA, 2404 bp, Zea Mays
gttctttcgtgggcggggggaaagcccagctgcgaaactctggccgcgaactctctggcatcgccgtcccggcctcgagccatccacgttccacggtctcgaactcgaagcccagcaccacgcgaccacgagccgcccttctccggcggcgtcgcagtgagcccggcatggccatgctactccgccgccgactcccgctgctccgcctcctccggccgctgcatactggatcgatggcttcgatctcttcgtcctccacacctccccctccccctccccctcctcttcagaaacctcacgccgccttcgtggggccaagatcacgccgcctgcggttccccaatgccgcgcccgttgagtcggggcggggggctgggaaatcatctcccgctgccgcctatctcgctatgggcgcggccgccgccctcgcgtcactgccggtggcctacgcagacagcaatgagcagggagcggtcgacacagtagcgagtgccgatcccgcggttggggaggatttggcccgcaaggagaggaagaggatattggagcttgtccagagccgagggatgcagcgcgggtcatacccgaagtttgatgttgcagtgaagggccagaaggtggttgttaaattcaacatgccatctaattgcaatgtatcacaccttatcgttgatcttgtaacacatattggacttgaggcagaacaacatggtggtggctcagaggttttagtgcgtgcttgggacagtccagctgcacgtcaaatcacactgaaccctcccaagaagactagcactggagatcacaatgaagatggtctctgtgttctgatatttgaaccacttattggatcagattattctgaaattgaattcatcaagcctgggagttttagtttgaaagaacttgaggctttgataagtgctttaaaaatagcctctgaaaaggggtcatcagggaaaaacacaccaagaaaaggaaatggtcaaagatccaagcatttgccctctttggagaaagttgtatctgatttagaggctatgggtgttagagtctatggatttgatgaaacatcaagtgttccaatggatggcactgtaatctgggagaaccttgcaggatatgaacctcagaaaagggaaatagaggatactgtactcttagctttacagagtcctgaagtgtatgatgatattgctcgcggcacgcgctgcaaatttgagacaaatagacctcgcgctgttctttttgagggcccacctgggacaggcaagacatcttcagctcgagttattgccaaacaagcaggaattccactactatatgtgccacttgaagttgttatgtcaaaatattatggcgaaagtgagcgtctattgggatctgttttttcacttgcaaatgatcttcctgaaggaggtggattcttttgctattgctcgagacagtgaaattcatgaagctacacgaagaatcttgtcagtaattctgcgacagatcgatgggtttgagcaggatagacgggtggtagtcattgctgcaacaaatagaaaggaggaccttgatccagctctcatcagatcagcaaactcgtgtggaaatagctgcacagtatgccaagcatttgactagatcagaattggttcaattttcattggccactcaagagatgtcaggaagagatatcagggatgtgtgccaacaagctgaaagacactgggcgtcaaagttaataagggggcaggttccaaaagatgagaagggggagccgagtcttcctccaattgacgaatacctttcctgtgctgaacagagacgtaagtccttgcctggtagaacgagccagacatccaggtcccctgcccttaagttagcatgaggaatgtacctaccagtttacctttacatgttcatatatcacatatagtattaccgaatgtagttcagatggaagtatgtaggcggttctaaacagtttttgttatgcgacatatgctaatacttaggaaatgtgacatctatgatctatccaaattttgacgtcagcacacctaaaatttttggagaggaaagcttaagtgacagatacatggatttcttgtgttgttttttctaaactaacgtacagagattatcaacgtacaagtgaatatcatgtttgagtgccagtttcatctcttaagatgaacatttggtacaaatttgtattgcccaagcaactctgaagctagtaattttgacatactgtgtttttctggtcaaattttgtagtcatcgctcatatgtctttatttatagttttgtacatattagattggatataaagatgatagctatggacatgtctcgagaagtaattcctggtgatcatcttaatttggagacttgtgagttgcaaaaggta

SEQ ID NO: 55906 - DNA, 2424 bp, Zea Mays
gttctttcgtgggcggggggaaagcccagctgcgaaactctggccgcgaactctctggcatcgccgtcccggcctcgagccatccacgttccacggtctcgaactcgaagcccagcaccacgcgaccacgagccgcccttctccggcggcgtcgcagtgagcccggcatggccatgctactccgccgccgactcccgctgctccgcctcctccggccgctgcatactggatcgatggcttcgatctcttcgtcctccacacctccccctccccctccccctcctcttcagaaacctcacgccgccttcgtggggccaagatcacgccgcctgcggttccccaatgccgcgcccgttgagtcggggcggggggctgggaaatcatctcccgctgccgcctatctcgctatgggcgcggccgccgccctcgcgtcactgccggtggcctacgcagacagcaatgagcagggagcggtcgacacagtagcgagtgccgatcccgcggttggggaggatttggcccgcaaggagaggaagaggatattggagcttgtccagagccgagggatgcagcgcgggtcatacccgaagtttgatgttgcagtgaagggccagaaggtggttgttaaattcaacatgccatctaattgcaatgtatcacaccttatcgttgatcttgtaacacatattggacttgaggcagaacaacatggtggtggctcagaggttttagtgcgtgcttgggacagtccagctgcacgtcaaatcacactgaaccctcccaagaagactagcactggagatcacaatgaagatggtctctgtgttctgatatttgaaccacttattggatcagattattctgaaattgaattcatcaagcctgggagttttagtttgaaagaacttgaggctttgataagtgctttaaaaatagcctctgaaaaggggtcatcagggaaaaacacaccaagaaaaggaaatggtcaaagatccaagcatttgccctctttggagaaagttgtatctgatttagaggctatgggtgttagagtctatggatttgatgaaacatcaagtgttccaatggatggcactgtaatctgggagaaccttgcaggatatgaacctcagaaaagggaaatagaggatactgtactcttagctttacagagtcctgaagtgtatgatgatattgctcgcggcacgcgctgcaaatttgagacaaatagacctcgcgctgttctttttgagggcccacctgggacaggcaagacatcttcagctcgagttattgccaaacaagcaggaattccactactatatgtgccacttgaagttgttatgtcaaaatattatggcgaaagtgagcgtctattgggatctgttttttcacttgcaaatgatcttcctgaaggaggtattatattcctagatgaggtggattcttttgctattgctcgagacagtgaaattcatgaagctacacgaagaatcttgtcagtaattctgcgacagatcgatgggtttgagcaggatagacgggtggtagtcattgctgcaacaaatagaaaggaggaccttgatccagctctcatcagatcagcaaactcgtgtggaaatagctgcacagtatgccaagcatttgactagatcagaattggttcaattttcattggccactcaagagatgtcaggaagagatatcagggatgtgtgccaacaagctgaaagacactgggcgtcaaagttaataagggggcaggttccaaaagatgagaagggggagccgagtcttcctccaattgacgaatacctttcctgtgctgaacagagacgtaagtccttgcctggtagaacgagccagacatccaggtcccctgcccttaagttagcatgaggaatgtacctaccagtttacctttacatgttcatatatcacatatagtattaccgaatgtagttcagatggaagtatgtaggcggttctaaacagtttttgttatgcgacatatgctaatacttaggaaatgtgacatctatgatctatccaaattttgacgtcagcacacctaaaatttttggagaggaaagcttaagtgacagatacatggatttcttgtgttgttttttctaaactaacgtacagagattatcaacgtacaagtgaatatcatgtttgagtgccagtttcatctcttaagatgaacatttggtacaaatttgtattgcccaagcaactctgaagctagtaattttgacatactgtgtttttctggtcaaattttgtagtcatcgctcatatgtctttatttatagttttgtacatattagattggatataaagatgatagctatggacatgtctcgagaagtaattcctggtgatcatcttaatttggagacttgtgagttgcaaaaggta

SEQ ID NO: 55907 - DNA, 1715 bp, Zea Mays
ctggcatcgccgtcccggcctcgagccatccacgttccacggtctcgaactcgaagcccagcaccacgcgaccacgagccgcccttctccggcggcgtcgcagtgagcccggcatggccatgctactccgccgccgactcccgctgctccgcctcctccggccgctgcatactggatcgatggcttcgatctcttcgtcctccacacctccccctccccctccccctcctcttcagaaacctcacgccgccttcgtggggccaagatcacgccgcctgcggttccccaatgccgcgcccgttgagtcggggcggggggctgggaaatcatctcccgctgccgcctatctcgctatgggcgcggccgccgccctcgcgtcactgccggtggcctacgcagacagcaatgagcagggagcggtcgacacagtagcgagtgccgatcccgcggttggggaggatttggcccgcaaggagaggaagaggatattggagcttgtccagagccgagggatgcagcgcgggtcatacccgaagtttgatgttgcagtgaagggccagaaggtggttgttaaattcaacatgccatctaattgcaatgtatcacaccttatcgttgatcttgtaacacatattggacttgaggcagaacaacatggtggtggctcagaggttttagtgcgtgcttgggacagtccagctgcacgtcaaatcacactgaaccctcccaagaagactagcactggagatcacaatgaagatggtctctgtgttctgatatttgaaccacttattggatcagattattctgaaattgaattcatcaagcctgggagttttagtttgaaagaacttgaggctttgataagtgctttaaaaatagcctctgaaaaggggtcatcagggaaaaacacaccaagaaaaggaaatggtcaaagatccaagcatttgccctctttggagaaagttgtatctgatttagaggctatgggtgttagagtctatggatttgatgaaacatcaagtgttccaatggatggcactgtaatctgggagaaccttgcaggatatgaacctcagaaaagggaaatagaggatactgtactcttagctttacagagtcctgaagtgtatgatgatattgctcgcggcacgcgctgcaaatttgagacaaatagacctcgcgctgttctttttgagggcccacctgggacaggcaagacatcttcagctcgagttattgccaaacaagcaggaattccactactatatgtgccacttgaagttgttatgtcaaaatattatggcgaaagtgagcgtctattgggatctgttttttcacttgcaaatgatcttcctgaaggaggtattatattcctagatgaggtggattcttttgctattgctcgagacagtgaaattcatgaagctacacgaagaatcttgtcagtaattctgcgacagatcgatgggtttgagcaggatagacgggtggtagtcattgctgcaacaaatagaaaggaggaccttgatccagctctcatcagccgttttgattcaatcatctgttttggcttaccagatcagcaaactcgtgtggaaatagctgcacagtatgccaagcatttgactagatcagaattggttcaattttcattggccactcaagatttttacagattggtctacccatattcttggttagccagtgaggat

SEQ ID NO: 55908 - DNA, 1778 bp, Zea Mays
aaagcccagctgcgaaactctggccgcgaactctctggcatcgccgtcccggcctcgagccatccacgttccacggtctcgaactcgaagcccagcaccacgcgaccacgagccgcccttctccggcggcgtcgcagtgagcccggcatggccatgctactccgccgccgactcccgctgctccgcctcctccggccgctgcatactggatcgatggcttcgatctcttcgtcctccacacctccccctccccctccccctcctcttcagaaacctcacgccgccttcgtggggccaagatcacgccgcctgcggttccccaatgccgcgcccgttgagtcggggcggggggctgggaaatcatctcccgctgccgcctatctcgctatgggcgcggccgccgccctcgcgtcactgccggtggcctacgcagacagcaatgagcagggagcggtcgacacagtagcgagtgccgatcccgcggttggggaggatttggcccgcaaggagaggaagaggatattggagcttgtccagagccgagggatgcagcgcgggtcatacccgaagtttgatgttgcagtgaagggccagaaggtggttgttaaattcaacatgccatctaattgcaatgtatcacaccttatcgttgatcttgtaacacatattggacttgaggcagaacaacatggtggtggctcagaggttttagtgcgtgcttgggacagtccagctgcacgtcaaatcacactgaaccctcccaagaagactagcactggagatcacaatgaagatggtctctgtgttctgatatttgaaccacttattggatcagattattctgttagttattttcgacccttcattgatgactctgaaaagaagtttattctgttatttccctttatatcatgatccttttttcaggaaattgaattcatcaagcctgggagttttagtttgaaagaacttgaggctttgataagtgctttaaaaatagcctctgaaaaggggtcatcagggaaaaacacaccaagaaaaggaaatggtcaaagatccaagcatttgccctctttggagaaagttgtatctgatttagaggctatgggtgttagagtctatggatttgatgaaacatcaagtgttccaatggatggcactgtaatctgggagaaccttgcaggatatgaacctcagaaaagggaaatagaggatactgtactcttagctttacagagtcctgaagtgtatgatgatattgctcgcggcacgcgctgcaaatttgagacaaatagacctcgcgctgttctttttgagggcccacctgggacaggcaagacatcttcagctcgagttattgccaaacaagcaggaattccactactatatgtgccacttgaagttgttatgtcaaaatattatggcgaaagtgagcgtctattgggatctgttttttcacttgcaaatgatcttcctgaaggaggtggattcttttgctattgctcgagacagtgaaattcatgaagctacacgaagaatcttgtcagtaattctgcgacagatcgatgggtttgagcaggatagacgggtggtagtcattgctgcaacaaatagaaaggaggaccttgatccagctctcatcagatcagcaaactcgtgtggaaatagctgcacagtatgccaagcatttgactagatcagaattggttcaattttcattggccactcaagatttttacagattggtctacccatattcttggttagccagtgaggat

SEQ ID NO: 55909 - DNA, 674 bp, Zea Mays
ccagaggtgacgaaggcggtgcaggcgaggaagcaggacaagcagaggaaagcgcagcagcagctgctggagccgaggcagggccagggcgtggcgagtggcgccgcggccgaggaggaggacgacgacgacgaggcagccttggacgccagccttgatcagttggcgcggcaggacaacggcagccggagctccagtgcgcggcaccggcaatggcggccgtcgctgcagagcatcgacgaggccacgacctgagatgtcagctccatacagccgtagcgccgtaatcattgactaccggtgggcctgtactttcggcgatcacctggcctcggtcagttcatcgcaagggttgctatttggcctactgctacgattgcacactgtggagtggagtgagttgggagcttgacaccccgggatgagagggcactgcttcggatgcagcatgtagcctcggatccgtgtaaattttcaggtcttggtcaggagtttgttagtgagactgctttgcttcttcttcttcttattttctctcgatccatacggtttgcacatggaattatatcagtaacaaattagagtagcttactattagatttacagccagacatgtcatgtacttgctgctactctcttgcagatgggaatcgagcgtgtagccttttgagagt

SEQ ID NO: 55910 - DNA, 2102 bp, Zea Mays
cgcctttttgaccgcgtccgcctgccgccctgtcctgtacccctccctccctcccccctcctccccttcacagtgtcacacgcacttctcgttctcgccgatccagtgccactacactacaatactactgcgcggtagcgctcgcactcgcaccacaccacgccaccgctgctgcctgctcctcacagtcctccccgcgctcgcattgcgattcgcgacctagcgcgagggtacggggggtggtgcgcgcgcgtgctcggtgatccgggaagcgccgcgagatggccgggggcggaggcggcggtgccgcgccgaagcacgacgacttcacgccgcaccccgtcaaggaccagctccctggggtctcctactgcatcaccagccctcccccgtggcctgaagccgttcttcttgggttccaacattatctggtcatgcttggtaccactgtgatcataccaactgcacttgttccacaaatgggaggaaacaatgaggacaaagcagtggttatccagacattgctgttcgttgcaggtatcaacaccctcctgcagagtttctttggtaccatgttgcctgcagtgatcggcgggtcatacacctttgttctgcctaccatttcgatcatccttgctggacgttatgctaatgaacctaatccacatattaaatttctccgcatcatgcgtgggacacaaggtgcgttgattgtggcttcagccttacagattatagttggcttcagtggcctttggcgtaatgttgccaggtatctgagtccactttcagctgctcctttggtggcactagttggatttggactgtatgagctaggatttccatcggtcgccaaatgtgttgagattggtctacctcaactcatccttcttgtgatctttacaatgtacctgccacatgctgttcacatgctgaagtctatcttcgatcgatttgctgtcctgttcactatccccatagtgtggctctatgcatatcttctcactgttggaggagcatacaggaatgcaccaccaaagactcaatttcattgccgcactgaccgttctggattaattggtggcgcaccctggataagagtaccatatccttttcagtggggtgctccaacttttgatgcgggtgaagctttcgcgatgatggcagcatcatttgttgctctcgtggagtccactggggccttcattgctgtctctaggtatgctagtgctacaccaatcccaccctctgttcttagccgtggtattggctggcagggcatcggtattcttctggatgggctatttgggactggaaatgggtcttctgtatcagttgaaaatgctggtttgctagctttgacacgcgttggtagccgaagggtagtgcagatatcagctggtttcatgatattcttttctattctcgggaaattcggagctgtgttcgcctcaattcctgcacccatctttgcagctatgtattgtatcttctttgcttatgccggttctgctgggatcggcttccttcagttctgtaacctcaacacctttaggaccaagttcatccttgggttctcagttttcatgggcctttctgttcctcaatacttcaatgagtacacatctattgctggttatggtcctgttcacacacattcaagatggttcaacgatatagtgaatgtgatattctcgtccaaggcgtttgttgctggcttcgtggcatatttgctggacaacactattgacaggcatgaagcttcagtcaggagagaccgaggctaccattggtgggacaaattccggtcgtacaggaccgatacaagaagcgaggagttctattccctgccattcaatctgaataagttcttcccatcggtctgagcttttgctgtggttaatacctatcactataacggattggaacaatatcacgatacctccaacatgcctaagtactatcactatgactcgatctgaatatgtgagtattgaaaacaagtcgacctatgtgtcgttggctcgttggagagttgtaaaagaacttgtatttgagtattgcgaagttcgctgattgtttattgcatgagaactaaagtt

SEQ ID NO: 55911 - DNA, 1666 bp, Zea Mays
gttttaaagcacatgctctctgccttcatgctgaagccgttcttcttgggttccaacattatctggtcatgcttggtaccactgtgatcataccaactgcacttgttccacaaatgggaggaaacaatgaggacaaagcagtggttatccagacattgctgttcgttgcaggtatcaacaccctcctgcagagtttctttggtaccatgttgcctgcagtgatcggcgggtcatacacctttgttctgcctaccatttcgatcatccttgctggacgttatgctaatgaacctaatccacatattaaatttctccgcatcatgcgtgggacacaaggtgcgttgattgtggcttcagccttacagattatagttggcttcagtggcctttggcgtaatgttgccaggtatctgagtccactttcagctgctcctttggtggcactagttggatttggactgtatgagctaggatttccatcggtcgccaaatgtgttgagattggtctacctcaactcatccttcttgtgatctttacaatgtacctgccacatgctgttcacatgctgaagtctatcttcgatcgatttgctgtcctgttcactatccccatagtgtggctctatgcatatcttctcactgttggaggagcatacaggaatgcaccaccaaagactcaatttcattgccgcactgaccgttctggattaattggtggcgcaccctggataagagtaccatatccttttcagtggggtgctccaacttttgatgcgggtgaagctttcgcgatgatggcagcatcatttgttgctctcgtggagtccactggggccttcattgctgtctctaggtatgctagtgctacaccaatcccaccctctgttcttagccgtggtattggctggcagggcatcggtattcttctggatgggctatttgggactggaaatgggtcttctgtatcagttgaaaatgctggtttgctagctttgacacgcgttggtagccgaagggtagtgcagatatcagctggtttcatgatattcttttctattctcgggaaattcggagctgtgttcgcctcaattcctgcacccatctttgcagctatgtattgtatcttctttgcttatgccggttctgctgggatcggcttccttcagttctgtaacctcaacacctttaggaccaagttcatccttgggttctcagttttcatgggcctttctgttcctcaatacttcaatgagtacacatctattgctggttatggtcctgttcacacacattcaagatggttcaacgatatagtgaatgtgatattctcgtccaaggcgtttgttgctggcttcgtggcatatttgctggacaacactattgacaggcatgaagcttcagtcaggagagaccgaggctaccattggtgggacaaattccggtcgtacaggaccgatacaagaagcgaggagttctattccctgccattcaatctgaataagttcttcccatcggtctgagcttttgctgtggttaatgtgagatgctcttgttactctggaactgcccaccccctgttctccggcggtggcaccgtgatctggattttctcggtacatgaaaaaattactgtatattaaaacccgctcagctcgggtttcacctc

SEQ ID NO: 55912 - DNA, 1841 bp, Zea Mays
cgcctctctagtttgtttaatcggatactcgtgattctgcgaaagctttgacccgtgttgtttcaacttttcaactggcgtatatccaccaaatggactttaaaggaatcatcgaaccgaggatgtgttggcccttgatgctcaagtcgcacacagcgcccgaatccgtgatcccggttctctgtcgccttaactgcctgcaatgctgaagccgttcttcttgggttccaacattatctggtcatgcttggtaccactgtgatcataccaactgcacttgttccacaaatgggaggaaacaatgaggacaaagcagtggttatccagacattgctgttcgttgcaggtatcaacaccctcctgcagagtttctttggtaccatgttgcctgcagtgatcggcgggtcatacacctttgttctgcctaccatttcgatcatccttgctggacgttatgctaatgaacctaatccacatattaaatttctccgcatcatgcgtgggacacaaggtgcgttgattgtggcttcagccttacagattatagttggcttcagtggcctttggcgtaatgttgccaggtatctgagtccactttcagctgctcctttggtggcactagttggatttggactgtatgagctaggatttccatcggtcgccaaatgtgttgagattggtctacctcaactcatccttcttgtgatctttacaatgtacctgccacatgctgttcacatgctgaagtctatcttcgatcgatttgctgtcctgttcactatccccatagtgtggctctatgcatatcttctcactgttggaggagcatacaggaatgcaccaccaaagactcaatttcattgccgcactgaccgttctggattaattggtggcgcaccctggataagagtaccatatccttttcagtggggtgctccaacttttgatgcgggtgaagctttcgcgatgatggcagcatcatttgttgctctcgtggagtccactggggccttcattgctgtctctaggtatgctagtgctacaccaatcccaccctctgttcttagccgtggtattggctggcagggcatcggtattcttctggatgggctatttgggactggaaatgggtcttctgtatcagttgaaaatgctggtttgctagctttgacacgcgttggtagccgaagggtagtgcagatatcagctggtttcatgatattcttttctattctcgggaaattcggagctgtgttcgcctcaattcctgcacccatctttgcagctatgtattgtatcttctttgcttatgccggttctgctgggatcggcttccttcagttctgtaacctcaacacctttaggaccaagttcatccttgggttctcagttttcatgggcctttctgttcctcaatacttcaatgagtacacatctattgctggttatggtcctgttcacacacattcaagatggttcaacgatatagtgaatgtgatattctcgtccaaggcgtttgttgctggcttcgtggcatatttgctggacaacactattgacaggcatgaagcttcagtcaggagagaccgaggctaccattggtgggacaaattccggtcgtacaggaccgatacaagaagcgaggagttctattccctgccattcaatctgaataagttcttcccatcggtctgagcttttgctgtggttaatgtgagatgctcttgttactctggaactgcccaccccctgttctccggcggtggcaccgtgatctggattttctcggtacatgaaaaaattactgtatattaaaacccgctcagctcgggtttcacctc

SEQ ID NO: 55913 - DNA, 2033 bp, Zea Mays
gcctttttgaccgcgtccgcctgccgccctgtcctgtacccctccctccctcccccctcctccccttcacagtgtcacacgcacttctcgttctcgccgatccagtgccactacactacaatactactgcgcggtagcgctcgcactcgcaccacaccacgccaccgctgctgcctgctcctcacagtcctccccgcgctcgcattgcgattcgcgacctagcgcgagggtacggggggtggtgcgcgcgcgtgctcggtgatccgggaagcgccgcgagatggccgggggcggaggcggcggtgccgcgccgaagcacgacgacttcacgccgcaccccgtcaaggaccagctccctggggtctcctactgcatcaccagccctcccccgtggcctgaagccgttcttcttgggttccaacattatctggtcatgcttggtaccactgtgatcataccaactgcacttgttccacaaatgggaggaaacaatgaggacaaagcagtggttatccagacattgctgttcgttgcaggtatcaacaccctcctgcagagtttctttggtaccatgttgcctgcagtgatcggcgggtcatacacctttgttctgcctaccatttcgatcatccttgctggacgttatgctaatgaacctaatccacatattaaatttctccgcatcatgcgtgggacacaaggtgcgttgattgtggcttcagccttacagattatagttggcttcagtggcctttggcgtaatgttgccagaggtatctgagtccactttcagctgctcctttggtggcactagttggatttggactgtatgagctaggatttccatcggtcgccaaatgtgttgagattggtctacctcaactcatccttcttgtgatctttacaatgtacctgccacatgctgttcacatgctgaagtctatcttcgatcgatttgctgtcctgttcactatccccatagtgtggctctatgcatatcttctcactgttggaggagcatacaggaatgcaccaccaaagactcaatttcattgccgcactgaccgttctggattaattggtggcgcaccctggataagagtaccatatccttttcagtggggtgctccaacttttgatgcgggtgaagctttcgcgatgatggcagcatcatttgttgctctcgtggagtccactggggccttcattgctgtctctaggtatgctagtgctacaccaatcccaccctctgttcttagccgtggtattggctggcagggcatcggtattcttctggatgggctatttgggactggaaatgggtcttctgtatcagttgaaaatgctggtttgctagctttgacacgcgttggtagccgaagggtagtgcagatatcagctggtttcatgatattcttttctattctcgggaaattcggagctgtgttcgcctcaattcctgcacccatctttgcagctatgtattgtatcttctttgcttatgccggttctgctgggatcggcttccttcagttctgtaacctcaacacctttaggaccaagttcatccttgggttctcagttttcatgggcctttctgttcctcaatacttcaatgagtacacatctattgctggttatggtcctgttcacacacattcaagatggttcaacgatatagtgaatgtgatattctcgtccaaggcgtttgttgctggcttcgtggcatatttgctggacaacactattgacaggcatgaagcttcagtcaggagagaccgaggctaccattggtgggacaaattccggtcgtacaggaccgatacaagaagcgaggagttctattccctgccattcaatctgaataagttcttcccatcggtctgagcttttgctgtggttaatgtgagatgctcttgttactctggaactgcccaccccctgttctccggcggtggcaccgtgatctggattttctcggtacatgaaaaaattactgtatattaaaacccgctcagctcgggtttcacctc

SEQ ID NO: 55914 - DNA, 1213 bp, Zea Mays
gtgctcccccctctgccagcctatgcagcgcccgagcgctcgcctttttgaccgcgtccgcctgccgccctgtcctgtacccctccctccctcccccctcctccccttcacagtgtcacacgcacttctcgttctcgccgatccagtgccactacactacaatactactgcgcggtagcgctcgcactcgcaccacaccacgccaccgctgctgcctgctcctcacagtcctccccgcgctcgcattgcgattcgcgacctagcgcgagggtacggggggtggtgcgcgcgcgtgctcggtgatccgggaagcgccgcgagatggccgggggcggaggcggcggtgccgcgccgaagcacgacgacttcacgccgcaccccgtcaaggaccagctccctggggtctcctactgcatcaccagccctcccccgtggcctgaagccgttcttcttgggttccaacattatctggtcatgcttggtaccactgtgatcataccaactgcacttgttccacaaatgggaggaaacaatgaggacaaagcagtggttatccagacattgctgttcgttgcaggtatcaacaccctcctgcagagtttctttggtaccatgttgcctgcagtgatcggcgggtcatacacctttgttctgcctaccatttcgatcatccttgctggacgttatgctaatgaacctaatccacatattaaatttctccgcatcatgcgtgggacacaaggtgcgttgattgtggcttcagccttacagattatagttggcttcagtggcctttggcgtaatgttgccaggtatctgagtccactttcagctgctcctttggtggcactagttggatttggactgtatgagctaggatttccatcggtcgccaaatgtgttgagattggtctacctcaactcatccttcttgtgatctttacaatgtacctgccacatgctgttcacatgctgaagtctatcttcgatcgatttgctgtcctgttcactatccccatagtgtggctctatgcatatcttctcactgttggaggagcatacaggaatgcaccaccaaagactcaatttcattgccgcactgaccgttctggattaattggtggcgcaccctgtggggtgctccaacttttgatgcgggtgaagctttcgcgatgatggcagcatcatttgttgctctcgtggagccattgta

SEQ ID NO: 55915 - DNA, 2292 bp, Zea Mays
ctccgttttgcctctcaggggcccatcctagatagaggaggggttccttgaccgtaccaatagcttgaagaaaccatgcctatacaaaacaccaacaggagaactggggcctggggtgaggagggcgcttctctaggcacggcagtgccagtgtgccactggtgaggtgagacttgggagttgagaggcatgtgaccctcttcactcgcttgaccctcctcttcactcgcttctcccagaagtcacgcaccaaacaccaccaccaaagaaggcgagaacgtactccgtccctcccctcccctcccctccccttcccctcgaggctccaggaccgtctcctcgcctgctcatccgccgctgcttcccttctctgggctcggagaaccggagagaagcgcgcgcggccatggcgtccagcgcctctcggttcatcaagtgcgtcacggtcggcgacggtgccgtgggcaagacatgtatgctcatctgctacaccagcaacaagttccccactgactacatacctacggtgttcgacaatttcagtgcaaatgtagttgtggatggcaccactgtgaatttgggcctttgggataccgctgggcaggaagattacaaccgcctgaggcctctaagctaccgaggtgcagatgttttcgtgcttgcattctcacttgtgagccgagctagctatgagaatatcatgaagaagtggataccagagcttcaacattatgcacctggggtgcccgttgttttggcaggcacaaaattggatcttcgtgaagacaagcactacttgatggaccatcctggattggtgcctgttaccactgcacagggggaggaacttcgtagacaaattggtgctatgtattacattgaatgcagctcaaagacacagcagaatgtcaaagctgtgttcgatgctgccatcaaggtagtaatccagcctccaactaaaataagagaaaagaagaagaaaaaatcacgcaaaggatgttctatgatgcaaacatgcgtacgtgactggcgacgaatcactcctcgacttcctccatccccaagaaagaactcggccagaccgaagaaggctgacgaatcacttcttccggtgtttccctgggtactggctgccattaatctacgagatgagagtaaaatagtatccgtagtctccccatcgcacaagtccaatcacccacttccagaattgcaatcaagtccagaactccaacttgagagcatccaattccaatcgcttaaacacacaacggctgtcctagtcgtcatcatcagccccgggtgtggcgctggtcggctggtgaactgggccatcttgtctcgtgacgatcagccccgggccgtaagcccaccggatcaacagcaggccgcagattcccctgtttccagaactccgtcgaatcctccccctcctccacgcagacgcagctccctctcctctcagcccccacccatcgagccgctagcgccggcgcccggcggcggtatggaggctggtggcgaggagttcgcgatcggcgtggtgctctccgcgaagaccaccctgggggaggagttcgagggccagatcgtcgccttcgatcgaccctccaacctcctcgttatccaggagggcgtggggagggcggagagcggagagcggcggaacgtgagggtgctgaaggcgaactacatccgggagttctctgtgctcagcaagggagacgaccctctcgatcctgccggttgcatgctggaccttaactccatttatgcccgggaggatgctgcactcaggcaagcagagattgaagctgagaaaattggtgttggtgtcaccccagaagctcaaaatatattcgatgcgctgtccaagacgcttccggtgcagtgggacaagactgacattgttgtaatgaaggaggttcgtgtacgcagcccgtacctgcctgaaaatgttagtggaggaacagctgcagcaaacgaacgcgttaagaaagtgattgactttgaaaggaaaagattacattcacgtgcacctggccaattctcttaacctaaaagtattgatttttttttacattagcatgtgtttctgatactgcggcccgttttattattctcatcggtggggttttccataaaatatttcagcaaaaatgtggtaataatcacatcaactagcttgtttatgaactgtttgatagatgacttgttgtaattgaattgattataagccctctgtatttaggactgttagattgataataatctcctcttttttgaaaagga

SEQ ID NO: 55916 - DNA, 2851 bp, Zea Mays
ctccgttttgcctctcaggggcccatcctagatagaggaggggttccttgaccgtaccaatagcttgaagaaaccatgcctatacaaaacaccaacaggagaactggggcctggggtgaggagggcgcttctctaggcacggcagtgccagtgtgccactggtgaggtgagacttgggagttgagaggcatgtgaccctcttcactcgcttgaccctcctcttcactcgcttctcccagaagtcacgcaccaaacaccaccaccaaagaaggcgagaacgtactccgtccctcccctcccctcccctccccttcccctcgaggctccaggaccgtctcctcgcctgctcatccgccgctgcttcccttctctgggctcggagaaccggagagaagcgcgcgcggccatggcgtccagcgcctctcggttcatcaagtgcgtcacggtcggcgacggtgccgtgggcaagacatgtatgctcatctgctacaccagcaacaagttccccactgactacatacctacggtgttcgacaatttcagtgcaaatgtagttgtggatggcaccactgtgaatttgggcctttgggataccgctgggcaggaagattacaaccgcctgaggcctctaagctaccgaggtgcagatgttttcgtgcttgcattctcacttgtgagccgagctagctatgagaatatcatgaagaagtggataccagagcttcaacattatgcacctggggtgcccgttgttttggcaggcacaaaattggatcttcgtgaagacaagcactacttgatggaccatcctggattggtgcctgttaccactgcacagggggaggaacttcgtagacaaattggtgctatgtattacattgaatgcagctcaaagacacagcagaatgtcaaagctgtgttcgatgctgccatcaaggtagtaatccagcctccaactaaaataagagaaaagaagaagaaaaaatcacgcaaaggatgttctatgatgaacatcttcggtggaagaaaaatgctatgcttcaagtcctgaatggttcaagggggtcttacatggactgataccacgagtgttaccccaagttcgcgaagcttgaaatcttgatgtgcttgttgcgcatgtgtatatttgcacctttggttattaatgactagaggtaggtaattgaaactagtctgcttaagcgttctgcactgctggtgtggttagctctatgagttaggcagttcgacagaggccaaaccgacagtgagattttgctctttcatggcaatgtcacagctttttcgtgaatctgagctcatcatactgtctgttagtttatcccccacgattccatgttagaatcgatccatagcaacattgtgttgaatggaccttttgcatttgctcttgagcctgagcatataattattccagtttttgtgtactttcaagctgattgttgacgcgttctgtgttgtattatggctagtacgcttctccactttggagacgtcttttttttgtgaaaacaacttatctaatctggctagccatcctaatggcaaaatagtgcgtacgtgactggcgacgaatcactcctcgacttcctccatccccaagaaagaactcggccagaccgaagaaggctgacgaatcacttcttccggtgtttccctgggtactggctgccattaatctacgagatgagagtaaaatagtatccgtagtctccccatcgcacaagtccaatcacccacttccagaattgcaatcaagtccagaactccaacttgagagcatccaattccaatcgcttaaacacacaacggctgtcctagtcgtcatcatcagccccgggtgtggcgctggtcggctggtgaactgggccatcttgtctcgtgacgatcagccccgggccgtaagcccaccggatcaacagcaggccgcagattcccctgtttccagaactccgtcgaatcctccccctcctccacgcagacgcagctccctctcctctcagcccccacccatcgagccgctagcgccggcgcccggcggcggtatggaggctggtggcgaggagttcgcgatcggcgtggtgctctccgcgaagaccaccctgggggaggagttcgagggccagatcgtcgccttcgatcgaccctccaacctcctcgttatccaggagggcgtggggagggcggagagcggagagcggcggaacgtgagggtgctgaaggcgaactacatccgggagttctctgtgctcagcaagggagacgaccctctcgatcctgccggttgcatgctggaccttaactccatttatgcccgggaggatgctgcactcaggcaagcagagattgaagctgagaaaattggtgttggtgtcaccccagaagctcaaaatatattcgatgcgctgtccaagacgcttccggtgcagtgggacaagactgacattgttgtaatgaaggaggttcgtgtacgcagcccgtacctgcctgaaaatgttagtggaggaacagctgcagcaaacgaacgcgttaagaaagtgattgactttgaaaggaaaagattacattcacgtgcacctggccaattctcttaacctaaaagtattgatttttttttacattagcatgtgtttctgatactgcggcccgttttattattctcatcggtggggttttccataaaatatttcagcaaaaatgtggtaataatcacatcaactagcttgtttatgaactgtttgatagatgacttgttgtaattgaattgattataagccctctgtatttaggactgttagattgataataatctcctcttttttgaaaagga

SEQ ID NO: 55917 - DNA, 1943 bp, Zea Mays
atggacgatccctcctccgcctccaacaagcacaagcgcaagcgggggcgcaagcccaaggcgtcgccgcccttccccgaccgctcctccccctctccctcggccgcccccgctccggctgggcgtcgtggccgcaagccgcgacgtcacgaggcccccgccgacgcggacgccacgcgtccgccgtccccgccccgccgcggggagccgaagccggtggcaaacggaggcgatgtggtggcagtggcggagtcaggccccgcgagctgggatgaggtggtgagggtagtgccgtgcatggacgctgtggtcaaggtgttctgcgtgcacacggagcccaacttctcgctgccgtggcagcggaagcggcagtacagctccagcagcagcggatttatcatcggcggccgccgtgtcctcaccaatgctcactccgtggagcactatacccaggttaagcttaagaagcgcggctccgacaccaagtaccttgccaccgtcctggccatcggcacagagtgcgacattgatagatgcagctattaattcaggaaattcaggtggcccagcttttaatgataggggaaaatgtgtcggtatagcttttcagtctcttaaacatgaagatgcggagaacataggttatgtgataccgactccagttattacacatttcattgaggactacaaaaaatctggagaatacacaggctttcctatacttggagttgaatggcagaaaatggagaatccagatctccgcaaagcaatgggaatgaaaccagatcaaaagggtgttcgtgttagaagggtggagcccactgctccagaatctggatgcctacgaccatctgatattattcttagtttcgacggtgttgacattgctaatgatggaacagttcctttcaggcatggtgagcgcattggcttcagttatctggtttctcagaaatatactggagagaaagctcttgttaaagttctgcgtgattcaaaagttcatgaatttaaaataagctatctctgttccatatcttcgatccgagtatggaaaagattatgaatatgatgcacctgtcaagttgttggtgaaacatttacatgcgatggcggaatcacctgatgaacagctagtggtggtatcacaggtgcttgtatcagatatcaatataggttatgaagaaatagtcaatactcaggtacttgctttcaatggccagcctgttaaaaatttaaagaacttggcgaccatggtggaaaattgcaaggatgaatttttgaagtttgatctggagtatgaccagctaataaaagcatttctcatggacacaaatatctggagtttgattgttgtcctcgagacgaaaactgcaaaggctgctacccaggacattctgacgacgcactgtataccttctgcaacgtcggatgaccttaaggcctagtgggaggagaagggagcatgacgcagccctgggcctgagccagggccatcaggtgggccaatagtttgggccacaatttcggctgaattgattagcgcagcgtacgatccgtgatgaagaggaaccccaatgtttatctgtttaagttaaatatcttttgaggggttgtggatgtgagagtgctggctggtgtctaaagctccgccattatagaaggtttgagggactgtcactgtcagataacaataaactggagttgttacagacagagtcatcgtgaaaacgatagtgtctagtaagaagctgagtttgttttttctttacatgatttcattacaactacaccaaattattgacggggaaaggaatcataattggtccgtgatttcattacatccttggtgtctcaagcttgttccgcatagtacctgctatttgtcaacgatacttttacttctgcttgtaaagtatttgcatcttgtttctggacaagtg

SEQ ID NO: 55918 - DNA, 2225 bp, Zea Mays
atggacgatccctcctccgcctccaacaagcacaagcgcaagcgggggcgcaagcccaaggcgtcgccgcccttccccgaccgctcctccccctctccctcggccgcccccgctccggctgggcgtcgtggccgcaagccgcgacgtcacgaggcccccgccgacgcggacgccacgcgtccgccgtccccgccccgccgcggggagccgaagccggtggcaaacggaggcgatgtggtggcagtggcggagtcaggccccgcgagctgggatgaggtggtgagggtagtgccgtgcatggacgctgtggtcaaggtgttctgcgtgcacacggagcccaacttctcgctgccgtggcagcggaagcggcagtacagctccagcagcagcggatttatcatcggcggccgccgtgtcctcaccaatgctcactccgtggagcactatacccaggttaagcttaagaagcgcggctccgacaccaagtaccttgccaccgtcctggccatcggcacagagtgcgacattgcgctcttaactgtcaatgacgatgaattctgggaaggagtttcacctgttgagtttggaacattaccagcccttcaggatgcagttactgttgttggttatccaattggaggagataccatatccgtgacaagtggagtggtctctaggatagaaatactttcatacgttcatggttctacagaacttctaggattgcagatgcagctattaattcaggaaattcaggtggcccagcttttaatgataggggaaaatgtgtcggtatagcttttcagtctcttaaacatgaagatgcggagaacataggttatgtgataccgactccagttattacacatttcattgaggactacaaaaaatctggagaatacacaggctttcctatacttggagttgaatggcagaaaatggagaatccagatctccgcaaagcaatgggaatgaaaccagatcaaaagggtgttcgtgttagaagggtggagcccactgctccagaatctggatgcctacgaccatctgatattattcttagtttcgacggtgttgacattgctaatgatggaacagttcctttcaggcatggtgagcgcattggcttcagttatctggtttctcagaaatatactggagagaaagctcttgttaaagttctgcgtgattcaaaagttcatgaatttaaaataaggttagcaactcacaagcggcttgttgcggctcatgtgaagggcaggccaccgtcatattacatagttgctggctttgtttttgcagctatctctgttccatatcttcgatccgagtatggaaaagattatgaatatgatgcacctgtcaagttgttggtgaaacatttacatgcgatggcggaatcacctgatgaacagctagtggtggtatcacaggtgcttgtatcagatatcaatataggttatgaagaaatagtcaatactcaggtacttgctttcaatggccagcctgttaaaaatttaaagaacttggcgaccatggtggaaaattgcaaggatgaatttttgaagtttgatctggagtatgaccagctaataaaagcatttctcatggacacaaatatctggagtttgattgttgtcctcgagacgaaaactgcaaaggctgctacccaggacattctgacgacgcactgtataccttctgcaacgtcggatgaccttaaggcctagtgggaggagaagggagcatgacgcagccctgggcctgagccagggccatcaggtgggccaatagtttgggccacaatttcggctgaattgattagcgcagcgtacgatccgtgatgaagaggaaccccaatgtttatctgtttaagttaaatatcttttgaggggttgtggatgtgagagtgctggctggtgtctaaagctccgccattatagaaggtttgagggactgtcactgtcagataacaataaactggagttgttacagacagagtcatcgtgaaaacgatagtgtctagtaagaagctgagtttgttttttctttacatgatttcattacaactacaccaaattattgacggggaaaggaatcataattggtccgtgatttcattacatccttggtgtctcaagcttgttccgcatagtacctgctatttgtcaacgatacttttacttctgcttgtaaagtatttgcatcttgtttctggacaagtg

SEQ ID NO: 55919 - DNA, 1901 bp, Zea Mays
atggacgatccctcctccgcctccaacaagcacaagcgcaagcgggggcgcaagcccaaggcgtcgccgcccttccccgaccgctcctccccctctccctcggccgcccccgctccggctgggcgtcgtggccgcaagccgcgacgtcacgaggcccccgccgacgcggacgccacgcgtccgccgtccccgccccgccgcggggagccgaagccggtggcaaacggaggcgatgtggtggcagtggcggagtcaggccccgcgagctgggatgaggtggtgagggtagtgccgtgcatggacgctgtggtcaaggtgttctgcgtgcacacggagcccaacttctcgctgccgtggcagcggaagcggcagtacagctccagcagcagcggatttatcatcggcggccgccgtgtcctcaccaatgctcactccgtggagcactatacccaggttaagcttaagaagcgcggctccgacaccaagtaccttgccaccgtcctggccatcggcacagagtgcgacattgatagatgcagctattaattcaggaaattcaggtggcccagcttttaatgataggggaaaatgtgtcggtatagcttttcagtctcttaaacatgaagatgcggagaacataggttatgtgataccgactccagttattacacatttcattgaggactacaaaaaatctggagaatacacaggctttcctatacttggagttgaatggcagaaaatggagaatccagatctccgcaaagcaatgggaatgaaaccagatcaaaagggtgttcgtgttagaagggtggagcccactgctccagaatctggatgcctacgaccatctgatattattcttagtttcgacggtgttgacattgctaatgatggaacagttcctttcaggcatggtgagcgcattggcttcagttatctggtttctcagaaatatactggagagaaagctcttgttaaagttctgcgtgattcaaaagttcatgaatttaaaataagctatctctgttccatatcttcgatccgagtatggaaaagattatgaatatgatgcacctgtcaagttgttggtgaaacatttacatgcgatggcggaatcacctgatgaacagctagtggtggtatcacaggtgcttgtatcagatatcaatataggttatgaagaaatagtcaatactcaggtacttgctttcaatggccagcctgttaaaaatttaaagaacttggcgaccatggtggaaaattgcaaggatgaatttttgaagtttgatctggagtatgaccagattgttgtcctcgagacgaaaactgcaaaggctgctacccaggacattctgacgacgcactgtataccttctgcaacgtcggatgaccttaaggcctagtgggaggagaagggagcatgacgcagccctgggcctgagccagggccatcaggtgggccaatagtttgggccacaatttcggctgaattgattagcgcagcgtacgatccgtgatgaagaggaaccccaatgtttatctgtttaagttaaatatcttttgaggggttgtggatgtgagagtgctggctggtgtctaaagctccgccattatagaaggtttgagggactgtcactgtcagataacaataaactggagttgttacagacagagtcatcgtgaaaacgatagtgtctagtaagaagctgagtttgttttttctttacatgatttcattacaactacaccaaattattgacggggaaaggaatcataattggtccgtgatttcattacatccttggtgtctcaagcttgttccgcatagtacctgctatttgtcaacgatacttttacttctgcttgtaaagtatttgcatcttgtttctggacaagtg

SEQ ID NO: 55920 - DNA, 2047 bp, Zea Mays
ccgccccccatggacgatccctcctccgcctccaacaagcacaagcgcaagcgggggcgcaagcccaaggcgtcgccgcccttccccgaccgctcctccccctctccctcggccgcccccgctccggctgggcgtcgtggccgcaagccgcgacgtcacgaggcccccgccgacgcggacgccacgcgtccgccgtccccgccccgccgcggggagccgaagccggtggcaaacggaggcgatgtggtggcagtggcggagtcaggccccgcgagctgggatgaggtggtgagggtagtgccgtgcatggacgctgtggtcaaggtgttctgcgtgcacacggagcccaacttctcgctgccgtggcagcggaagcggcagtacagctccagcagcagcggatttatcatcggcggccgccgtgtcctcaccaatgctcactccgtggagcactatacccaggttaagcttaagaagcgcggctccgacaccaagtaccttgccaccgtcctggccatcggcacagagtgcgacattgcgctcttaactgtcaatgacgatgaattctgggaaggagtttcacctgttgagtttggaacattaccagcccttcaggatgcagttactgttgttggttatccaattggaggagataccatatccgtgacaagtggagtggtctctaggatagaaatactttcatacgttcatggttctacagaacttctaggattgcagatagatgcagctattaattcaggaaattcaggtggcccagcttttaatgataggggaaaatgtgtcggtatagcttttcagtctcttaaacatgaagatgcggagaacataggttatgtgataccgactccagttattacacatttcattgaggactacaaaaaatctggagaatacacaggctttcctatacttggagttgaatggcagaaaatggagaatccagatctccgcaaagcaatgggaatgaaaccagatcaaaagggtgttcgtgttagaagggtggagcccactgctccagaatctggatgcctacgaccatctgatattattcttagtttcgacggtgttgacattgctaatgatggaacagttcctttcaggcatggtgagcgcattggcttcagttatctggtttctcagaaatatactggagagaaagctcttgttaaagttctgcgtgattcaaaagttcatgaatttaaaataagctatctctgttccatatcttcgatccgagtatggaaaagattatgaatatgatgcacctgtcaagttgttggtgaaacatttacatgcgatggcggaatcacctgatgaacagctagtggtggtatcacaggtgcttgtatcagatatcaatataggttatgaagaaatagtcaatactcagctaataaaagcatttctcatggacacaaatatctggagtttgattgttgtcctcgagacgaaaactgcaaaggctgctacccaggacattctgacgacgcactgtataccttctgcaacgtcggatgaccttaaggcctagtgggaggagaagggagcatgacgcagccctgggcctgagccagggccatcaggtgggccaatagtttgggccacaatttcggctgaattgattagcgcagcgtacgatccgtgatgaagaggaaccccaatgtttatctgtttaagttaaatatcttttgaggggttgtggatgtgagagtgctggctggtgtctaaagctccgccattatagaaggtttgagggactgtcactgtcagataacaataaactggagttgttacagacagagtcatcgtgaaaacgatagtgtctagtaagaagctgagtttgttttttctttacatgatttcattacaactacaccaaattattgacggggaaaggaatcataattggtccgtgatttcattacatccttggtgtctcaagcttgttccgcatagtacctgctatttgtcaacgatacttttacttctgcttgtaaagtatttgcatcttgtttctggacaagtg

SEQ ID NO: 55921 - DNA, 2155 bp, Zea Mays
agcccgccccccatggacgatccctcctccgcctccaacaagcacaagcgcaagcgggggcgcaagcccaaggcgtcgccgcccttccccgaccgctcctccccctctccctcggccgcccccgctccggctgggcgtcgtggccgcaagccgcgacgtcacgaggcccccgccgacgcggacgccacgcgtccgccgtccccgccccgccgcggggagccgaagccggtggcaaacggaggcgatgtggtggcagtggcggagtcaggccccgcgagctgggatgaggtggtgagggtagtgccgtgcatggacgctgtggtcaaggtgttctgcgtgcacacggagcccaacttctcgctgccgtggcagcggaagcggcagtacagctccagcagcagcggatttatcatcggcggccgccgtgtcctcaccaatgctcactccgtggagcactatacccaggttaagcttaagaagcgcggctccgacaccaagtaccttgccaccgtcctggccatcggcacagagtgcgacattgcgctcttaactgtcaatgacgatgaattctgggaaggagtttcacctgttgagtttggaacattaccagcccttcaggatgcagttactgttgttggttatccaattggaggagataccatatccgtgacaagtggagtggtctctaggatagaaatactttcatacgttcatggttctacagaacttctaggattgcagatagatgcagctattaattcaggaaattcaggtggcccagcttttaatgataggggaaaatgtgtcggtatagcttttcagtctcttaaacatgaagatgcggagaacataggttatgtgataccgactccagttattacacatttcattgaggactacaaaaaatctggagaatacacaggctttcctatacttggagttgaatggcagaaaatggagaatccagatctccgcaaagcaatgggaatgaaaccagatcaaaagggtgttcgtgttagaagggtggagcccactgctccagaatctggatgcctacgaccatctgatattattcttagtttcgacggtgttgacattgctaatgatggaacagttcctttcaggcatggtgagcgcattggcttcagttatctggtttctcagaaatatactggagagaaagctcttgttaaagttctgcgtgattcaaaagttcatgaatttaaaataagctatctctgttccatatcttcgatccgagtatggaaaagattatgaatatgatgcacctgtcaagttgttggtgaaacatttacatgcgatggcggaatcacctgatgaacagctagtggtggtatcacaggtgcttgtatcagatatcaatataggttatgaagaaatagtcaatactcaggtacttgctttcaatggccagcctgttaaaaatttaaagaacttggcgaccatggtggaaaattgcaaggatgaatttttgaagtttgatctggagtatgaccagctaataaaagcatttctcatggacacaaatatctggagtttgattgttgtcctcgagacgaaaactgcaaaggctgctacccaggacattctgacgacgcactgtataccttctgcaacgtcggatgaccttaaggcctagtgggaggagaagggagcatgacgcagccctgggcctgagccagggccatcaggtgggccaatagtttgggccacaatttcggctgaattgattagcgcagcgtacgatccgtgatgaagaggaaccccaatgtttatctgtttaagttaaatatcttttgaggggttgtggatgtgagagtgctggctggtgtctaaagctccgccattatagaaggtttgagggactgtcactgtcagataacaataaactggagttgttacagacagagtcatcgtgaaaacgatagtgtctagtaagaagctgagtttgttttttctttacatgatttcattacaactacaccaaattattgacggggaaaggaatcataattggtccgtgatttcattacatccttggtgtctcaagcttgttccgcatagtacctgctatttgtcaacgatacttttacttctgcttgtaaagtatttgcatcttgtttctggacaagtg

SEQ ID NO: 55922 - DNA, 2202 bp, Zea Mays
cctagcccgccccccatggacgatccctcctccgcctccaacaagcacaagcgcaagcgggggcgcaagcccaaggcgtcgccgcccttccccgaccgctcctccccctctccctcggccgcccccgctccggctgggcgtcgtggccgcaagccgcgacgtcacgaggcccccgccgacgcggacgccacgcgtccgccgtccccgccccgccgcggggagccgaagccggtggcaaacggaggcgatgtggtggcagtggcggagtcaggccccgcgagctgggatgaggtggtgagggtagtgccgtgcatggacgctgtggtcaaggtgttctgcgtgcacacggagcccaacttctcgctgccgtggcagcggaagcggcagtacagctccagcagcagcggatttatcatcggcggccgccgtgtcctcaccaatgctcactccgtggagcactatacccaggttaagcttaagaagcgcggctccgacaccaagtaccttgccaccgtcctggccatcggcacagagtgcgacattgcgctcttaactgtcaatgacgatgaattctgggaaggagtttcacctgttgagtttggaacattaccagcccttcaggatgcagttactgttgttggttatccaattggaggagataccatatccgtgacaagtggagtggtctctaggatagaaatactttcatacgttcatggttctacagaacttctaggattgcagatagatgcagctattaattcaggaaattcaggtggcccagcttttaatgataggggaaaatgtgtcggtatagcttttcagtctcttaaacatgaagatgcggagaacataggttatgtgataccgactccagttattacacatttcattgaggactacaaaaaatctggagaatacacaggctttcctatacttggagttgaatggcagaaaatggagaatccagatctccgcaaagcaatgggaatgaaaccagatcaaaagggtgttcgtgttagaagggtggagcccactgctccagaatctggatgcctacgaccatctgatattattcttagtttcgacggtgttgacattgctaatgatggaacagttcctttcaggcatggtgagcgcattggcttcagttatctggtttctcagaaatatactggagagaaagctcttgttaaagttctgcgtgattcaaaagttcatgaatttaaaataaggttagcaactcacaagcggcttgttgcggctcatgtgaagggcaggccaccgtcatattacatagttgctggctttgtttttgcagctatctctgttccatatcttcgatccgagtatggaaaagattatgaatatgatgcacctgtcaagttgttggtgaaacatttacatgcgatggcggaatcacctgatgaacagctagtggtggtatcacaggtgcttgtatcagatatcaatataggttatgaagaaatagtcaatactcaggtacttgctttcaatggccagcctgttaaaaatttaaagaacttggcgaccatggtggaaaattgcaaggatgaatttttgaagtttgatctggagtatgaccagattgttgtcctcgagacgaaaactgcaaaggctgctacccaggacattctgacgacgcactgtataccttctgcaacgtcggatgaccttaaggcctagtgggaggagaagggagcatgacgcagccctgggcctgagccagggccatcaggtgggccaatagtttgggccacaatttcggctgaattgattagcgcagcgtacgatccgtgatgaagaggaaccccaatgtttatctgtttaagttaaatatcttttgaggggttgtggatgtgagagtgctggctggtgtctaaagctccgccattatagaaggtttgagggactgtcactgtcagataacaataaactggagttgttacagacagagtcatcgtgaaaacgatagtgtctagtaagaagctgagtttgttttttctttacatgatttcattacaactacaccaaattattgacggggaaaggaatcataattggtccgtgatttcattacatccttggtgtctcaagcttgttccgcatagtacctgctatttgtcaacgatacttttacttctgcttgtaaagtatttgcatcttgtttctggacaagtg

SEQ ID NO: 55923 - DNA, 2240 bp, Zea Mays
gcacggcccgcctcgaaccgggccgacactcctcatcttccccggttcggcacttcggctcgtcctcctcgcggcgaaaccctagcccgccccccatggacgatccctcctccgcctccaacaagcacaagcgcaagcgggggcgcaagcccaaggcgtcgccgcccttccccgaccgctcctccccctctccctcggccgcccccgctccggctgggcgtcgtggccgcaagccgcgacgtcacgaggcccccgccgacgcggacgccacgcgtccgccgtccccgccccgccgcggggagccgaagccggtggcaaacggaggcgatgtggtggcagtggcggagtcaggccccgcgagctgggatgaggtggtgagggtagtgccgtgcatggacgctgtggtcaaggtgttctgcgtgcacacggagcccaacttctcgctgccgtggcagcggaagcggcagtacagctccagcagcagcggatttatcatcggcggccgccgtgtcctcaccaatgctcactccgtggagcactatacccaggttaagcttaagaagcgcggctccgacaccaagtaccttgccaccgtcctggccatcggcacagagtgcgacattgcgctcttaactgtcaatgacgatgaattctgggaaggagtttcacctgttgagtttggaacattaccagcccttcaggatgcagttactgttgttggttatccaattggaggagataccatatccgtgacaagtggagtggtctctaggatagaaatactttcatacgttcatggttctacagaacttctaggattgcagatagatgcagctattaattcaggaaattcaggtggcccagcttttaatgataggggaaaatgtgtcggtatagcttttcagtctcttaaacatgaagatgcggagaacataggttatgtgataccgactccagttattacacatttcattgaggactacaaaaaatctggagaatacacaggctttcctatacttggagttgaatggcagaaaatggagaatccagatctccgcaaagcaatgggaatgaaaccagatcaaaagggtgttcgtgttagaagggtggagcccactgctccagaatctggatgcctacgaccatctgatattattcttagtttcgacggtgttgacattgctaatgatggaacagttcctttcaggcatggtgagcgcattggcttcagttatctggtttctcagaaatatactggagagaaagctcttgttaaagttctgcgtgattcaaaagttcatgaatttaaaataaggttagcaactcacaagcggcttgttgcggctcatgtgaagggcaggccaccgtcatattacatagttgctggctttgtttttgcagctatctctgttccatatcttcgatccgagtatggaaaagattatgaatatgatgcacctgtcaagttgttggtgaaacatttacatgcgatggcggaatcacctgatgaacagctagtggtggtatcacaggtgcttgtatcagatatcaatataggttatgaagaaatagtcaatactcaggtacttgctttcaatggccagcctgttaaaaatttaaagaacttggcgaccatggtggaaaattgcaaggatgaatttttgaagtttgatctggagtatgaccaggacattctgacgacgcactgtataccttctgcaacgtcggatgaccttaaggcctagtgggaggagaagggagcatgacgcagccctgggcctgagccagggccatcaggtgggccaatagtttgggccacaatttcggctgaattgattagcgcagcgtacgatccgtgatgaagaggaaccccaatgtttatctgtttaagttaaatatcttttgaggggttgtggatgtgagagtgctggctggtgtctaaagctccgccattatagaaggtttgagggactgtcactgtcagataacaataaactggagttgttacagacagagtcatcgtgaaaacgatagtgtctagtaagaagctgagtttgttttttctttacatgatttcattacaactacaccaaattattgacggggaaaggaatcataattggtccgtgatttcattacatccttggtgtctcaagcttgttccgcatagtacctgctatttgtcaacgatacttttacttctgcttgtaaagtatttgcatcttgtttctggacaagtg

SEQ ID NO: 55924 - DNA, 3366 bp, Zea Mays
cgcaaagcaggtctgctgacattgcggctaccaaatcctaacgatgtgcgtcgcgggtttggaggcaggcaacgcgtggggggggggggggggggggggggtgtcgcgtctcacgagcatggcgtcgtctttggcagacttcgcgcaggtgttggaggcgtcgcgacttcacgagcatggtgtcacctccggcgggcttcgctcaggtgctgggggcatcgcgacttcgcgagcaaggcataatctccggcgggcgtcatgtgtgggcgggcaggcaaaggcaacacgagggcgtcgccaatccggctcgatccgccggtttaagggttccgatggagacctcggaggcggcggccgcgcatccgcagaaggacagtgtgaaggtggccgtcaacataaggccgctcatcacggtggagctgcaggatggctgcacggattgcgtcaccgtcacgccgggcgaacctcaggttcaaattgggccccacgtattcacctttgatcacgtctatggcagctcgggcccttcatcatcattaatatttgagcaatgcgtgcaccccttgatcgatgcattgttcagcggatacaatgccactgttctagcatatggccagaccggttctggcaagacatacacaatgggtactgactatagtggtgaagggaactgcggagggataattcctcaagttatggatacaatatttagaaaagttgacacctcaaaggatggctcagagtttttaattagagtatcttttattgagatattcaaggaagatgtttttgatttgctcgatgcaaatcaagctgctgtaagacttgatgcaggttctatggcaaaagcatcagcacctggcagagtgccgattcaaatccgagagactgcaactggaggcataacccttgctggtgtcacagaggctgaggtgaagtcaaaagaagaaatggcatcatatttgacacgtgggtcgtcgtcgcgtgcaacagcaagcacaaacatgaataggcagtcgagtcgctctcatgccatctttacaatatgcgttgaacaaaagagaacatctggtacatccgacaagtcagccaacggtgactatgatatactatcgtcaaagtttcatctagttgatcttgctggttctgaaagggctaaacgtactggagccgatggacataggcttaaagaagggatacacataaataaaggccttctagctcttggcttttttaagtgcattagcatgcatagccctgctgatataaaagcagaagaaaccataaacacactcaaaaatgccaatcgcgcacgcaacattcaaaacaaagcagtggtaatccgtgatccagctacagcagagatgcaaaaattgaggagccagctggagcagctgcaaactgaacttttgttttcccgcagtgggagtgcagcgttagaagaacttcagttgctgcagaaaaaagtctctcttcttgagctgaagaattctgagcttaacaatgaacttaaggagaaggaattgtcatatgagcagttggcagagcgggcacgcgctgctcagttggaaagggatcagttgatgctgaagattgaatctgtgaggaatggaaaatcattggatgatattgaaaatattgataacgaccaagacatggaccttttgaagggctacatatcaaaaatacagcagttggagagtgaactgatgcgtcaaaacttctccaatgcttgcagacatggcttacatgaccagcttgccatggaccaggacatttttctaaatgaattgggttctggatgtgaagagctggttcgtgctgagtgctggcggtgggcgagcaagggcgtgaacgtcaagtacgaggtccgcgacagccggcgagggtacaaggccggcgcgctccgggaaggcatgaagcgcgcctacgcccgcggctgcgacctggtggccatcttcgacgccgacttccagccggagccggacttcctgtggcgcgccgtgccgttccttctccacaacccggacctcgcgctcgtccaggcgcgctggaagttcgtgaacgcagacgaatgcctgatgacaaggatgcaggagatgtccctggactaccacttcgcagtggagcaggaagtcggctcctccacctacgccttcttcggcttcaacggaaccgctggcgtgtggcgcatatccgctttgaacgaggccggagggtggaaggacaggaccacggtggaggacatggatctggcagtccgagcaagcctcaaagggtggaagtttgtatacatcggtgacctcatgaaggtgacgctctggaagaaaatccacgtcatctacaacttcttcctcgtgcgcaagatcgtagcgcacgccgtgacgttcgtgttttactgcatcgtgatccccacgacggtcctggttcctgaggttcaagtgccaaagtggggttccgtctatatcccaaccgtaataacccttctcagtgctgttgccactccaaggtcagctcacttagttgtcttctggaccctcttcgagaatgtgatgtcgctgcatagaaccaaggccactttcatcggcctactggaggcaggcagggtgaacgagtgggtggtgacagaaaaactcggtgatgctctcaggaccaaagtgccaggcaagaaaccccgcatgaggataggagacaggttgcacgttctggagctcggtgtcgcagcttacctcctcttctgtggatgctatgacattgcgttcgggaacaaccgctactacatattcttgttcctccaatccatcgctttcttcatcgtcggcattggctatgtcggaacattcgtccctcactagctagctcgtagcagaatcattctgagaggctacccatcctgatgatgcatggttgtcttcaaccccttccggtttcatttcatggaaatcagttggtagataagatcgagcaaaccttctcttgtatgtaatgttgtcatgggaaaaaaaagaaaatacagtgtaaaggcacactggcagacaagccatagatatgagtaggtatgtgtgttgttgaaggaatgtgctgtgatgcgcatggggggattggtgatgacaagcaggccgttttgagtctccatgtcacctatgcagaatcagctgtagaaaaaaaggtagcaaattgtggaagtcgaaccaattgttttgcaaacataaaaaaaaaagatgaatgtttgttggcgagttcgttgtgagaacattgtaaagttgtacatgttttgttgtctcctcttacccttctttatttgtttcccatgtttatatcaactataataaacagattgtatttgaaaagatttcgtttcagatc

SEQ ID NO: 55925 - DNA, 1334 bp, Zea Mays
gtgacattcgatcctgtgccatgattcatcatatgtgtgagacttggtcccagcacacctggtggttatgttcgcgcccgggttttggaccctaaaatccgggtgtgacaacttgggacttcgaaaacttatagatagttatgtaagtttctaattgcttatttgtttaatttgctaattgatatactataatcttctgctgctgattcatacaacacagggaacctgagagtcatggggcttcactttctatccgtgtttttactgaacacagttggacatacttggtatctgtttttttctgcttaacatcatatgtatgatcaacaattatagaaggtaacatttctgttcaacacacttctggaataagaatttgttattttctagaattttcagtgagctttatatatggtaggttatcaagagcgaaacaaactcataagttaattgtgccatttacataaactgtaggctcgagacgtcctttcaacttttattctttgctgctcttgtttgtttatcttgaatgtatggtcaataggaatacaaatgtttatttgtagtatgcttaatatacttttggtaggcagttctttcgactttcaaatttccccaatgcgcatgcaccagatattccccaatgcgggaggttttggctttatggagacttcatgttcatctcttttgtcaactgcacctgaggatcaacccgcacttagtatatatggtcccatgcagtcagacattaggtatgcacacactctctaatgtctgactaggtacgtgcccatgcacggacaactcacaatttgtagcgttaggtacgtgcacactctctaatgtctggcaacaacaattaattttagtagtgtgcatctttgtagtacgtgcacactctctaatgccagatctaggagttcgacgcctccgcaagaaaaacgacgacgtcgcctgcgacactgcacaacggctcagtcgaggcacccaatgcccaccggcaccagtgagatgaggcttcaaatttgggttagctccgccactgcccgggtgcgactacgagcactggctcatcgtgatggacaagctcggtgggagggcgccaccaagtaacatatgatcgactactacatccagaccctcgccaaggtccttggaagccgaagatcctaaagaaataaacaccttcgacagatcttctctgaagcagcgccgaagctatcaactataaagcttcggtacagtgacatgtctcaagacgaaggggtgaaccgacttaaagatgaaatgacttaaagacccataatattctgtgtcattattatagttcattg

SEQ ID NO: 55926 - DNA, 4154 bp, Zea Mays
aatgggacttggaattgatgagttcatcagcattgcttgtatacaaattgaacgggatgtacataggttcaaattgggccccatgtcttcacttttgatcacgtctatggcagctcgggcccttcatcatcattaatatttgagcaatgcgtgcaccccttgatcgatgcattgttcagcggatacaatgccactgttctagcatatggccagaccggttctggcaagacatacacaatgggtactaactatagcggtgaagagaactgcggtgggataattcctcaagttatggatacaatatttagaaaagttgacacctcaaaggatggctcagagtttttaattagagtatcttttattgagatattcaaggaagatgtttttgatttgctcgatgcaaatcaagctgctgtaagacttgatgcaggttctatggcaaaagcatcagcccctggcagagtgccaattcaaatccgagagactgcaactggaggcataatccttgctggtgtcacagaggctgaggtgaagtcaaaagaagaaatggcatcatatttgacacgtgggtcgtcgtcgcgtgcaacagcaagcacaaacatgaatatgcagtcgagtcgctctcatgccatctttacaatatgtgttgaacaaaagagaacatctggtacatccgacaagtcagccagcagtgactatgatatactatcatcaaagtttcacctagttgatcttgctggttctgaaagggctaaacgtactggagcagatggacataggcttaaagaagggatacacataaataaaggccttctagctcttggcaatgttataagtgcattaggtgacgaaaagaaaaggaaagaaggggcatttgtaccataccgggatagcaaattaacccgtcttctacaggattctctaggaggaaacagcaaaacagttatgattgcatgcattagccctgctgatataaatgcagaagaaaccataaacacactcaaatatgccaatcgcgcacgcaacattcaaaacaaagcagtggtaaaccgtgatccagctacagcagagatgcaaaaattgaggagccagctggagcagctgcaaactgaacttttgttttctcgcagtgggagtgcagcgttagaagaacttcagaaaaaggtctctcttcttgagctaaagacttctgagcttaacaatgaacttaaggagaaggaattgtcatgtgagcagttggcagagcgggcacaggctgctcagttggaaagggatcagttgatgctgaagattgaatccgtgaggaatggaaaatcgttggatgatattgaaaatattgataacgaccaagacatggaccttttgaagggctacatatcaaaaatacagcagttggagagtgcgctgatgcgtcaaaacttctccaatgcttgcagacatggcttacatgaccagcttgccatggaccaggacatttttctaaatgaattgggttctggatgtgaagtagaaacaactgatgcttcaaatgaagttgatgaagaagaaaaggagagggaacattcattcatgcaagaccaacttgataaagagctgcaggaactagataaacgacttcagcaaaaggaggcagagatgaaacaatttgccaagagtgatacttctgttctcaagcaacattatgaaaagaagttaactgacttggagcaagaaaagaaagctcttcaggtttatactagcataccttgctgacactatgctcttcttttcctgacacgctagtaacaccattcttgtttgtagaaagaaatagagaatcttcgccatgcattaaccaacatatcttcttctatggatgataatgctcaaaaagttaaagaaaactatcttcagaagctgaatgcacttgagtcccaggtccatgagctcaagaaaaagcaggaagctcaacaacagcttctaaggcagaaacagaggagtgatgaggcagcaaagcgcttacaagaagatattcagcgtataaaatctcagaaggttcaacttcaacaaaagatcaagcaagagtctgaacagtttaggtcttggaaggctgcccgtgaaaaggaagtacttcagctcaagaaggaagggagacgaaatgaatatgagatgcacaagctcttggccttaaatcagaggcagaagatggtcttacagaggaaaactgaggaagcagctgctgctacaaaaagattgaaggagttgctggaagcaaagaagtcatcacgtgaaacatatggcagtgcaaatggttcggggatgcaggccttaatacgagctattgacgatgaactagaagtcactgtaagagcacacgaattacgctcatattacgagcgacaaatgcaagagagagcagcaatatccaaggaaatagcaaaactaaaggaggaatcaaagcacaagatcagtgattgtcctcaagctatgtcacctagtgctagaagttctaggatatcagcattagagaatatgttgtcctcctcatctagtgctatggtatctatggcttctcaactgtcagaagcagaggagcgggagcgtgtattcaatggtaaaggtagatggtaccatgtcaggtccctcccagaggcaaagaatataatgaattaccttttccagttagcatcatctgcaaggtctcaagtactggataaagaagtaatttgtaatgaaaaagaacacaccattactgaattgaaggaaaaggtggttgtgcttaatggtggaattaggcagttggaaacacaagtgagggatctaaggagccaaaatacacagcttttcactgcattgaacaatgcaaagaaatctgctaggtcgaatggcactggatttgctgggcgtaagagtgttcgatcttcccagcattttggttatagtaaggacaacttcaattgggtggatgatatggacatttcagacagtgagcactcggatgagttagagaatatgagtgatggatccgattcagactgggtacagtcgacgaggaaagccaaaaaacaccagagaagagtgtctagccattcaaatcctaacctggattgtcaaaatacacaaggcagtgcagaaccagagaagccctcagatgaaaagtgcattttgcccaaatacatttcatcagacggctgttcatgctcaaaatcctcctcatgcaagaccaacaaatgcgagtgcagagggtcaggtgcacaatgcggtgcaggctgtggttgtaaggattccaaatgttctaacagggattcttctactatagaaaaagccaatcagggagccatgcttcttcagaccgcgttttctgagaaggaagcccaagatgcaaagccaagaaagcctttgactaacattggtaataatgtggttaaccaaactgccgagacaaagaagcccaggaaaaaccggcgcaagtcggcaattcaactcgtcccaggacctctcctgccgtccgagccagtggccaccgaagctgcccctcgggacattgccaacattcccctcaagctaccgagagccatgtcctcggtgactcctgcggagagcaaccctcccctcacagaccgcaatgctgccaaacccgacgaatcagtgagcaccggcagcaagaatagcaccggagctgcagccacgagagcaccgtctcagctgagaaaaaacgcaaccaccgagaaggagaaccagttgcgataatccgattgctgacatgcagtatccgtgactccgtgtcgcttaagccttctgtttaacagtgggggaggctgcctcggcgtcctttggagaggcaggtagactctggaagggctggcgctctcgggttcctgtgggaaatggcgtgttctgtggaaagccttagctctgctttggctggaatgcgaccttcttgtataatggaaaagtaacatgctggattaagctatgtcagtctcgtaaatggtctccgttcattttgaacatactgaggaaatcaatctgcgcatctgtatgcttagactggtacactgcaggatgcacatttcctccacagttcgacagcataacagatgcaatcgtatatatcgttgcaaccaagtggtgttcttttgagattataatatatcttgaaaaagtcaaaggta

SEQ ID NO: 55927 - DNA, 4379 bp, Zea Mays
gtttttcgaaatcctccgagcgggcgccgggcgctgctcgctctcaagtctcacccgttcgccattccgctcgtctctctctctcttcctcccccgccctctctcccccctcgagggggcgatcgaccccaagcctagctaagctcgccgcatcctaaatccccaaaccacgtgcagctcgccgttgtatgtcgcagagcgtggctaatccggctcgatccgccggtttgagaggcggcggccgcgcatccgcagaaggacagtgtgaaggtggccgttaacataaggccgctcatcacggtggagctgcaggatggctgcacggattgcgtcacagtcacgcaaggcgaacctcaggttcaaattgggccccatgtcttcacttttgatcacgtctatggcagctcgggcccttcatcatcattaatatttgagcaatgcgtgcaccccttgatcgatgcattgttcagcggatacaatgccactgttctagcatatggccagaccggttctggcaagacatacacaatgggtactaactatagcggtgaagagaactgcggtgggataattcctcaagttatggatacaatatttagaaaagttgacacctcaaaggatggctcagagtttttaattagagtatcttttattgagatattcaaggaagatgtttttgatttgctcgatgcaaatcaagctgctgtaagacttgatgcaggttctatggcaaaagcatcagcccctggcagagtgccaattcaaatccgagagactgcaactggaggcataatccttgctggtgtcacagaggctgaggtgaagtcaaaagaagaaatggcatcatatttgacacgtgggtcgtcgtcgcgtgcaacagcaagcacaaacatgaatatgcagtcgagtcgctctcatgccatctttacaatatgtgttgaacaaaagagaacatctggtacatccgacaagtcagccagcagtgactatgatatactatcatcaaagtttcacctagttgatcttgctggttctgaaagggctaaacgtactggagcagatggacataggcttaaagaagggatacacataaataaaggccttctagctcttggcaatgttataagtgcattaggtgacgaaaagaaaaggaaagaaggggcatttgtaccataccgggatagcaaattaacccgtcttctacaggattctctaggaggaaacagcaaaacagttatgattgcatgcattagccctgctgatataaatgcagaagaaaccataaacacactcaaatatgccaatcgcgcacgcaacattcaaaacaaagcagtggtaaaccgtgatccagctacagcagagatgcaaaaattgaggagccagctggagcagctgcaaactgaacttttgttttctcgcagtgggagtgcagcgttagaagaacttcagttgctgcagaaaaaggtctctcttcttgagctaaagacttctgagcttaacaatgaacttaaggagaaggaattgtcatgtgagcagttggcagagcgggcacaggctgctcagttggaaagggatcagttgatgctgaagattgaatccgtgaggaatggaaaatcgttggatgatattgaaaatattgataacgaccaagacatggaccttttgaagggctacatatcaaaaatacagcagttggagagtgcgctgatgcgtcaaaacttctccaatgcttgcagacatggcttacatgaccagcttgccatggaccaggacatttttctaaatgaattgggttctggatgtgaagtagaaacaactgatgcttcaaatgaagttgatgaagaagaaaaggagagggaacattcattcatgcaagaccaacttgataaagagctgcaggaactagataaacgacttcagcaaaaggaggcagagatgaaacaatttgccaagagtgatacttctgttctcaagcaacattatgaaaagaagttaactgacttggagcaagaaaagaaagctcttcagaaagaaatagagaatcttcgccatgcattaaccaacatatcttcttctatggatgataatgctcaaaaagttaaagaaaactatcttcagaagctgaatgcacttgagtcccaggtccatgagctcaagaaaaagcaggaagctcaacaacagcttctaaggcagaaacagaggagtgatgaggcagcaaagcgcttacaagaagatattcagcgtataaaatctcagaaggttcaacttcaacaaaagatcaagcaagagtctgaacagtttaggtcttggaaggctgcccgtgaaaaggaagtacttcagctcaagaaggaagggagacgaaatgaatatgagatgcacaagctcttggccttaaatcagaggcagaagatggtcttacagaggaaaactgaggaagcagctgctgctacaaaaagattgaaggagttgctggaagcaaagaagtcatcacgtgaaacatatggcagtgcaaatggttcggggatgcaggccttaatacgagctattgacgatgaactagaagtcactgtaagagcacacgaattacgctcatattacgagcgacaaatgcaagagagagcagcaatatccaaggaaatagcaaaactaaaggaggaatcaaagcacaagatcagtgattgtcctcaagctatgtcacctagtgctagaagttctaggatatcagcattagagaatatgttgtcctcctcatctagtgctatggtatctatggcttctcaactgtcagaagcagaggagcgggagcgtgtattcaatggtaaaggtagatggtaccatgtcaggtccctcccagaggcaaagaatataatgaattaccttttccagttagcatcatctgcaaggtctcaagtactggataaagaagtaatttgtaatgaaaaagaacacaccattactgaattgaaggaaaaggtggttgtgcttaatggtggaattaggcagttggaaacacaagtgagggatctaaggagccaaaatacacagcttttcactgcattgaacaatgcaaagaaatctgctaggtcgaatggcactggatttgctgggcgtaagagtgttcgatcttcccagcattttggttatagtaaggacaacttcaattgggtggatgatatggacatttcagacagtgagcactcggatgagttagagaatatgagtgatggatccgattcagactgggtacagtcgacgaggaaagccaaaaaacaccagagaagagtgtctagccattcaaatcctaacctggattgtcaaaatacacaaggcagtgcagaaccagagaagccctcagatgaaaagtgcattttgcccaaatacatttcatcagacggctgttcatgctcaaaatcctcctcatgcaagaccaacaaatgcgagtgcagagggtcaggtgcacaatgcggtgcaggctgtggttgtaaggattccaaatgttctaacagggattcttctactatagaaaaagccaatcagggagccatgcttcttcagaccgcgttttctgagaaggaagcccaagatgcaaagccaagaaagcctttgactaacattggtaataatgtggttaaccaaactgccgagacaaagaagcccaggaaaaaccggcgcaagtcggcaattcaactcgtcccaggacctctcctgccgtccgagccagtggccaccgaagctgcccctcgggacattgccaacattcccctcaagctaccgagagccatgtcctcggtgactcctgcggagagcaaccctcccctcacagaccgcaatgctgccaaacccgacgaatcagtgagcaccggcagcaagaatagcaccggagctgcagccacgagagcaccgtctcagctgagaaaaaacgcaaccaccgagaaggagaaccagttgcgataatccgattgctgacatgcagtatccgtgactccgtgtcgcttaagccttctgtttaacagtgggggaggctgcctcggcgtcctttggagaggcaggtagactctggaagggctggcgctctcgggttcctgtgggaaatggcgtgttctgtggaaagccttagctctgctttggctggaatgcgaccttcttgtataatggaaaagtaacatgctggattaagctatgtcagtctcgtaaatggtctccgttcattttgaacatactgaggaaatcaatctgcgcatctgtatgcttagactggtacactgcaggatgcacatttcctccacagttcgacagcataacagatgcaatcgtatatatcgttgcaaccaagtggtgttcttttgagattataatatatcttgaaaaagtcaaaggta

SEQ ID NO: 55928 - DNA, 4272 bp, Zea Mays
ccgcagctcacgccacgccctagtttttcgaaatcctccgagcgggcgccgggcgctgctcgctctcaagtctcacccgttcgccattccgctcgtctctctctctcttcctcccccgccctctctcccccctcgagggggcgatcgaccccaagcctagctaagctcgccgcatcctaaatccccaaaccacgtgcagctcgccgttgtatgtcgcagagcgtggctaatccggctcgatccgccggtttgaggttcaaattgggccccatgtcttcacttttgatcacgtctatggcagctcgggcccttcatcatcattaatatttgagcaatgcgtgcaccccttgatcgatgcattgttcagcggatacaatgccactgttctagcatatggccagaccggttctggcaagacatacacaatgggtactaactatagcggtgaagagaactgcggtgggataattcctcaagttatggatacaatatttagaaaagttgacacctcaaaggatggctcagagtttttaattagagtatcttttattgagatattcaaggaagatgtttttgatttgctcgatgcaaatcaagctgctgtaagacttgatgcaggttctatggcaaaagcatcagcccctggcagagtgccaattcaaatccgagagactgcaactggaggcataatccttgctggtgtcacagaggctgaggtgaagtcaaaagaagaaatggcatcatatttgacacgtgggtcgtcgtcgcgtgcaacagcaagcacaaacatgaatatgcagtcgagtcgctctcatgccatctttacaatatgtgttgaacaaaagagaacatctggtacatccgacaagtcagccagcagtgactatgatatactatcatcaaagtttcacctagttgatcttgctggttctgaaagggctaaacgtactggagcagatggacataggcttaaagaagggatacacataaataaaggccttctagctcttggcaatgttataagtgcattaggtgacgaaaagaaaaggaaagaaggggcatttgtaccataccgggatagcaaattaacccgtcttctacaggattctctaggaggaaacagcaaaacagttatgattgcatgcattagccctgctgatataaatgcagaagaaaccataaacacactcaaatatgccaatcgcgcacgcaacattcaaaacaaagcagtggtaaaccgtgatccagctacagcagagatgcaaaaattgaggagccagctggagcagctgcaaactgaacttttgttttctcgcagtgggagtgcagcgttagaagaacttcagttgctgcagaaaaaggtctctcttcttgagctaaagacttctgagcttaacaatgaacttaaggagaaggaattgtcatgtgagcagttggcagagcgggcacaggctgctcagttggaaagggatcagttgatgctgaagattgaatccgtgaggaatggaaaatcgttggatgatattgaaaatattgataacgaccaagacatggaccttttgaagggctacatatcaaaaatacagcagttggagagtgcgctgatgcgtcaaaacttctccaatgcttgcagacatggcttacatgaccagcttgccatggaccaggacatttttctaaatgaattgggttctggatgtgaagtagaaacaactgatgcttcaaatgaagttgatgaagaagaaaaggagagggaacattcattcatgcaagaccaacttgataaagagctgcaggaactagataaacgacttcagcaaaaggagagatgaaacaatttgccaagagtgatacttctgttctcaagcaacattatgaaaagaagttaactgacttggagcaagaaaagaaagctcttcagaaagaaatagagaatcttcgccatgcattaaccaacatatcttcttctatggatgataatgctcaaaaagttaaagaaaactatcttcagaagctgaatgcacttgagtcccaggtccatgagctcaagaaaaagcaggaagctcaacaacagcttctaaggcagaaacagaggagtgatgaggcagcaaagcgcttacaagaagatattcagcgtataaaatctcagaaggttcaacttcaacaaaagatcaagcaagagtctgaacagtttaggtcttggaaggctgcccgtgaaaaggaagtacttcagctcaagaaggaagggagacgaaatgaatatgagatgcacaagctcttggccttaaatcagaggcagaagatggtcttacagaggaaaactgaggaagcagctgctgctacaaaaagattgaaggagttgctggaagcaaagaagtcatcacgtgaaacatatggcagtgcaaatggttcggggatgcaggccttaatacgagctattgacgatgaactagaagtcactgtaagagcacacgaattacgctcatattacgagcgacaaatgcaagagagagcagcaatatccaaggaaatagcaaaactaaaggaggaatcaaagcacaagatcagtgattgtcctcaagctatgtcacctagtgctagaagttctaggatatcagcattagagaatatgttgtcctcctcatctagtgctatggtatctatggcttctcaactgtcagaagcagaggagcgggagcgtgtattcaatggtaaaggtagatggtaccatgtcaggtccctcccagaggcaaagaatataatgaattaccttttccagttagcatcatctgcaaggtctcaagtactggataaagaagtaatttgtaatgaaaaagaacacaccattactgaattgaaggaaaaggtggttgtgcttaatggtggaattaggcagttggaaacacaagtgagggatctaaggagccaaaatacacagcttttcactgcattgaacaatgcaaagaaatctgctaggtcgaatggcactggatttgctgggcgtaagagtgttcgatcttcccagcattttggttatagtaaggacaacttcaattgggtggatgatatggacatttcagacagtgagcactcggatgagttagagaatatgagtgatggatccgattcagactgggtacagtcgacgaggaaagccaaaaaacaccagagaagagtgtctagccattcaaatcctaacctggattgtcaaaatacacaaggcagtgcagaaccagagaagccctcagatgaaaagtgcattttgcccaaatacatttcatcagacggctgttcatgctcaaaatcctcctcatgcaagaccaacaaatgcgagtgcagagggtcaggtgcacaatgcggtgcaggctgtggttgtaaggattccaaatgttctaacagggattcttctactatagaaaaagccaatcagggagccatgcttcttcagaccgcgttttctgagaaggaagcccaagatgcaaagccaagaaagcctttgactaacattggtaataatgtggttaaccaaactgccgagacaaagaagcccaggaaaaaccggcgcaagtcggcaattcaactcgtcccaggacctctcctgccgtccgagccagtggccaccgaagctgcccctcgggacattgccaacattcccctcaagctaccgagagccatgtcctcggtgactcctgcggagagcaaccctcccctcacagaccgcaatgctgccaaacccgacgaatcagtgagcaccggcagcaagaatagcaccggagctgcagccacgagagcaccgtctcagctgagaaaaaacgcaaccaccgagaaggagaaccagttgcgataatccgattgctgacatgcagtatccgtgactccgtgtcgcttaagccttctgtttaacagtgggggaggctgcctcggcgtcctttggagaggcaggtagactctggaagggctggcgctctcgggttcctgtgggaaatggcgtgttctgtggaaagccttagctctgctttggctggaatgcgaccttcttgtataatggaaaagtaacatgctggattaagctatgtcagtctcgtaaatggtctccgttcattttgaacatactgaggaaatcaatctgcgcatctgtatgcttagactggtacactgcaggatgcacatttcctccacagttcgacagcataacagatgcaatcgtatatatcgttgcaaccaagtggtgttcttttgagattataatatatcttgaaaaagtcaaaggta

SEQ ID NO: 55929 - DNA, 4287 bp, Zea Mays
cagtgatcggtccgcagctcacgccacgccctagtttttcgaaatcctccgagcgggcgccgggcgctgctcgctctcaagtctcacccgttcgccattccgctcgtctctctctctcttcctcccccgccctctctcccccctcgagggggcgatcgaccccaagcctagctaagctcgccgcatcctaaatccccaaaccacgtgcagctcgccgttgtatgtcgcagagcgtggctaatccggctcgatccgccggtttgaggttcaaattgggccccatgtcttcacttttgatcacgtctatggcagctcgggcccttcatcatcattaatatttgagcaatgcgtgcaccccttgatcgatgcattgttcagcggatacaatgccactgttctagcatatggccagaccggttctggcaagacatacacaatgggtactaactatagcggtgaagagaactgcggtgggataattcctcaagttatggatacaatatttagaaaagttgacacctcaaaggatggctcagagtttttaattagagtatcttttattgagatattcaaggaagatgtttttgatttgctcgatgcaaatcaagctgctgtaagacttgatgcaggttctatggcaaaagcatcagcccctggcagagtgccaattcaaatccgagagactgcaactggaggcataatccttgctggtgtcacagaggctgaggtgaagtcaaaagaagaaatggcatcatatttgacacgtgggtcgtcgtcgcgtgcaacagcaagcacaaacatgaatatgcagtcgagtcgctctcatgccatctttacaatatgtgttgaacaaaagagaacatctggtacatccgacaagtcagccagcagtgactatgatatactatcatcaaagtttcacctagttgatcttgctggttctgaaagggctaaacgtactggagcagatggacataggcttaaagaagggatacacataaataaaggccttctagctcttggcaatgttataagtgcattaggtgacgaaaagaaaaggaaagaaggggcatttgtaccataccgggatagcaaattaacccgtcttctacaggattctctaggaggaaacagcaaaacagttatgattgcatgcattagccctgctgatataaatgcagaagaaaccataaacacactcaaatatgccaatcgcgcacgcaacattcaaaacaaagcagtggtaaaccgtgatccagctacagcagagatgcaaaaattgaggagccagctggagcagctgcaaactgaacttttgttttctcgcagtgggagtgcagcgttagaagaacttcagttgctgcagaaaaaggtctctcttcttgagctaaagacttctgagcttaacaatgaacttaaggagaaggaattgtcatgtgagcagttggcagagcgggcacaggctgctcagttggaaagggatcagttgatgctgaagattgaatccgtgaggaatggaaaatcgttggatgatattgaaaatattgataacgaccaagacatggaccttttgaagggctacatatcaaaaatacagcagttggagagtgcgctgatgcgtcaaaacttctccaatgcttgcagacatggcttacatgaccagcttgccatggaccaggacatttttctaaatgaattgggttctggatgtgaagtagaaacaactgatgcttcaaatgaagttgatgaagaagaaaaggagagggaacattcattcatgcaagaccaacttgataaagagctgcaggaactagataaacgacttcagcaaaaggaggcagagatgaaacaatttgccaagagtgatacttctgttctcaagcaacattatgaaaagaagttaactgacttggagcaagaaaagaaagctcttcagaaagaaatagagaatcttcgccatgcattaaccaacatatcttcttctatggatgataatgctcaaaaagttaaagaaaactatcttcagaagctgaatgcacttgagtcccaggtccatgagctcaagaaaaagcaggaagctcaacaacagcttctaaggcagaaacagaggagtgatgaggcagcaaagcgcttacaagaagatattcagcgtataaaatctcagaaggttcaacttcaacaaaagatcaagcaagagtctgaacagtttaggtcttggaaggctgcccgtgaaaaggaagtacttcagctcaagaaggaagggagacgaaatgaatatgagatgcacaagctcttggccttaaatcagaggcagaagatggtcttacagaggaaaactgaggaagcagctgctgctacaaaaagattgaaggagttgctggaagcaaagaagtcatcacgtgaaacatatggcagtgcaaatggttcggggatgcaggccttaatacgagctattgacgatgaactagaagtcactgtaagagcacacgaattacgctcatattacgagcgacaaatgcaagagagagcagcaatatccaaggaaatagcaaaactaaaggaggaatcaaagcacaagatcagtgattgtcctcaagctatgtcacctagtgctagaagttctaggatatcagcattagagaatatgttgtcctcctcatctagtgctatggtatctatggcttctcaactgtcagaagcagaggagcgggagcgtgtattcaatggtaaaggtagatggtaccatgtcaggtccctcccagaggcaaagaatataatgaattaccttttccagttagcatcatctgcaaggtctcaagtactggataaagaagtaatttgtaatgaaaaagaacacaccattactgaattgaaggaaaaggtggttgtgcttaatggtggaattaggcagttggaaacacaagtgagggatctaaggagccaaaatacacagcttttcactgcattgaacaatgcaaagaaatctgctaggtcgaatggcactggatttgctgggcgtaagagtgttcgatcttcccagcattttggttatagtaaggacaacttcaattgggtggatgatatggacatttcagacagtgagcactcggatgagttagagaatatgagtgatggatccgattcagactgggtacagtcgacgaggaaagccaaaaaacaccagagaagagtgtctagccattcaaatcctaacctggattgtcaaaatacacaaggcagtgcagaaccagagaagccctcagatgaaaagtgcattttgcccaaatacatttcatcagacggctgttcatgctcaaaatcctcctcatgcaagaccaacaaatgcgagtgcagagggtcaggtgcacaatgcggtgcaggctgtggttgtaaggattccaaatgttctaacagggattcttctactatagaaaaagccaatcagggagccatgcttcttcagaccgcgttttctgagaaggaagcccaagatgcaaagccaagaaagcctttgactaacattggtaataatgtggttaaccaaactgccgagacaaagaagcccaggaaaaaccggcgcaagtcggcaattcaactcgtcccaggacctctcctgccgtccgagccagtggccaccgaagctgcccctcgggacattgccaacattcccctcaagctaccgagagccatgtcctcggtgactcctgcggagagcaaccctcccctcacagaccgcaatgctgccaaacccgacgaatcagtgagcaccggcagcaagaatagcaccggagctgcagccacgagagcaccgtctcagctgagaaaaaacgcaaccaccgagaaggagaaccagttgcgataatccgattgctgacatgcagtatccgtgactccgtgtcgcttaagccttctgtttaacagtgggggaggctgcctcggcgtcctttggagaggcaggtagactctggaagggctggcgctctcgggttcctgtgggaaatggcgtgttctgtggaaagccttagctctgctttggctggaatgcgaccttcttgtataatggaaaagtaacatgctggattaagctatgtcagtctcgtaaatggtctccgttcattttgaacatactgaggaaatcaatctgcgcatctgtatgcttagactggtacactgcaggatgcacatttcctccacagttcgacagcataacagatgcaatcgtatatatcgttgcaaccaagtggtgttcttttgagattataatatatcttgaaaaagtcaaaggta

SEQ ID NO: 55930 - DNA, 4351 bp, Zea Mays
gccttcagtgatcggtccgcagctcacgccacgccctagtttttcgaaatcctccgagcgggcgccgggcgctgctcgctctcaagtctcacccgttcgccattccgctcgtctctctctctcttcctcccccgccctctctcccccctcgagggggcgatcgaccccaagcctagctaagctcgccgcatcctaaatccccaaaccacgtgcagctcgccgttgtatgtcgcagagcgtggctaatccggctcgatccgccggtttgagggttccgatggagaccacagaggcggcggccgcgcatccgcagaaggacagtgtgaaggtggccgttaacataaggccgctcatcacggtggagctgcaggatggctgcacggattgcgtcacagtcacgcaaggcgaacctcaggttcaaattgggccccatgtcttcacttttgatcacgtctatggcagctcgggcccttcatcatcattaatatttgagcaatgcgtgcaccccttgatcgatgcattgttcagcggatacaatgccactgttctagcatatggccagaccggttctggcaagacatacacaatgggtactaactatagcggtgaagagaactgcggtgggataattcctcaagttatggatacaatatttagaaaagttgacacctcaaaggatggctcagagtttttaattagagtatcttttattgagatattcaaggaagatgtttttgatttgctcgatgcaaatcaagctgctgtaagacttgatgcaggttctatggcaaaagcatcagcccctggcagagtgccaattcaaatccgagagactgcaactggaggcataatccttgctggtgtcacagaggctgaggtgaagtcaaaagaagaaatggcatcatatttgacacgtgggtcgtcgtcgcgtgcaacagcaagcacaaacatgaatatgcagtcgagtcgctctcatgccatctttacaatatgtgttgaacaaaagagaacatctggtacatccgacaagtcagccagcagtgactatgatatactatcatcaaagtttcacctagttgatcttgctggttctgaaagggctaaacgtactggagcagatggacataggcttaaagaagggatacacataaataaaggccttctagctcttggcaatgttataagtgcattaggtgacgaaaagaaaaggaaagaaggggcatttgtaccataccgggatagcaaattaacccgtcttctacaggattctctaggaggaaacagcaaaacagttatgattgcatgcattagccctgctgatataaatgcagaagaaaccataaacacactcaaatatgccaatcgcgcacgcaacattcaaaacaaagcagtggtaaaccgtgatccagctacagcagagatgcaaaaattgaggagccagctggagcagctgcaaactgaacttttgttttctcgcagtgggagtgcagcgttagaagaacttcagttgctgcagaaaaaggtctctcttcttgagctaaagacttctgagcttaacaatgaacttaaggagaaggaattgtcatgtgagcagttggcagagcgggcacaggctgctcagttggaaagggatcagttgatgctgaagattgaatccgtgaggaatggaaaatcgttggatgatattgaaaatattgataacgaccaagacatggaccttttgaagggctacatatcaaaaatacagcagttggagagtgcgctgatgcgtcaaaacttctccaatgcttgcagacatggcttacatgaccagcttgccatggaccaggacatttttctaaatgaattgggttctggatgtgaagtagaaacaactgatgcttcaaatgaagttgatgaagaagaaaaggagagggaacattcattcatgcaagaccaacttgataaagagctgcaggaactagataaacgacttcagcaaaaggaggcagagatgaaacaatttgccaagagtgatacttctgttctcaagcaacattatgaaaagaagttaactgacttggagcaagaaaagaaagctcttcagaaagaaatagagaatcttcgccatgcattaaccaacatatcttcttctatggatgataatgctcaaaaagttaaagaaaactatcttcagaagctgaatgcacttgagtcccaggtccatgagctcaagaaaaagcaggaagctcaacaacagcttctaaggcagaaacagaggagtgatgaggcagcaaagcgcttacaagaagatattcagcgtataaaatctcagaaggttcaacttcaacaaaagatcaagcaagagtctgaacagtttaggtcttggaaggctgcccgtgaaaaggaagtacttcagctcaagaaggaagggagacgaaatgaatatgagatgcacaagctcttggccttaaatcagaggcagaagatggtcttacagaggaaaactgaggaagcagctgctgctacaaaaagattgaaggagttgctggaagcaaagaagtcatcacgtgaaacatatggcagtgcaaatggttcggggatgcaggccttaatacgagctattgacgatgaactagaagtcactgtaagagcacacgaattacgctcatattacgagcgacaaatgcaagagagagcagcaatatccaaggaaatagcaaaactaaaggaggaatcaaagcacaagatcagaagcagaggagcgggagcgtgtattcaatggtaaaggtagatggtaccatgtcaggtccctcccagaggcaaagaatataatgaattaccttttccagttagcatcatctgcaaggtctcaagtactggataaagaagtaatttgtaatgaaaaagaacacaccattactgaattgaaggaaaaggtggttgtgcttaatggtggaattaggcagttggaaacacaagtgagggatctaaggagccaaaatacacagcttttcactgcattgaacaatgcaaagaaatctgctaggtcgaatggcactggatttgctgggcgtaagatgtctgactatccctcatacatgcagagtgttcgatcttcccagcattttggttatagtaaggacaacttcaattgggtggatgatatggacatttcagacagtgagcactcggatgagttagagaatatgagtgatggatccgattcagactgggtacagtcgacgaggaaagccaaaaaacaccagagaagagtgtctagccattcaaatcctaacctggattgtcaaaatacacaaggcagtgcagaaccagagaagccctcagatgaaaagtgcattttgcccaaatacatttcatcagacggctgttcatgctcaaaatcctcctcatgcaagaccaacaaatgcgagtgcagagggtcaggtgcacaatgcggtgcaggctgtggttgtaaggattccaaatgttctaacagggattcttctactatagaaaaagccaatcagggagccatgcttcttcagaccgcgttttctgagaaggaagcccaagatgcaaagccaagaaagcctttgactaacattggtaataatgtggttaaccaaactgccgagacaaagaagcccaggaaaaaccggcgcaagtcggcaattcaactcgtcccaggacctctcctgccgtccgagccagtggccaccgaagctgcccctcgggacattgccaacattcccctcaagctaccgagagccatgtcctcggtgactcctgcggagagcaaccctcccctcacagaccgcaatgctgccaaacccgacgaatcagtgagcaccggcagcaagaatagcaccggagctgcagccacgagagcaccgtctcagctgagaaaaaacgcaaccaccgagaaggagaaccagttgcgataatccgattgctgacatgcagtatccgtgactccgtgtcgcttaagccttctgtttaacagtgggggaggctgcctcggcgtcctttggagaggcaggtagactctggaagggctggcgctctcgggttcctgtgggaaatggcgtgttctgtggaaagccttagctctgctttggctggaatgcgaccttcttgtataatggaaaagtaacatgctggattaagctatgtcagtctcgtaaatggtctccgttcattttgaacatactgaggaaatcaatctgcgcatctgtatgcttagactggtacactgcaggatgcacatttcctccacagttcgacagcataacagatgcaatcgtatatatcgttgcaaccaagtggtgttcttttgagattataatatatcttgaaaaagtcaaaggta

SEQ ID NO: 55931 - DNA, 4470 bp, Zea Mays
cacagaccatgtttgcaaacaggtatgcgttaagccttcagtgatcggtccgcagctcacgccacgccctagtttttcgaaatcctccgagcgggcgccgggcgctgctcgctctcaagtctcacccgttcgccattccgctcgtctctctctctcttcctcccccgccctctctcccccctcgagggggcgatcgaccccaagcctagctaagctcgccgcatcctaaatccccaaaccacgtgcagctcgccgttgtatgtcgcagagcgtggctaatccggctcgatccgccggtttgagggttccgatggagaccacagaggcggcggccgcgcatccgcagaaggacagtgtgaaggtggccgttaacataaggccgctcatcacggtggagctgcaggatggctgcacggattgcgtcacagtcacgcaaggcgaacctcaggttcaaattgggccccatgtcttcacttttgatcacgtctatggcagctcgggcccttcatcatcattaatatttgagcaatgcgtgcaccccttgatcgatgcattgttcagcggatacaatgccactgttctagcatatggccagaccggttctggcaagacatacacaatgggtactaactatagcggtgaagagaactgcggtgggataattcctcaagttatggatacaatatttagaaaagttgacacctcaaaggatggctcagagtttttaattagagtatcttttattgagatattcaaggaagatgtttttgatttgctcgatgcaaatcaagctgctgtaagacttgatgcaggttctatggcaaaagcatcagcccctggcagagtgccaattcaaatccgagagactgcaactggaggcataatccttgctggtgtcacagaggctgaggtgaagtcaaaagaagaaatggcatcatatttgacacgtgggtcgtcgtcgcgtgcaacagcaagcacaaacatgaatatgcagtcgagtcgctctcatgccatctttacaatatgtgttgaacaaaagagaacatctggtacatccgacaagtcagccagcagtgactatgatatactatcatcaaagtttcacctagttgatcttgctggttctgaaagggctaaacgtactggagcagatggacataggcttaaagaagggatacacataaataaaggccttctagctcttggcaatgttataagtgcattaggtgacgaaaagaaaaggaaagaaggggcatttgtaccataccgggatagcaaattaacccgtcttctacaggattctctaggaggaaacagcaaaacagttatgattgcatgcattagccctgctgatataaatgcagaagaaaccataaacacactcaaatatgccaatcgcgcacgcaacattcaaaacaaagcagtggtaaaccgtgatccagctacagcagagatgcaaaaattgaggagccagctggagcagctgcaaactgaacttttgttttctcgcagtgggagtgcagcgttagaagaacttcagttgctgcagaaaaaggtctctcttcttgagctaaagacttctgagcttaacaatgaacttaaggagaaggaattgtcatgtgagcagttggcagagcgggcacaggctgctcagttggaaagggatcagttgatgctgaagattgaatccgtgaggaatggaaaatcgttggatgatattgaaaatattgataacgaccaagacatggaccttttgaagggctacatatcaaaaatacagcagttggagagtgcgctgatgcgtcaaaacttctccaatgcttgcagacatggcttacatgaccagcttgccatggaccaggacatttttctaaatgaattgggttctggatgtgaagtagaaacaactgatgcttcaaatgaagttgatgaagaagaaaaggagagggaacattcattcatgcaagaccaacttgataaagagctgcaggaactagataaacgacttcagcaaaaggaggcagagatgaaacaatttgccaagagtgatacttctgttctcaagcaacattatgaaaagaagttaactgacttggagcaagaaaagaaagctcttcagaaagaaatagagaatcttcgccatgcattaaccaacatatcttcttctatggatgataatgctcaaaaagttaaagaaaactatcttcagaagctgaatgcacttgagtcccaggtccatgagctcaagaaaaagcaggaagctcaacaacagcttctaaggcagaaacagaggagtgatgaggcagcaaagcgcttacaagaagatattcagcgtataaaatctcagaaggttcaacttcaacaaaagatcaagcaagagtctgaacagtttaggtcttggaaggctgcccgtgaaaaggaagtacttcagctcaagaaggaagggagacgaaatgaatatgagatgcacaagctcttggccttaaatcagaggcagaagatggtcttacagaggaaaactgaggaagcagctgctgctacaaaaagattgaaggagttgctggaagcaaagaagtcatcacgtgaaacatatggcagtgcaaatggttcggggatgcaggccttaatacgagctattgacgatgaactagaagtcactgtaagagcacacgaattacgctcatattacgagcgacaaatgcaagagagagcagcaatatccaaggaaatagcaaaactaaaggaggaatcaaagcacaagatcagtgattgtcctcaagctatgtcacctagtgctagaagttctaggatatcagcattagagaatatgttgtcctcctcatctagtgctatggtatctatggcttctcaactgtcagaagcagaggagcgggagcgtgtattcaatggtaaaggtagatggtaccatgtcaggtccctcccagaggcaaagaatataatgaattaccttttccagttagcatcatctgcaaggtctcaagtactggataaagaagtaatttgtaatgaaaaagaacacaccattactgaattgaaggaaaaggtggttgtgcttaatggtggaattaggcagttggaaacacaagtgagggatctaaggagccaaaatacacagcttttcactgcattgaacaatgcaaagaaatctgctaggtcgaatggcactggatttgctgggcgtaagagtgttcgatcttcccagcattttggttatagtaaggacaacttcaattgggtggatgatatggacatttcagacagtgagcactcggatgagttagagaatatgagtgatggatccgattcagactgggtacagtcgacgaggaaagccaaaaaacaccagagaagagtgtctagccattcaaatcctaacctggattgtcaaaatacacaaggcagtgcagaaccagagaagccctcagatgaaaagtgcattttgcccaaatacatttcatcagacggctgttcatgctcaaaatcctcctcatgcaagaccaacaaatgcgagtgcagagggtcaggtgcacaatgcggtgcaggctgtggttgtaaggattccaaatgttctaacagggattcttctactatagaaaaagccaatcagggagccatgcttcttcagaccgcgttttctgagaaggaagcccaagatgcaaagccaagaaagcctttgactaacattggtaataatgtggttaaccaaactgccgagacaaagaagcccaggaaaaaccggcgcaagtcggcaattcaactcgtcccaggacctctcctgccgtccgagccagtggccaccgaagctgcccctcgggacattgccaacattcccctcaagctaccgagagccatgtcctcggtgactcctgcggagagcaaccctcccctcacagaccgcaatgctgccaaacccgacgaatcagtgagcaccggcagcaagaatagcaccggagctgcagccacgagagcaccgtctcagctgagaaaaaacgcaaccaccgagaaggagaaccagttgcgataatccgattgctgacatgcagtatccgtgactccgtgtcgcttaagccttctgtttaacagtgggggaggctgcctcggcgtcctttggagaggcaggtagactctggaagggctggcgctctcgggttcctgtgggaaatggcgtgttctgtggaaagccttagctctgctttggctggaatgcgaccttcttgtataatggaaaagtaacatgctggattaagctatgtcagtctcgtaaatggtctccgttcattttgaacatactgaggaaatcaatctgcgcatctgtatgcttagactggtacactgcaggatgcacatttcctccacagttcgacagcataacagatgcaatcgtatatatcgttgcaaccaagtggtgttcttttgagattataatatatcttgaaaaagtcaaaggta

SEQ ID NO: 55932 - DNA, 928 bp, Zea Mays
caagagccccccaaaaagatccagccgccgcgcgccgcggcccctgaccctgagcctgtgagggaacgcagaagagggtttccgtgccgcgccacacgaccccccccggcgggcgatggacaccgaccacggcggcgcgtcggccgcgggcatggacgaggcggaggcggccttcttcgcgcgcgggggccggcggtgctgctgcttcccctggcccgccgccgcctcctcctcctcctcccaccagcgggtcggcgctggtggccggcccgcggtggaagaccttcatccggcggttcggccgcagcggcccgcccgcgcggccgcaccaccaccacttcggcggccgcaagctcaactacgacgcgctcagctacgcgctcaacttcgacgagggccacggcgccagccccgagggcgactacaccggctaccgcgacttctccgcgcgcttcgtcggaccgcctgcctccgccaagtcgtccatggacctcggcggccgcgacgcgccgccgctcttcggcccgccgccgctgccgccccacgacggagccggccgcgcctgaccgccacatcggtcgtcggaccggagcaggggaaggaacgctgattgagtggtcaaaggaaaggtgtccaaagtatctcaggaaaaaaaatggtgaccggttcgggtggatttgaggattccgcgggcgtcccggtgagaatggtgagcgagatcgctgctacaattccttcctccccctagtccccttcgtccgttcggttgattgattggtttagccactgtaaaaatgagattgctactgctgctactactacattcgttgtcatgttacctgctgctgtaatgaatccgttcaccctgtactccgtaccaattttgtcccaacattgaaacgaggtgcacaaacctttgcgattttcc

SEQ ID NO: 55933 - DNA, 3589 bp, Zea Mays
ctcaaaaccttatctgtggccgttatggctacaagaagtatccaaaatgcaaaagaccgctctccaccgtatcaagtagcatggctattttgatgcgcgcagtcgtcagttcttcgtgtcaggccgtgggctgtggcagaatcggcaccagacttggcctgaagcgcattgaggcagtttctgtctgttctttacgtatcaatctaggggcaagcccacgggttcgagagagggaggcccagtttgcaacactatctatgtggtgggcttgggttcgcaccgatcactggacgatggatggaggccccgtggtctatgcgcttcgttttccacacacgcagctgcagctgctcccctccgccccgcccccgcccccgcccccgccccgccccgcgtgcggcgtgccatgtcccgcccgctcagcagccagtacgccgccctcctctctgccgccgcccggaccgagccgcacgcagccggcgcgctccactgcgtcatcctcaggaccctaccgcacccgccgcccacccacctcctcaaccacctgctcaccgcctatggcaaggctggccgccacgcgcgcgcgcgccgcgtgttcgacgcaacgccccacccgaacctcttcacatacaacgcgctcctctccactctcgcccacgccaggctcctcgacgacatggactccctcttcgcgtccatggcgcagcgcgacaccgtctcctacaacgcggtcatcgccggcttctctggcggtggcgcgcacgctcgggcggtcaggttgtaccacacgttacttcgggcgggcagtagcgtcaggcctagccggatcacgatgtcggctatggtcatggcggcatcggccttgggtgaccgcgcccttggcaggcagtttcattgtcagattctgcggcttgggtttggggtgaacgcctttgtcgggagcccactggttggtatgtatgccaagatgggtctcattggggatgctaagagagtcttcgatgaaatggatggcaagaatgtggtgatgtataacacgatgatcaccgggctgctccgatgcaagatggttgaagaagcaaggcggttgtttgaggtgatgacggacagggattgcattacttggaccacgatggtcacggggttcacacagaacggattggagtcacaggctcttaacttttttaggaggatgaggtttcagggcattgctattgatcagtacaccttcggaagcatccttaccgcctgtggtgccctttcagccttggaacaggggaaacagatccatgcctacataatcaggactcactacgatgacaatgtctttgtcgggagtgcgcttgttgacatgtactcaaagtgcaggagcatcaaaccggcagaaactgctttcaggaggatgtcgtgcaaaaacatcatctcatggactgcactgattgttggttatggacaaaatgggtgcagcgaggaggctgtcagggtgttctctgagatgcaaagagatggcattgatcctgatgatttcaccctaggaagtgttataagttcttgcgctaacctagcaagcctagaggaaggagctcagttccactgtctagcgcttgtgtcaggattgatgcattacatcacagtgtctaatgcactagttaccttgtatgggaagtgtggtagcattgaggatgcacacagattgtttgatgagatgttgtttcacgatcaggtctcctggacagcacttgtcactgggtacgctcagtttgggagggcaaaagaaactattgatttgttcgagaagatgttggctaaggacgtgaagcctgatggagtaacctttatcggtgttctttctgcttgcagtcgtgcggggtttgttgagaaaggttgcagctacttccattccatgcagaaggaccatggtattgttcccatagatgatcactatacctgtatgattgacttgtatagcagatctgggagattaaaagaagctgaggagttcataaagcagatgccaatgcaccctgatgcaattggatgggggacattgctgagtgcttgcaggttgcggggcgacatggaaattggccaatgggctgctgagaatctcttagagatcgatccccagaatccagcaagctacgtgttgctatgcagcatgcatgctactaaaggtaactggaatcaggttgcccagctaaggcgtggaatgagggacaggcaagtgaagaaggagccaggttgtagctggatcaaatataagaataaagttcacatattttctgctgatgaccagtcccaccccttctccaagggaatttatgaaaagctcgagtggctcaactccaagatgcttgaagaaggatacaaacctgatgtcagttcagtgctgcatgatgttgcagatactgataaggttcacatggtcagccatcacagtgagaagcttgcgattgccttcggattaatgtttgttccacatgaaatgccaattcgtattgtcaagaatctgcgggtttgtgtagattgtcacaatgctacaaagcttatatctaagattactgggcgtgatattcttgtgagggatgctgtcagatttcacaagttcagcaacggggtttgctcttgtggagacttctggtgatgacaatatttctgtctctggtcaatgtcatttattcaagcatgaaatttgactgggaactgtgagtgaacaaaaggaaataaatgatttagttaagccaaacatggattgcatacttatattgagctctgctaaaggtgctgcattggtggtgttcagtacatcagagattgctgccagtgttgctcttgctgcaaccgggaaatgcagtagttctttgatcaaaagaactactgctaggtatgttcccaaggattgtgccatgttgttctctatttcaattttattatagcttcatcttttagaagggcagctctggtgtagtggtgagagttgtctcactaagtcactaggtcacggatttgaatcaacctctctgtatttgtgggggaaagtcttgcctcgatttatccctttcttagacctcactcagtggcagatggcctaatatggctaagtatggcccgagccataccttggcccagctcattaccccagaagcctcttcttcgcggctctttcgatctcgactcttcgccgcagctgctcgcttctccagcttctgcagccgcaggtcgccgtcgccctctctccaattctctgtactctccagcaagggtgaggcggcttccgtgccgtgcgcggtgcgtgtgcgcttcacggttttaggttctggccttcaacaattagcagttcagcacctgtgctttaagggctgcagcttgcttgtgcggcccgtggccgtgcgcgggtgcgtgtgtgcccgtccgtggctccggcctgcgccgtaggcgcacaacagtgctccgatttttattggtacattatcaatgatttttttcgtatcttatgtcattatcattaccaacgagtatatacatacaccgtgaatgatatgtatcgggggtaccccaagcactcaagcaattcgagaagcaagactat

SEQ ID NO: 55934 - DNA, 3614 bp, Zea Mays
ctcaaaaccttatctgtggccgttatggctacaagaagtatccaaaatgcaaaagaccgctctccaccgtatcaagtagcatggctattttgatgcgcgcagtcgtcagttcttcgtgtcaggccgtgggctgtggcagaatcggcaccagacttggcctgaagcgcattgaggcagtttctgtctgttctttacgtatcaatctaggggcaagcccacgggttcgagagagggaggcccagtttgcaacactatctatgtggtgggcttgggttcgcaccgatcactggacgatggatggaggccccgtggtctatgcgcttcgttttccacacacgcagctgcagctgctcccctccgccccgcccccgcccccgcccccgccccgccccgcgtgcggcgtgccatgtcccgcccgctcagcagccagtacgccgccctcctctctgccgccgcccggaccgagccgcacgcagccggcgcgctccactgcgtcatcctcaggaccctaccgcacccgccgcccacccacctcctcaaccacctgctcaccgcctatggcaaggctggccgccacgcgcgcgcgcgccgcgtgttcgacgcaacgccccacccgaacctcttcacatacaacgcgctcctctccactctcgcccacgccaggctcctcgacgacatggactccctcttcgcgtccatggcgcagcgcgacaccgtctcctacaacgcggtcatcgccggcttctctggcggtggcgcgcacgctcgggcggtcaggttgtaccacacgttacttcgggcgggcagtagcgtcaggcctagccggatcacgatgtcggctatggtcatggcggcatcggccttgggtgaccgcgcccttggcaggcagtttcattgtcagattctgcggcttgggtttggggtgaacgcctttgtcgggagcccactggttggtatgtatgccaagatgggtctcattggggatgctaagagagtcttcgatgaaatggatggcaagaatgtggtgatgtataacacgatgatcaccgggctgctccgatgcaagatggttgaagaagcaaggcggttgtttgaggtgatgacggacagggattgcattacttggaccacgatggtcacggggttcacacagaacggattggagtcacaggctcttaacttttttaggaggatgaggtttcagggcattgctattgatcagtacaccttcggaagcatccttaccgcctgtggtgccctttcagccttggaacaggggaaacagatccatgcctacataatcaggactcactacgatgacaatgtctttgtcgggagtgcgcttgttgacatgtactcaaagtgcaggagcatcaaaccggcagaaactgctttcaggaggatgtcgtgcaaaaacatcatctcatggactgcactgattgttggttatggacaaaatgggtgcagcgaggaggctgtcagggtgttctctgagatgcaaagagatggcattgatcctgatgatttcaccctaggaagtgttataagttcttgcgctaacctagcaagcctagaggaaggagctcagttccactgtctagcgcttgtgtcaggattgatgcattacatcacagtgtctaatgcactagttaccttgtatgggaagtgtggtagcattgaggatgcacacagattgtttgatgagatgttgtttcacgatcaggtctcctggacagcacttgtcactgggtacgctcagtttgggagggcaaaagaaactattgatttgttcgagaagatgttggctaaggacgtgaagcctgatggagtaacctttatcggtgttctttctgcttgcagtcgtgcggggtttgttgagaaaggttgcagctacttccattccatgcagaaggaccatggtattgttcccatagatgatcactatacctgtatgattgacttgtatagcagatctgggagattaaaagaagctgaggagttcataaagcagatgccaatgcaccctgatgcaattggatgggggacattgctgagtgcttgcaggttgcggggcgacatggaaattggccaatgggctgctgagaatctcttagagatcgatccccagaatccagcaagctacgtgttgctatgcagcatgcatgctactaaaggtaactggaatcaggttgcccagctaaggcgtggaatgagggacaggcaagtgaagaaggagccaggttgtagctggatcaaatataagaataaagttcacatattttctgctgatgaccagtcccaccccttctccaagggaatttatgaaaagctcgagtggctcaactccaagatgcttgaagaaggatacaaacctgatgtcagttcagtgctgcatgatgttgcagatactgataaggttcacatggtcagccatcacagtgagaagcttgcgattgccttcggattaatgtttgttccacatgaaatgccaattcgtattgtcaagaatctgcgggtttgtgtagattgtcacaatgctacaaagcttatatctaagattactgggcgtgatattcttgtgagggatgctgtcagatttcacaagttcagcaacggggtttgctcttgtggagacttctggtgatgacaatatttctgtctctggtcaatgtcatttattcaagcatgaaatttgactgggaactgtgagtgaacaaaaggaaataaatgatttagttaagccaaacatggattgcatacttatattgagctctgctaaaggtgctgcattggtggtgttcagtacatcagagattgctgccagtgttgctcttgctgcaaccgggaaatgcagtagttctttgatcaaaagaactactgctaggtatgttcccaaggattgtgccatgttgttctctatttcaattttattatagcttcatcttttagaagggcagctctggtgtagtggtgagagttgtctcactaagtcactaggtcacggatttgaatcaacctctctgtatttgtgggggaaagtcttgcctcgatttatccctttcttagacctcactcagtggcagatggcctaatatggctaagtatggcccgagccataccttggcccagctcattaccccagaagcctcttcttcgcggctctttcgatctcgactcttcgccgcagctgctcgcttctccagcttctgcagccgcaggtcgccgtcgccctctctccaattctctgtactctccagcaagggtgaggcggcttccgtgccgtgcgcggtgcgtgtgcgcttcacggttttaggttctggccttcaacaattagcagttcagcacctgtgctttaagggctgcagcttgcttgtgcggcccgtggccgtgcgcgggtgcgtgtgtgcccgtccgtggctccggcctgcgccgtaggcgcacaacagtgctccgatttttattggtacattatcaatgatttttttcgtatcttatgtcattatcattaccaacggtaaattcttcttctttttgttaagagtatatacatacaccgtgaatgatatgtatcgggggtaccccaagcactcaagcaattcgagaagcaagactat

SEQ ID NO: 55935 - DNA, 2959 bp, Zea Mays
ctcaaaaccttatctgtggccgttatggctacaagaagtatccaaaatgcaaaagaccgctctccaccgtatcaagtagcatggctattttgatgcgcgcagtcgtcagttcttcgtgtcaggccgtgggctgtggcagaatcggcaccagacttggcctgaagcgcattgaggcagtttctgtctgttctttacgtatcaatctaggggcaagcccacgggttcgagagagggaggcccagtttgcaacactatctatgtggtgggcttgggttcgcaccgatcactggacgatggatggaggccccgtggtctatgcgcttcgttttccacacacgcagctgcagctgctcccctccgccccgcccccgcccccgcccccgccccgccccgcgtgcggcgtgccatgtcccgcccgctcagcagccagtacgccgccctcctctctgccgccgcccggaccgagccgcacgcagccggcgcgctccactgcgtcatcctcaggaccctaccgcacccgccgcccacccacctcctcaaccacctgctcaccgcctatggcaaggctggccgccacgcgcgcgcgcgccgcgtgttcgacgcaacgccccacccgaacctcttcacatacaacgcgctcctctccactctcgcccacgccaggctcctcgacgacatggactccctcttcgcgtccatggcgcagcgcgacaccgtctcctacaacgcggtcatcgccggcttctctggcggtggcgcgcacgctcgggcggtcaggttgtaccacacgttacttcgggcgggcagtagcgtcaggcctagccggatcacgatgtcggctatggtcatggcggcatcggccttgggtgaccgcgcccttggcaggcagtttcattgtcagattctgcggcttgggtttggggtgaacgcctttgtcgggagcccactggttggtatgtatgccaagatgggtctcattggggatgctaagagagtcttcgatgaaatggatggcaagaatgtggtgatgtataacacgatgatcaccgggctgctccgatgcaagatggttgaagaagcaaggcggttgtttgaggtgatgacggacagggattgcattacttggaccacgatggtcacggggttcacacagaacggattggagtcacaggctcttaacttttttaggaggatgaggtttcagggcattgctattgatcagtacaccttcggaagcatccttaccgcctgtggtgccctttcagccttggaacaggggaaacagatccatgcctacataatcaggactcactacgatgacaatgtctttgtcgggagtgcgcttgttgacatgtactcaaagtgcaggagcatcaaaccggcagaaactgctttcaggaggatgtcgtgcaaaaacatcatctcatggactgcactgattgttggttatggacaaaatgggtgcagcgaggaggctgtcagggtgttctctgagatgcaaagagatggcattgatcctgatgatttcaccctaggaagtgttataagttcttgcgctaacctagcaagcctagaggaaggagctcagttccactgtctagcgcttgtgtcaggattgatgcattacatcacagtgtctaatgcactagttaccttgtatgggaagtgtggtagcattgaggatgcacacagattgtttgatgagatgttgtttcacgatcaggtctcctggacagcacttgtcactgggtacgctcagtttgggagggcaaaagaaactattgatttgttcgagaagatgttggctaaggacgtgaagcctgatggagtaacctttatcggtgttctttctgcttgcagtcgtgcggggtttgttgagaaaggttgcagctacttccattccatgcagaaggaccatggtattgttcccatagatgatcactatacctgtatgattgacttgtatagcagatctgggagattaaaagaagctgaggagttcataaagcagatgccaatgcaccctgatgcaattggatgggggacattgctgagtgcttgcaggttgcggggcgacatggaaattggccaatgggctgctgagaatctcttagagatcgatccccagaatccagcaagctacgtgttgctatgcagcatgcatgctactaaaggtaactggaatcaggttgcccagctaaggcgtggaatgagggacaggcaagtgaagaaggagccaggttgtagctggatcaaatataagaataaagttcacatattttctgctgatgaccagtcccaccccttctccaagggaatttatgaaaagctcgagtggctcaactccaagatgcttgaagaaggatacaaacctgatgtcagttcagtgctgcatgatgttgcagatactgataaggttcacatggtcagccatcacagtgagaagcttgcgattgccttcggattaatgtttgttccacatgaaatgccaattcgtattgtcaagaatctgcgggtttgtgtagattgtcacaatgctacaaagcttatatctaagattactgggcgtgatattcttgtgagggatgctgtcagatttcacaagttcagcaacggggtttgctcttgtggagacttctggtgatgacaatatttctgtctctggtcaatgtcatttattcaagcatgaaatttgactgggaactgtgagtgaacaaaaggaaataaatgatttagttaagccaaacatggattgcatacttatattgagctctgctaaaggtgctgcattggtggtgttcagtacatcagagattgctgccagtgttgctcttgctgcaaccgggaaatgcagtagttctttgatcaaaagaactactgctagagtatatacatacaccgtgaatgatatgtatcgggggtaccccaagcactcaagcaattcgagaagcaagactat

SEQ ID NO: 55936 - DNA, 3479 bp, Zea Mays
ctcaaaaccttatctgtggccgttatggctacaagaagtatccaaaatgcaaaagaccgctctccaccgtatcaagtagcatggctattttgatgcgcgcagtcgtcagttcttcgtgtcaggccgtgggctgtggcagaatcggcaccagacttggcctgaagcgcattgaggcagtttctgtctgttctttacgtatcaatctaggggcaagcccacgggttcgagagagggaggcccagtttgcaacactatctatgtggtgggcttgggttcgcaccgatcactggacgatggatggaggccccgtggtctatgcgcttcgttttccacacacgcagctgcagctgctcccctccgccccgcccccgcccccgcccccgccccgccccgcgtgcggcgtgccatgtcccgcccgctcagcagccagtacgccgccctcctctctgccgccgcccggaccgagccgcacgcagccggcgcgctccactgcgtcatcctcaggaccctaccgcacccgccgcccacccacctcctcaaccacctgctcaccgcctatggcaaggctggccgccacgcgcgcgcgcgccgcgtgttcgacgcaacgccccacccgaacctcttcacatacaacgcgctcctctccactctcgcccacgccaggctcctcgacgacatggactccctcttcgcgtccatggcgcagcgcgacaccgtctcctacaacgcggtcatcgccggcttctctggcggtggcgcgcacgctcgggcggtcaggttgtaccacacgttacttcgggcgggcagtagcgtcaggcctagccggatcacgatgtcggctatggtcatggcggcatcggccttgggtgaccgcgcccttggcaggcagtttcattgtcagattctgcggcttgggtttggggtgaacgcctttgtcgggagcccactggttggtatgtatgccaagatgggtctcattggggatgctaagagagtcttcgatgaaatggatggcaagaatgtggtgatgtataacacgatgatcaccgggctgctccgatgcaagatggttgaagaagcaaggcggttgtttgaggtgatgacggacagggattgcattacttggaccacgatggtcacggggttcacacagaacggattggagtcacaggctcttaacttttttaggaggatgaggtttcagggcattgctattgatcagtacaccttcggaagcatccttaccgcctgtggtgccctttcagccttggaacaggggaaacagatccatgcctacataatcaggactcactacgatgacaatgtctttgtcgggagtgcgcttgttgacatgtactcaaagtgcaggagcatcaaaccggcagaaactgctttcaggaggatgtcgtgcaaaaacatcatctcatggactgcactgattgttggttatggacaaaatgggtgcagcgaggaggctgtcagggtgttctctgagatgcaaagagatggcattgatcctgatgatttcaccctaggaagtgttataagttcttgcgctaacctagcaagcctagaggaaggagctcagttccactgtctagcgcttgtgtcaggattgatgcattacatcacagtgtctaatgcactagttaccttgtatgggaagtgtggtagcattgaggatgcacacagattgtttgatgagatgttgtttcacgatcaggtctcctggacagcacttgtcactgggtacgctcagtttgggagggcaaaagaaactattgatttgttcgagaagatgttggctaaggacgtgaagcctgatggagtaacctttatcggtgttctttctgcttgcagtcgtgcggggtttgttgagaaaggttgcagctacttccattccatgcagaaggaccatggtattgttcccatagatgatcactatacctgtatgattgacttgtatagcagatctgggagattaaaagaagctgaggagttcataaagcagatgccaatgcaccctgatgcaattggatgggggacattgctgagtgcttgcaggttgcggggcgacatggaaattggccaatgggctgctgagaatctcttagagatcgatccccagaatccagcaagctacgtgttgctatgcagcatgcatgctactaaaggtaactggaatcaggttgcccagctaaggcgtggaatgagggacaggcaagtgaagaaggagccaggttgtagctggatcaaatataagaataaagttcacatattttctgctgatgaccagtcccaccccttctccaagggaatttatgaaaagctcgagtggctcaactccaagatgcttgaagaaggatacaaacctgatgtcagttcagtgctgcatgatgttgcagatactgataaggttcacatggtcagccatcacagtgagaagcttgcgattgccttcggattaatgtttgttccacatgaaatgccaattcgtattgtcaagaatctgcgggtttgtgtagattgtcacaatgctacaaagcttatatctaagattactgggcgtgatattcttgtgagggatgctgtcagatttcacaagttcagcaacggggtttgctcttgtggagacttctggtgatggtgctgcattggtggtgttcagtacatcagagattgctgccagtgttgctcttgctgcaaccgggaaatgcagtagttctttgatcaaaagaactactgctaggtatgttcccaaggattgtgccatgttgttctctatttcaattttattatagcttcatcttttagaagggcagctctggtgtagtggtgagagttgtctcactaagtcactaggtcacggatttgaatcaacctctctgtatttgtgggggaaagtcttgcctcgatttatccctttcttagacctcactcagtggcagatggcctaatatggctaagtatggcccgagccataccttggcccagctcattaccccagaagcctcttcttcgcggctctttcgatctcgactcttcgccgcagctgctcgcttctccagcttctgcagccgcaggtcgccgtcgccctctctccaattctctgtactctccagcaagggtgaggcggcttccgtgccgtgcgcggtgcgtgtgcgcttcacggttttaggttctggccttcaacaattagcagttcagcacctgtgctttaagggctgcagcttgcttgtgcggcccgtggccgtgcgcgggtgcgtgtgtgcccgtccgtggctccggcctgcgccgtaggcgcacaacagtgctccgatttttattggtacattatcaatgatttttttcgtatcttatgtcattatcattaccaacggtaaattcttcttctttttgttaagagtatatacatacaccgtgaatgatatgtatcgggggtaccccaagcactcaagcaattcgagaagcaagactat

SEQ ID NO: 55937 - DNA, 3045 bp, Zea Mays
ctcaaaaccttatctgtggccgttatggctacaagaagtatccaaaatgcaaaagaccgctctccaccgtatcaagtagcatggctattttgatgcgcgcagtcgtcagttcttcgtgtcaggccgtgggctgtggcagaatcggcaccagacttggcctgaagcgcattgaggcagtttctgtctgttctttacgtatcaatctaggggcaagcccacgggttcgagagagggaggcccagtttgcaacactatctatgtggtgggcttgggttcgcaccgatcactggacgatggatggaggccccgtggtctatgcgcttcgttttccacacacgcagctgcagctgctcccctccgccccgcccccgcccccgcccccgccccgccccgcgtgcggcgtgccatgtcccgcccgctcagcagccagtacgccgccctcctctctgccgccgcccggaccgagccgcacgcagccggcgcgctccactgcgtcatcctcaggaccctaccgcacccgccgcccacccacctcctcaaccacctgctcaccgcctatggcaaggctggccgccacgcgcgcgcgcgccgcgtgttcgacgcaacgccccacccgaacctcttcacatacaacgcgctcctctccactctcgcccacgccaggctcctcgacgacatggactccctcttcgcgtccatggcgcagcgcgacaccgtctcctacaacgcggtcatcgccggcttctctggcggtggcgcgcacgctcgggcggtcaggttgtaccacacgttacttcgggcgggcagtagcgtcaggcctagccggatcacgatgtcggctatggtcatggcggcatcggccttgggtgaccgcgcccttggcaggcagtttcattgtcagattctgcggcttgggtttggggtgaacgcctttgtcgggagcccactggttggtatgtatgccaagatgggtctcattggggatgctaagagagtcttcgatgaaatggatggcaagaatgtggtgatgtataacacgatgatcaccgggctgctccgatgcaagatggttgaagaagcaaggcggttgtttgaggtgatgacggacagggattgcattacttggaccacgatggtcacggggttcacacagaacggattggagtcacaggctcttaacttttttaggaggatgaggtttcagggcattgctattgatcagtacaccttcggaagcatccttaccgcctgtggtgccctttcagccttggaacaggggaaacagatccatgcctacataatcaggactcactacgatgacaatgtctttgtcgggagtgcgcttgttgacatgtactcaaagtgcaggagcatcaaaccggcagaaactgctttcaggaggatgtcgtgcaaaaacatcatctcatggactgcactgattgttggttatggacaaaatgggtgcagcgaggaggctgtcagggtgttctctgagatgcaaagagatggcattgatcctgatgatttcaccctaggaagtgttataagttcttgcgctaacctagcaagcctagaggaaggagctcagttccactgtctagcgcttgtgtcaggattgatgcattacatcacagtgtctaatgcactagttaccttgtatgggaagtgtggtagcattgaggatgcacacagattgtttgatgagatgttgtttcacgatcaggtctcctggacagcacttgtcactgggtacgctcagtttgggagggcaaaagaaactattgatttgttcgagaagatgttggctaaggacgtgaagcctgatggagtaacctttatcggtgttctttctgcttgcagtcgtgcggggtttgttgagaaaggttgcagctacttccattccatgcagaaggaccatggtattgttcccatagatgatcactatacctgtatgattgacttgtatagcagatctgggagattaaaagaagctgaggagttcataaagcagatgccaatgcaccctgatgcaattggatgggggacattgctgagtgcttgcaggttgcggggcgacatggaaattggccaatgggctgctgagaatctcttagagatcgatccccagaatccagcaagctacgtgttgctatgcagcatgcatgctactaaaggtaactggaatcaggttgcccagctaaggcgtggaatgagggacaggcaagtgaagaaggagccaggttgtagctggatcaaatataagaataaagttcacatattttctgctgatgaccagtcccaccccttctccaagggaatttatgaaaagctcgagtggctcaactccaagatgcttgaagaaggatacaaacctgatgtcagttcagtgctgcatgatgttgcagatactgataaggttcacatggtcagccatcacagtgagaagcttgcgattgccttcggattaatgtttgttccacatgaaatgccaattcgtattgtcaagaatctgcgggtttgtgtagattgtcacaatgctacaaagcttatatctaagattactgggcgtgatattcttgtgagggatgctgtcagatttcacaagttcagcaacggggtttgctcttgtggagacttctggtgatgacaatatttctgtctctggtcaatgtcatttattcaagcatgaaatttgactgggaactgtgagtgaacaaaaggaaataaatgatttagttaagccaaacatggattgcatacttatattgagctctgctaaaggtgctgcattggtggtgttcagtacatcagagattgctgccagtgttgctcttgctgcaaccgggaaatgcagtagttctttgatcaaaagaactactgctagatttttattggtacattatcaatgatttttttcgtatcttatgtcattatcattaccaacggtaaattcttcttctttttgttaagagtatatacatacaccgtgaatgatatgtatcgggggtaccccaagcactcaagcaattcgagaagcaagactat

SEQ ID NO: 55938 - DNA, 3152 bp, Zea Mays
ctcaaaaccttatctgtggccgttatggctacaagaagtatccaaaatgcaaaagaccgctctccaccgtatcaagtagcatggctattttgatgcgcgcagtcgtcagttcttcgtgtcaggccgtgggctgtggcagaatcggcaccagacttggcctgaagcgcattgaggcagtttctgtctgttctttacgtatcaatctaggggcaagcccacgggttcgagagagggaggcccagtttgcaacactatctatgtggtgggcttgggttcgcaccgatcactggacgatggatggaggccccgtggtctatgcgcttcgttttccacacacgcagctgcagctgctcccctccgccccgcccccgcccccgcccccgccccgccccgcgtgcggcgtgccatgtcccgcccgctcagcagccagtacgccgccctcctctctgccgccgcccggaccgagccgcacgcagccggcgcgctccactgcgtcatcctcaggaccctaccgcacccgccgcccacccacctcctcaaccacctgctcaccgcctatggcaaggctggccgccacgcgcgcgcgcgccgcgtgttcgacgcaacgccccacccgaacctcttcacatacaacgcgctcctctccactctcgcccacgccaggctcctcgacgacatggactccctcttcgcgtccatggcgcagcgcgacaccgtctcctacaacgcggtcatcgccggcttctctggcggtggcgcgcacgctcgggcggtcaggttgtaccacacgttacttcgggcgggcagtagcgtcaggcctagccggatcacgatgtcggctatggtcatggcggcatcggccttgggtgaccgcgcccttggcaggcagtttcattgtcagattctgcggcttgggtttggggtgaacgcctttgtcgggagcccactggttggtatgtatgccaagatgggtctcattggggatgctaagagagtcttcgatgaaatggatggcaagaatgtggtgatgtataacacgatgatcaccgggctgctccgatgcaagatggttgaagaagcaaggcggttgtttgaggtgatgacggacagggattgcattacttggaccacgatggtcacggggttcacacagaacggattggagtcacaggctcttaacttttttaggaggatgaggtttcagggcattgctattgatcagtacaccttcggaagcatccttaccgcctgtggtgccctttcagccttggaacaggggaaacagatccatgcctacataatcaggactcactacgatgacaatgtctttgtcgggagtgcgcttgttgacatgtactcaaagtgcaggagcatcaaaccggcagaaactgctttcaggaggatgtcgtgcaaaaacatcatctcatggactgcactgattgttggttatggacaaaatgggtgcagcgaggaggctgtcagggtgttctctgagatgcaaagagatggcattgatcctgatgatttcaccctaggaagtgttataagttcttgcgctaacctagcaagcctagaggaaggagctcagttccactgtctagcgcttgtgtcaggattgatgcattacatcacagtgtctaatgcactagttaccttgtatgggaagtgtggtagcattgaggatgcacacagattgtttgatgagatgttgtttcacgatcaggtctcctggacagcacttgtcactgggtacgctcagtttgggagggcaaaagaaactattgatttgttcgagaagatgttggctaaggacgtgaagcctgatggagtaacctttatcggtgttctttctgcttgcagtcgtgcggggtttgttgagaaaggttgcagctacttccattccatgcagaaggaccatggtattgttcccatagatgatcactatacctgtatgattgacttgtatagcagatctgggagattaaaagaagctgaggagttcataaagcagatgccaatgcaccctgatgcaattggatgggggacattgctgagtgcttgcaggttgcggggcgacatggaaattggccaatgggctgctgagaatctcttagagatcgatccccagaatccagcaagctacgtgttgctatgcagcatgcatgctactaaaggtaactggaatcaggttgcccagctaaggcgtggaatgagggacaggcaagtgaagaaggagccaggttgtagctggatcaaatataagaataaagttcacatattttctgctgatgaccagtcccaccccttctccaagggaatttatgaaaagctcgagtggctcaactccaagatgcttgaagaaggatacaaacctgatgtcagttcagtgctgcatgatgttgcagatactgataaggttcacatggtcagccatcacagtgagaagcttgcgattgccttcggattaatgtttgttccacatgaaatgccaattcgtattgtcaagaatctgcgggtttgtgtagattgtcacaatgctacaaagcttatatctaagattactgggcgtgatattcttgtgagggatgctgtcagatttcacaagttcagcaacggggtttgctcttgtggagacttctggtgctgcattggtggtgttcagtacatcagagattgctgccagtgttgctcttgctgcaaccgggaaatgcagtagttctttgatcaaaagaactactgctaggtatgttcccaaggattgtgccatgttgttctctatttcaattttattatagcttcatcttttagaagggcagctctggtgtagtggtgagagttgtctcactaagtcactaggtcacggatttgaatcaacctctctgtatttgtgggggaaagtcttgcctcgatttatccctttcttagacctcactcagtggcagatggcctaatatggctaagtatggcccgagccataccttggcccagctcattaccccagaagcctcttcttcgcggctctttcgatctcgactcttcgccgcagctgctcgcttctccagcttctgcagccgcagagtatatacatacaccgtgaatgatatgtatcgggggtaccccaagcactcaagcaattcgagaagcaagactat

SEQ ID NO: 55939 - DNA, 3255 bp, Zea Mays
attcagagaccctcctccgcctcagcgtctcagtggccatgtcggatccacccacccaccaccaacgccactagtagcagccgaggagatagctgcgacggcgactcggtttcggcggcggcggcatgaagaacttcctcaggaagctccatatcggcgagggctcgagcgacggagcctcaacgcccccgcccccgccctctcgcaaaggcggtaccggtaccggtggcggtgttggtggggttcatcatcatcaaccgcaccacgatcaaaggcatcagacctcggcggtatccagttggctcgattcggtgcctaccaggcctccgccgccgattcctgtcgaagcggaggtgccgacttcgtcgtcgtcggcgtcgtcgctcggggttggggcacaggataggaaagcgaggcagtccgggggagtcgagaggcggcggtcccagcaggaggagagggagcggaggcggtcgcaagaggaagtgacgttgagggagcggaggcggtcgcaagaggaagagacgttgagggagctgaggcggtcgcgggaggaggagatggagcaggagcggaggcggtctcaagaacaggacgaggtggaggagagggtgataagagagtcgtcagaagcggaggagaggaagcgggagagggagaaggaggaagacgacctggaggcgtaccagattcagctggtgctagagatgagcgcgcgggacaatccggaggagatggagatggaggtcgccaagcagcttagtctgggcttctgccctccacagagatcccctgcggaggtcctcgcggtccgataccggaatttcaatgcccttggctatgacgacaaaatattggatggattttatgatctgttttatgttggaaatgggccagcagcagttactatgccctcttttgctgagctacgagtccagccattttcacataaagtcgattgggaagctgtgttggtccacagaggtgaagaccctgagcttatgaaacttcagcaggaggccttaatcatgaatcatgaacttcattcgagaacttcagaatctgtgggcaatgctttggttaagggacttgcaaatctagttgctagacacatgggtggagtgtttgatcctgagcgcatgtcagcgaaataccagaatatgcttagctacttaagaagtgatattggaagtgtaattgtgccacttggccagctaaaaattggtctagctcgtcatcgtgcactgctgtttaaggttttggctgatggccttgatgtaccttgccgtctcctgaaaggaaagcgatacactggatcagatgatggagctttgaacattgtgaaatttaaagacggaagggaatttattgttgatcttgtgtctgatcctggtacacttattccttcagatgtttctgttttgtccacagaattagacaggaatttcgtctctgataatcaacactttggccaagatgataataccaatctgttgggatcttctcttagcggtgtatcgagctcagcgtatggttcttttgagtatgagttacttgaccgaagatccacttcaagcaatgttggtccttctgatactgatggacctacaactaatctgacaagcaatcaacaaaatatgtcctcaaattcattcgataaactatcagttagcacattcacaagtgaaaataggcctgtcagtaaagaatctacaaatccagattacattattgttggaaaaaacaaagaaaaatatactgcggccgttgattcttcatcatcttcaccctctacaccagatatgggcagcgctccagctgtccggagaatgaaagtgaaggacatttcagagtacatgattaatgctgccaaggaaaatccacaattagttcagaaaatccatgaggttttacttgaaaatggtgttatggcaccacctgacctgttttcagaagattcaatggaagaaccaaaggacctcatcgtgtatgacaccaccctgtttcaaagcaaggatgaaatgaaaaggaggatgaatgagcttgggtcaagggaatacacagatcgtggtcatgatccattgttgcctcatcatcctggacatgaactccaaccaaaagtggctcctcaccgagcacctctggagtcacttaagcctgttgagggtttgggcatttaccacccacatgatatcagagatatagcatctccgtttgtttctcagtacgaaccttctgcacctcctcaggaagcttcatcccaacttacaaagcaattgcctgtcacagctgctgctgttgcaactgctgcagtggtggcatcctctatggttgctgcagccgctttatctaccaatgacgtaaactttgacgtgcctgttgctgctgcagccactgtcactgcagctgcagttgttgccacaactgctgctgttagcaagcaatatgagcactcggatcctggcaatcagctgtttagcgtaccaagtacttctcaaggaaataaatcagttgagaaagctggaggtgacctttgggacaaacaccatgttgaaactgatcatggccaagataattgtctggaccaagaagttcctcaggaagccgaacgaacctctgataaatcaaataaatcaagtgggacagaggatgtgaaatctgatcttgctttggacaatgttgcagagtttgagatccaatgggaagaaatttctattggtgaacggattggccttggatcgtttggagaagtttatagaggagaatggcatggaacagaagttgctgtcaagaagtttttgcaacaggatatttcaagtgatgctctggaagagtttagagctgaggtgcgaataatgaagaggttgcgccatcctaatgttgttctcttcatgggtgccatcactcgtgtgcctaatctttctattgtcactgaatttcttccaagaggcagtttgtttcgtttgattcaccgacccaacaaccagttagatgaaaggaagcgcttaagaatggcacttgatgtggctcgtggtatgaattatctgcataattgttcaccagttatagttcatagagatctgaaatccccgaatctactggtggacaagaattgggttgtgaaggtttgcgattttggtttgtcaagaatgaagaacaataccttcctgtcatcaagatcaacagctggaacagtattaataaacttactctatggtgctccttgaatatggaaaagaaatggaattttgaagg

SEQ ID NO: 55940 - DNA, 3261 bp, Zea Mays
cctcctccgcctcagcgtctcagtggccatgtcggatccacccacccaccaccaacgccactagtagcagccgaggagatagctgcgacggcgactcggtttcggcggcggcggcatgaagaacttcctcaggaagctccatatcggcgagggctcgagcgacggagcctcaacgcccccgcccccgccctctcgcaaaggcggtaccggtaccggtggcggtgttggtggggttcatcatcatcaaccgcaccacgatcaaaggcatcagacctcggcggtatccagttggctcgattcggtgcctaccaggcctccgccgccgattcctgtcgaagcggaggtgccgacttcgtcgtcgtcggcgtcgtcgctcggggttggggcacaggataggaaagcgaggcagtccgggggagtcgagaggcggcggtcccagcaggaggagagggagcggaggcggtcgcaagaggaagtgacgttgagggagcggaggcggtcgcaagaggaagagacgttgagggagctgaggcggtcgcgggaggaggagatggagcaggagcggaggcggtctcaagaacaggacgaggtggaggagagggtgataagagagtcgtcagaagcggaggagaggaagcgggagagggagaaggaggaagacgacctggaggcgtaccagattcagctggtgctagagatgagcgcgcgggacaatccggaggagatggagatggaggtcgccaagcagcttagtctgggcttctgccctccacagagatcccctgcggaggtcctcgcggtccgataccggaatttcaatgcccttggctatgacgacaaaatattggatggattttatgatctgttttatgttggaaatgggccagcagcagttactatgccctcttttgctgagctacgagtccagccattttcacataaagtcgattgggaagctgtgttggtccacagaggtgaagaccctgagcttatgaaacttcagcaggaggccttaatcatgaatcatgaacttcattcgagaacttcagaatctgtgggcaatgctttggttaagggacttgcaaatctagttgctagacacatgggtggagtgtttgatcctgagcgcatgtcagcgaaataccagaatatgcttagctacttaagaagtgatattggaagtgtaattgtgccacttggccagctaaaaattggtctagctcgtcatcgtgcactgctgtttaaggttttggctgatggccttgatgtaccttgccgtctcctgaaaggaaagcgatacactggatcagatgatggagctttgaacattgtgaaatttaaagacggaagggaatttattgttgatcttgtgtctgatcctggtacacttattccttcagatgtttctgttttgtccacagaattagacaggaatttcgtctctgataatcaacactttggccaagatgataataccaatctgttgggatcttctcttagcggtgtatcgagctcagcgtatggttcttttgagtatgagttacttgaccgaagatccacttcaagcaatgttggtccttctgatactgatggacctacaactaatctgacaagcaatcaacaaaatatgtcctcaaattcattcgataaactatcagttagcacattcacaagtgaaaataggcctgtcagtaaagaatctacaaatccagattacattattgttggaaaaaacaaagaaaaatatactgcggccgttgattcttcatcatcttcaccctctacaccagatatgggcagcgctccagctgtccggagaatgaaagtgaaggacatttcagagtacatgattaatgctgccaaggaaaatccacaattagttcagaaaatccatgaggttttacttgaaaatggtgttatggcaccacctgacctgttttcagaagattcaatggaagaaccaaaggacctcatcgtgtatgacaccaccctgtttcaaagcaaggatgaaatgaaaaggaggatgaatgagcttgggtcaagggaatacacagatcgtggtcatgatccattgttgcctcatcatcctggacatgaactccaaccaaaagtggctcctcaccgagcacctctggagtcacttaagcctgttgagggtttgggcatttaccacccacatgatatcagagatatagcatctccgtttgtttctcagtacgaaccttctgcacctcctcaggaagcttcatcccaacttacaaagcaattgcctgtcacagctgctgctgttgcaactgctgcagtggtggcatcctctatggttgctgcagccgctttatctaccaatgacgtaaactttgacgtgcctgttgctgctgcagccactgtcactgcagctgcagttgttgccacaactgctgctgttagcaagcaatatgagcactcggatcctggcaatcagctgtttagcgtaccaagtacttctcaaggaaataaatcagttgagaaagctggaggtgacctttgggacaaacaccatgttgaaactgatcatggccaagataattgtctggaccaagaagttcctcaggaagccgaacgaacctctgataaatcaaataaatcaagtgggacagaggatgtgaaatctgatcttgctttggacaatgttgcagagtttgagatccaatgggaagaaatttctattggtgaacggattggccttggatcgtttggagaagtttatagaggagaatggcatggaacagaagttgctgtcaagaagtttttgcaacaggatatttcaagtgatgctctggaagagtttagagctgagaggcagtttgtttcgtttgattcaccgacccaacaaccagttagatgaaaggaagcgcttaagaatggcacttgatgtggctcgtggtatgaattatctgcataattgttcaccagttatagttcatagagatctgaaatccccgaatctactggtggacaagaattgggttgtgaaggtttgcgattttggtttgtcaagaatgaagaacaataccttcctgtcatcaagatcaacagctggaacagtgtatccaaattgcttgaagtgtgtctaactttttgtttttgggagagtgtacaggcacttgcatttgcctcacttgattatattttgttccaatgttgagtcctgtaccatgtaaattaaaattgtttccatttgttctaagtttttttgctgagctcttatatatttagagttta

SEQ ID NO: 55941 - DNA, 2934 bp, Zea Mays
cagagaccctcctccgcctcagcgtctcagtggccatgtcggatccacccacccaccaccaacgccactagtagcagccgaggagatagctgcgacggcgactcggtttcggcggcggcggcatgaagaacttcctcaggaagctccatatcggcgagggctcgagcgacggagcctcaacgcccccgcccccgccctctcgcaaaggcggtaccggtaccggtggcggtgttggtggggttcatcatcatcaaccgcaccacgatcaaaggcatcagacctcggcggtatccagttggctcgattcggtgcctaccaggcctccgccgccgattcctgtcgaagcggaggtgccgacttcgtcgtcgtcggcgtcgtcgctcggggttggggcacaggataggaaagcgaggcagtccgggggagtcgagaggcggcggtcccagcaggaggagagggagcggaggcggtcgcaagaggaagtgacgttgagggagcggaggcggtcgcaagaggaagagacgttgagggagctgaggcggtcgcgggaggaggagatggagcaggagcggaggcggtctcaagaacaggacgaggtggaggagagggtgataagagagtcgtcagaagcggaggagaggaagcgggagagggagaaggaggaagacgacctggaggcgtaccagattcagctggtgctagagatgagcgcgcgggacaatccggaggagatggagatggaggtcgccaagcagcttagtctgggcttctgccctccacagagatcccctgcggaggtcctcgcggtccgataccgggttttggctgatggccttgatgtaccttgccgtctcctgaaaggaaagcgatacactggatcagatgatggagctttgaacattgtgaaatttaaagacggaagggaatttattgttgatcttgtgtctgatcctggtacacttattccttcagatgtttctgttttgtccacagaattagacaggaatttcgtctctgataatcaacactttggccaagatgataataccaatctgttgggatcttctcttagcggtgtatcgagctcagcgtatggttcttttgagtatgagttacttgaccgaagatccacttcaagcaatgttggtccttctgatactgatggacctacaactaatctgacaagcaatcaacaaaatatgtcctcaaattcattcgataaactatcagttagcacattcacaagtgaaaataggcctgtcagtaaagaatctacaaatccagattacattattgttggaaaaaacaaagaaaaatatactgcggccgttgattcttcatcatcttcaccctctacaccagatatgggcagcgctccagctgtccggagaatgaaagtgaaggacatttcagagtacatgattaatgctgccaaggaaaatccacaattagttcagaaaatccatgaggttttacttgaaaatggtgttatggcaccacctgacctgttttcagaagattcaatggaagaaccaaaggacctcatcgtgtatgacaccaccctgtttcaaagcaaggatgaaatgaaaaggaggatgaatgagcttgggtcaagggaatacacagatcgtggtcatgatccattgttgcctcatcatcctggacatgaactccaaccaaaagtggctcctcaccgagcacctctggagtcacttaagcctgttgagggtttgggcatttaccacccacatgatatcagagatatagcatctccgtttgtttctcagtacgaaccttctgcacctcctcaggaagcttcatcccaacttacaaagcaattgcctgtcacagctgctgctgttgcaactgctgcagtggtggcatcctctatggttgctgcagccgctttatctaccaatgacgtaaactttgacgtgcctgttgctgctgcagccactgtcactgcagctgcagttgttgccacaactgctgctgttagcaagcaatatgagcactcggatcctggcaatcagctgtttagcgtaccaagtacttctcaaggaaataaatcagttgagaaagctggaggtgacctttgggacaaacaccatgttgaaactgatcatggccaagataattgtctggaccaagaagttcctcaggaagccgaacgaacctctgataaatcaaataaatcaagtgggacagaggatgtgaaatctgatcttgctttggacaatgttgcagagtttgagatccaatgggaagaaatttctattggtgaacggattggccttggatcgtttggagaagtttatagaggagaatggcatggaacagaagttgctgtcaagaagtttttgcaacaggatatttcaagtgatgctctggaagagtttagagctgaggtgcgaataatgaagaggttgcgccatcctaatgttgttctcttcatgggtgccatcactcgtgtgcctaatctttctattgtcactgaatttcttccaagaggcagtttgtttcgtttgattcaccgacccaacaaccagttagatgaaaggaagcgcttaagaatggcacttgatgtggctcgtggtatgaattatctgcataattgttcaccagttatagttcatagagatctgaaatccccgaatctactggtggacaagaattgggttgtgaaggtttgcgattttggtttgtcaagaatgaagaacaataccttcctgtcatcaagatcaacagctggaacagtgtatccaaattgcttgaagtgtgtctaactttttgtttttgggagagtgtacaggcacttgcatttgcctcacttgattatattttgttccaatgttgagtcctgtaccatgtaaattaaaattgtttccatttgttctaagtttttttgctgagctcttatatatttagagttta

SEQ ID NO: 55942 - DNA, 3379 bp, Zea Mays
gcgagggctattcagagaccctcctccgcctcagcgtctcagtggccatgtcggatccacccacccaccaccaacgccactagtagcagccgaggagatagctgcgacggcgactcggtttcggcggcggcggcatgaagaacttcctcaggaagctccatatcggcgagggctcgagcgacggagcctcaacgcccccgcccccgccctctcgcaaaggcggtaccggtaccggtggcggtgttggtggggttcatcatcatcaaccgcaccacgatcaaaggcatcagacctcggcggtatccagttggctcgattcggtgcctaccaggcctccgccgccgattcctgtcgaagcggaggtgccgacttcgtcgtcgtcggcgtcgtcgctcggggttggggcacaggataggaaagcgaggcagtccgggggagtcgagaggcggcggtcccagcaggaggagagggagcggaggcggtcgcaagaggaagtgacgttgagggagcggaggcggtcgcaagaggaagagacgttgagggagctgaggcggtcgcgggaggaggagatggagcaggagcggaggcggtctcaagaacaggacgaggtggaggagagggtgataagagagtcgtcagaagcggaggagaggaagcgggagagggagaaggaggaagacgacctggaggcgtaccagattcagctggtgctagagatgagcgcgcgggacaatccggaggagatggagatggaggtcgccaagcagcttagtctgggcttctgccctccacagagatcccctgcggaggtcctcgcggtccgataccggaatttcaatgcccttggctatgacgacaaaatattggatggattttatgatctgttttatgttggaaatgggccagcagcagttactatgccctcttttgctgagctacgagtccagccattttcacataaagtcgattgggaagctgtgttggtccacagaggtgaagaccctgagcttatgaaacttcagcaggaggccttaatcatgaatcatgaacttcattcgagaacttcagaatctgtgggcaatgctttggttaagggacttgcaaatctagttgctagacacatgggtggagtgtttgatcctgagcgcatgtcagcgaaataccagaatatgcttagctacttaagaagtgatattggaagtgtaattgtgccacttggccagctaaaaattggtctagctcgtcatcgtgcactgctgtttaaggttttggctgatggccttgatgtaccttgccgtctcctgaaaggaaagcgatacactggatcagatgatggagctttgaacattgtgaaatttaaagacggaagggaatttattgttgatcttgtgtctgatcctggtacacttattccttcagatgtttctgttttgtccacagaattagacaggaatttcgtctctgataatcaacactttggccaagatgataataccaatctgttgggatcttctcttagcggtgtatcgagctcagcgtatggttcttttgagtatgagttacttgaccgaagatccacttcaagcaatgttggtccttctgatactgatggacctacaactaatctgacaagcaatcaacaaaatatgtcctcaaattcattcgataaactatcagttagcacattcacaagtgaaaataggcctgtcagtaaagaatctacaaatccagattacattattgttggaaaaaacaaagaaaaatatactgcggccgttgattcttcatcatcttcaccctctacaccagatatgggcagcgctccagctgtccggagaatgaaagtgaaggacatttcagagtacatgattaatgctgccaaggaaaatccacaattagttcagaaaatccatgaggttttacttgaaaatggtgttatggcaccacctgacctgttttcagaagattcaatggaagaaccaaaggacctcatcgtgtatgacaccaccctgtttcaaagcaaggatgaaatgaaaaggaggatgaatgagcttgggtcaagggaatacacagatcgtggtcatgatccattgttgcctcatcatcctggacatgaactccaaccaaaagtggctcctcaccgagcacctctggagtcacttaagcctgttgagggtttgggcatttaccacccacatgatatcagagatatagcatctccgtttgtttctcagtacgaaccttctgcacctcctcaggaagcttcatcccaacttacaaagcaattgcctgtcacagctgctgctgttgcaactgctgcagtggtggcatcctctatggttgctgcagccgctttatctaccaatgacgtaaactttgacgtgcctgttgctgctgcagccactgtcactgcagctgcagttgttgccacaactgctgctgttagcaagcaatatgagcactcggatcctggcaatcagctgtttagcgtaccaagtacttctcaaggaaataaatcagttgagaaagctggaggtgacctttgggacaaacaccatgttgaaactgatcatggccaagataattgtctggaccaagaagttcctcaggaagccgaacgaacctctgataaatcaaataaatcaagtgggacagaggatgtgaaatctgatcttgctttggacaatgttgcagagtttgagatccaatgggaagaaatttctattggtgaacggattggccttggatcgtttggagaagtttatagaggagaatggcatggaacagaagttgctgtcaagaagtttttgcaacaggatatttcaagtgatgctctggaagagtttagagctgaggtgcgaataatgaagaggttgcgccatcctaatgttgttctcttcatgggtgccatcactcgtgtgcctaatctttctattgtcactgaatttcttccaagaggcagtttgtttcgtttgattcaccgacccaacaaccagttagatgaaaggaagcgcttaagaatggcacttgatggctcgtggtatgaattatctgcataattgttcaccagttatagttcatagagatctgaaatccccgaatctactggtggacaagaattgggttgtgaaggtttgcgattttggtttgtcaagaatgaagaacaataccttcctgtcatcaagatcaacagctggaacagtgtatccaaattgcttgaagtgtgtctaactttttgtttttgggagagtgtacaggcacttgcatttgcctcacttgattatattttgttccaatgttgagtcctgtaccatgtaaattaaaattgtttccatttgttctaagtttttttgctgagctcttatatatttagagttta

SEQ ID NO: 55943 - DNA, 3171 bp, Zea Mays
ctacagtatttttctctctatagattgcagctgcagcagtccaaacagctgcaccagtgtcggcgagggctattcagagaccctcctccgcctcagcgtctcagtggccatgtcggatccacccacccaccaccaacgccactagtagcagccgaggagatagctgcgacggcgactcggtttcggcggcggcggcatgaagaacttcctcaggaagctccatatcggcgagggctcgagcgacggagcctcaacgcccccgcccccgccctctcgcaaaggcggtaccggtaccggtggcggtgttggtggggttcatcatcatcaaccgcaccacgatcaaaggcatcagacctcggcggtatccagttggctcgattcggtgcctaccaggcctccgccgccgattcctgtcgaagcggaggtgccgacttcgtcgtcgtcggcgtcgtcgctcggggttggggcacaggataggaaagcgaggcagtccgggggagtcgagaggcggcggtcccagcaggaggagagggagcggaggcggtcgcaagaggaagtgacgttgagggagcggaggcggtcgcaagaggaagagacgttgagggagctgaggcggtcgcgggaggaggagatggagcaggagcggaggcggtctcaagaacaggacgaggtggaggagagggtgataagagagtcgtcagaagcggaggagaggaagcgggagagggagaaggaggaagacgacctggaggcgtaccagattcagctggtgctagagatgagcgcgcgggacaatccggaggagatggagatggaggtcgccaagcagcttagtctgggcttctgccctccacagagatcccctgcggaggtcctcgcggtccgataccggaatttcaatgcccttggctatgacgacaaaatattggatggattttatgatctgttttatgttggaaatgggccagcagcagttactatgccctcttttgctgagctacgagtccagccattttcacataaagtcgattgggaagctgtgttggtccacagaggttttggctgatggccttgatgtaccttgccgtctcctgaaaggaaagcgatacactggatcagatgatggagctttgaacattgtgaaatttaaagacggaagggaatttattgttgatcttgtgtctgatcctggtacacttattccttcagatgtttctgttttgtccacagaattagacaggaatttcgtctctgataatcaacactttggccaagatgataataccaatctgttgggatcttctcttagcggtgtatcgagctcagcgtatggttcttttgagtatgagttacttgaccgaagatccacttcaagcaatgttggtccttctgatactgatggacctacaactaatctgacaagcaatcaacaaaatatgtcctcaaattcattcgataaactatcagttagcacattcacaagtgaaaataggcctgtcagtaaagaatctacaaatccagattacattattgttggaaaaaacaaagaaaaatatactgcggccgttgattcttcatcatcttcaccctctacaccagatatgggcagcgctccagctgtccggagaatgaaagtgaaggacatttcagagtacatgattaatgctgccaaggaaaatccacaattagttcagaaaatccatgaggttttacttgaaaatggtgttatggcaccacctgacctgttttcagaagattcaatggaagaaccaaaggacctcatcgtgtatgacaccaccctgtttcaaagcaaggatgaaatgaaaaggaggatgaatgagcttgggtcaagggaatacacagatcgtggtcatgatccattgttgcctcatcatcctggacatgaactccaaccaaaagtggctcctcaccgagcacctctggagtcacttaagcctgttgagggtttgggcatttaccacccacatgatatcagagatatagcatctccgtttgtttctcagtacgaaccttctgcacctcctcaggaagcttcatcccaacttacaaagcaattgcctgtcacagctgctgctgttgcaactgctgcagtggtggcatcctctatggttgctgcagccgctttatctaccaatgacgtaaactttgacgtgcctgttgctgctgcagccactgtcactgcagctgcagttgttgccacaactgctgctgttagcaagcaatatgagcactcggatcctggcaatcagctgtttagcgtaccaagtacttctcaaggaaataaatcagttgagaaagctggaggtgacctttgggacaaacaccatgttgaaactgatcatggccaagataattgtctggaccaagaagttcctcaggaagccgaacgaacctctgataaatcaaataaatcaagtgggacagaggatgtgaaatctgatcttgctttggacaatgttgcagagtttgagatccaatgggaagaaatttctattggtgaacggattggccttggatcgtttggagaagtttatagaggagaatggcatggaacagaagttgctgtcaagaagtttttgcaacaggatatttcaagtgatgctctggaagagtttagagctgaggtgcgaataatgaagaggttgcgccatcctaatgttgttctcttcatgggtgccatcactcgtgtgcctaatctttctattgtcactgaatttcttccaagaggcagtttgtttcgtttgattcaccgacccaacaaccagttagatgaaaggaagcgcttaagaatggcacttgatgtggctcgtggtatgaattatctgcataattgttcaccagttatagttcatagagatctgaaatccccgaatctactggtggacaagaattgggttgtgaaggtttgcgattttggtttgtcaagaatgaagaacaataccttcctgtcatcaagatcaacagctggaacagtgtatccaaattgcttgaagtgtgtctaactttttgtttttgggagagtgtacaggcacttgcatttgcctcacttgattatattttgttccaatgttgagtcctgtaccatgtaaattaaaattgtttccatttgttctaagtttttttgctgagctcttatatatttagagttta

SEQ ID NO: 55944 - DNA, 3495 bp, Zea Mays
ggttactagtcgcttgcgattagcgataacgactaaactaatgcggtttcggccactcggggacgagtcacagcttgttcgctgcggtttgctgcggctgcaatccggctgcggctgcggcttctacagtatttttctctctatagattgcagctgcagcagtccaaacagctgcaccagtgtcggcgagggctattcagagaccctcctccgcctcagcgtctcagtggccatgtcggatccacccacccaccaccaacgccactagtagcagccgaggagatagctgcgacggcgactcggtttcggcggcggcggcatgaagaacttcctcaggaagctccatatcggcgagggctcgagcgacggagcctcaacgcccccgcccccgccctctcgcaaaggcggtaccggtaccggtggcggtgttggtggggttcatcatcatcaaccgcaccacgatcaaaggcatcagacctcggcggtatccagttggctcgattcggtgcctaccaggcctccgccgccgattcctgtcgaagcggaggtgccgacttcgtcgtcgtcggcgtcgtcgctcggggttggggcacaggataggaaagcgaggcagtccgggggagtcgagaggcggcggtcccagcaggaggagagggagcggaggcggtcgcaagaggaagtgacgttgagggagcggaggcggtcgcaagaggaagagacgttgagggagctgaggcggtcgcgggaggaggagatggagcaggagcggaggcggtctcaagaacaggacgaggtggaggagagggtgataagagagtcgtcagaagcggaggagaggaagcgggagagggagaaggaggaagacgacctggaggcgtaccagattcagctggtgctagagatgagcgcgcgggacaatccggaggagatggagatggaggtcgccaagcagcttagtctgggcttctgccctccacagagatcccctgcggaggtcctcgcggtccgataccggaatttcaatgcccttggctatgacgacaaaatattggatggattttatgatctgttttatgttggaaatgggccagcagcagttactatgccctcttttgctgagctacgagtccagccattttcacataaagtcgattgggaagctgtgttggtccacagaggtgaagaccctgagcttatgaaacttcagcaggaggccttaatcatgaatcatgaacttcattcgagaacttcagaatctgtgggcaatgctttggttaagggacttgcaaatctagttgctagacacatgggtggagtgtttgatcctgagcgcatgtcagcgaaataccagaatatgcttagctacttaagaagtgatattggaagtgtaattgtgccacttggccagctaaaaattggtctagctcgtcatcgtgcactgctgtttaaggttttggctgatggccttgatgtaccttgccgtctcctgaaaggaaagcgatacactggatcagatgatggagctttgaacattgtgaaatttaaagacggaagaattagacaggaatttcgtctctgataatcaacactttggccaagatgataataccaatctgttgggatcttctcttagcggtgtatcgagctcagcgtatggttcttttgagtatgagttacttgaccgaagatccacttcaagcaatgttggtccttctgatactgatggacctacaactaatctgacaagcaatcaacaaaatatgtcctcaaattcattcgataaactatcagttagcacattcacaagtgaaaataggcctgtcagtaaagaatctacaaatccagattacattattgttggaaaaaacaaagaaaaatatactgcggccgttgattcttcatcatcttcaccctctacaccagatatgggcagcgctccagctgtccggagaatgaaagtgaaggacatttcagagtacatgattaatgctgccaaggaaaatccacaattagttcagaaaatccatgaggttttacttgaaaatggtgttatggcaccacctgacctgttttcagaagattcaatggaagaaccaaaggacctcatcgtgtatgacaccaccctgtttcaaagcaaggatgaaatgaaaaggaggatgaatgagcttgggtcaagggaatacacagatcgtggtcatgatccattgttgcctcatcatcctggacatgaactccaaccaaaagtggctcctcaccgagcacctctggagtcacttaagcctgttgagggtttgggcatttaccacccacatgatatcagagatatagcatctccgtttgtttctcagtacgaaccttctgcacctcctcaggaagcttcatcccaacttacaaagcaattgcctgtcacagctgctgctgttgcaactgctgcagtggtggcatcctctatggttgctgcagccgctttatctaccaatgacgtaaactttgacgtgcctgttgctgctgcagccactgtcactgcagctgcagttgttgccacaactgctgctgttagcaagcaatatgagcactcggatcctggcaatcagctgtttagcgtaccaagtacttctcaaggaaataaatcagttgagaaagctggaggtgacctttgggacaaacaccatgttgaaactgatcatggccaagataattgtctggaccaagaagttcctcaggaagccgaacgaacctctgataaatcaaataaatcaagtgggacagaggatgtgaaatctgatcttgctttggacaatgttgcagagtttgagatccaatgggaagaaatttctattggtgaacggattggccttggatcgtttggagaagtttatagaggagaatggcatggaacagaagttgctgtcaagaagtttttgcaacaggatatttcaagtgatgctctggaagagtttagagctgaggtgcgaataatgaagaggttgcgccatcctaatgttgttctcttcatgggtgccatcactcgtgtgcctaatctttctattgtcactgaatttcttccaagaggcagtttgtttcgtttgattcaccgacccaacaaccagttagatgaaaggaagcgcttaagaatggcacttgatgtggctcgtggtatgaattatctgcataattgttcaccagttatagttcatagagatctgaaatccccgaatctactggtggacaagaattgggttgtgaaggtttgcgattttggtttgtcaagaatgaagaacaataccttcctgtcatcaagatcaacagctggaacagtgtatccaaattgcttgaagtgtgtctaactttttgtttttgggagagtgtacaggcacttgcatttgcctcacttgattatattttgttccaatgttgagtcctgtaccatgtaaattaaaattgtttccatttgttctaagtttttttgctgagctcttatatatttagagttta

SEQ ID NO: 55945 - DNA, 1944 bp, Zea Mays
ggagactgctcatcctcgttcgttcgcttaaagagcagcagcatctgaatctctctagtcttttaagaggttgcatcgagccaattaatttcgcattactacaatgttccatggatgtcattggggggaggggaataattacaataaaagtggattcgaatgcaggacagcgggtttaccagctatcaatagaggcagcctgcaggctcacatggccggtagatcgactaatagtgcaggtgctggacgactccaccgactccgtcatcaaggagctggtgaagggcgagtgcgagcggtgggccacggaggaggggatcaacgtcaagtacgagacgcgcaaggacagggccgggtacaaggccggcaacctcaaggaggggatgcgccacgcctacgtgcgcgcctgcgagttcgtcgccatgttcgacgcagacttccagccgccgccggacttcctcgtcagaaccgtcccgttcctcgtccacaaccccagcctcgcgctcgtgcagacacgctggaagttcgtgaatgccaacgactgcttgctgacgagaatgcaggagatgtccatggactaccatttcaaggtggagcaggaagctggctcttccttatgcaacttctttggatacaacggaaccgctggagtatggagaacgcaagcgatcgtcgagtccgggggctgggaggaccgaaccactgctgaggacatggacttggcgctgagagcagggctcctgggctgggagttcgtctacgttggaagcataaaggttaagagtgagctgccgagcactctcaaggcgtaccggtcccagcagcaccgctggtcatgcggacctgccctcctgttcaagaaaatgttctggcaaattctcgctgccgagagagtgtcggtctggaagaagtggtacatggtctatgacttcttcattgcccggagaatcgtaggcaccttctacacgttcttctttttcagcgtcctgattcctctgaacattctgctacccgaagcgcagattcctgtgtgggagctcatctatatccccatagctatcactcttctcaactctgttgggactccaaggtctatccatctggtcatactgtgggtcttgttcgagaacgtaatggcgttgcatcggtttaaagccatcttgatagggtttctcgaagctgacagggccaacgaatggatcgtgacgcaaaagctggggaatctgcagaagctgaaatcgatcgccagacttacaggaagctaccgtttcaaagacaggttccatttcctggaggtgttcattgggctgttccttttggcctctgcgtgctttgactacttatacagagatgactatgtttacctctttgttcttccccaatcgatcatgtatttcgcgattgggtttcagttcgttggtctcaatgtctctgaagactgaccaattgcaagacaactgaacgttttggttgcgatattatgattgctcgggtcaaggttcttgtatcgatggtctacagaagggcaggtttgtgtgcgatctagtagatacgtcatacttcaggagaggataagcacacgctggaggttgagacgaatctattataatccagtaggtgccaaaaaaatgcatctaaaacctgttgatgtgtctggaaaacacaaccagtgtatttagatataagagttgtgtaccgacgatcagatcttgctggtagtatgcttgaagggaaaatactgagtacagccacactttcgatggaattaggcctaatgagtggctacagttctgctcatagacattgagaaagattttggctcctgggtcctgaacgtgatgcggaattagggttgagacgggcttggcagcgaaggcccgtgtacatgacgtggaatgtcagggcaagagtcgtaatgccagacttgacggcccatataataag

SEQ ID NO: 55946 - DNA, 2408 bp, Zea Mays
gatctgactagtcagtcaatccgagattgcaattctcccgtcccgtggtctctacctccattccatgccacaaccaccaccaccactgcattctcaaacgagcagtgcctgaacccaagtgcagtgcagcagccatgggaggtacgtacccacgctcagcttcgtccttactgccaggacaagagagattctctctgctcaatgcgctatccatacgtctctaatctctctcccgtctcccgactggcggctgccgcgcgcgcctgcagcagcagcagcaggtggccacgcgctgcgcgccgtcggcgacgtcgtctcgttccccgcgaccgtcgccgccttcgtggaggcgctgctccagggctgggccgaggccagggccgggctgctggtgccgctgctccgcgccgcggtgctgctgtgcacggccatgtcgctgatcgtgctggccgagaaggtgttcctgggcgcggtcagctccgtggcgaagctgcggcgccggcgtccggggcgggtgtgcaggtgcgaccccgacgaggaggcggctgcggcatcccaggcctatcccatggtgctcgtccagatccccatgtacaacgagagggaggtttaccagctatcaatagaggcagcctgcaggctcacatggccggtagatcgactaatagtgcaggtgctggacgactccaccgactccgtcatcaaggagctggtgaagggcgagtgcgagcggtgggccacggaggaggggatcaacgtcaagtacgagacgcgcaaggacagggccgggtacaaggccggcaacctcaaggaggggatgcgccacgcctacgtgcgcgcctgcgagttcgtcgccatgttcgacgcagacttccagccgccgccggacttcctcgtcagaaccgtcccgttcctcgtccacaaccccagcctcgcgctcgtgcagacacgctggaagttcgtgaatgccaacgactgcttgctgacgagaatgcaggagatgtccatggactaccatttcaaggtggagcaggaagctggctcttccttatgcaacttctttggatacaacggaaccgctggagtatggagaacgcaagcgatcgtcgagtccgggggctgggaggaccgaaccactgctgaggacatggacttggcgctgagagcagggctcctgggctgggagttcgtctacgttggaagcataaaggttaagagtgagctgccgagcactctcaaggcgtaccggtcccagcagcaccgctggtcatgcggacctgccctcctgttcaagaaaatgttctggcaaattctcgctgccgagagagtgtcggtctggaagaagtggtacatggtctatgacttcttcattgcccggagaatcgtaggcaccttctacacgttcttctttttcagcgtcctgattcctctgaacattctgctacccgaagcgcagattcctgtgtgggagctcatctatatccccatagctatcactcttctcaactctgttgggactccaaggtctatccatctggtcatactgtgggtcttgttcgagaacgtaatggcgttgcatcggtttaaagccatcttgatagggtttctcgaagctgacagggccaacgaatggatcgtgacgcaaaagctggggaatctgcagaagctgaaatcgatcgccagacttacaggaagctaccgtttcaaagacaggtaatttctagaagacgacatgttcagcaggttccatttcctggaggtgttcattgggctgttccttttggcctctgcgtgctttgactacttatacagagatgactatgtttacctctttgttcttccccaatcgatcatgtatttcgcgattgggtttcagttcgttggtctcaatgtctctgaagactgaccaattgcaagacaactgaacgttttggttgcgatattatgattgctcgggtcaaggttcttgtatcgatggtctacagaagggcaggtttgtgtgcgatctagtagatacgtcatacttcaggagaggataagcacacgctggaggttgagacgaatctattataatccagtaggtgccaaaaaaatgcatctaaaacctgttgatgtgtctggaaaacacaaccagtgtatttagatataagagttgtgtaccgacgatcagatcttgctggtagtatgcttgaagggaaaatactgagtacagccacactttcgatggaattaggcctaatgagtggctacagttctgctcatagacattgagaaagattttggctcctgggtcctgaacgtgatgcggaattagggttgagacgggcttggcagcgaaggcccgtgtacatgacgtggaatgtcagggcaagagtcgtaatgccagacttgacggcccatataataag

SEQ ID NO: 55947 - DNA, 2260 bp, Zea Mays
gatctgactagtcagtcaatccgagattgcaattctcccgtcccgtggtctctacctccattccatgccacaaccaccaccaccactgcattctcaaacgagcagtgcctgaacccaagtgcagtgcagcagccatgggagcagcagcagcaggtggccacgcgctgcgcgccgtcggcgacgtcgtctcgttccccgcgaccgtcgccgccttcgtggaggcgctgctccagggctgggccgaggccagggccgggctgctggtgccgctgctccgcgccgcggtgctgctgtgcacggccatgtcgctgatcgtgctggccgagaaggtgttcctgggcgcggtcagctccgtggcgaagctgcggcgccggcgtccggggcgggtgtgcaggtgcgaccccgacgaggaggcggctgcggcatcccaggcctatcccatggtgctcgtccagatccccatgtacaacgagagggaggtttaccagctatcaatagaggcagcctgcaggctcacatggccggtagatcgactaatagtgcaggtgctggacgactccaccgactccgtcatcaaggagctggtgaagggcgagtgcgagcggtgggccacggaggaggggatcaacgtcaagtacgagacgcgcaaggacagggccgggtacaaggccggcaacctcaaggaggggatgcgccacgcctacgtgcgcgcctgcgagttcgtcgccatgttcgacgcagacttccagccgccgccggacttcctcgtcagaaccgtcccgttcctcgtccacaaccccagcctcgcgctcgtgcagacacgctggaagttcgtgaatgccaacgactgcttgctgacgagaatgcaggagatgtccatggactaccatttcaaggtggagcaggaagctggctcttccttatgcaacttctttggatacaacggaaccgctggagtatggagaacgcaagcgatcgtcgagtccgggggctgggaggaccgaaccactgctgaggacatggacttggcgctgagagcagggctcctgggctgggagttcgtctacgttggaagcataaaggttaagagtgagctgccgagcactctcaaggcgtaccggtcccagcagcaccgctggtcatgcggacctgccctcctgttcaagaaaatgttctggcaaattctcgctgccgagagagtgtcggtctggaagaagtggtacatggtctatgacttcttcattgcccggagaatcgtaggcaccttctacacgttcttctttttcagcgtcctgattcctctgaacattctgctacccgaagcgcagattcctgtgtgggagctcatctatatccccatagctatcactcttctcaactctgttgggactccaagtgtgttgcaggtctatccatctggtcatactgtgggtcttgttcgagaacgtaatggcgttgcatcggtttaaagccatcttgatagggtttctcgaagctgacagggccaacgaatggatcgtgacgcaaaagctggggaatctgcagaagctgaaatcgatcgccagacttacaggaagctaccgtttcaaagacaggttccatttcctggaggtgttcattgggctgttccttttggcctctgcgtgctttgactacttatacagagatgactatgtttacctctttgttcttccccaatcgatcatgtatttcgcgattgggtttcagttcgttggtctcaatgtctctgaagactgaccaattgcaagacaactgaacgttttggttgcgatattatgattgctcgggtcaaggttcttgtatcgatggtctacagaagggcaggtttgtgtgcgatctagtagatacgtcatacttcaggagaggataagcacacgctggaggttgagacgaatctattataatccagtaggtgccaaaaaaatgcatctaaaacctgttgatgtgtctggaaaacacaaccagtgtatttagatataagagttgtgtaccgacgatcagatcttgctggtagtatgcttgaagggaaaatactgagtacagccacactttcgatggaattaggcctaatgagtggctacagttctgctcatagacattgagaaagattttggctcctgggtcctgaacgtgatgcggaattagggttgagacgggcttggcagcgaaggcccgtgtacatgacgtggaatgtcagggcaagagtcgtaatgccagacttgacggcccatataataag

SEQ ID NO: 55948 - DNA, 2393 bp, Zea Mays
ccataggttcgcgaccgcgcagatgctgacaaactgacatctattgttgtaaaggtgctcactcaggctaacaaccactgcagtgagctagccggccggttgcgagcgggagtgcagagtcgtacatgtaccctagatctgactagtcagtcaatccgagattgcaattctcccgtcccgtggtctctacctccattccatgccacaaccaccaccaccactgcattctcaaacgagcagtgcctgaacccaagtgcagtgcagcagccatgggagcagcagcaggtggccacgcgctgcgcgccgtcggcgacgtcgtctcgttccccgcgaccgtcgccgccttcgtggaggcgctgctccagggctgggccgaggccagggccgggctgctggtgccgctgctccgcgccgcggtgctgctgtgcacggccatgtcgctgatcgtgctggccgagaaggtgttcctgggcgcggtcagctccgtggcgaagctgcggcgccggcgtccggggcgggtgtgcaggtgcgaccccgacgaggaggcggctgcggcatcccaggcctatcccatggtgctcgtccagatccccatgtacaacgagagggaggtttaccagctatcaatagaggcagcctgcaggctcacatggccggtagatcgactaatagtgcaggtgctggacgactccaccgactccgtcatcaaggagctggtgaagggcgagtgcgagcggtgggccacggaggaggggatcaacgtcaagtacgagacgcgcaaggacagggccgggtacaaggccggcaacctcaaggaggggatgcgccacgcctacgtgcgcgcctgcgagttcgtcgccatgttcgacgcagacttccagccgccgccggacttcctcgtcagaaccgtcccgttcctcgtccacaaccccagcctcgcgctcgtgcagacacgctggaagttcgctgccctgtagtgaatgccaacgactgcttgctgacgagaatgcaggagatgtccatggactaccatttcaaggtggagcaggaagctggctcttccttatgcaacttctttggatacaacggaaccgctggagtatggagaacgcaagcgatcgtcgagtccgggggctgggaggaccgaaccactgctgaggacatggacttggcgctgagagcagggctcctgggctgggagttcgtctacgttggaagcataaaggttaagagtgagctgccgagcactctcaaggcgtaccggtcccagcagcaccgctggtcatgcggacctgccctcctgttcaagaaaatgttctggcaaattctcgctgccgagagagtgtcggtctggaagaagtggtacatggtctatgacttcttcattgcccggagaatcgtaggcaccttctacacgttcttctttttcagcgtcctgattcctctgaacattctgctacccgaagcgcagattcctgtgtgggagctcatctatatccccatagctatcactcttctcaactctgttgggactccaaggtctatccatctggtcatactgtgggtcttgttcgagaacgtaatggcgttgcatcggtttaaagccatcttgatagggtttctcgaagctgacagggccaacgaatggatcgtgacgcaaaagctggggaatctgcagaagctgaaatcgatcgccagacttacaggaagctaccgtttcaaagacaggttccatttcctggaggtgttcattgggctgttccttttggcctctgcgtgctttgactacttatacagagatgactatgtttacctctttgttcttccccaatcgatcatgtatttcgcgattgggtttcagttcgttggtctcaatgtctctgaagactgaccaattgcaagacaactgaacgttttggttgcgatattatgattgctcgggtcaaggttcttgtatcgatggtctacagaagggcaggtttgtgtgcgatctagtagatacgtcatacttcaggagaggataagcacacgctggaggttgagacgaatctattataatccagtaggtgccaaaaaaatgcatctaaaacctgttgatgtgtctggaaaacacaaccagtgtatttagatataagagttgtgtaccgacgatcagatcttgctggtagtatgcttgaagggaaaatactgagtacagccacactttcgatggaattaggcctaatgagtggctacagttctgctcatagacattgagaaagattttggctcctgggtcctgaacgtgatgcggaattagggttgagacgggcttggcagcgaaggcccgtgtacatgacgtggaatgtcagggcaagagtcgtaatgccagacttgacggcccatataataag

SEQ ID NO: 55949 - DNA, 2396 bp, Zea Mays
ccataggttcgcgaccgcgcagatgctgacaaactgacatctattgttgtaaaggtgctcactcaggctaacaaccactgcagtgagctagccggccggttgcgagcgggagtgcagagtcgtacatgtaccctagatctgactagtcagtcaatccgagattgcaattctcccgtcccgtggtctctacctccattccatgccacaaccaccaccaccactgcattctcaaacgagcagtgcctgaacccaagtgcagtgcagcagccatgggagcagcagcagcaggtggccacgcgctgcgcgccgtcggcgacgtcgtctcgttccccgcgaccgtcgccgccttcgtggaggcgctgctccagggctgggccgaggccagggccgggctgctggtgccgctgctccgcgccgcggtgctgctgtgcacggccatgtcgctgatcgtgctggccgagaaggtgttcctgggcgcggtcagctccgtggcgaagctgcggcgccggcgtccggggcgggtgtgcaggtgcgaccccgacgaggaggcggctgcggcatcccaggcctatcccatggtgctcgtccagatccccatgtacaacgagagggaggtttaccagctatcaatagaggcagcctgcaggctcacatggccggtagatcgactaatagtgcaggtgctggacgactccaccgactccgtcatcaaggagctggtgaagggcgagtgcgagcggtgggccacggaggaggggatcaacgtcaagtacgagacgcgcaaggacagggccgggtacaaggccggcaacctcaaggaggggatgcgccacgcctacgtgcgcgcctgcgagttcgtcgccatgttcgacgcagacttccagccgccgccggacttcctcgtcagaaccgtcccgttcctcgtccacaaccccagcctcgcgctcgtgcagacacgctggaagttcgctgccctgtagtgaatgccaacgactgcttgctgacgagaatgcaggagatgtccatggactaccatttcaaggtggagcaggaagctggctcttccttatgcaacttctttggatacaacggaaccgctggagtatggagaacgcaagcgatcgtcgagtccgggggctgggaggaccgaaccactgctgaggacatggacttggcgctgagagcagggctcctgggctgggagttcgtctacgttggaagcataaaggttaagagtgagctgccgagcactctcaaggcgtaccggtcccagcagcaccgctggtcatgcggacctgccctcctgttcaagaaaatgttctggcaaattctcgctgccgagagagtgtcggtctggaagaagtggtacatggtctatgacttcttcattgcccggagaatcgtaggcaccttctacacgttcttctttttcagcgtcctgattcctctgaacattctgctacccgaagcgcagattcctgtgtgggagctcatctatatccccatagctatcactcttctcaactctgttgggactccaaggtctatccatctggtcatactgtgggtcttgttcgagaacgtaatggcgttgcatcggtttaaagccatcttgatagggtttctcgaagctgacagggccaacgaatggatcgtgacgcaaaagctggggaatctgcagaagctgaaatcgatcgccagacttacaggaagctaccgtttcaaagacaggttccatttcctggaggtgttcattgggctgttccttttggcctctgcgtgctttgactacttatacagagatgactatgtttacctctttgttcttccccaatcgatcatgtatttcgcgattgggtttcagttcgttggtctcaatgtctctgaagactgaccaattgcaagacaactgaacgttttggttgcgatattatgattgctcgggtcaaggttcttgtatcgatggtctacagaagggcaggtttgtgtgcgatctagtagatacgtcatacttcaggagaggataagcacacgctggaggttgagacgaatctattataatccagtaggtgccaaaaaaatgcatctaaaacctgttgatgtgtctggaaaacacaaccagtgtatttagatataagagttgtgtaccgacgatcagatcttgctggtagtatgcttgaagggaaaatactgagtacagccacactttcgatggaattaggcctaatgagtggctacagttctgctcatagacattgagaaagattttggctcctgggtcctgaacgtgatgcggaattagggttgagacgggcttggcagcgaaggcccgtgtacatgacgtggaatgtcagggcaagagtcgtaatgccagacttgacggcccatataataag

SEQ ID NO: 55950 - DNA, 4560 bp, Zea Mays
ctcgctccctgcgctcgcttaatcgccttcgtcctcttccccacctacgtgctctcgctctccccttctccccacctagcctctcgatcggctcatttcgtggcctccagatcctccttctccccccggggcccatcatcaacccctcaacaccggcctcacaaactcgggcaggtctcccccgctgcttaattacctcgtgcgccgcgaaaacacgctctaggctctcgtttcctcgtactggtacaagcgggacgggagcagcagcagtagcgtgatccatccccatggcgggggcaacctcttcctcgtccgtgtctttgatcctcatcctcgtcgcgtcctcctcgccgcggcgcagccggggcagggtgggcattgctctgcgctcgtacggctacagcggcgccgagctgcggttgcattgggcgcgtcggggctcgtctcgggatggaccggcggtagtgcgcgccgcagcggttccggccgggggtgagggcgaggacgccgcggcggtagggaagagctcctcgtccaaggcggtcgccgtgcagggcagcgagtccaaggttgatttacttggaacatttgggctagtttggtaaccatatttttcttaagtttttttcgttttttaaggaaatttagttcaattttttttgtaaaattggaaatctcagtaaaaaatatatggttgtcaaactagctcttaacttattttttttcgcataaaatagtactccgtataaaattgctattggggatttgtgcacagtttgattgtcaaattcagcagcaaccactcaccgtttctgacggaaatgcagcttcacgtgcaccgcccttttctcctgatcaaataccacatgccacgcacacgcttgaaagtataacagtagtaggtgcacccctactgaatcgctgagctttgtaataggtgctttgctcagcttcattgatgctaaatttctgactgcctctcaaacctatagactcaggctgtatattctacttcacctcccaaaactgcgacgtctgcgccgaagcaaaaccagagcgctgcaaagcaaaacggaacagttgggagcagcagtgcgagcaaatccccggcgcctgcggtatctgaatccaaagctgaaccatctgctcctgtcaccaagacagaaaccgatgccagtgcgaaggttgaagagctgaagccctcagtggatgatgctaaacccgtagaaagcataggcatccctgagccggtggatgctaaggtggacgccgctgcagctactgatgccgcggcgagtgctgctgatgacactgaagacaaggaacatggccctttggctgggcctaatgtgatgaatgtcgtcgtggtggcttctgaatgcgctcctttctgcaagacaggtggccttggagatgttgtgggtgctttgcccaaggctttggcgaggagaggacaccgtgttatggtcgtgataccaagatatggagagtatgcagaagcccgggatttaggtgtaaggagacgttacagggtggctggacaggattcagaagttacttattttcactcttacattgatggcgttgattttgtattcatagaagcccctcccttccggcaccggcacaatgatatttatggaggagaaagatcggatgttttgaagcgcataattttgttctgcaaggccgctgttgaggttccatggtacgctccatgtggtggtaccgtctatggtgatggcaatttagttttcattgctaatgattggcatacggcacttcttccggtctacctaaaagcctactaccgggacaatggtttgatgcagtatgctcgctcagtgcttgtgatacacaacattgctcatcagggtcgtggccctgtagacgacttcgtcaactttgacttgcctgaacactacatcgatcacttcaaactgtacgacaatatcggtggcgagcactgcaacgtttttgccgcagggctgaagatggcagaccaggtggtgaccgtcagtaatggatacctatgggagctgaggacatcggaaggtgggtggggcctccacgacatcataaaccagaacgactggaagctgcagggcatcgtgaacggcatcgacatgagcgagtggaaccccgctgtggacgtgcacctccactccgacgaatacaccaactacacgttcgagacgctggacacgggcaagcggcagtgcaaggctgccctgcagcggcagctcggcctgcaggtccgcgacgacgtgccactaatcgggttcatcgggcggctggaccaccagaagggcgtggacatcatcgccgacgcgatccactggatcgcgggacaggacgtgcagcttgtgatgctgggcacggggcgccccgacctggaggacatgctgcggcggtgcgaggcggagcacagcgacaaggtgcgcgcgtgggtggggttctcggtgcccttggcgcaccgcatcacggcgggcgcggacgtcctgctgatgccgtcgcggttcgagccgtgcgggctgaaccagctctacgcgatggcgtacgggaccgtgcccgtggtgcacgccgtgggcgggctccgggacacggtggcgccgttcgacccgttcaacgacaccgggctggggtggacgttcgaccgcgcggaggcgaatcggatgatcgacgcgctctcgcactgcctcaacacgttccggaactacaaggagagctggcgcggcctggaggcgcgcggcatggcgcaggacctcagctgggaccacgccgccgtgctgtatgaggacgtgctcgtcaaggccaagtaccagtggtaagtgagttacgccgacgcccttcatgtcgcgggacagtcctggacgccctgggcactgcgtgctcttctcacgcggctttgctgcgtgcggcgcatttgctcaattggcgcggggcgatggtggttggcctacgtcggcttcggctaggtgccttcggattttcagcttcttaccaccaaaacaccaaaagctgctgcggactattaaacgctcagtttttcagttagcttctataaaaatcgatcgtaaaaatcatctataatcaacataaacacataatggacggagtacttttaataatagaaatctatcgctttgtagatcttaccctatggacaccttcatcttgaaaattgtttggttgaaataacagtgagttgtatattctataagaaatatccatcattatggcattgtgaagagggtatacaagaaatatttgttatgacattgcgaagacggtatatatgctaattggttggattaaaaggtagctaatacaatagatatatgtaacctattttttctcataactatattatcgttcactaaccaaagcattaactttattctatagattcttggaaatctatttagccttcgtaaccttttgtttagattttagatacttttcacagtcagattctctacatagtcagattttcaaaaaaaaaaactggtaagaaaaaagctaaactaaacagacggaatttgggtgggcgcgatgataccactgggcacgggcacaggataatatgaaagcgacggagtgatgtatttgagctacggtaatggcctgcatttggttcttagtctacggctatgttttgatccactacatttaaagaaactagtttctaaacttggtttctaaaaactaacttttagagacagagaactgaatagaggtgtttgagtccactagtttttttaaatggtttatagctttttctataagtattgactgaccatcaaaaactgattttggatggagtaactggattcttggtttttaagaagccagaaaactagtttttagaaattgaataaaaaattgacctatttggaggactttaaggttttaaaactagtttctaataaactggatagatctaaacaggacctagatcacgttggacctggttcgagccttcgaggtgttctaaactattcagtattgagttggagatgaggcacatagaattcccactaataaatggggagttgtatgttacttatcgccacctctgttgtatgtttattggtgcaaccaagtttttcattccaggttccagtatataaggcataaatcacctttattttaaagcccaatgaatgtatttaattccctctatcaatactagtactaccacattgatgtatgtgtatctagaaagaacatgctttatgttatgggacaaacaaaaaatagttatatgtattggttacgtcttgtatccttcctattcacatcgaattgcttgctcgtcatcgatgtggtttttctccgcaaagggtttcttagtaaatctttgtgtttacttgtgatttattattaatcttgatatacttgttgattagttgatatcttgcttgctattggtgtaattttgtccaagttcatgttgtatgtatgagattggcatatgatgtataaatgtgttctttgatatgctgattatggagattgatgtgttactagcttgatctttacaagtatacttcttat

SEQ ID NO: 55951 - DNA, 5292 bp, Zea Mays
cctacgtctctcgctccctgcgctcgcttaatcgccttcgtcctcttccccacctacgtgctctcgctctccccttctccccacctagcctctcgatcggctcatttcgtggcctccagatcctccttctccccccggggcccatcatcaacccctcaacaccggcctcacaaactcgggcaggtctcccccgctgcttaattacctcgtgcgccgcgaaaacacgctctaggctctcgtttcctcgtactggtacaagcgggacgggagcagcagcagtagcgtgatccatccccatggcgggggcaacctcttcctcgtccgtgtctttgatcctcatcctcgtcgcgtcctcctcgccgcggcgcagccggggcagggtgggcattgctctgcgctcgtacggctacagcggcgccgagctgcggttgcattgggcgcgtcggggctcgtctcgggatggaccggcggtagtgcgcgccgcagcggttccggccgggggtgagggcgaggacgccgcggcggtagggaagagctcctcgtccaaggcggtcgccgtgcagggcagcgagtccaaggttgatttacttggaacatttgggctagtttggtaaccatatttttcttaagtttttttcgttttttaaggaaatttagttcaattttttttgtaaaattggaaatctcagtaaaaaatatatggttgtcaaactagctcttaacttattttttttcgcataaaatagtactccgtataaaattgctattggggatttgtgcacagtttgattgtcaaattcagcagcaaccactcaccgtttctgacggaaatgcagcttcacgtgcaccgcccttttctcctgatcaaataccacatgccacgcacacgcttgaaagtataacagtagtaggtgcacccctactgaatcgctgagctttgtaataggtgctttgctcagcttcattgatgctaaatttctgactgcctctcaaacctatagactcaggctgtatattctacttcacctcccaaaactgcgacgtctgcgccgaagcaaaaccagagcgctgcaaagcaaaacggaacagttgggagcagcagtgcgagcaaatccccggcgcctgcggtatctgaatccaaagctgaaccatctgctcctgtcaccaagacagaaaccgatgccagtgcgaaggttgaagagctgaagccctcagtggatgatgctaaacccgtagaaagcataggcatccctgagccggtggatgctaaggtggacgccgctgcagctactgatgccgcggcgagtgctgctgatgacactgaagacaaggaacatggccctttggctgggcctaatgtgatgaatgtcgtcgtggtggcttctgaatgcgctcctttctgcaagacaggtggccttggagatgttgtgggtgctttgcccaaggctttggcgaggagaggacaccgtgttatggtcgtgataccaagatatggagagtatgcagaagcccgggatttaggtgtaaggagacgttacagggtggctggacaggattcagaagttacttattttcactcttacattgatggcgttgattttgtattcatagaagcccctcccttccggcaccggcacaatgatatttatggaggagaaagatcggtaaacgtcaaatttcaagtgccttctgtaacagtagaaaattaaattggatacctgccacttttatctaaaatgtgtttcagaatttaatcaattgatggcaggatgttttgaagcgcataattttgttctgcaaggccgctgttgaggttccatggtacgctccatgtggtggtaccgtctatggtgatggcaatttagttttcattgctaatgattggcatacggcacttcttccggtctacctaaaagcctactaccgggacaatggtttgatgcagtatgctcgctcagtgcttgtgatacacaacattgctcatcaggttttttgcaccttaaacttaggccgcctcttgttctctctctaaatacttaacccattagtatacttcattttgaaatcacatgtacttatcttgttggtatcattgttcatatttctcctgcagaagatttctagattcatctagtcatcaattattgtgttgactcaataaacctagaagcctattttgttcttattagtttcttccagttgactactggtctgaaactcagatgaaacggaaatatgaaaaaaattgaaaggataaagggcctgtttggttcagcttttttctgaccagcttttctgaaaatctggttgtggagagaatctgagtatcattacgattacgtgtggagtaaaataaagttgatcataagactcaggatctagaaagtgacggattcgtactattacaacgactcaaccgattatgtgtttatgttgattttggatggtttttgccccaacaaattttatagaagctggctaaaaagctgagcgtttggcagtccggagcagcttttggtggccagaagctgccagaagtcgaaacaaacagggccaaaatatggtggcatataaggaaggttaccctgtgaggaaatgtttttgtgggtcgtggccctgtagacgacttcgtcaactttgacttgcctgaacactacatcgatcacttcaaactgtacgacaatatcggtggcgagcactgcaacgtttttgccgcagggctgaagatggcagaccaggtggtgaccgtcagtaatggatacctatgggagctgaggacatcggaaggtgggtggggcctccacgacatcataaaccagaacgactggaagctgcagggcatcgtgaacggcatcgacatgagcgagtggaaccccgctgtggacgtgcacctccactccgacgaatacaccaactacacgttcgagacgctggacacgggcaagcggcagtgcaaggctgccctgcagcggcagctcggcctgcaggtccgcgacgacgtgccactaatcgggttcatcgggcggctggaccaccagaagggcgtggacatcatcgccgacgcgatccactggatcgcgggacaggacgtgcagcttgtgatgctgggcacggggcgccccgacctggaggacatgctgcggcggtgcgaggcggagcacagcgacaaggtgcgcgcgtgggtggggttctcggtgcccttggcgcaccgcatcacggcgggcgcggacgtcctgctgatgccgtcgcggttcgagccgtgcgggctgaaccagctctacgcgatggcgtacgggaccgtgcccgtggtgcacgccgtgggcgggctccgggacacggtggcgccgttcgacccgttcaacgacaccgggctggggtggacgttcgaccgcgcggaggcgaatcggatgatcgacgcgctctcgcactgcctcaacacgttccggaactacaaggagagctggcgcggcctggaggcgcgcggcatggcgcaggacctcagctgggaccacgccgccgtgctgtatgaggacgtgctcgtcaaggccaagtaccagtggtaagtgagttacgccgacgcccttcatgtcgcgggacagtcctggacgccctgggcactgcgtgctcttctcacgcggctttgctgcgtgcggcgcatttgctcaattggcgcggggcgatggtggttggcctacgtcggcttcggctaggtgccttcggattttcagcttcttaccaccaaaacaccaaaagctgctgcggactattaaacgctcagtttttcagttagcttctataaaaatcgatcgtaaaaatcatctataatcaacataaacacataatggacggagtacttttaataatagaaatctatcgctttgtagatcttaccctatggacaccttcatcttgaaaattgtttggttgaaataacagtgagttgtatattctataagaaatatccatcattatggcattgtgaagagggtatacaagaaatatttgttatgacattgcgaagacggtatatatgctaattggttggattaaaaggtagctaatacaatagatatatgtaacctattttttctcataactatattatcgttcactaaccaaagcattaactttattctatagattcttggaaatctatttagccttcgtaaccttttgtttagattttagatacttttcacagtcagattctctacatagtcagattttcaaaaaaaaaaactggtaagaaaaaagctaaactaaacagacggaatttgggtgggcgcgatgataccactgggcacgggcacaggataatatgaaagcgacggagtgatgtatttgagctacggtaatggcctgcatttggttcttagtctacggctatgttttgatccactacatttaaagaaactagtttctaaacttggtttctaaaaactaacttttagagacagagaactgaatagaggtgtttgagtccactagtttttttaaatggtttatagctttttctataagtattgactgaccatcaaaaactgattttggatggagtaactggattcttggtttttaagaagccagaaaactagtttttagaaattgaataaaaaattgacctatttggaggactttaaggttttaaaactagtttctaataaactggatagatctaaacaggacctagatcacgttggacctggttcgagccttcgaggtgttctaaactattcagtattgagttggagatgaggcacatagaattcccactaataaatggggagttgtatgttacttatcgccacctctgttgtatgtttattggtgcaaccaagtttttcattccaggttccagtatataaggcataaatcacctttattttaaagcccaatgaatgtatttaattccctctatcaatactagtactaccacattgatgtatgtgtatctagaaagaacatgctttatgttatgggacaaacaaaaaatagttatatgtattggttacgtcttgtatccttcctattcacatcgaattgcttgctcgtcatcgatgtggtttttctccgcaaagggtttcttagtaaatctttgtgtttacttgtgatttattattaatcttgatatacttgttgattagttgatatcttgcttgctattggtgtaattttgtccaagttcatgttgtatgtatgagattggcatatgatgtataaatgtgttctttgatatgctgattatggagattgatgtgttactagcttgatctttacaagtatacttcttat

SEQ ID NO: 55952 - DNA, 4755 bp, Zea Mays
caaaaccaccctacgtctctcgctccctgcgctcgcttaatcgccttcgtcctcttccccacctacgtgctctcgctctccccttctccccacctagcctctcgatcggctcatttcgtggcctccagatcctccttctccccccggggcccatcatcaacccctcaacaccggcctcacaaactcgggcaggtctcccccgctgcttaattacctcgtgcgccgcgaaaacacgctctaggctctcgtttcctcgtactggtacaagcgggacgggagcagcagcagtagcgtgatccatccccatggcgggggcaacctcttcctcgtccgtgtctttgatcctcatcctcgtcgcgtcctcctcgccgcggcgcagccggggcagggtgggcattgctctgcgctcgtacggctacagcggcgccgagctgcggttgcattgggcgcgtcggggctcgtctcgggatggaccggcggtagtgcgcgccgcagcggttccggccgggggtgagggcgaggacgccgcggcggtagggaagagctcctcgtccaaggcggtcgccgtgcagggcagcgagtccaagactcaggctgtatattctacttcacctcccaaaactgcgacgtctgcgccgaagcaaaaccagagcgctgcaaagcaaaacggaacagttgggagcagcagtgcgagcaaatccccggcgcctgcggtatctgaatccaaagctgaaccatctgctcctgtcaccaagacagaaaccgatgccagtgcgaaggttgaagagctgaagccctcagtggatgatgctaaacccgtagaaagcataggcatccctgagccggtggatgctaaggtggacgccgctgcagctactgatgccgcggcgagtgctgctgatgacactgaagacaaggaacatggccctttggctgggcctaatgtgatgaatgtcgtcgtggtggcttctgaatgcgctcctttctgcaagacaggtggccttggagatgttgtgggtgctttgcccaaggctttggcgaggagaggacaccgtgttatggtcgtgataccaagatatggagagtatgcagaagcccgggatttaggtgtaaggagacgttacagggtggctggacaggattcagaagttacttattttcactcttacattgatggcgttgattttgtattcatagaagcccctcccttccggcaccggcacaatgatatttatggaggagaaagatcggatgttttgaagcgcataattttgttctgcaaggccgctgttgaggttccatggtacgctccatgtggtggtaccgtctatggtgatggcaatttagttttcattgctaatgattggcatacggcacttcttccggtctacctaaaagcctactaccgggacaatggtttgatgcagtatgctcgctcagtgcttgtgatacacaacattgctcatcaggttttttgcaccttaaacttaggccgcctcttgttctctctctaaatacttaacccattagtatacttcattttgaaatcacatgtacttatcttgttggtatcattgttcatatttctcctgcagaagatttctagattcatctagtcatcaattattgtgttgactcaataaacctagaagcctattttgttcttattagtttcttccagttgactactggtctgaaactcagatgaaacggaaatatgaaaaaaattgaaaggataaagggcctgtttggttcagcttttttctgaccagcttttctgaaaatctggttgtggagagaatctgagtatcattacgattacgtgtggagtaaaataaagttgatcataagactcaggatctagaaagtgacggattcgtactattacaacgactcaaccgattatgtgtttatgttgattttggatggtttttgccccaacaaattttatagaagctggctaaaaagctgagcgtttggcagtccggagcagcttttggtggccagaagctgccagaagtcgaaacaaacagggccaaaatatggtggcatataaggaaggttaccctggtcgtggccctgtagacgacttcgtcaactttgacttgcctgaacactacatcgatcacttcaaactgtacgacaatatcggtggcgagcactgcaacgtttttgccgcagggctgaagatggcagaccaggtggtgaccgtcagtaatggatacctatgggagctgaggacatcggaaggtgggtggggcctccacgacatcataaaccagaacgactggaagctgcagggcatcgtgaacggcatcgacatgagcgagtggaaccccgctgtggacgtgcacctccactccgacgaatacaccaactacacgttcgagacgctggacacgggcaagcggcagtgcaaggctgccctgcagcggcagctcggcctgcaggtccgcgacgacgtgccactaatcgggttcatcgggcggctggaccaccagaagggcgtggacatcatcgccgacgcgatccactggatcgcgggacaggacgtgcagcttgtgatgctgggcacggggcgccccgacctggaggacatgctgcggcggtgcgaggcggagcacagcgacaaggtgcgcgcgtgggtggggttctcggtgcccttggcgcaccgcatcacggcgggcgcggacgtcctgctgatgccgtcgcggttcgagccgtgcgggctgaaccagctctacgcgatggcgtacgggaccgtgcccgtggtgcacgccgtgggcgggctccgggacacggtggcgccgttcgacccgttcaacgacaccgggctggggtggacgttcgaccgcgcggaggcgaatcggatgatcgacgcgctctcgcactgcctcaacacgttccggaactacaaggagagctggcgcggcctggaggcgcgcggcatggcgcaggacctcagctgggaccacgccgccgtgctgtatgaggacgtgctcgtcaaggccaagtaccagtggtaagtgagttacgccgacgcccttcatgtcgcgggacagtcctggacgccctgggcactgcgtgctcttctcacgcggctttgctgcgtgcggcgcatttgctcaattggcgcggggcgatggtggttggcctacgtcggcttcggctaggtgccttcggattttcagcttcttaccaccaaaacaccaaaagctgctgcggactattaaacgctcagtttttcagttagcttctataaaaatcgatcgtaaaaatcatctataatcaacataaacacataatggacggagtacttttaataatagaaatctatcgctttgtagatcttaccctatggacaccttcatcttgaaaattgtttggttgaaataacagtgagttgtatattctataagaaatatccatcattatggcattgtgaagagggtatacaagaaatatttgttatgacattgcgaagacggtatatatgctaattggttggattaaaaggtagctaatacaatagatatatgtaacctattttttctcataactatattatcgttcactaaccaaagcattaactttattctatagattcttggaaatctatttagccttcgtaaccttttgtttagattttagatacttttcacagtcagattctctacatagtcagattttcaaaaaaaaaaactggtaagaaaaaagctaaactaaacagacggaatttgggtgggcgcgatgataccactgggcacgggcacaggataatatgaaagcgacggagtgatgtatttgagctacggtaatggcctgcatttggttcttagtctacggctatgttttgatccactacatttaaagaaactagtttctaaacttggtttctaaaaactaacttttagagacagagaactgaatagaggtgtttgagtccactagtttttttaaatggtttatagctttttctataagtattgactgaccatcaaaaactgattttggatggagtaactggattcttggtttttaagaagccagaaaactagtttttagaaattgaataaaaaattgacctatttggaggactttaaggttttaaaactagtttctaataaactggatagatctaaacaggacctagatcacgttggacctggttcgagccttcgaggtgttctaaactattcagtattgagttggagatgaggcacatagaattcccactaataaatggggagttgtatgttacttatcgccacctctgttgtatgtttattggtgcaaccaagtttttcattccaggttccagtatataaggcataaatcacctttattttaaagcccaatgaatgtatttaattccctctatcaatactagtactaccacattgatgtatgtgtatctagaaagaacatgctttatgttatgggacaaacaaaaaatagttatatgtattggttacgtcttgtatccttcctattcacatcgaattgcttgctcgtcatcgatgtggtttttctccgcaaagggtttcttagtaaatctttgtgtttacttgtgatttattattaatcttgatatacttgttgattagttgatatcttgcttgctattggtgtaattttgtccaagttcatgttgtatgtatgagattggcatatgatgtataaatgtgttctttgatatgctgattatggagattgatgtgttactagcttgatctttacaagtatacttcttat

SEQ ID NO: 55953 - DNA, 1256 bp, Zea Mays
cccaaaaccaccctacgtctctcgctccctgcgctcgcttaatcgccttcgtcctcttccccacctacgtgctctcgctctccccttctccccacctagcctctcgatcggctcatttcgtggcctccagatcctccttctccccccggggcccatcatcaacccctcaacaccggcctcacaaactcgggcaggtctcccccgctgcttaattacctcgtgcgccgcgaaaacacgctctaggctctcgtttcctcgtactggtacaagcgggacgggagcagcagcagtagcgtgatccatccccatggcgggggcaacctcttcctcgtccgtgtctttgatcctcatcctcgtcgcgtcctcctcgccgcggcgcagccggggcagggtgggcattgctctgcgctcgtacggctacagcggcgccgagctgcggttgcattgggcgcgtcggggctcgtctcgggatggaccggcggtagtgcgcgccgcagcggttccggccgggggtgagggcgaggacgccgcggcggtagggaagagctcctcgtccaaggcggtcgccgtgcagggcagcgagtccaagactcaggctgtatattctacttcacctcccaaaactgcgacgtctgcgccgaagcaaaaccagagcgctgcaaagcaaaacggaacagttgggagcagcagtgcgagcaaatccccggcgcctgcggtatctgaatccaaagctgaaccatctgctcctgtcaccaagacagaaaccgatgccagtgcgaaggttgaagagctgaagccctcagtggatgatgctaaacccgtagaaagcataggcatccctgagccggtggatgctaaggtggacgccgctgcagctactgatgccgcggcgagtgctgctgatgacactgaagacaaggaacatggccctttggctgggcctaatgtgatgaatgtcgtcgtggtggcttctgaatgcgctcctttctgcaagacaggtggccttggagatgttgtgggtgctttgcccaaggctttggcgaggagaggacaccgtgttatggtcgtgataccaagatatggagagtatgcagaagcccgggatttaggtgtaaggagacgttacagggtggctggacagaagttacttattttcactcttacattgatggcgttgattttgtattcatagaagcccctcccttccggcaccggcacaatgatatttatggaggagaaagatcgaatttaatcaa

SEQ ID NO: 55954 - DNA, 573 bp, Zea Mays
cttaatcgccttcgtcctcttccccacctacgtgctctcgctctccccttctccccacctagcctctcgatcggctcatttcgtggcctccagatcctccttctccccccggggcccatcatcaacccctcaacaccggcctcacaaactcgggcaggtctcccccgctgcttaattacctcgtgcgccgcgaaaacacgctctaggctctcgtttcctcgtactggtacaagcgggacgggagcagcagcagtagcgtgatccatccccatggcgggggcaacctcttcctcgtccgtgtctttgatcctcatcctcgtcgcgtcctcctcgccgcggcgcagccggggcagggtgggcattgctctgcgctcgtacggctacagcggcgccgagctgcggttgcattgggcgcgtcggggctcgtctcgggatggaccggcggtagtgcgcgccgcagcggttccggccgggggtgagggcgaggacgccgcggcggtagggaagagctcctcgtccaaggcggtcgccgtgcagggcagcgagtccaagcttcacgtgcaccgccctttt

SEQ ID NO: 55955 - DNA, 1457 bp, Zea Mays
gaacacggcgacccgccgctgtgcatcgcgccccaaaccccggccaccaatcacccaccactacaacctgcgatcaatccgggaatcagccccgattcctaccagctatgccattggaactacaataattttggtgcagataaatcctgaaaaggcccgggaggagtttcggacagtaagtcaaaaaaatggaggaacaggagtaaaagatttcatggatagcatgggccttggggtgcttgttgagcagcttggagagttaaaattgggggaattgttggacacaccaccacctggcttggatgaagcaattgcaatttctaaggttatgcaattccttgaagcacaagaatacagcatgtttagtcgcattgtatttgacactgcccctacgggccatacactccggttattatccttgccagatttcttggatgcgtccattgggaaaatcttgaagctgaggagtaagattgcttctgcaacatcagctattaaatcagtatttggacaagaggtccaacagcaggatgcagcgaacaaattagagcaactcagagaaaggatggtcaaagtaagagagcttttccgcgacacggaatcaacagagtttataatcgtgacaatcccaacggtgatggcaatcagtgagtcatcaagactgcattcttcgttgcaaaaggaaagtgttcctgtaaggagactcattgtgaaccaagttctgccaccttcaacatcggactgtaaattctgttctataaaaagaaaggatcaaacgcgtgcattggatatgatacggactgacccagagttaaaaggtttgaacattatccaagcacctcttgtggacatggagattagaggtgttccggctctcaattttttgggtgatatactgtggaagtaacttcagttatgggaaacaggatcgcttataagggtgcttaattggccaatatcactgttagcctgctgcacaattgcactgctctgcaactagcaatctgtgggctcttctggttgtttccagctaacaattgcacaataagcttaagttgtttccagctacaatacagcacaacacattctccatggtgcgttaaatctgagtagaaagcaccaaattggagggttttgctgcactcctgcactagcatttgatgacctgttactcttggcagtgatgcagattggatttagccccaaattaggctaattgaagtgaaatgctgtaatatttatccttttatcaattatccccaagattaatagcaacacttgtggccttttggttcggcgactttgtaaaactcttcgtttcttatgtgccatctcaattttgtacaagaaatgtgttttctcttctccctcactggggcagttattcaggatattttaagctttggtttagctgccttgcaatgatgcgtgggtttggcaccctaattctggctgca

SEQ ID NO: 55956 - DNA, 1666 bp, Zea Mays
ataagattgcatgcagataaggattagaagataagatttgttagagagaaaataggagatctatctcattagataaggattagaagggagtataaataattgtaagcaccactctatagatcaagcagaaacaagattgttccggcttcccagagggagccgggagattactgtgacctagctgcccctttcctcgcgcctctcttctctcacgcgcggtgaacacggcgacccgccgctgtgcatcgcgccccaaaccccggccaccaatcacccaccactacaacctgcgatcaatccgggaatcagccccgattcctaccagctatgccattggaactacaataaataaatcctgaaaaggcccgggaggagtttcggacagtaagtcaaaaaaatggaggaacaggagtaaaagatttcatggatagcatgggccttggggtgcttgttgagcagcttggagagttaaaattgggggaattgttggacacaccaccacctggcttggatgaagcaattgcaatttctaaggttatgcaattccttgaagcacaagaatacagcatgtttagtcgcattgtatttgacactgcccctacgggccatacactccggttattatccttgccagatttcttggatgcgtccattgggaaaatcttgaagctgaggagtaagattgcttctgcaacatcagctattaaatcagtatttggacaagaggtccaacagcaggatgcagcgaacaaattagagcaactcagagaaaggatggtcaaagtaagagagcttttccgcgacacggaatcaacagagtttataatcgtgacaatcccaacggtgatggcaatcagtgagtcatcaagactgcattcttcgttgcaaaaggaaagtgttcctgtaaggagactcattgtgaaccaagttctgccaccttcaacatcggactgtaaattctgttctataaaaagaaaggatcaaacgcgtgcattggatatgatacggactgacccagagttaaaaggtttgaacattatccaagcacctcttgtggacatggagattagaggtgttccggctctcaattttttgggtgatatactgtggaagtaacttcagttatgggaaacaggatcgcttataagggtgcttaattggccaatatcactgttagcctgctgcacaattgcactgctctgcaactagcaatctgtgggctcttctggttgtttccagctaacaattgcacaataagcttaagttgtttccagctacaatacagcacaacacattctccatggtgcgttaaatctgagtagaaagcaccaaattggagggttttgctgcactcctgcactagcatttgatgacctgttactcttggcagtgatgcagattggatttagccccaaattaggctaattgaagtgaaatgctgtaatatttatccttttatcaattatccccaagattaatagcaacacttgtggccttttggttcggcgactttgtaaaactcttcgtttcttatgtgccatctcaattttgtacaagaaatgtgttttctcttctccctcactggggcagttattcaggatattttaagctttggtttagctgccttgcaatgatgcgtgggtttggcaccctaattctggctgca

SEQ ID NO: 55957 - DNA, 612 bp, Zea Mays
atggagcatgaatcacacttggatgtggtcgagctcgtcgtcgtcgaccgcgacggactggctctgcaggcggcggagcttgaaggaggagagcttctgcgacatgtccttgtggctgggcgcctcctcgaagcggatgtaggtgtaggtccaggccccggagagcgtgccgaggacggggcccaggaagtagatccagaggccggtgtagaggttgctcgccagcgccggccccagcgtcctcgccgggttcatcgatccgcccgacactgcccttgcgaagatggacgtaatgcaaaccgcggaaccaactgccaaccccgccaactcacccaccgctctcgtgtccgtggcgacggcgagggtgacgaacatcatgttgaaggtgacgatgatctcgatgacgagcgagtgccagtgcggagggaagatgtccgccagcgaccggtcgtagtacgtggggggcatgctggagttctgcgccgtgccgatgtcatggatctcgttgttgaagttggccctggagttggacctcgagttggtcgacatttccggccggcggtcgatcgatcgagctactacgcgcctgcgtgctgcgcgtggtcgagctag

SEQ ID NO: 55958 - DNA, 1290 bp, Zea Mays
agtgcttggtgatctcttacagttacctcagctgcagttctgaaagcaacagtgaagttcaagaatttgaatatttacataaaagataatagaaatacaatcttgtgaggataaatgaactctccataaaaacattgaattcaaaccaaaatatcacctacaagctaccaacaaagcttacaaagtaaaccaagtacaacagaaactaaaatggctatgggatccactgaaaaatagacatgtaagaacagtgtacaaaaataaaatctaaagcatttaattcaacaccaaactctgcatgtgaaacctttttcggggatatgtgacaccaatgtaacaatgcttttaaggtttcattcctgatattttaatctcttgcttagcaaattgacactgaatcattgattatgaaattatgctgtataatggaacttatggattgttacagagttggcagttgcagaatcactacctctacagggatcatttaatagtgaaacaacagtattccagatttacataccgactgacacaagtttccaacatattttcaaactggaagataaaatatagaccatattcatggcttcctctcatggatcacacttcaactaagcatgttaagaatcaagctgaactaacacagagcctacacacctcaattgaatcggctgccacattacgaatgtttggcaagctttggccaaaacatagggcaaatcccttttgcctattttgttcattcttgccataaaacagactgaccaacgataaaatacccaactccttttttcatcccatttcccaaacatgtaaccattacttaccaaaaaaaacatgtaaccattgaagagcaatcaaaacacacatatggtttgtatgttagctaactgcaagccaataagtgagtgagcttggctttcctaatgacgaatcaaaaggcaatggttgaacatggttgtcgacatagttgaactgcaaaatagaacaagaaatgaaaggcaatgtaatgcaatactagcaaaagagacaaggtgtgtatttctatggctggcatgagtatagttcagatgaatacatatagcaaataaaagaaagtagtccctagacaaaatctcttttcactcctattccaatgaacaacccaaataagtcccctctaggagtctaattatttgtggctttaagcgcaaaaaggagcctaacatcaaagtagatataaatgagtcaggcatttaaaaagaagccctcaataagctagatcattttggaaaaggtgttagcagtcgc

SEQ ID NO: 55959 - DNA, 787 bp, Zea Mays
agatatcaaaatccgccaggaatggaccagcaattagtatttcagactgtgacggtctttccagcctaacgctctaattctaggatgcaacaaacttcacaggcagcgtgtcatgttatactttgttcatatcacagaaatgaaacaagaccatctaagaaattcaggggttctctagaacgaggagtggtgaaaggaccatcaaattatcacaataaaaggcatgtggctctgcagaattacagtgaacagtgagatctgaacctccgagaattttgttattgtccttcatgtacttctcccagtccagcgacgactcctcaaatcagcttcttcttcatgccgccatttgccacaggtcgccacgccatggccgccacatccgccacagccgcagcagctgcggcgctctcccacgtgctctataaagaaaacgggaaacaaacaaaacaattctacaataggccaaaaaatagacgaagaaatatgagaggaacacgacataccggagcaacgcgagggaccgtcgaactatgcatcagatgccgccactatgcgcaaaaaggaaaccataccggagctagaagaaccgaggagctaaacaaacctagagcgggggctctacaaccagccaaacaaagacggcgacacgatgacctagatctacacgaaagcaagaattctatctacaattgaatgctgaaagtatatcaacattcatcaaagtgagtgtatttgtttatggtcgaaagatggtgccacaaaataaaacatcactgtaggaaaa

SEQ ID NO: 55960 - DNA, 2894 bp, Zea Mays
ggcatcgtacgtccttttgtcgatgttatttaggccgaggccatgcttgggcgaggcaaagatttctcccgaggccatcgtcgggcctgcgcctggacacacaaatgtgtatggagtggtcagcacagtagccggagtggtcgtctgcgcgattcgcgtggagttggtggtatgccctactgccagggcagttgatcgagaccaaactcgggcgaggcggagtttcctcccgagtcggaagccatcttcaggctaggtggagttctctcccgagggtgaggctgtgctttagacatttgcacgtcccattcagagttgcttgggaacagcgaccagagtgggggagcagcgtccgattttcgtgggcgtgcgtcatcttagtcggtgaaagtagatgggaccgctgtcccatcgtcctctgttgactgtggtgtcacatggagcagatatttgtatcatcgcatttaatgcgcatgtcttcatggtccccgagaactttggtcgataccgggctcgaggctatccttcgttcgagatgagcttaggtgagacagaaattgatttctgtaaagtggggccctcggccgagtcaaggatttcacacgggcacaaccttcacacgaggatgggctcgggcaagacgtagttttgagcgaccgttgagcgggggtccgggcgaatcgtgattcaacccttagtggcctcaaggagtgcgtttttttgtttgatttcttaatactcaggtgttaggtatgcttagggacacaatccaagtacactaattatgatacccgacaccttgctactagaggccaccctcggtttatctctatttgggcccgattaattggctaacaggggaggctagttagcaaaatcgtctggtttatctccctttttatttttgaaacttgtttgatttttatttttaaatcttttaagtgttttcaaatttggtttatgtgaaaagtcttaaaatactttatagtatttataaaaaactggcatcaaatttttcaaaatttacaaaatattctaaatttaaatgggtaaatcggtgatacggccttacgagccgccaccgattactgatttactggccaattagccggatcaatcgaacggtttcatgaacctgctaggccctgcctctacgtatgttgtgtcgtgccatgtgcgctcgccatgctattgtgaagtgtccaaatgcttgcctcttcatgaggaggttgaggccaagttcgcacttgcattcaccctctgcttgctctccttcaatgctcaagcctttcatgattggcctatctcgtcatgtcttgccgtagagcatctcaaacaatacctcaaattagtgtcttaaattgaaatatgaagctttacacagtgaaaaatattccaatagtacctcgttttataaaatttggtcaaaaaattatagggcattgtctgaagtgcctcaaaaacaccgtagtgggctgtcctataatctagatttaaggttttactgttggagcgaggtattttgtccgtgccctaaattctacaaaatatactcatttttaaattatagggcaattttataggtcacattgttggaaatgctcttaggtctcaattctacaaacaatataatatgcagtgcaaaatagtactttgtccggctatttacacggtctgctagagatggcctaaccatcagaccattacctataacaggccatgagaaaacacccaaccctaactcgacacgaagacacatacatacagtgtaacactagaataataccacctcgctagctgaagaatgatgaggaaccgagcctgctcttaaaaaaaggttagattttctttttaacgcatatctttctcaaacttttgaggccttttggataatatgaagtgtggtatctacaaattaatatacagtatgtgggaaatatgtccactttaattttaatttattttttatgataggatctaatttaattttaatttttttatggggagcatccatcacactaacttgacacagctccctcgaatgtcgtataactattgcactatagcatcaaatgtgattgatgtacatcgcaatgcgcagacattataatagtgtttctataaaacacccttagtcataataattatgttatctttaactatcaaaatcaaattaaggtgtagatgctttcatcatgctccttttgagtaaacaactacggatactacctctagtaaggctatggtcaccatattatgcatatgaccatgtaaaaatattattttatgaactgcactatttatagagtgagatttaaaatgaaagatgagtaaattactggagactaaggttatgtccagtggtggccgaatgcgaaagcgcatgcgccatggcgctcatttgcgcaacaaaaaacgcccatttatagtgtctcgagcatgagagtgcgcaccctctcctgcagagaagagaacgtgtggccacacgaacgaccacacattttacgcgacaatttgctggaagtatacataatgggatgtggtcgcacaaaatgcgcatgtgcgaactgattcgtaagctgttggacataacctaaggtacatctttcatgcatgaacctacgacgacagaacccagagacaacggcggcctgaaaatgagtcttagtctatctccagcctccctatcacacctcatatcacattccctatttcaaacaccactttgtaaataataattatacagtgcaaaacaatgttttgcacaaccataatatgcctgctcctaagcacgacaatcagcacggccttagagcaagcacggctcagaaacagacaagtgatgatggttcagttaagggccttagctctccagcagaccagcagactctcta

SEQ ID NO: 55961 - DNA, 2788 bp, Zea Mays
ctgcctcctttgatcactacaaaagaatctggagatcttgggccccctcaaagtgccgttttttcatgtggttggtggcacacaacagatgttggactgctgatcggttggccaaaaagggcctgaatcacccgcaaaggtgtcttctttgtgatcaggatgatgaaaccatgaaccaccttcttatctcctgtgtcttcacaagaattttctggtatatgctcctaaggaaatttgggttacatgccctggccccacagcctggacttacatccttctttgagtggtggaaaggggctgctgaggcagtgcagggaatggtcaggaaagggctgaattctctcatcatgttgggtgcctggaagatatggaacctccgcaatagatgtgtgtttgatggagagacccccagcctctctcgaatcctgcagcaggctgaagaggagagaaatctttgggtgctagcaggggccaagggtctctcctttttggctgcccctttgttggtagtctgaagtcctaatggatttgttcctttatgtttgtttctggcctccgtaaggagagctattgtattttgtactatgtactatttctcctcttcttaatataattaaaggcgcagttcccctgcgctttcgagaaaaaaaaaagttccaaactgccctcaatggcgagcagatcaaaaatcatctgaaaacttggtccataaggtttgccaagataaataggataagaaaagtgagtggtacaggctgggatgaagatagttttactattactttggatgaagagcactataatggctatgttaaggatcacaagaatgatgctgattgtttaaacaagcctcttgaacactttgctgagatgcaaacaatatttggaaacaccatggccacaggtaagtttgcaaaggattctagtgcagctttaggtgaagatgatgaagttcaaaatgaagaggtgatggcacatgctttcactaaaaggatgtccagttgtgatgataatgccacaacatcttctacaagcaagaccaggaagaaggcaaaaaaacgtgatagtgaagaggaggggttgattgctgcattcaaaagtgtcggggataccttatccaatgctattgagaaggttgccacaggggggcactgatgtgccagatgatctttttgacagtttgataaaccttccaggttttgaacagaaccacatatctctgtatttcaattatctggtggcgcaccctcacattgctagagccttcaacaagttgccattcgaccacaagttaatctaggctcgcaatttcatcagtgaaaagttcccaggagtgtgagggcaattggtaggtaggcttggagggttcttttgcttgaactacatcgaacaatgaattgtgatctatgtacgtatggattttgtagaagccttgaacttgatattatgtgtacccaggagtgtgagggcaattagtagataggcttgggcagttcttttgcttgaaccacatcaaacaatgaaatgtggtctaagtacgtgcagattttgtggaaaccttatattggaataatggaaaccctaaccctaacagaggttgggtggtgtattaatagacttgagtactgggccgggcccattacagaggggcgagacagtaattacatagggaacaaccccaaaccctaaacgggtattctaacaccccccgcagtcacaactctatcctgtacagatgttgagactggagcgaaagtctaaaaatgcactcgatggtaaccccttggtgaagatgtcagcgaattgcagcgtggtggggacgctgagaacccgaacgtcaccagcagcgacacgctcgcggacgaagtgcaggtcaatctccacgtgcttcgtgcgctgatgctgcacgggattggtggagaggtagaccgcgctgacgttgtcgcagtagacgagggtggcgcgctgaaggggactgcgaagctctctgaggacgacgggcctccggtcgaggggcgagacagtaattacatagggaacaaccccaaaccctaaacgggtattctaacaccttaaacttggtattatgtgtaatgctagaacacattattatgtattgtgtggaattaataatatgtgtgttttgtggacttaatattagttgtaacatatcatgagatgggggcaatgactgcaagcattttgattgaattccattttttgtgaaggacaagtgtaacagttatctctcaaaccaaacaaaggacaagaccaattcatccccggttatacctctaaccaaacaaaaaacaaggaccatctcatccctccgaccaaacaataccagaaatcatttcatcgcccaacccagggatcattctattccgtcctcatttgtcccgcaaccaaacgcatcctaaataactagccatgggcaaagtaaagggtggtttgtgctgcaggtgccaagtattctgaacaaataaagtggtaaaagattcgaagcatttgcaaaccgaaagtaccaaataacaagtactatagtagaaaaaaatggggctccctatacatgggtactccatctctgacctagtatattagttctctaattggtttccgagatataactatatgagtaatgtactccaatcatattgtcataactaaagtgaatcttcagtattccaaacattctaacatcacagaagtaaactttgaataattcagaatgaggaagtaacatgtctggaacttgattttgagatcctaaatctttaacagctggaat

SEQ ID NO: 55962 - DNA, 2126 bp, Zea Mays
aacaaattatcatcccaatcagatgacataagcaaacaaaatctctatcacataatgatatgtattcaagcttctccatatattgatcatcaatgaattctggggttcaacgttcaaggcaaggagcttttgctcatgggtctgttttccactaggaacttcaaaatgacccttcacatcatgatttgttattcagcaacacttgtctgccgtggtctttccacttggcggtactttagaaatctgggaaactctgcatgcccaatgtgctggaaagtgtatatcagagcttactattgtgcctgcaaaagtatgttggcaggaccttaggatctccactacgatatattattaaagcacagttgtttttaaagatcatcatacaaaatacatctggacatactatgtagatcactttatgctctgattggctgaagtaagtctttgggtaattgttatgtttacagtaacttttatttctgatggtgtttcttgctatgccattttcaggttaggactgtccttgacatagaatgtggatttggtacctttggggcgcatctttttgagagagatctcttgaccatgtgcattgctaactatgaagcatcaggtagccaagtgcaaattacactggagagaggcattcctgcaatgattggttcatttgcaacgaagcagcttccgtatccctatctttcctttgatatggtgcattgtgctaaatgcaatatcgaatggtacaaaaacggtatgtgtgaaagtcttctttcacatgccctggccctcattgacgattataatgttattcagcaatgtcttaagttggcacttcacatataaagatcggtacatgcctagctgaatattaaatatttaaggatatacagttgtgggtgacttttggttgacttgtaacccttgtcacttcaaactttgcatacatctgatttctgcaaagacacatttatggtaatttggctataaagtagtatctcttacagtcttactaaatatgtaaacgttggttttctctgtaattctgcagatggcattttcttggttgaagtgaacaggcttttgaggcctggtggatattttgtatggacatcgaatttgaatacacatagggccttgcgagacaaagaaaaccaaaagaaatggacagccattcgtgactacgctgagggcctttgttgggagatgctgtcacaacaagatgagacaattgtatggaaaaagacgaataaaagggaatgttacaaatcaagaaaatttgggcctgagctatgtggccatgatccagaatcaccatactaccaaccactaagcccctgcatatctggcacaagaagtcagcgttggatccccattgaacaccgtaccacctggccatctcaggctaggcaaaactcaacagaactggacatacatggtgtgcattcagaagtcttcgctgatgataattcaagctgggactccatggtgcgaaactactggtctttgctatccccacttatattttcagaccatccaaagagacctggtgatgaagacccacaaccaccatttaacatgctaaggaatgttttagatatgaatgctcactttggtggatttaatgctgctttactgaagtctggaaagtctgtatgggtgatgaatgttgttcctacaaatgccccaaattatctaccaataatatttgaccgtggttttattggggttcaacatgattggtgtgacgcatttgcgacttacccaagaacatatgatatggtgcatgctgatggctttctatcacttgagaagacccacaagcatagatgttctactcttgacatattcttggaagttgatcgcatcctacgaccagagggctgggtcataatccgtgacaccgcccctcttattgaagcggcaagatctgttgttactcaactcagatgggatgcccgtattttagatcttgacatagctagtgatgaaaagctactcgtctgtcagaagccctttctcagaaaataaggagcacaagcacagtagacactgacacaagatatgaacttattctttcaccctatactgttacagttattgtctgagcagaactgagtacaaaagct

SEQ ID NO: 55963 - DNA, 2005 bp, Zea Mays
acgtccccagcagcagtagccccagcccccagtgccgcagttgcgctcagctatctctgctgagccgattagataaatccggcggaggaagagggaagaattatcgtgcgatatttcccccctcccactccctctctctctctctcgatttgcccgagaaatttttttggttgtttcccgcatcactctccactaggccgccgtctcccccgctggtgctcgtcgcttcctgcccaattcggcgccattcgcccggcgcactccctattaattccctgcctcggtagtcactggccgattgccacgtgaaatttcctgttccgttgcctttcgggtgcgcctgaagtacccacacgctactagggttcaatcgtcgtcagcaggcttacctctcaatcactgcggggcggcggctcgagagtttgtggacagttggcgaagagatagttaggttttttttttgtctcccgtgtccgatggaggaatcggacttgggaggtaatctgggtaagcaaacggaagaggataaggctgcgggagaatcaggggatgagggtaagatcgagaggagccaatctatcaatctgaatagagtgccagcagttgctgtagaggcgatgagcacccagggaaactgtgagacgcacggtgcagcagtgccaggaactaaggatgcaggcacaggaaaggcagggcaatccagtggcgatcgacaggaggagaagttacccaagtgtgagcaggtcgactatggaagtgaagttgaaggctgcgcagatgatgagaaccctggcaagagggctgctttagttactttggttggaaatgaatactgcggcgacgaggatgagagagttcaagtgctcaccattgtcaagaaggacgagcatgcagatgacattgtcgaccgtattaatcctggcacagttgcagggtacagtgaagtgaagggtgctgtaggtgcttctgccgccacttctgcggtgcgacctgctggctcccgatcgtcaagtttccatggtgtgactaggcatagatggagtgggaaatatgaagctcatttgtgggacagttcttgcagagtagagggacgtagaaggaaagggaaacaagtttatctaggaagttatgataccgaggaaaaagcggccagggcttatgatgttgctgctattaaatactggggcgaaaataccagactgaactttccgatttcacaatacggcaaggagttggaggacataagggatttgtctcgagaggaatgtgtgacatacttgagaaggaggagcagctgcttttcaagaggagcttctatttatagaggagtgacaagaaggcagaaagacgggagatggcaagcacgcataggactggttgctggaactagagacatttacctgggaacattcaaggaagaagctgcagaggcttatgatattgctgccattgagatacgtggcaaaaacgctgtgaccaattttgaccgaagcaactatgtcgataagggtatgcactgtatagaaggcgaaggcttgaggctgcttgcatccaagccagaagaatgacttccaagttcaatgcagtgattgtcgatcgagcagatttggccagacgtatatgcagcttagttggtacatatacagataggagaaccggttgcagtttgtcaatattcctgctttacatgacttgggattacagttaaatcgacccgctagcaaaaaaaagtgtgcaaatgttagtagatttggccagacatatatgaagattttggggttgtatcataaggcctcgtaggatagatctttctgcaaatgttagcgaagccagtgtttatgttcaaatatggacccctgcgcatcaaagaaaagttggacaccagatcttccaagaaccgaagattttctcagattattagcaacctttaagtttgtagaatgtcctctataattatatataactgttcaactcttctaaagacatttcatataaatataacaag

SEQ ID NO: 55964 - DNA, 1959 bp, Zea Mays
acgtccccagcagcagtagccccagcccccagtgccgcagttgcgctcagctatctctgctgagccgattagataaatccggcggaggaagagggaagaattatcgtgcgatatttcccccctcccactccctctctctctctctcgatttgcccgagaaatttttttggttgtttcccgcatcactctccactaggccgccgtctcccccgctggtgctcgtcgcttcctgcccaattcggcgccattcgcccggcgcactccctattaattccctgcctcggtagtcactggccgattgccacgtgaaatttcctgttccgttgcctttcgggtgcgcctgaagtacccacacgctactagggttcaatcgtcgtcagcaggcttacctctcaatcactgcggggcggcggctcgagagtttgtggacagttggcgaagagatagttaggttttttttttgtctcccgtgtccgatggaggaatcggacttgggaggtaatctgggtaagcaaacggaagaggataaggctgcgggagaatcaggggatgagggtaagatcgagaggagccaatctatcaatctgaatagagtgccagcagttgctgtagaggcgatgagcacccagggaaactgtgagacgcacggtgcagcagtgccaggaactaaggatgcaggcacaggaaaggcagggcaatccagtggcgatcgacaggaggagaagttacccaagtgtgagcaggtcgactatggaagtgaagttgaaggctgcgcagatgatgagaaccctggcaagagggctgctttagttactttggttggaaatgaatactgcggcgacgaggatgagagagttcaagtgctcaccattgtcaagaaggacgagcatgcagatgacattgtcgaccgtattaatcctggcacagttgcagggtacagtgaagtgaagggtgctgtaggtgcttctgccgccacttctgcggtgcgacctgctggctcccgatcgtcaagtttccatggtgtgactaggcatagatggagtgggaaatatgaagctcatttgtgggacagttcttgcagagtagagggacgtagaaggaaagggaaacaagctttcaggaagttatgataccgaggaaaaagcggccagggcttatgatgttgctgctattaaatactggggcgaaaataccagactgaactttccgatttcacaatacggcaaggagttggaggacataagggatttgtctcgagaggaatgtgtgacatacttgagaaggaggagcagctgcttttcaagaggagcttctatttatagaggagtgacaagaaggcagaaagacgggagatggcaagcacgcataggactggttgctggaactagagacatttacctgggaacattcaaaacagaggaagaagctgcagaggcttatgatattgctgccattgagatacgtggcaaaaacgctgtgaccaattttgaccgaagcaactatgtcgataagggtatgcactgtatagaaggcgaaggcttgaggctgcttgcatccaagccagaagaatgacttccaagttcaatgcagtgattgtcgatcgagcagatttggccagacgtatatgcagcttagttggtacatatacagataggagaaccggttgcagtttgtcaatattcctgctttacatgacttgggattacagttaaatcgacccgctagcaaaaaaaagtgtgcaaatgttagtagatttggccagacatatatgaagattttggggttgtatcataaggcctcgtaggatagatctttctgcaaatgttagcgaagccagtgtttatgttctgtttgctagattagcgttatcagtttgcacgttccccttttttttctgaataattgtccttgtatgatcttgagggaatgcgtttacctggtcgtttgccattcttttta

SEQ ID NO: 55965 - DNA, 1972 bp, Zea Mays
ctttaattacctattcccttacgtccccagcagcagtagccccagcccccagtgccgcagttgcgctcagctatctctgctgagccgattagataaatccggcggaggaagagggaagaattatcgtgcgatatttcccccctcccactccctctctctctctctcgatttgcccgagaaatttttttggttgtttcccgcatcactctccactaggccgccgtctcccccgctggtgctcgtcgcttcctgcccaattcggcgccattcgcccggcgcactccctattaattccctgcctcggtagtcactggccgattgccacgtgaaatttcctgttccgttgcctttcgggtgcgcctgaagtacccacacgctactagggttcaatcgtcgtcagcaggcttacctctcaatcactgcggggcggcggctcgagagtttgtggacagttggcgaagagatagttaggttttttttttgtctcccgtgtccgatggaggaatcggacttgggaggtaatctgggtaagcaaacggaagaggataaggctgcgggagaatcaggggatgagggtaagatcgagaggagccaatctatcaatctgaatagagtgccagcagttgctgtagaggcgatgagcacccagggaaactgtgagacgcacggtgcagcagtgccaggaactaaggatgcaggcacaggaaaggcagggcaatccagtggcgatcgacaggaggagaagttacccaagtgtgagcaggtcgactatggaagtgaagttgaaggctgcgcagatgatgagaaccctggcaagagggctgctttagttactttggttggaaatgaatactgcggcgacgaggatgagagagttcaagtgctcaccattgtcaagaaggacgagcatgcagatgacattgtcgaccgtattaatcctggcacagttgcagggtacagtgaagtgaagggtgctgtaggtgcttctgccgccacttctgcggtgcgacctgctggctcccgatcgtcaagtttccatggtgtgactaggcatagatggagtgggaaatatgaagctcatttgtgggacagttcttgcagagtagagggacgtagaaggaaagggaaacaaggaagttatgataccgaggaaaaagcggccagggcttatgatgttgctgctattaaatactggggcgaaaataccagactgaactttccgatttcacaatacggcaaggagttggaggacataagggatttgtctcgagaggaatgtgtgacatacttgagaaggaggagcagctgcttttcaagaggagcttctatttatagaggagtgacaagaaggcagaaagacgggagatggcaagcacgcataggactggttgctggaactagagacatttacctgggaacattcaaaacagaggaagaagctgcagaggcttatgatattgctgccattgagatacgtggcaaaaacgctgtgaccaattttgaccgaagcaactatgtcgataagggtatgcactgtatagaaggcgaaggcttgaggctgcttgcatccaagccagaagaatgacttccaagttcaatgcagtgattgtcgatcgagcagatttggccagacgtatatgcagcttagttggtacatatacagataggagaaccggttgcagtttgtcaatattcctgctttacatgacttgggattacagttaaatcgacccgctagcaaaaaaaagtgtgcaaatgttagtagatttggccagacatatatgaagattttggggttgtatcataaggcctcgtaggatagatctttctgcaaatgttagcgaagccagtgtttatgttctgtttgctagattagcgttatcagtttgcacgttccccttttttttctgaataattgtccttgtatgatcttgagggaatgcgtttacctggtcgtttgccattcttttta

SEQ ID NO: 55966 - DNA, 2247 bp, Zea Mays
gtccaaaccatcacaaccggtgttggacgaacttttcttcaattggtgctacccctagcctatcacaaatggctctcaaacttgacagtttggtgggtgatatagaagatgcagtttcttcttctgttactggaaaacttaaatctcgtgtagacaattcggaggaaacacatcatgttgctattggatatttgaaaagcatagaagatcttctagcttctgtagctgtgactagaccacaatggactcgccttctatcttccgtggatcacagagtagaccgatctttagctatactaagaccacaagccattgttgatcatcgatcacttctttcttcccttggctggcctccttcacttgccggctcaaaattttcaagtattaattcggggaaacaagcagagattgtgaacccattgtttgtgatgcggggtgacctgaaaagcaagtattccgagagctttcttgcactatgcaatttgcagggattacagaaacgtagaaaagctagacaactgaaagggcattgtgtgggtaatcaactacgtcaaccattatgggtaattgaagagctagtaaatccaatatctacagctgcacaacgccatttctcaaaatgggctgaaaagcctgaatttgtttttgctcttgcttataagataattagagattttgttgattctatggatgagattctacagccccttgtggataaggctaaccttattgggtatagttgtagggaggaatggatttcaggaatggtcattgcattgtctacatacttggcgaaagagatatttcctaagcagattgaagttcttcaggaaagtagtagctcaagtgactcaggcagcacggcctatcaggctagagtctcgtggctcagccttgttgatctgatgatatcttttgacaagcggattcaagatttaatcttgagtgctggactactacttacggtaaaggatgatgacagttggcagaggatctcagttctctgtgtcttctgtgatcgcccagattggcttcaagtatgggcggagattgagagacaagagagtcttaataagctgcgatcagcaatggatttagagaaaaattggagtacaggaattcgaggaactatgcttgaatactcagatgattacaaggctccagtaatcaccagtgtcgttcatcataccttgtctttgctaattgatcgtgcccgtcccatccctagcatcacacttagggcagaattcattagtatgtctgctgcacccatcatatcagaattccttggttacatgcttcggaggtgtcaagaagcagaggggctgactgctctggctgatgataatgctgtgctcaaggtatcacaatctatcaatgcagctcgatatttcgaatccacgttggcagaatggtgcgaggatgtttttttccttgagatggaaaatttgactgtaaatggtgagagtgggtgtatctttcagcaagagataaaccatctgaaagagttcagagtggaatggactgataagatttccactgtcattttgcgtggattcgatgctcgttctcgggattatctaaaaaacaagaggcagtggctggagaaatcagatggacctgctgtatccagaaccttcatagaatctttagactacatgcaagagcaactatccaagctgcaaggtggcctaaatacggttgattttgtgaccgtatggagaggtgtggcaagcggggtagaccagctgcttttcgccggcattttcacaagcggcacaaaggttagcagcgatggagtggagaggctacagggcgacctcagcgttttgttcgctattttttcagcatggtgtctgagacctgaaggcttcttccctcgactgtccgagggattgaggttactgaagattgacgaacagcagcttagagagggggcgtttaaagataagaattggttgagggaacatggcattaggcatctggcagctgccgacaccgagaggataataaaaaaccgggtatatgatgcatgacgaattgtacttaactaacatcagtctgtagttgggaaaagagagggattgtcgagtttgaaagaattcacactgttttactccatacaggtcttgtttcttctttatatacacctacgttcttggcgtatcggctggtgtaataaggtacattatatttatcaaatatatatatgaagagagactagctatggattgcaaatattctgtg

SEQ ID NO: 55967 - DNA, 2722 bp, Zea Mays
ggaaaacaaaggcccccctcccccctcaaccaaatgtattaaccacccacaatccgggccatacctgaggcaacggcccctgaggcaacggcccaacctgtcaagtgtcaaactcccattaaccattactacgcgctaaaaaatgacgattatgagctcgcacaaactgaaaaaatgcaggtcgtctccttctccggttgagctacgctgccccccctccaaaccctaacccgttgtgtgatccgttctgctatggaagcagcagctcaaccccatccgctccagcttttccaagacatggacccgggggtccgccgtttcctcgacgcccgattccgctcggcggccgatctcgccacggcctccgatgtcgaggccgagatccgcgggcactgtgcggagctagaggcatcgatttacgacctttacgtacgcctacaggaaactgccgcagcgtactcgtcttgctgcgaggtcgctggttcggccctccgtggcgtccgcggccggcttggtgccctcaaagcatccgggtcaacaggggctggagaagaggtggaggtgagaacggagcagatgcagttcgagcaactccctgctctggcctccgaggtggcgagagtagagatggtcagagagtatgcagaaatggctctcaaacttgacagtttggtgggtgatatagaagatgcagtttcttcttctgttactggaaaacttaaatctcgtgtagacaattcggaggaaacacatcatgttgctattggatatttgaaaagcatagaagatcttctagcttctgtagctgtgactagaccacaatggactcgccttctatcttccgtggatcacagagtagaccgatctttagctatactaagaccacaagccattgttgatcatcgatcacttctttcttcccttggctggcctccttcacttgccggctcaaaattttcaagtattaattcggggaaacaagcagagattgtgaacccattgtttgtgatgcggggtgacctgaaaagcaagtattccgagagctttcttgcactatgcaatttgcagggattacagaaacgtagaaaagctagacaactgaaagggcattgtgtgggtaatcaactacgtcaaccattatgggtaattgaagagctagtaaatccaatatctacagctgcacaacgccatttctcaaaatgggctgaaaagcctgaatttgtttttgctcttgcttataagataattagagattttgttgattctatggatgagattctacagccccttgtggataaggctaaccttattgggtatagttgtagggaggaatggatttcaggaatggtcattgcattgtctacatacttggcgaaagagatatttcctaagcagattgaagttcttcaggaaagtagtagctcaagtgactcaggcagcacggcctatcaggctagagtctcgtggctcagccttgttgatctgatgatatcttttgacaagcggattcaagatttaatcttgagtgctggactactacttacggtaaaggatgatgacagttggcagaggatctcagttctctgtgtcttctgtgatcgcccagattggcttcaagtatgggcggagattgagagacaagagagtcttaataagctgcgatcagcaatggatttagagaaaaattggagtacaggaattcgaggaactatgcttgaatactcagatgattacaaggctccagtaatcaccagtgtcgttcatcataccttgtctttgctaattgatcgtgcccgtcccatccctagcatcacacttagggcagaattcattagtatgtctgctgcacccatcatatcagaattccttggttacatgcttcggaggtgtcaagaagcagaggggctgactgctctggctgatgataatgctgtgctcaaggtatcacaatctatcaatgcagctcgatatttcgaatccacgttggcagaatggtgcgaggatgtttttttccttgagatggaaaatttgactgtaaatggtgagagtgggtgtatctttcagcaagagataaaccatctgaaagagttcagagtggaatggactgataagatttccactgtcattttgcgtggattcgatgctcgttctcgggattatctaaaaaacaagaggcagtggctggagaaatcagatggacctgctgtatccagaaccttcatagaatctttagactacatgcaagagcaactatccaagctgcaaggtggcctaaatacggttgattttgtgaccgtatggagaggtgtggcaagcggggtagaccagctgcttttcgccggcattttcacaagcggcacaaaggttagcagcgatggagtggagaggctacagggcgacctcagcgttttgttcgctattttttcagcatggtgtctgagacctgaaggcttcttccctcgactgtccgagggattgaggttactgaagattgacgaacagcagcttagagagggggcgtttaaagataagaattggttgagggaacatggcattaggcatctggcagctgccgacaccgagaggataataaaaaaccgggtcttgtttcttctttatatacacctacgttcttggcgtatcggctggtgtaataaggtacattatatttatcaaatatatatatgaagagagactagctatggattgcaaatattctgtg

SEQ ID NO: 55968 - DNA, 988 bp, Zea Mays
atttagtgttacatgcctacacaattacaatgtttccctcaatcttcatactgtttcctgactggctggagggaatggtcacagaatatcttgtcgcaacatttgctgattactttggtgatgttaaaatgtatattgaagaaagatcatttcgaagatttgtggaggcttgcatagaggaaacaattgtggtctatgttgaccatctcctttctcagaaaaactacataaaagaagaaacgatagagaggatgaggttagatgaagaggtgcttatggatttcttcagggaacacatcaacgtgacaaaagttgaaagcagagtgcggattctggcagatatgagggagctagcttcagctgagagtttggatagctttactctcatttacactaatatactggaacatcaacctgattgcccgcctgaggttgtcgagaagcttgtggcaatgcgggaaggcattccaaaaaaggaagcgaaggaggttgtacaagaatgcaaagagatatacgagaactcgcttgtggatggcaaccctcagaagtccggttttgtgtttggcaaattgaagtgcttgacagcaaagaaaggcatatggaggaagcttgggcagtaagtgtggacttgagcagagtggacagaagtaccacctaggcaaagactgtacgtttcacttctctatgatcattcttttgttcttttgtcgatgctactgttgggtttcacgtttagactatcagtgtgtactcagcttgaggagcaaaaatgtatattccactttgcttagctacagaggattttggtgtaagaatatgtaatttattcaataaaatggttgctatttgcaataagttggcccaagtcatcgtacgcgcttgacggctgctgatccaggcgcacgtcatgtatgatagactgcaatttctctgtgaaatggaaacaaggcaatatcatataatagacaacggccgtgctgcatgcgag

SEQ ID NO: 55969 - DNA, 955 bp, Zea Mays
cgcttgaattgttgggccgactacaagactggctggagggaatggtcacagaatatcttgtcgcaacatttgctgattactttggtgatgttaaaatgtatattgaagaaagatcatttcgaagatttgtggaggcttgcatagaggaaacaattgtggtctatgttgaccatctcctttctcagaaaaactacataaaagaagaaacgatagagaggatgaggttagatgaagaggtgcttatggatttcttcagggaacacatcaacgtgacaaaagttgaaagcagagtgcggattctggcagatatgagggagctagcttcagctgagagtttggatagctttactctcatttacactaatatactggaacatcaacctgattgcccgcctgaggttgtcgagaagcttgtggcaatgcgggaaggcattccaaaaaaggaagcgaaggaggttgtacaagaatgcaaagagatatacgagaactcgcttgtggatggcaaccctcagaagtccggttttgtgtttggcaaattgaagtgcttgacagcaaagaaaggcatatggaggaagcttgggcagtaagtgtggacttgagcagagtggacagaagtaccacctaggcaaagactgtacgtttcacttctctatgatcattcttttgttcttttgtcgatgctactgttgggtttcacgtttagactatcagtgtgtactcagcttgaggagcaaaaatgtatattccactttgcttagctacagaggattttggtgtaagaatatgtaatttattcaataaaatggttgctatttgcaataagttggcccaagtcatcgtacgcgcttgacggctgctgatccaggcgcacgtcatgtatgatagactgcaatttctctgtgaaatggaaacaaggcaatatcatataatagacaacggccgtgctgcatgcgag

SEQ ID NO: 55970 - DNA, 1674 bp, Zea Mays
ccgcaaacatcactggctgaggtatgaaattttccagctcatggtaaacctgtatactgagagattcattcagatgcttcgacttctcagtgatagagcaaacgatattcaaaatataaatatcctgaaggtgactggttgggtcgtgcaatatcaagaaaacttgattggtcttggtgtggatgaatcacttgcccaagtttgttctgaaagtggtgcattggatcccctcatgaacatgtatgttgagcgtatgcaggcaacaaccaagaaatggtacagcaacattttggaggctgacaaaacacaaccaccaaagagtacagaggatggaaaactatatacacctgcagcagtggatctattcagaatattgaccgagcaagttcagatagttagagacaacagcacagacgtcatgctatatcgaattgcacttgcggttattcaggtcatgcttgattttcaagcagctgagaggcaaaggcttgaggagccagcttctgatgttggtctggaatctctatgtgcattgattaacaataatctgcgttgctatgaactttcatcagagctaagtagcagtacattggaggcgcttccacaaaactatgctgaacaggttaattttgaagacacctgcaaaggatttcttgaggttgccaaggaggccgtcctccaaactgttagtgttatttttgaagacccaggtgtgcaggatctactcgtgaagctttaccagaaagactggctggagggaatggtcacagaatatcttgtcgcaacatttgctgattactttggtgatgttaaaatgtatattgaagaaagatcatttcgaagatttgtggaggcttgcatagaggaaacaattgtggtctatgttgaccatctcctttctcagaaaaactacataaaagaagaaacgatagagaggatgaggttagatgaagaggtgcttatggatttcttcagggaacacatcaacgtgacaaaagttgaaagcagagtgcggattctggcagatatgagggagctagcttcagctgagagtttggatagctttactctcatttacactaatatactggaacatcaacctgattgcccgcctgaggttgtcgagaagcttgtggcaatgcgggaaggcattccaaaaaaggaagcgaaggaggttgtacaagaatgcaaagagatatacgagaactcgcttgtggatggcaaccctcagaagtccggttttgtgtttggcaaattgaagtgcttgacagcaaagaaaggcatatggaggaagcttgggcagtaagtgtggacttgagcagagtggacagaagtaccacctaggcaaagactgtacgtttcacttctctatgatcattcttttgttcttttgtcgatgctactgttgggtttcacgtttagactatcagtgtgtactcagcttgaggagcaaaaatgtatattccactttgcttagctacagaggattttggtgtaagaatatgtaatttattcaataaaatggttgctatttgcaataagttggcccaagtcatcgtacgcgcttgacggctgctgatccaggcgcacgtcatgtatgatagactgcaatttctctgtgaaatggaaacaaggcaatatcatataatagacaacggccgtgctgcatgcgag

SEQ ID NO: 55971 - DNA, 2217 bp, Zea Mays
cttttttctggaggatatatccaaatatgatatgactcttgttccagacattttttcacattatatttcattgacaacaaagatgcatgcaataaacatgttactgcttgttatgtccttgtgccaaactgccaattttgagttaaattcttggatgtggttgggttttattttgtaacatagtcctcagacattggttcgagctttgagggttgttgaaatgcaagagatcttagatcaacaagttgcagaagaagcagctgaggctgagggtgctggtgctatggcgacaataacaaaccaacgtagaactgcaaacagaaaaggtgcaggggcaacagttaccccaagaaagggcactcaagaaaaatcgaaggttcagggaaagggctacaaggacaaatgctatgagtctatcaggatggctgttgaggcccgcttcaacaagttgcttactgagcttgtttttgtggaggacttgatggaagctttggaggaagccaaagctattggagatgagcttggcgatatatatgattatgttgcaccatgctttcctcctaggtatgaaattttccagctcatggtaaacctgtatactgagagattcattcagatgcttcgacttctcagtgatagagcaaacgatattcaaaatataaatatcctgaaggtgactggttgggtcgtgcaatatcaagaaaacttgattggtcttggtgtggatgaatcacttgcccaagtttgttctgaaagtggtgcattggatcccctcatgaacatgtatgttgagcgtatgcaggcaacaaccaagaaatggtacagcaacattttggaggctgacaaaacacaaccaccaaagagtacagaggatggaaaactatatacacctgcagcagtggatctattcagaatattgaccgagcaagttcagatagttagagacaacagcacagacgtcatgctatatcgaattgcacttgcggttattcaggtcatgcttgattttcaagcagctgagaggcaaaggcttgaggagccagcttctgatgttggtctggaatctctatgtgcattgattaacaataatctgcgttgctatgaactttcatcagagctaagtagcagtacattggaggcgcttccacaaaactatgctgaacaggttaattttgaagacacctgcaaaggatttcttgaggttgccaaggaggccgtcctccaaactgttagtgttatttttgaagacccaggtgtgcaggatctactcgtgaagctttaccagaaagactggctggagggaatggtcacagaatatcttgtcgcaacatttgctgattactttggtgatgttaaaatgtatattgaagaaagatcatttcgaagatttgtggaggcttgcatagaggaaacaattgtggtctatgttgaccatctcctttctcagaaaaactacataaaagaagaaacgatagagaggatgaggttagatgaagaggtgcttatggatttcttcagggaacacatcaacgtgacaaaagttgaaagcagagtgcggattctggcagatatgagggagctagcttcagctgagagtttggatagctttactctcatttacactaatatactggaacatcaacctgattgcccgcctgaggttgtcgagaagcttgtggcaatgcgggaaggcattccaaaaaaggaagcgaaggaggttgtacaagaatgcaaagagatatacgagaactcgcttgtggatggcaaccctcagaagtccggttttgtgtttggcaaattgaagtgcttgacagcaaagaaaggcatatggaggaagcttgggcagtaagtgtggacttgagcagagtggacagaagtaccacctaggcaaagactgtacgtttcacttctctatgatcattcttttgttcttttgtcgatgctactgttgggtttcacgtttagactatcagtgtgtactcagcttgaggagcaaaaatgtatattccactttgcttagctacagaggattttggtgtaagaatatgtaatttattcaataaaatggttgctatttgcaataagttggcccaagtcatcgtacgcgcttgacggctgctgatccaggcgcacgtcatgtatgatagactgcaatttctctgtgaaatggaaacaaggcaatatcatataatagacaacggccgtgctgcatgcgag

SEQ ID NO: 55972 - DNA, 2257 bp, Zea Mays
aacctgttgcctttaatgttaccttaccctcttctacatgtggcttttttctggaggatatatccaaatatgatatgactcttgttccagacattttttcacattatatttcattgacaacaaagatgcatgcaataaacatgttactgcttgttatgtccttgtgccaaactgccaattttgagttaaattcttggatgtggttgggttttattttgtaacatagtcctcagacattggttcgagctttgagggttgttgaaatgcaagagatcttagatcaacaagttgcagaagaagcagctgaggctgagggtgctggtgctatggcgacaataacaaaccaacgtagaactgcaaaaaaaggtgcaggggcaacagttaccccaagaaagggcactcaagaaaaatcgaaggttcagggaaagggctacaaggacaaatgctatgagtctatcaggatggctgttgaggcccgcttcaacaagttgcttactgagcttgtttttgtggaggacttgatggaagctttggaggaagccaaagctattggagatgagcttggcgatatatatgattatgttgcaccatgctttcctcctaggtatgaaattttccagctcatggtaaacctgtatactgagagattcattcagatgcttcgacttctcagtgatagagcaaacgatattcaaaatataaatatcctgaaggtgactggttgggtcgtgcaatatcaagaaaacttgattggtcttggtgtggatgaatcacttgcccaagtttgttctgaaagtggtgcattggatcccctcatgaacatgtatgttgagcgtatgcaggcaacaaccaagaaatggtacagcaacattttggaggctgacaaaacacaaccaccaaagagtacagaggatggaaaactatatacacctgcagcagtggatctattcagaatattgaccgagcaagttcagatagttagagacaacagcacagacgtcatgctatatcgaattgcacttgcggttattcaggtcatgcttgattttcaagcagctgagaggcaaaggcttgaggagccagcttctgatgttggtctggaatctctatgtgcattgattaacaataatctgcgttgctatgaactttcatcagagctaagtagcagtacattggaggcgcttccacaaaactatgctgaacaggttaattttgaagacacctgcaaaggatttcttgaggttgccaaggaggccgtcctccaaactgttagtgttatttttgaagacccaggtgtgcaggatctactcgtgaagctttaccagaaagactggctggagggaatggtcacagaatatcttgtcgcaacatttgctgattactttggtgatgttaaaatgtatattgaagaaagatcatttcgaagatttgtggaggcttgcatagaggaaacaattgtggtctatgttgaccatctcctttctcagaaaaactacataaaagaagaaacgatagagaggatgaggttagatgaagaggtgcttatggatttcttcagggaacacatcaacgtgacaaaagttgaaagcagagtgcggattctggcagatatgagggagctagcttcagctgagagtttggatagctttactctcatttacactaatatactggaacatcaacctgattgcccgcctgaggttgtcgagaagcttgtggcaatgcgggaaggcattccaaaaaaggaagcgaaggaggttgtacaagaatgcaaagagatatacgagaactcgcttgtggatggcaaccctcagaagtccggttttgtgtttggcaaattgaagtgcttgacagcaaagaaaggcatatggaggaagcttgggcagtaagtgtggacttgagcagagtggacagaagtaccacctaggcaaagactgtacgtttcacttctctatgatcattcttttgttcttttgtcgatgctactgttgggtttcacgtttagactatcagtgtgtactcagcttgaggagcaaaaatgtatattccactttgcttagctacagaggattttggtgtaagaatatgtaatttattcaataaaatggttgctatttgcaataagttggcccaagtcatcgtacgcgcttgacggctgctgatccaggcgcacgtcatgtatgatagactgcaatttctctgtgaaatggaaacaaggcaatatcatataatagacaacggccgtgctgcatgcgag

SEQ ID NO: 55973 - DNA, 2060 bp, Zea Mays
agacaacccctagagacaacagacaatcctcagacattggttcgagctttgagggttgttgaaatgcaagagatcttagatcaacaagttgcagaagaagcagctgaggctgagggtgctggtgctatggcgacaataacaaaccaacgtagaactgcaaacagaaaaggtgcaggggcaacagttaccccaagaaagggcactcaagaaaaatcgaaggttcagggaaagggctacaaggacaaatgctatgagtctatcaggatggctgttgaggcccgcttcaacaagttgcttactgagcttgtttttgtggaggacttgatggaagctttggaggaagccaaagctattggagatgagcttggcgatatatatgattatgttgcaccatgctttcctcctaggtatgaaattttccagctcatggtaaacctgtatactgagagattcattcagatgcttcgacttctcagtgatagagcaaacgatattcaaaatataaatatcctgaaggtgactggttgggtcgtgcaatatcaagaaaacttgattggtcttggtgtggatgaatcacttgcccaagtttgttctgaaagtggtgcattggatcccctcatgaacatgtatgttgagcgtatgcaggcaacaaccaagaaatggtacagcaacattttggaggctgacaaaacacaaccaccaaagagtacagaggatggaaaactatatacacctgcagcagtggatctattcagaatattgaccgagcaagttcagatagttagagacaacagcacagacgtcatgctatatcgaattgcacttgcggttattcaggtcatgcttgattttcaagcagctgagaggcaaaggcttgaggagccagcttctgatgttggtctggaatctctatgtgcattgattaacaataatctgcgttgctatgaactttcatcagagctaagtagcagtacattggaggcgcttccacaaaactatgctgaacaggttaattttgaagacacctgcaaaggatttcttgaggttgccaaggaggccgtcctccaaactgttagtgttatttttgaagacccaggtgtgcaggatctactcgtgaagctttaccagaaagactggctggagggaatggtcacagaatatcttgtcgcaacatttgctgattactttggtgatgttaaaatgtatattgaagaaagatcatttcgaagatttgtggaggcttgcatagaggaaacaattgtggtctatgttgaccatctcctttctcagaaaaactacataaaagaagaaacgatagagaggatgaggttagatgaagaggtgcttatggatttcttcagggaacacatcaacgtgacaaaagttgaaagcagagtgcggattctggcagatatgagggagctagcttcagctgagagtttggatagctttactctcatttacactaatatactggaacatcaacctgattgcccgcctgaggttgtcgagaagcttgtggcaatgcgggaaggcattccaaaaaaggaagcgaaggaggttgtacaagaatgcaaagagatatacgagaactcgcttgtggatggcaaccctcagaagtccggttttgtgtttggcaaattgaagtgcttgacagcaaagaaaggcatatggaggaagcttgggcagtaagtgtggacttgagcagagtggacagaagtaccacctaggcaaagactgtacgtttcacttctctatgatcattcttttgttcttttgtcgatgctactgttgggtttcacgtttagactatcagtgtgtactcagcttgaggagcaaaaatgtatattccactttgcttagctacagaggattttggtgtaagaatatgtaatttattcaataaaatggttgctatttgcaataagttggcccaagtcatcgtacgcgcttgacggctgctgatccaggcgcacgtcatgtatgatagactgcaatttctctgtgaaatggaaacaaggcaatatcatataatagacaacggccgtgctgcatgcgag

SEQ ID NO: 55974 - DNA, 2625 bp, Zea Mays
attaacgtcactaaaacaatcaggcttgattggttgctgcagcagctccaaggcattctagactggaggtctcaagttcgattcctcttaaatgcatctttttttgtgcaattactaggggcaacaacgtccaaatcccagacccacgcgcgctatgacttctttttgtgcacgctcggtcacgcgcaggatgacttcttttactgcaccggagggagtactcaaccaaccactttctacttttcaaatttagtccatctgtgaatcatttaggcgttttttatcactccagttgacaggtaataaaactattgctgatggcataataaaaaacagttgaagaaaagaaaacttgtcctcaatcctcattgattcatctaagatgatgtgttacctagctgatgctgaaccgttcgttttcgtaactaaacctcttttacatatcaatgggatgcaaattttttcttgtggttctgtattgcatgaagtacacaagtgtaaagaatactttgaggatgttgaccgaacatgggaaacctttgagaaaacattatggagccatatctctaactttttcaaactttcaaaagagagtcctcagacattggttcgagctttgagggttgttgaaatgcaagagatcttagatcaacaagttgcagaagaagcagctgaggctgagggtgctggtgctatggcgacaataacaaaccaacgtagaactgcaaaaaaaggtgcaggggcaacagttaccccaagaaagggcactcaagaaaaatcgaaggttcagggaaagggctacaaggacaaatgctatgagtctatcaggatggctgttgaggcccgcttcaacaagttgcttactgagcttgtttttgtggaggacttgatggaagctttggaggaagccaaagctattggagatgagcttggcgatatatatgattatgttgcaccatgctttcctcctaggtatgaaattttccagctcatggtaaacctgtatactgagagattcattcagatgcttcgacttctcagtgatagagcaaacgatattcaaaatataaatatcctgaaggtgactggttgggtcgtgcaatatcaagaaaacttgattggtcttggtgtggatgaatcacttgcccaagtttgttctgaaagtggtgcattggatcccctcatgaacatgtatgttgagcgtatgcaggcaacaaccaagaaatggtacagcaacattttggaggctgacaaaacacaaccaccaaagagtacagaggatggaaaactatatacacctgcagcagtggatctattcagaatattgaccgagcaagttcagatagttagagacaacagcacagacgtcatgctatatcgaattgcacttgcggttattcaggtcatgcttgattttcaagcagctgagaggcaaaggcttgaggagccagcttctgatgttggtctggaatctctatgtgcattgattaacaataatctgcgttgctatgaactttcatcagagctaagtagcagtacattggaggcgcttccacaaaactatgctgaacaggttaattttgaagacacctgcaaaggatttcttgaggttgccaaggaggccgtcctccaaactgttagtgttatttttgaagacccaggtgtgcaggatctactcgtgaagctttaccagaaagactggctggagggaatggtcacagaatatcttgtcgcaacatttgctgattactttggtgatgttaaaatgtatattgaagaaagatcatttcgaagatttgtggaggcttgcatagaggaaacaattgtggtctatgttgaccatctcctttctcagaaaaactacataaaagaagaaacgatagagaggatgaggttagatgaagaggtgcttatggatttcttcagggaacacatcaacgtgacaaaagttgaaagcagagtgcggattctggcagatatgagggagctagcttcagctgagagtttggatagctttactctcatttacactaatatactggaacatcaacctgattgcccgcctgaggttgtcgagaagcttgtggcaatgcgggaaggcattccaaaaaaggaagcgaaggaggttgtacaagaatgcaaagagatatacgagaactcgcttgtggatggcaaccctcagaagtccggttttgtgtttggcaaattgaagtgcttgacagcaaagaaaggcatatggaggaagcttgggcagtaagtgtggacttgagcagagtggacagaagtaccacctaggcaaagactgtacgtttcacttctctatgatcattcttttgttcttttgtcgatgctactgttgggtttcacgtttagactatcagtgtgtactcagcttgaggagcaaaaatgtatattccactttgcttagctacagaggattttggtgtaagaatatgtaatttattcaataaaatggttgctatttgcaataagttggcccaagtcatcgtacgcgcttgacggctgctgatccaggcgcacgtcatgtatgatagactgcaatttctctgtgaaatggaaacaaggcaatatcatataatagacaacggccgtgctgcatgcgag

SEQ ID NO: 55975 - DNA, 2677 bp, Zea Mays
gtttctactgctctgcatatgcaattgtactccctccagtgcagtaaaggtagtcgtttaggacatgattgtgcataccaaggagtgattaattatcatagagttttccatgtttgcccctattaaatagggatatgggtgcattaacgtcactaaaacaatcaggcttgattggttgctgcagcagctccaaggcattctagactggaggtctcaagttcgattcctcttaaatgcatctttttttgtgcaattactaggggcaacaacgtccaaatcccagacccacgcgcgctatgacttctttttgtgcacgctcggtcacgcgcaggatgacttcttttactgcaccggagggagtactcaaccaaccactttctacttttcaaatttagtccatctgtgaatcatttaggcgttttttatcactccagttgacaggtaataaaactattgctgatggcataataaaaaacagttgaagaaaagaaaacttgtcctcaatcctcattgattcatctaagatgatgtgttacctagctgatgctgaaccagaatactttgaggatgttgaccgaacatgggaaacctttgagaaaacattatggagccatatctctaactttttcaaactttcaaaagagagtcctcagacattggttcgagctttgagggttgttgaaatgcaagagatcttagatcaacaagttgcagaagaagcagctgaggctgagggtgctggtgctatggcgacaataacaaaccaacgtagaactgcaaaaaaaggtgcaggggcaacagttaccccaagaaagggcactcaagaaaaatcgaaggttcagggaaagggctacaaggacaaatgctatgagtctatcaggatggctgttgaggcccgcttcaacaagttgcttactgagcttgtttttgtggaggacttgatggaagctttggaggaagccaaagctattggagatgagcttggcgatatatatgattatgttgcaccatgctttcctcctaggtatgaaattttccagctcatggtaaacctgtatactgagagattcattcagatgcttcgacttctcagtgatagagcaaacgatattcaaaatataaatatcctgaaggtgactggttgggtcgtgcaatatcaagaaaacttgattggtcttggtgtggatgaatcacttgcccaagtttgttctgaaagtggtgcattggatcccctcatgaacatgtatgttgagcgtatgcaggcaacaaccaagaaatggtacagcaacattttggaggctgacaaaacacaaccaccaaagagtacagaggatggaaaactatatacacctgcagcagtggatctattcagaatattgaccgagcaagttcagatagttagagacaacagcacagacgtcatgctatatcgaattgcacttgcggttattcaggtcatgcttgattttcaagcagctgagaggcaaaggcttgaggagccagcttctgatgttggtctggaatctctatgtgcattgattaacaataatctgcgttgctatgaactttcatcagagctaagtagcagtacattggaggcgcttccacaaaactatgctgaacaggttaattttgaagacacctgcaaaggatttcttgaggttgccaaggaggccgtcctccaaactgttagtgttatttttgaagacccaggtgtgcaggatctactcgtgaagctttaccagaaagactggctggagggaatggtcacagaatatcttgtcgcaacatttgctgattactttggtgatgttaaaatgtatattgaagaaagatcatttcgaagatttgtggaggcttgcatagaggaaacaattgtggtctatgttgaccatctcctttctcagaaaaactacataaaagaagaaacgatagagaggatgaggttagatgaagaggtgcttatggatttcttcagggaacacatcaacgtgacaaaagttgaaagcagagtgcggattctggcagatatgagggagctagcttcagctgagagtttggatagctttactctcatttacactaatatactggaacatcaacctgattgcccgcctgaggttgtcgagaagcttgtggcaatgcgggaaggcattccaaaaaaggaagcgaaggaggttgtacaagaatgcaaagagatatacgagaactcgcttgtggatggcaaccctcagaagtccggttttgtgtttggcaaattgaagtgcttgacagcaaagaaaggcatatggaggaagcttgggcagtaagtgtggacttgagcagagtggacagaagtaccacctaggcaaagactgtacgtttcacttctctatgatcattcttttgttcttttgtcgatgctactgttgggtttcacgtttagactatcagtgtgtactcagcttgaggagcaaaaatgtatattccactttgcttagctacagaggattttggtgtaagaatatgtaatttattcaataaaatggttgctatttgcaataagttggcccaagtcatcgtacgcgcttgacggctgctgatccaggcgcacgtcatgtatgatagactgcaatttctctgtgaaatggaaacaaggcaatatcatataatagacaacggccgtgctgcatgcgag

SEQ ID NO: 55976 - DNA, 2651 bp, Zea Mays
ctaaacacgaagtttctactgctctgcatatgcaattgtactccctccagtgcagtaaaggtagtcgtttaggacatgattgtgcataccaaggagtgattaattatcatagagttttccatgtttgcccctattaaatagggatatgggtgcattaacgtcactaaaacaatcaggcttgattggttgctgcagcagctccaaggcattctagactggaggtctcaagttcgattcctcttaaatgcatctttttttgtgcaattactaggggcaacaacgtccaaatcccagacccacgcgcgctatgacttctttttgtgcacgctcggtcacgcgcaggatgacttcttttactgcaccggagggagtactcaaccaaccactttctacttttcaaatttagtccatctgtgaatcatttaggcgttttttatcactccagttgacaggtaataaaactattgctgatggcataataaaaaacagttgaagaaaagaaaacttgtcctcaatcctcattgattcatctaagatgatgtgttacctagctgatgctgaaccagaatactttgaggatgttgaccgaacatgggaaacctttgagaaaacattatggagccatatctctaactttttcaaactttcaaaagagagtcctcagacattggttcgagctttgagggttgttgaaatgcaagagatcttagatcaacaagttgcagaagaagcagctgaggctgagggtgctggtgctatggcgacaataacaaaccaacgtagaactgcaaaaaaaggtgcaggggcaacagttaccccaagaaagggcactcaagaaaaatcgaaggttcagggaaagggctacaaggacaaatgctatgagtctatcaggatggctgttgaggcccgcttcaacaagttgcttactgagcttgtttttgtggaggacttgatggaagctttggaggaagccaaagctattggagatgagcttggcgatatatatgattatgttgcaccatgctttcctcctaggtatgaaattttccagctcatggtaaacctgtatactgagagattcattcagatgcttcgacttctcagtgatagagcaaacgatattcaaaatataaatatcctgaaggtgactggttgggtcgtgcaatatcaagaaaacttgattggtcttggtgtggatgaatcacttgcccaagtttgttctgaaagtggtgcattggatcccctcatgaacatgtatgttgagcgtatgcaggcaacaaccaagaaatggtacagcaacattttggaggctgacaaaacacaaccaccaaagagtacagaggatggaaaactatatacacctgcagcagtggatctattcagaatattgaccgagcaagttcagatagttagagacaacagcacagacgtcatgctatatcgaattgcacttgcggttattcaggtcatgcttgattttcaagcagctgagaggcaaaggcttgaggagccagcttctgatgttggtctggaatctctatgtgcattgagctaagtagcagtacattggaggcgcttccacaaaactatgctgaacaggttaattttgaagacacctgcaaaggatttcttgaggttgccaaggaggccgtcctccaaactgttagtgttatttttgaagacccaggtgtgcaggatctactcgtgaagctttaccagaaagactggctggagggaatggtcacagaatatcttgtcgcaacatttgctgattactttggtgatgttaaaatgtatattgaagaaagatcatttcgaagatttgtggaggcttgcatagaggaaacaattgtggtctatgttgaccatctcctttctcagaaaaactacataaaagaagaaacgatagagaggatgaggttagatgaagaggtgcttatggatttcttcagggaacacatcaacgtgacaaaagttgaaagcagagtgcggattctggcagatatgagggagctagcttcagctgagagtttggatagctttactctcatttacactaatatactggaacatcaacctgattgcccgcctgaggttgtcgagaagcttgtggcaatgcgggaaggcattccaaaaaaggaagcgaaggaggttgtacaagaatgcaaagagatatacgagaactcgcttgtggatggcaaccctcagaagtccggttttgtgtttggcaaattgaagtgcttgacagcaaagaaaggcatatggaggaagcttgggcagtaagtgtggacttgagcagagtggacagaagtaccacctaggcaaagactgtacgtttcacttctctatgatcattcttttgttcttttgtcgatgctactgttgggtttcacgtttagactatcagtgtgtactcagcttgaggagcaaaaatgtatattccactttgcttagctacagaggattttggtgtaagaatatgtaatttattcaataaaatggttgctatttgcaataagttggcccaagtcatcgtacgcgcttgacggctgctgatccaggcgcacgtcatgtatgatagactgcaatttctctgtgaaatggaaacaaggcaatatcatataatagacaacggccgtgctgcatgcgag

SEQ ID NO: 55977 - DNA, 2147 bp, Zea Mays
gcccgacagccgccgccgtttcttcctcttcatcttcctcgcagcgccggccttccatcttccgctccctccccgactcgcccttggcacgcaggcgacagcggcggcgctcaggttcgggctctcagcgacggcggggcaaccccagactcgctgccgtcgtcagcggctcttcctcccgcctctcgccaatcgactcgcaccctcgcctccggtcctcgtcccccccgcataccggccggcgaccctgcatgcgcgcctcccgctccccttccgcctccggtggaccgtcgacagcgcccggccccggcggctgcactgcgcgccgcgtgcggccggcgggcagtgggagccagcagccgctgctccagcaaggcggccgtgccgctttggtagcgcttgcccgaaacgaagcgttacctgtccgcttacgtttcagcgcgagcttagtgcctccttttggaaccctggtcttgcatgatactaatattttcgaggataacagcaagaagcattcataaagccatacacatttctcattcatattcttcaagctttcgaaataaagaattctctagttataagccaacgtttcagcatcttagcactaacaacccgatgaggccaaatgattcgttggaggctcaagacatggttcctgctgagggaaaccacagttgcttctcaagtgttcagtccactccagaaattgagaagaagtatgtgcatcgtgtctatgatgccatagctccccatttcagtgcaacaagatttgctaaatggcccaaggttgcaggattcttgaattccttgaggccagggtcggttgtactggatgctggctgtggtaatggcaagtatttgggtttcaaccctgattgtttattcataggatgtgatataagcccaccgcttattgagatatgtgctgggagagggcatgaggtgttggttgctgatgctgtcaacctcccatacaggaatgattttggcgatgcagcaatttcaattgctgtgttgcatcatttgagtactgatgataggcggaggagggccatagaagagctaatccgtgttgttcgaagaggtggtctggtgcttataacagtctgggctagggagcaggaagacaagtctttgctcaacaagtggactcccctctgcgagaaatatactgaagagtgggttgaacagagcagtcctccagtacgcagtaaatctggaactcttctggaaagcattgcagaaactgatgaagatgctggtttcacgaagcaaacagatgaccgattgaaaagctgtcatggtgaggtggaggacaagaccattgactgtagtaattcaaagactgatgaaaatgagaaaaaccagcaggagtactttgttccatggcatctaccatttcaccgagctgaaattggtggtgcatctgctgctctggaaaatggatttgcaaagaaagatgagaagaagggtacagtggtctacaatcgttattatcatgtttttgttgaaggagaacttcagagattggtttctggcataaagaatgctgctattgttgaccagttctatgacaaatccaactggtgcattgttctcgagaagctttgagctgcagaaaaaggaatggcacaagaagccatcagaatatgatatttgtggggattcagtggtaggcgagccaaatgtgtttatcccgaagtgtatgatgcattgtttaagggatcctgaaatttatggtgcattgttaagacttatgtcagattgcccaatattttgagggccatctggacttgaagaaatatttgctgtcaatctggtcaacaccgtgaattagcatgattgctagtactgtttttgatataagtatgagctttcattgttctacggcatcactgttcattagctggtggagggatgcttatagttcatttgcacctctagcctactattcaaccacgtattagccgttcgatggatcaaaacagactctggctaataattagctagctgatagttagcaactatcagttagctaactaatggattcaaacatgttcttatgcttcttgcattttacaaaagcgatcattttctgaaacaacgtgctgcatgccactccggttcacagttttatgtatcgg

SEQ ID NO: 55978 - DNA, 680 bp, Zea Mays
cggtctcctcgctcaaggagttcatcctcgctcggtggccgcaaggatattggagaataatcggacacttgcagagtcccgtgttccagtaggagaggtcccaggaggtgtaattacaatgcatgtggtagtgcgacctccacaagctgacaaaaacagtgagaagcagcttgcgaattccgtcaagcagaacagatgcgggtgcaccattctctgataagacgcctgcttgatgttgtacaatctgtgtagtcttaggattttgtatctgctttgctgtgttcacacaagcgtgaattcattttgatatccagtccttgaagccattcgagtccagaaacatacacactaaaaatccatcgaatatgaaggtttctggatggtagatttggatcgtcttgttccagagttgaggattggatgcttcctgctgtataaatggtgttgtcgaaactagaaaaaaaaactcttttatttcttttttcttttctgccatgttgacgttatatatatatcgattctttttagatcggttgctttgtctcgtctaacagaaatattgtactcagatataagttgcaaaaggagtaatgtatggtgttatggtaaaggggaaacaaagaggtgaaaagagcgcatggctagttttacatttgattctttggttaacctgacctgac

SEQ ID NO: 55979 - DNA, 728 bp, Zea Mays
atcgggcccaccaagtacgatccctccaccacggtctcctcgctcaaggagttcatcctcgctcggtggccgcaagcttatcaatgctggaaggatattggagaataatcggacacttgcagagtcccgtgttccagtaggagaggtcccaggaggtgtaattacaatgcatgtggtagtgcgacctccacaagctgacaaaaacagtgagaagcagcttgcgaattccgtcaagcagaacagatgcgggtgcaccattctctgataagacgcctgcttgatgttgtacaatctgtgtagtcttaggattttgtatctgctttgctgtgttcacacaagcgtgaattcattttgatatccagtccttgaagccattcgagtccagaaacatacacactaaaaatccatcgaatatgaaggtttctggatggtagatttggatcgtcttgttccagagttgaggattggatgcttcctgctgtataaatggtgttgtcgaaactagaaaaaaaaactcttttatttcttttttcttttctgccatgttgacgttatatatatatcgattctttttagatcggttgctttgtctcgtctaacagaaatattgtactcagatataagttgcaaaaggagtaatgtatggtgttatggtaaaggggaaacaaagaggtgaaaagagcgcatggctagttttacatttgattctttggttaacctgacctgac

SEQ ID NO: 55980 - DNA, 725 bp, Zea Mays
atcgggcccaccaagtacgatccctccaccacggtctcctcgctcaaggagttcatcctcgctcggtggccgcaagcttatcaatgctggaaggatattggagaataatcggacacttgcagagtcccgtgttccagtaggagaggtcccaggaggtgtaattacaatgcatgtggtagtgcgacctccacaagctgacaaaaacaagaagcagcttgcgaattccgtcaagcagaacagatgcgggtgcaccattctctgataagacgcctgcttgatgttgtacaatctgtgtagtcttaggattttgtatctgctttgctgtgttcacacaagcgtgaattcattttgatatccagtccttgaagccattcgagtccagaaacatacacactaaaaatccatcgaatatgaaggtttctggatggtagatttggatcgtcttgttccagagttgaggattggatgcttcctgctgtataaatggtgttgtcgaaactagaaaaaaaaactcttttatttcttttttcttttctgccatgttgacgttatatatatatcgattctttttagatcggttgctttgtctcgtctaacagaaatattgtactcagatataagttgcaaaaggagtaatgtatggtgttatggtaaaggggaaacaaagaggtgaaaagagcgcatggctagttttacatttgattctttggttaacctgacctgac

SEQ ID NO: 55981 - DNA, 708 bp, Zea Mays
atcgggcccaccaagtacgatccctccaccacggtctcctcgctcaaggagttcatcctcgctcggtggccgcaaggatattggagaataatcggacacttgcagagtcccgtgttccagtaggagaggtcccaggaggtgtaattacaatgcatgtggtagtgcgacctccacaagctgacaaaaacaagaagcagcttgcgaattccgtcaagcagaacagatgcgggtgcaccattctctgataagacgcctgcttgatgttgtacaatctgtgtagtcttaggattttgtatctgctttgctgtgttcacacaagcgtgaattcattttgatatccagtccttgaagccattcgagtccagaaacatacacactaaaaatccatcgaatatgaaggtttctggatggtagatttggatcgtcttgttccagagttgaggattggatgcttcctgctgtataaatggtgttgtcgaaactagaaaaaaaaactcttttatttcttttttcttttctgccatgttgacgttatatatatatcgattctttttagatcggttgctttgtctcgtctaacagaaatattgtactcagatataagttgcaaaaggagtaatgtatggtgttatggtaaaggggaaacaaagaggtgaaaagagcgcatggctagttttacatttgattctttggttaacctgacctgac

SEQ ID NO: 55982 - DNA, 1091 bp, Zea Mays
ccgccgccggcgatctggcggggaggccccgtctctctctctctctcctccctggctctcgtcttcctctcctcccccaccgagttgccgccccctcgctttcaccccacgcggaagcaagaattcgtcgtcaaattcccaccttgcgcgtgtttctgtggatttccttttttttggccgcttccttgctcctatgggcctttgatccggggcttggatcttgggaaggggaggtgtggtgggccgccgccggcgatctggcggggaggatatggccggcgggaaggagccgatcgaggtcaggttccggctcttcgacggcacggacatcgggcccaccaagtacgatccctccaccacggtctcctcgctcaaggagttcatcctcgctcggtggccgcaagataaggatataactccaaaaactgttaatgacttgaagcttatcaatgctggaaggatattggagaataatcggacacttgcagagtcccgtgttccagtaggagaggtcccaggaggtgtaattacaatgcatgtggtagtgcgacctccacaagctgacaaaaacaagaagcagcttgcgaattccgtcaagcagaacagatgcgggtgcaccattctctgataagacgcctgcttgatgttgtacaatctgtgtagtcttaggattttgtatctgctttgctgtgttcacacaagcgtgaattcattttgatatccagtccttgaagccattcgagtccagaaacatacacactaaaaatccatcgaatatgaaggtttctggatggtagatttggatcgtcttgttccagagttgaggattggatgcttcctgctgtataaatggtgttgtcgaaactagaaaaaaaaactcttttatttcttttttcttttctgccatgttgacgttatatatatatcgattctttttagatcggttgctttgtctcgtctaacagaaatattgtactcagatataagttgcaaaaggagtaatgtatggtgttatggtaaaggggaaacaaagaggtgaaaagagcgcatggctagttttacatttgattctttggttaacctgacctgac

SEQ ID NO: 55983 - DNA, 763 bp, Zea Mays
gacgagaccaccgagggcagtcaaagtgcccgagatagaagccgccatcgcccgtcgccgacgtcgaaccccgataaggatataactccaaaaactgttaatgacttgaagcttatcaatgctggaaggatattggagaataatcggacacttgcagagtcccgtgttccagtaggagaggtcccaggaggtgtaattacaatgcatgtggtagtgcgacctccacaagctgacaaaaacagtgagaagcagcttgcgaattccgtcaagcagaacagatgcgggtgcaccattctctgataagacgcctgcttgatgttgtacaatctgtgtagtcttaggattttgtatctgctttgctgtgttcacacaagcgtgaattcattttgatatccagtccttgaagccattcgagtccagaaacatacacactaaaaatccatcgaatatgaaggtttctggatggtagatttggatcgtcttgttccagagttgaggattggatgcttcctgctgtataaatggtgttgtcgaaactagaaaaaaaaactcttttatttcttttttcttttctgccatgttgacgttatatatatatcgattctttttagatcggttgctttgtctcgtctaacagaaatattgtactcagatataagttgcaaaaggagtaatgtatggtgttatggtaaaggggaaacaaagaggtgaaaagagcgcatggctagttttacatttgattctttggttaacctgacctgac

SEQ ID NO: 55984 - DNA, 2592 bp, Zea Mays
acgattgccgagcatagctcacttggcgccgtgacacacgtacacactgcagccatcaaaagccatggaaggccgcgcgcgcctctccctcgtccacgccgccgccgcgctggtggtcctgctgcagctgcatggcggcgccgtcgtggttgcgtctgagccgccctacacctgcggcgccggagcgccgcccaacatcccgttctgcgacgcggggctgcccatcgaccggcgcgtcgacgacctcgtctcgcggatgacggtggcggagaagatctcgcagctcggggaccagtccccggccatcccgcggctcggcgtgccggcgtacaagtggtggtccgaggcgctgcacgggatctccaaccagggccgcggcatccacctcgacggcccgctccgcgccgccaccagcttcccgcaggtgatcggcgtcgaggcgagggcggtgtacaacaacgggcaggcggaggggctcaccttctgggcgcccaacatcaacgtgttccgggacccgcggtggggccgcgggcaggagacccccggcgaggacccgacgatgaccggcaagtacgccgccgtcttcgtccgcggcgtgcagggctacggcctcgccggccccgtcaactccacgggcctcgaggcctccgcctgctgcaagcacttcaccgcctacgacctcgagaactggaagggcgtcacccgatacgtgttcgacgccaaggtgacggcgcaggatctggcggacacgtacaaccctccgttcaagagctgcgtggaggacggccatgccagcggcatcatgtgctcctacaaccgcgtcaatggcgtgccgacgtgcgccgactacaacctgctctccacgacggcgaggcaggactgggggttttacgggtatatcacctcggactgcgacgctgtggccatcatccatgatgcgcaaggctacgccaagacggcagaagatgcagttgcagatgtgctcaaagctggaatggacgtgaactgcggcagctacgtgcaggaccacggtgcctctgcgctgcagcaagggaagatcacggagcaggacatcaacagggcgctgcacaacctgttcgccgtcaggatgaggctggggctcttcaacggcgaccccaggcgcaacctgtacggcgacatcgggcccgatcaggtgtgcacgcaggagcaccaggacctcgccctggaagcggcgcaggacggcatcgtcttgctcaagaacgacggcggcgccggcgcgctcccgctgtccaagcccaacgtcgcgtccctcgccgtgatcgggttcaacgcgaacgacgccatcaggctgcgcggcaactacttcggcccgccgtgcgtgacggtgacgccgctccaggtgctgcagggctacgtgaaggacacgagcttcgtcgccggctgcaactcggccgcctgcaacgtcacgacgatccccgaggcggtccaggcggcgagctcggcggactccgtcgtcttgttcatggggctggaccaggaccaggagagggaggaggttgaccggctggacctgacgctcccgggacagcagcagaccctcatcgagagcgtcgcgaacgcggcgaagaagccggtgatcctggtgctgctctgcggtgggcccgtggatgtgagctttgcgaagaccaaccccaagattggggccatcctgtgggctggctaccccggcgaggccggcggcattgccatcgcacaggtcctcttcggagagcacaaccctggtggaaggctgcccgtgacatggtatccccaagatttcacgagagtgcctatgacggacatgcggatgcgcgccgacccggccacgggctaccccggccggacgtaccggttctaccgcggcccgacagtgttcaacttcggctacggcctcagctactccaagtactcccaccgcttcgccacgaagccgcctcccacgagcaacgtcgccggccttaaggcggtggaggcaacggcgggcggcatggcgagctacgacgtggaggcgatcgggtcggagacgtgcgaccggctcaagttcccggcggtggtgcgggtgcagaaccacgggcccatggacgggaagcactcggtgctggtgttcatgcgctggcccaacgcgacggacggcagcggccggccggccagccagctgatcgggttccagagcctgcacctgagggcgacgcagacggcgcacgtggagttcgaggtgagcccctgcaagcacttcagccgggcgacggaggatggcaggaaggtgatcgatcagggctcgcacttcgtgatggtcggcgaggatgagttcgagatgagcttcatggcgtgatcccggttgtgttggaagcctcgagtgtttcctcagaatttccgatgctctctaacttattcaaacgagaaaaaaaaaggtaaattcagcaagattatggcatcattgatgccagaagttcattgacaaacgcttccccgctccttttgttctttaacaagctaagggaagtagaaattatcttgattaaccgatactctgacatgatgagacgtatatattaggaaaaacaattgatc

SEQ ID NO: 55985 - DNA, 1926 bp, Zea Mays
cttttctccatgatgacgcttactttttttaagcgctggcagtggctgtggcaccaactgaaagctggaggccgcctgctttttaacaaacacctagtataaacagatcatcatcactctctctctctcacacacacagcaccatgcttcacaggaggagccgcacgctgggagggagctccgatcgacctgcgcgccgagctgtcgcggtgaagagcggcagggggagcaatggcgcggccacggacctgctcgtctgcttcccgtcgcgggcgcacctcgccctcatgccgcccaaggccatctgcagcccgtcgcggccgtcggcgtccgagccggtcaagcgccggcacagcaccagccggccgcccagcgggctctacaagtcggccgcgggcgcggccaggaacccgagccgccgcggcgcggacgtccccgtggacgacgagccgacgtcgcccaaggtgacgtgcgtggggcagatcaaggcccgccaggccaagcccaagggccccgggcccggcggtggcggtggcggtggcaagaagaccaagaaggccacgtggctgcaggcgctggggatcaagaaggacgccctggcgctcttggacgccctgcacggcgctttcaggttcaacgttgccggatgcttcggcagcttccccggcgccgtgggcgtggggtacacttccggggaggacgacgaagacgaggaacacgatgcgccgcgcaccgagaaggaaacagaacacggcgcggcattggcccggtggttcatggtattggaggaaggcaagaaggtgtctgccaagaagctgcagggccaaaaaccggaacagagccaccaggaggaggacagggaggaagacgcggccccgccggcgaacgcgctgatgctgatgcggtgccggtcggcaccggcgaagggattagcgaggaggctagagacagaggaggagcgcaatgatgtgaagggcgccgccaagaagactccagatcaggaagagaaggagaacgagggcctggtgctcatgacatactcgccggacttcttcaaggtgtcccttgacattgccaaggagacttggatcgtcggcggtgatgacgcggtcctgcgctgccggagctggaagagatgatcgcagtgactgttcaacaaggaatgtgaacagctgaaattccctgaattctttggagggttttcttcaaaagaaaataattaagtcatcgatcaaagttttacatctgaagttgtaagatgggaacagcaggagaatggctgcagctgcagcaaaagaggccttgctcaaaggaacaaatcacataatttagattcgagatgatcattcatttctagagcagagtcttcagtcggtagttgtcattttcagagccaaactgaaaccttacaaatctctgggatccgtcaccggcacccctgcaaccaaatacatcagctttcttttcgcaaggaaccaaacgcattcaactaactatacatcacactggagcaagtattatgtacagttccatctcttgacctccttttcaaattggtgtatatggtggacaaaaaaaacatacagatttggtataacaaattgttcatcggcgcatgcagaattgttctttcgaaaatcttgtcctcttaagtcttaagcagtcgcggttgatttctctggtagccgacagagtaaagaaaacctgcaaagaaagacaggctatcctatgatcaacatgccaaacttttgctttaaaaaagatggtgggcagtcaaggaatctgccggattttctaatcactacttatttgtttatctaagcgtgaccatctaccacctattaaccagttaaaatttagatagataaagagcactgaagtttgttaggaccgacactttgaatcattagtccaaggaatatgagt

SEQ ID NO: 55986 - DNA, 1409 bp, Zea Mays
cttttctccatgatgacgcttactttttttaagcgctggcagtggctgtggcaccaactgaaagctggaggccgcctgctttttaacaaacacctagtataaacagatcatcatcactctctctctctcacacacacagcaccatgcttcacaggaggagccgcacgctgggagggagctccgatcgacctgcgcgccgagctgtcgcggtgaagagcggcagggggagcaatggcgcggccacggacctgctcgtctgcttcccgtcgcgggcgcacctcgccctcatgccgcccaaggccatctgcagcccgtcgcggccgtcggcgtccgagccggtcaagcgccggcacagcaccagccggccgcccagcgggctctacaagtcggccgcgggcgcggccaggaacccgagccgccgcggcgcggacgtccccgtggacgacgagccgacgtcgcccaaggtgacgtgcgtggggcagatcaaggcccgccaggccaagcccaagggccccgggcccggcggtggcggtggcggtggcaagaagaccaagaaggccacgtggctgcaggcgctggggatcaagaaggacgccctggcgctcttggacgccctgcacggcgctttcaggttcaacgttgccggatgcttcggcagcttccccggcgccgtgggcgtggggtacacttccggggaggacgacgaagacgaggaacacgatgcgccgcgcaccgagaaggaaacagaacacggcgcggcattggcccggtggttcatggtattggaggaaggcaagaaggtgtctgccaagaagctgcagggccaaaaaccggaacagagccaccaggaggaggacagggaggaagacgcggccccgccggcgaacgcgctgatgctgatgcggtgccggtcggcaccggcgaagggattagcgaggaggctagagacagaggaggagcgcaatgatgtgaagggcgccgccaagaagactccagatcaggaagagaaggagaacgagggcctggtgctcatgacatactcgccggacttcttcaaggtgtcccttgacattgccaaggagacttggatcgtcggcggtgatgacgcggtcctgcgctgccggagctggaagagatgatcgcagtgactgttcaacaaggaatgtcatgtgagctgtgaggagcggcaagatcaggcccttttacggacagagcctacactgatgtctgtctgtcggttttagctggagctttcatttttttttggacaaaccaactactctccatcaaggccatgagccatgttccaacaagaagtgtacttgctcctgcggccttgcccaaaggcaattattgtcttagctattatctcatgggcctaaaggagagaataaagagattgattaaag

SEQ ID NO: 55987 - DNA, 1772 bp, Zea Mays
aaaaggaaaaatattttaaaaagagaaaaaaaataacattttgccatcattacagggtgaatggcacataaaaccaacttttttacgcgcggtcctcttaagcaaccgaaagtgttttcttaagagaatcgcatgtaaaaaagaccaacccaacaacccattaaaaagtccatcacaaatataaagtcaaccaatgatgccatcactcttatagccctagttcagaagtcttcataacgacacctctttccattcttatcttcttctcccttgagagctgcgacatacgaagagaccatgaaaacgcaacatccacaagcgatggaggatccatcaccgacgaccacccctgtcatctccgccaccaggaggagccgcacgctgggagggagctccgatcgacctgcgcgccgagctgtcgcggtgaagagcggcagggggagcaatggcgcggccacggacctgctcgtctgcttcccgtcgcgggcgcacctcgccctcatgccgcccaaggccatctgcagcccgtcgcggccgtcggcgtccgagccggtcaagcgccggcacagcaccagccggccgcccagcgggctctacaagtcggccgcgggcgcggccaggaacccgagccgccgcggcgcggacgtccccgtggacgacgagccgacgtcgcccaaggtgacgtgcgtggggcagatcaaggcccgccaggccaagcccaagggccccgggcccggcggtggcggtggcggtggcaagaagaccaagaaggccacgtggctgcaggcgctggggatcaagaaggacgccctggcgctcttggacgccctgcacggcgctttcaggttcaacgttgccggatgcttcggcagcttccccggcgccgtgggcgtggggtacacttccggggaggacgacgaagacgaggaacacgatgcgccgcgcaccgagaaggaaacagaacacggcgcggcattggcccggtggttcatggtattggaggaaggcaagaaggtgtctgccaagaagctgcagggccaaaaaccggaacagagccaccaggaggaggacagggaggaagacgcggccccgccggcgaacgcgctgatgctgatgcggtgccggtcggcaccggcgaagggattagcgaggaggctagagacagaggaggagcgcaatgatgtgaagggcgccgccaagaagactccagatcaggaagagaaggagaacgagggcctggtgctcatgacatactcgccggacttcttcaaggtgtcccttgacattgccaaggagacttggatcgtcggcggtgatgacgcggtcctgcgctgccggagctggaagagatgatcgcagtgactgttcaacaaggaatgtatgtgccttttgtttaccttttactcctccgcttgctttttttcttctttttttccgacactcttgatgattactactactcttgcataaggctcgtgtgaagggtacgatcagcacacagcagaattggtttagccaaggccactgtatgtctgtattggcctcaccctgcaaaacattcctgctctgtaaatagtgctgtaaagtcccttgttaaatgttgcccaggtatacttgctcggtgagggctgatttggttagagaattgattcactggtcaccaaattaaaccagccatgatatgtgagtgagactgagtagtactcgcacatatgatgaacttgacagctcatcctttcgtgccagtaaagcttccatcttggcattcagat

SEQ ID NO: 55988 - DNA, 946 bp, Zea Mays
gtttttgcagtgtttctaatacataacagtcttaattagaaacagtgacataaaattaccattgagactgaccaaatacttggtgttttagattctctcagggacaccaatataaaagtcaaaagaccaaaacagccctaaaaatacagatatactccatcagtctcaaatttaaattcgttttaaatttttagtggatttatacaataattaatgtatgtgtctagattcatcatcatccatttagatatagatataaaaattaagagctaaagcgaatgctaatttgggatggagggggcattagaaaaggaaaaatattttaaaaagagaaaaaaaataacattttgccatcattacagggtgaatggcacataaaaccaacttttttacgcgcggtcctcttaagcaaccgaaagtgttttcttaagagaatcgcatgtaaaaaagaccaacccaacaacccattaaaaagtccatcacaaatataaagtcaaccaatgatgccatcactcttatagccctagttcagaagtcttcataacgacacctctttccattcttatcttcttctcccttgagagctgcgacatacgaagagaccatgaaaacgcaacatccacaagcgatggaggatccatcaccgacgaccacccctgtcatctccgccaccagctggctactgtggaggcacaagtgtggtgcagcgtagcgcatggcaacaaggtcgtcaccgcggtgctacgcgtcgataaggataaggacaacaatggaagagaacgagaggagagggtacatacacaagttcagatagagagaagtggaacgggagcggagaagtcggagctgcttggagcagcgacgtgttgaggaagatgagatggttaggatgcacgaattcgtgaatcctcttgtatgcacatggaagtgagtgataagtacacaa

SEQ ID NO: 55989 - DNA, 1192 bp, Zea Mays
ctcggagtgactggaagagctgtgactatgtcttagatccccatcaccccattgggaacgggatctgagcttccccctacaagtgacacaggaggagttgatccaccgtcgatcaacgacgagaaccaatctccttgccacacacagggaggtcgaggaggaggagacgagtcttcgctgcaagacgtcgccgcgatggtggccagaaacaacaacgaaggagctgttgtggtggcaaaaccgcagttggttaccacaattggagccaaccctccaggttcagtgacatctggttctgttgatggaaaaagaataataggtgccgcaaatcctggtccagaagatgcagctgatcttctgaggatgtgtctccaatgtggtgtaccaaagacctactcacatggcaagggtatggtttgccctcaatgtggtgatagaccggcgctgacaaaagagcccgaaaagaagaagggttccactgtcaaagacaaggagaagatcaagaggatgaggggccaatcgtcgcatgcgtcctggaagagcgaaaccgagatggctcttcgacaacatttcgactgataactagttagcgtggccaatatttagatggagtaccctgtaaactgtacgttggtgaaacttttttttgccctgtgtaatgtaccatgtgatggcccttgtgcctcacacagtcacactaggttccagagagcctgatccagagttgtgtcttatgtatatgccttgaacggttttatttgctgatctgtcaaaactgaatcttagatatcagattccgtggaatggtttttgtttgctaagctagactgagcaccggggcacgaggcaatgtgaagtgtgagctggtttgtgcagtttgcggaaggcatactggtcactgcttcgtccgtgcagacttgcttgcaaccgccgaccgctcgcctgagtccctgacggtcgttcgtcgttgatttggccgctctgctgtagcgtgagtcgaattatcttcctttatatagacaagctaaaatgacttgtgtaatttaaaatagatcgatgacttatagttcggaacagaggcagtattggctgttttcaatggatcgtttaaaaaagaggacgcggtattgtatatgatactgtttgaatagtgaagtttgaaataaacaataagaatagctgatactgtttg

SEQ ID NO: 55990 - DNA, 1707 bp, Zea Mays
ccaattcccatcccacccccgcacccaccgtggcccgagtagccgtggccgccgcggcaggccggcagcgccctcccggcggtgagcgcagcccggcgcgcgcgtcgcggccaccgccgcgctcgaagcgcccagatctagggcctagcggcccccctcctccatggcgcggcgactgccgttgtggacagcgctgctcctccccttcctcctcaccggcgttggtaccgccgccgccgcatccccgccccacgatgagtgcccggtgcctactatcgtggaatccgttcttggtactcgagacacgtgctcgacgctggatcttggcaacccggtcggcgtcgtggagggggatgagttcaccttagcaacggcagttaatcttcttcatgcaaacaaggatgactatattgctgtacttttctatgcctcgtggtgcccattctcacaagaatgcaaaccaaatttcgagacactggcctccttattcccaaccattagacattttgcatttgaggaatctgcaattaggccaagcataatttcaagatacggcatccatggtttcccaacactctttctcttgaattcaaccatgagagtacggtatcatggaccaaggactgttaaaccacttgcagctttctatactgatgtctcagaaatcttaaccttgttcttggtggttactatactttaagtcatttacggaagataaattaatgtggtgaaggtatcaatgcctcggtcaatgtcaagtcaactgcaggggagaccatggtacatcccttgcacgatattgagcggcaaaaggatgctgaacaggaaaattgcccgttttggtgggctcggtcgccagagaaaatacttcagcaggatacttatctagcattggcgaccgcatttgttattttgaggctgctgtatcgtctttttccaaagattgattcctttgctagatgggcatggaggaggcataatctgtttgcaaacttgatgggggcacatgaatatttcctcacctaccttgagcaaggaagacagaagtttcatcggctatacccttcaagttcgaagcgaggaaatctgcaggagggggcaatgaacgctaccgcttgggcctccaaatcattagcatctgtttcgattggagaaccaagtgcgattggaaggacaaactctaccagtgagcttagatgaagtgtaaccctttttttctccacagagatatatgtacagtacagtagagcgatcttatggacacccagaatctgttgtaacggctgtatttctctttgtatcctctcctccttagaataagtatatccatggttttgcacctttttttgttgttacatcccaattcttcggaggagtaaagtttctggtgtattgagtagtgtcttgtgttctgaaatttggaatatgtaccagtatgttggagccttggagggcatcacaataggatattgtcactttctgctgtcatgccgtccttggtctgtcatagaaattagcaatttaggtgtttagggtttaggaatggtaacaggatctcttgtcggtggtaatgattactggctgtaattagattggatagtactttctccgttcttttttatttgtaacggtttagtgtaaaaatgaactagcgaatggtaaatatttaagaacggaggtagtacgaaagaattttactaaacaaaa

SEQ ID NO: 55991 - DNA, 1668 bp, Zea Mays
ccaattcccatcccacccccgcacccaccgtggcccgagtagccgtggccgccgcggcaggccggcagcgccctcccggcggtgagcgcagcccggcgcgcgcgtcgcggccaccgccgcgctcgaagcgcccagatctagggcctagcggcccccctcctccatggcgcggcgactgccgttgtggacagcgctgctcctccccttcctcctcaccggcgttggtaccgccgccgccgcatccccgccccacgatgagtgcccggtgcctactatcgtggaatccgttcttggtactcgagacacgtgctcgacgctggatcttggcaacccggtcggcgtcgtggagggggatgagttcaccttagcaacggcagttaatcttcttcatgcaaacaaggatgactatattgctgtacttttctatgcctcgtggtgcccattctcacaagaatgcaaaccaaatttcgagacactggcctccttattcccaaccattagacattttgcatttgaggaatctgcaattaggccaagcataatttcaagatacggcatccatggtttcccaacactctttctcttgaattcaaccatgagagtacggtatcatggaccaaggactgttaaaccacttgcagctttctatactgatgtctcagtcatttacggaagataaattaatgtggtgaaggtatcaatgcctcggtcaatgtcaagtcaactgcaggggagaccatggtacatcccttgcacgatattgagcggcaaaaggatgctgaacaggaaaattgcccgttttggtgggctcggtcgccagagaaaatacttcagcaggatacttatctagcattggcgaccgcatttgttattttgaggctgctgtatcgtctttttccaaagattgattcctttgctagatgggcatggaggaggcataatctgtttgcaaacttgatgggggcacatgaatatttcctcacctaccttgagcaaggaagacagaagtttcatcggctatacccttcaagttcgaagcgaggaaatctgcaggagggggcaatgaacgctaccgcttgggcctccaaatcattagcatctgtttcgattggagaaccaagtgcgattggaaggacaaactctaccagtgagcttagatgaagtgtaaccctttttttctccacagagatatatgtacagtacagtagagcgatcttatggacacccagaatctgttgtaacggctgtatttctctttgtatcctctcctccttagaataagtatatccatggttttgcacctttttttgttgttacatcccaattcttcggaggagtaaagtttctggtgtattgagtagtgtcttgtgttctgaaatttggaatatgtaccagtatgttggagccttggagggcatcacaataggatattgtcactttctgctgtcatgccgtccttggtctgtcatagaaattagcaatttaggtgtttagggtttaggaatggtaacaggatctcttgtcggtggtaatgattactggctgtaattagattggatagtactttctccgttcttttttatttgtaacggtttagtgtaaaaatgaactagcgaatggtaaatatttaagaacggaggtagtacgaaagaattttactaaacaaaa

SEQ ID NO: 55992 - DNA, 1610 bp, Zea Mays
ccaattcccatcccacccccgcacccaccgtggcccgagtagccgtggccgccgcggcaggccggcagcgccctcccggcggtgagcgcagcccggcgcgcgcgtcgcggccaccgccgcgctcgaagcgcccagatctagggcctagcggcccccctcctccatggcgcggcgactgccgttgtggacagcgctgctcctccccttcctcctcaccggcgttggtaccgccgccgccgcatccccgccccacgatgagtgcccggtgcctactatcgtggaatccgttcttggtactcgagacacgtgctcgacgctggatcttggcaacccggtcggcgtcgtggagggggatgagttcaccttagcaacggcagttaatcttcttcatgcaaacaaggatgactatattgctgtacttttctatgcctcgtggtgcccattctcacaagaatgcaaaccaaatttcgagacactggcctccttattcccaaccattagacattttgcatttgaggaatctgcaattaggccaagcataatttcaagatacggcatccatggtttcccaacactctttctcttgaattcaaccatgagagtacggtatcatggaccaaggactgttaaaccacttgcagctttctatactgatgtctcagtcaactgcaggggagaccatggtacatcccttgcacgatattgagcggcaaaaggatgctgaacaggaaaattgcccgttttggtgggctcggtcgccagagaaaatacttcagcaggatacttatctagcattggcgaccgcatttgttattttgaggctgctgtatcgtctttttccaaagattgattcctttgctagatgggcatggaggaggcataatctgtttgcaaacttgatgggggcacatgaatatttcctcacctaccttgagcaaggaagacagaagtttcatcggctatacccttcaagttcgaagcgaggaaatctgcaggagggggcaatgaacgctaccgcttgggcctccaaatcattagcatctgtttcgattggagaaccaagtgcgattggaaggacaaactctaccagtgagcttagatgaagtgtaaccctttttttctccacagagatatatgtacagtacagtagagcgatcttatggacacccagaatctgttgtaacggctgtatttctctttgtatcctctcctccttagaataagtatatccatggttttgcacctttttttgttgttacatcccaattcttcggaggagtaaagtttctggtgtattgagtagtgtcttgtgttctgaaatttggaatatgtaccagtatgttggagccttggagggcatcacaataggatattgtcactttctgctgtcatgccgtccttggtctgtcatagaaattagcaatttaggtgtttagggtttaggaatggtaacaggatctcttgtcggtggtaatgattactggctgtaattagattggatagtactttctccgttcttttttatttgtaacggtttagtgtaaaaatgaactagcgaatggtaaatatttaagaacggaggtagtacgaaagaattttactaaacaaaa

SEQ ID NO: 55993 - DNA, 1600 bp, Zea Mays
ccaattcccatcccacccccgcacccaccgtggcccgagtagccgtggccgccgcggcaggccggcagcgccctcccggcggtgagcgcagcccggcgcgcgcgtcgcggccaccgccgcgctcgaagcgcccagatctagggcctagcggcccccctcctccatggcgcggcgactgccgttgtggacagcgctgctcctccccttcctcctcaccggcgttggtaccgccgccgccgcatccccgccccacgatgagtgcccggtgcctactatcgtggaatccgttcttggtactcgagacacgtgctcgacgctggatcttggcaacccggtcggcgtcgtggagggggatgagttcaccttagcaacggcagttaatcttcttcatgcaaacaaggatgactatattgctgtacttttctatgcctcgtggtgcccattctcacaagaatgcaaaccaaatttcgagacactggcctccttattcccaaccattagacattttgcatttgaggaatctgcaattaggccaagcataatttcaagatacggcatccatggtttcccaacactctttctcttgaattcaaccatgagagtacggtatcatggaccaaggactgttaaaccacttgcagctttctatactgatgtctcaggggagaccatggtacatcccttgcacgatattgagcggcaaaaggatgctgaacaggaaaattgcccgttttggtgggctcggtcgccagagaaaatacttcagcaggatacttatctagcattggcgaccgcatttgttattttgaggctgctgtatcgtctttttccaaagattgattcctttgctagatgggcatggaggaggcataatctgtttgcaaacttgatgggggcacatgaatatttcctcacctaccttgagcaaggaagacagaagtttcatcggctatacccttcaagttcgaagcgaggaaatctgcaggagggggcaatgaacgctaccgcttgggcctccaaatcattagcatctgtttcgattggagaaccaagtgcgattggaaggacaaactctaccagtgagcttagatgaagtgtaaccctttttttctccacagagatatatgtacagtacagtagagcgatcttatggacacccagaatctgttgtaacggctgtatttctctttgtatcctctcctccttagaataagtatatccatggttttgcacctttttttgttgttacatcccaattcttcggaggagtaaagtttctggtgtattgagtagtgtcttgtgttctgaaatttggaatatgtaccagtatgttggagccttggagggcatcacaataggatattgtcactttctgctgtcatgccgtccttggtctgtcatagaaattagcaatttaggtgtttagggtttaggaatggtaacaggatctcttgtcggtggtaatgattactggctgtaattagattggatagtactttctccgttcttttttatttgtaacggtttagtgtaaaaatgaactagcgaatggtaaatatttaagaacggaggtagtacgaaagaattttactaaacaaaa

SEQ ID NO: 55994 - DNA, 1792 bp, Zea Mays
aacggctgtgtagcacccgaaccagataaagcgagcccccaacaacgcaacacaccgatcccaattcccatcccacccccgcacccaccgtggcccgagtagccgtggccgccgcggcaggccggcagcgccctcccggcggtgagcgcagcccggcgcgcgcgtcgcggccaccgccgcgctcgaagcgcccagatctagggcctagcggcccccctcctccatggcgcggcgactgccgttgtggacagcgctgctcctccccttcctcctcaccggcgttggtaccgccgccgccgcatccccgccccacgatgagtgcccggtgcctactatcgtggaatccgttcttggtactcgagacacgtgctcgacgctggatcttggcaacccggtcggcgtcgtggagggggatgagttcaccttagcaacggcagttaatcttcttcatgcaaacaaggatgactatattgctgtacttttctatgcctcgtggtgcccattctcacaagaatgcaaaccaaatttcgagacactggcctccttattcccaaccattagacattttgcatttgaggaatctgcaattaggccaagcataatttcaagatacggcatccatggtttcccaacactctttctcttgaattcaaccatgagagtacggtatcatggaccaaggactgttaaaccacttgcagctttctatactgatgtctcagcttgcttgtggttttcattttccagaaatcttaaccttgttcttggtggttactatactttaagtcatttacggaagataaattaatgtggtgaaggtatcaatgcctcggtcaatgtcaagtcaactgcaggggagaccatggtacatcccttgcacgatattgagcggcaaaaggatgctgaacaggaaaattgcccgttttggtgggctcggtcgccagagaaaatacttcagcaggatacttatctagcattggcgaccgcatttgttattttgaggctgctgtatcgtctttttccaaagattgattcctttgctagatgggcatggaggaggcataatctgtttgcaaacttgatgggggcacatgaatatttcctcacctaccttgagcaaggaagacagaagtttcatcggctatacccttcaagttcgaagcgaggaaatctgcaggagggggcaatgaacgctaccgcttgggcctccaaatcattagcatctgtttcgattggagaaccaagtgcgattggaaggacaaactctaccagtgagcttagatgaagtgtaaccctttttttctccacagagatatatgtacagtacagtagagcgatcttatggacacccagaatctgttgtaacggctgtatttctctttgtatcctctcctccttagaataagtatatccatggttttgcacctttttttgttgttacatcccaattcttcggaggagtaaagtttctggtgtattgagtagtgtcttgtgttctgaaatttggaatatgtaccagtatgttggagccttggagggcatcacaataggatattgtcactttctgctgtcatgccgtccttggtctgtcatagaaattagcaatttaggtgtttagggtttaggaatggtaacaggatctcttgtcggtggtaatgattactggctgtaattagattggatagtactttctccgttcttttttatttgtaacggtttagtgtaaaaatgaactagcgaatggtaaatatttaagaacggaggtagtacgaaagaattttactaaacaaaa

SEQ ID NO: 55995 - DNA, 3099 bp, Zea Mays
cgctcttccgttctgtcctgtgacgcgtgggtaaaacggcgaagggattctggagggaaacgccgaagggcctcactcgattgctactttggtctggtactgtactgctgctgctaccttctctctccccattactcgtgtaatggcgaggacgcaatagcgctagcgctcagtggagcggcggcggcggcggcggcagcagcgcaggccatcgcggaattgctcgctgctgcggcccagtggcgtggcggcccgcgtgtcgcgctccatgcggcactggtgcgcctcgtgagatccatccgcagcagcaggcatgtcgcggccgctgtacaggggcgtgtcggggatcggcggcaagctggcggcggcggacgaggcgtactacgaccccaaggagcccagcgagaacggcattggcgggggcttcggccggggcggcgcgcggaagcggcacctcgcggccgcggcggtgaagatcggggtcctgctgctgctggcggcggcgctcgtgggctcggtcgcgtgggcggggacgctctacgcggggcgcggcgcggcggcgcgcgcggccgcagccgccgcgcaccgcgggtaccggcggctgcaggagcagctggtcacggacctgctcgacatcggcgagctcgcgggcggcggcgtccgcgccaaggaggcggaggtgtgcccgcccgagtacgacaactacgtgccctgctactacaacatcacggacgccgtcgacgtctcggatctgggggccggcgtcgtcataagctacgaccgccagtgcacgcgcgacggcagggtcacttgcctcgtcgcgccgccgcggagctaccgggttcccgtgcgatggcccagcggcaagggcttcatctggaaggacaacgtgcggatcagcgggcaggagttctcgtccggaagcctgttcaagaggatgatggtggaggaggaccagatctcgttcccgtcggacgcgcacatggccgacggtgtggaggattatgcccatcaaatcgctgagatgattgggttgcggaatgaattcaatttcaatgaggctggggttaggacagtccttgacatagaatgtggatttggtacctttggggcgcatctttttgagagagatctcttgaccatgtgcattgctaactatgaagcatcaggtagccaagtccaaattacactggagagaggcattcctgcaatgattggttcatttgcaacgaagcagcttccgtatccctatctttcctttgatatggtgcattgtgctaaatgcaatattgaatggtacaaaaatgatggcattttcttggttgaagtgaacaggcttttgaggcctggtggatattttgtatggacatcgaatttgaatacacatagggccttgcgagacaaagaaaaccaaaagaaatggacagccattcgtgactacgctgagggcctttgttgggagatgctgtcacaacaagatgagacaattgtatggaaaaagacgaataaaagggaatgttacaaatcaagaaaatttgggcctgagctatgtggccatgatccagaatcaccatactaccaaccactaagcccctgcatatcaggcacaagaagtcagcgttggatccccattgaacaccgtaccacctggccatctcaggctaggcaaaactcaacagaactggacatacatggtgtgcattcagaagtcttcgctgatgataattcaagctgggactccatggtgcgaaactactggtctttgctatccccacttatattttcagaccatccaaagagacctggtgatgaagacccacaaccaccatttaacatgctaaggaatgttttagatatgaatgctcattttggtggatttaatgctgctttactgaagtctggaaagtctgtatgggtgatgaatgttgttcctacaaatgccccaaattatctaccactaatatttgaccgtggttttattggggttcaacatgattggtgtgacgcatttgcaacttacccaagaacatatgatatggtgcatgctgatggctttctatcacttgagaagacccacaagcatagatgttctactcttgacatattcttggaagttgatcgcatcctacgaccagagggctgggtcataatccgtgacaccgcccctcttattgaagcggcaagatctgttgttactcaactcagatgggatgcccgtattttagatcttgacatagctagtgatgaaaagctactcgtctgtcagaagccctttctcagaaaataaggagcacaagcacagtagacactgacacaagatatgaacttattctttcaccctatactgttacagttattgtctgagcagaactgagtacaaagcttgggacgaaaacacgggaaggtgccattagattggttagtaagtgcatgctgcagagaacaggcttggtggcaaagctttccaggccaaggttttattgccaagacacagagatgaagccatgaaattactttagtggtgaaaaccatatccaataaagggatgacgctgcggtgtacataatcgcggtcaatgtgccatatagggtttttttttggccatttaacgttagtcggagctactgaggtgagctggtattgctctgtggcttcaacctcccgtgcttttgtggaggattgcgcgtccagttcatgttagctgtagtttggtatctgccacaaccaattgggctgccccattgcgacggtgatgtgccaccttaatccgaagggattagcttgtcattcttccgtggtttggaccatccccttttgcctgcttgtatgtttgactctgctaatactctgggctagcataaaaaaaattaactagaaaatggtaacaacaggttagatcgtgtttaatagtttacccatatgtgttcgcttggctttaaccctaaaggacttttaatgtttttacagtgttttatttctatgaattgcagtagcagcagttcgaacagttgactttaatctgaaacgaacaacctatatttgaatacgatttatgagtatatggatgtgtaagctgttgaagatagccatagaggtttt

SEQ ID NO: 55996 - DNA, 3547 bp, Zea Mays
gtacacctccaaaatcccgcggggcccgcaagcattaattttcagttccattcccaacagcacggtcagcaccccactcgcccaccgaccgcgggtccagtggaccatggcctacctgtcactcagacatccgagcaccgtaatctccagccctatttatactggtgtcagtgtcctgtcccgtcccgtgttcatctctccgctcttccgttctgtcctgtgacgcgtgggtaaaacggcgaagggattctggagggaaacgccgaagggcctcactcgattgctactttggtctggtactgtactgctgctgctaccttctctctccccattactcgtgtaatggcgaggacgcaatagcgctagcgctcagtggagcggcggcggcggcggcggcagcagcgcaggccatcgcggaattgctcgctgctgcggcccagtggcgtggcggcccgcgtgtcgcgctccatgcggcactggtgcgcctcgtgagatccatccgcagcagcaggcatgtcgcggccgctgtacaggggcgtgtcggggatcggcggcaagctggcggcggcggacgaggcgtactacgaccccaaggagcccagcgagaacggcattggcgggggcttcggccggggcggcgcgcggaagcggcacctcgcggccgcggcggtgaagatcggggtcctgctgctgctggcggcggcgctcgtgggctcggtcgcgtgggcggggacgctctacgcggggcgcggcgcggcggcgcgcgcggccgcagccgccgcgcaccgcgggtaccggcggctgcaggagcagctggtcacggacctgctcgacatcggcgagctcgcgggcggcggcgtccgcgccaaggaggcggaggtgtgcccgcccgagtacgacaactacgtgccctgctactacaacatcacggacgccgtcgacgtctcggatctgggggccggcgtcgtcataagctacgaccgccagtgcacgcgcgacggcagggtcacttgcctcgtcgcgccgccgcggagctaccgggttcccgtgcgatggcccagcggcaagggcttcatctggaaggacaacgtgcggatcagcgggcaggagttctcgtccggaagcctgttcaagaggatgatggtggaggaggaccagatctcgttcccgtcggacgcgcacatggccgacggtgtggaggattatgcccatcaaatcgctgagatgattgggttgcggaatgaattcaatttcaatgaggctggggttaggacagtccttgacatagaatgtggatttggtacctttggggcgcatctttttgagagagatctcttgaccatgtgcattgctaactatgaagcatcaggtagccaagtccaaattacactggagagaggcattcctgcaatgattggttcatttgcaacgaagcagcttccgtatccctatctttcctttgatatggtgcattgtgctaaatgcaatattgaatggtacaaaaatgatggcattttcttggttgaagtgaacaggcttttgaggcctggtggatattttgtatggacatcgaatttgaatacacatagggccttgcgagacaaagaaaaccaaaagaaatggacagccattcgtgactacgctgagggcctttgttgggagatgctgtcacaacaagatgagacaattgtatggaaaaagacgaataaaagggaatgttacaaatcaagaaaatttgggcctgagctatgtggccatgatccagaatcaccatactaccaaccactaagcccctgcatatcaggcacaagaagtcagcgttggatccccattgaacaccgtaccacctggccatctcaggctaggcaaaactcaacagaactggacatacatggtgtgcattcagaagtcttcgctgatgataattcaagctgggactccatgatatgaatgctcattttggtggatttaatgctgctttactgaagtctggaaagtctgtatgggtgatgaatgttgttcctacaaatgccccaaattatctaccactaatatttgaccgtggttttattggggttcaacatgattggtaagtagtagtacatgatcttttgtcctttgttgatttgaatttgttttacccttttttgtttcaggtgagtgctctggtaatgctaaatcttgaactaccttacttgacaaagttttccaaactaaacttcatatgcatagtcagtcataacttggaaatgttaatacatgcaaattttaggcatatggaaagttgttgatatagaggaattagagcatcctcaatttcacataattttattagagtacatggagattgatgcataatcaaagtatcaatttgatagacaactttcggcatatcaatctttggatcatcctccagttaaatgatcgatggatggacatgtgttaggtgtgacgcatttgcaacttacccaagaacatatgatatggtgcatgctgatggctttctatcacttgagaagacccacaagcatagatgttctactcttgacatattcttggaagttgatcgcatcctacgaccagagggctgggtcataatccgtgacaccgcccctcttattgaagcggcaagatctgttgttactcaactcagatgggatgcccgtattttagatcttgacatagctagtgatgaaaagctactcgtctgtcagaagccctttctcagaaaataaggagcacaagcacagtagacactgacacaagatatgaacttattctttcaccctatactgttacagttattgtctgagcagaactgagtacaaagcttgggacgaaaacacgggaaggtgccattagattggttagtaagtgcatgctgcagagaacaggcttggtggcaaagctttccaggccaaggttttattgccaagacacagagatgaagccatgaaattactttagtggtgaaaaccatatccaataaagggatgacgctgcggtgtacataatcgcggtcaatgtgccatatagggtttttttttggccatttaacgttagtcggagctactgaggtgagctggtattgctctgtggcttcaacctcccgtgcttttgtggaggattgcgcgtccagttcatgttagctgtagtttggtatctgccacaaccaattgggctgccccattgcgacggtgatgtgccaccttaatccgaagggattagcttgtcattcttccgtggtttggaccatccccttttgcctgcttgtatgtttgactctgctaatactctgggctagcataaaaaaaattaactagaaaatggtaacaacaggttagatcgtgtttaatagtttacccatatgtgttcgcttggctttaaccctaaaggacttttaatgtttttacagtgttttatttctatgaattgcagtagcagcagttcgaacagttgactttaatctgaaacgaacaacctatatttgaatacgatttatgagtatatggatgtgtaagctgttgaagatagccatagaggtttt

SEQ ID NO: 55997 - DNA, 1633 bp, Zea Mays
cctttggggcgcatctttttgagagagatctcttgaccatgtgcattgctaactatgaagcatcaggtagccaagtccaaattacactggagagaggcattcctgcaatgattggttcatttgcaacgaagcagcttccgtatccctatctttcctttgatatggtgcattgtgctaaatgcaatattgaatggtacaaaaatgatggcattttcttggttgaagtgaacaggcttttgaggcctggtggatattttgtatggacatcgaatttgaatacacatagggccttgcgagacaaagaaaaccaaaagaaatggacagccattcgtgactacgctgagggcctttgttgggagatgctgtcacaacaagatgagacaattgtatggaaaaagacgaataaaagggaatgttacaaatcaagaaaatttgggcctgagctatgtggccatgatccagaatcaccatactaccaaccactaagcccctgcatatcaggcacaagaagtcagcgttggatccccattgaacaccgtaccacctggccatctcaggctaggcaaaactcaacagaactggacatacatggtgtgcattcagaagtcttcgctgatgataattcaagctgggactccatggtgcgaaactactggtctttgctatccccacttatattttcagaccatccaaagagacctggtgatgaagacccacaaccaccatttaacatgctaaggaatgttttagatatgaatgctcattttggtggatttaatgctgctttactgaagtctggaaagtctgtatgggtgatgaatgttgttcctacaaatgccccaaattatctaccactaatatttgaccgtggttttattggggttcaacatgattgttaaatgatcgatggatggacatgtgttaggtgtgacgcatttgcaacttacccaagaacatatgatatggtgcatgctgatggctttctatcacttgagaagacccacaagcatagatgttctactcttgacatattcttggaagttgatcgcatcctacgaccagagggctgggtcataatccgtgacaccgcccctcttattgaagcggcaagatctgttgttactcaactcagatgggatgcccgtattttagatcttgacatagctagtgatgaaaagctactcgtctgtcagaagccctttctcagaaaataaggagcacaagcacagtagacactgacacaagatatgaacttattctttcaccctatactgttacagttattgtctgagcagaactgagtacaaagcttgggacgaaaacacgggaaggtgccattagattggttagtaagtgcatgctgcagagaacaggcttggtggcaaagctttccaggccaaggttttattgccaagacacagagatgaagccatgaaattactttagtggtgaaaaccatatccaataaagggatgacgctgcggtgtacataatcgcggtcaatgtgccatatagactacagtctagtgaaaccaatataattattatttggagatgaatgataagcaagaacactttataactgttgcactatatctttctaccatttgtacagttcatttgtacattatcg

SEQ ID NO: 55998 - DNA, 741 bp, Zea Mays
atggagagatcagcaagtggggcagcattagcatactccaggtttgccaaatgccagtccagaagcatcctttcttcatgctcagctgcaacaccatgcgctgcccggaatgcttcaagtgccatgcccaatgacaaatcaacaccatgtggtacaccatctgcaatcacctgtctcaactggcaaaccttgtccagaagctggttaaaggcagcctcaacacgagcatccatgtcagggtcaactgggcggccatctggaagatacagtgggcatttatcccgcaccttgtggagtgggaatccaagctgccgagcaatgacaccaaggggattaccattgataccggtgagaacgctgcctccaaggtcagcagcagcaacagtgtcgggatactctacagcagaagaacgcattgtcttggtaaacacacggcccccggggcggagccggccttcaatgacggccaccttgaatccaagcgcaatcaggtgccgtgcagcagctagaccggcaaggccagcgccaacaataaggacggatgggggaggagaagagggaggaggctgtgggggaagcgagaggacggcgggggcaagaccgaaattaatgtatgcgtgctcagacaagaaggaatgcgccgcggcaacaaggggagcgtgctcggcgcgaatagatgcgagcgcggcgttagcggcaacgggggagaggggattggaacgccagagcgctacaatgtga

SEQ ID NO: 55999 - DNA, 408 bp, Zea Mays
agtaatcatgttgcttgtttatttatctcccaagacttggagaagtggaagtgcttcctcacaagctgtgtacatgtgttgctaatactatgtaatttcacaagacgttgtgttaggccacagatattgactgctagatagaaggattaaagatctaactgaccaaacaaatgacttgtatggataggaggtcagattcaaacttcaactgaattgggaaatacctacagcaacatacctttctaaatagacactaagaagaatatacatttcatacagctcgaccacaaaagaagaattaaaaatgatgatttatttaaaatcaccctctaaagaataaagaaaactaacatgaaccactaactgatgtgtcgacaataaagttactatgtacctgttacaaacaag

SEQ ID NO: 56000 - DNA, 655 bp, Zea Mays
caccactcaaccggtcctcacagtccttgccttgccgtggcgtccgtcgtccccccacgtttgtacatatatatgcccatgtcatcgtcgtctccttcctctgctccgatcccctttgcaaccttcctcgtcataggccaggcaactgcggccctgcttgcttcgcttgtgctcctgcgccaccgtcactgctcatctcctccatagccatagcttttagactaggttttagattctggaagaagaacctatacacgagacagaagctagctagctagcttatttctgtttcttcagtaacctctcggtctagcaaccagcaagcttcccattgccctcgatcgatccgccccaaacatccatccatccatccacccttcttcattcctggctgtaagaagagatggtctcatggccgtgagctcacctcgccgagcgctcatcgcggccgtgtccctctgcttccttctcggcgctgcgagcagcgtccgcaccgcgacgttttccccttctcagcagcagaacctggcggaggacaagtcgcggctggggtcgacgccgccgagctgccgcaaccggtgcagcgcctgcaacccctgcatgcccgtccaggacattgtactggagattgacaaggtggcacggctcataaaag

SEQ ID NO: 56001 - DNA, 629 bp, Zea Mays
ctcacagtccttgccttgccgtggcgtccgtcgtccccccacgtttgtacatatatatgcccatgtcatcgtcgtctccttcctctgctccgatcccctttgcaaccttcctcgtcataggccaggcaactgcggccctgcttgcttcgcttgtgctcctgcgccaccgtcactgctcatctcctccatagccatagcttttagactaggttttagattctggaagaagaacctatacacgagacagaagctagctagctagcttatttctgtttcttcagtaacctctcggtctagcaaccagcaagcttcccattgccctcgatcgatccgccccaaacatccatccatccatccacccttcttcattcctggctgtaagaagagatggtctcatggccgtgagctcacctcgccgagcgctcatcgcggccgtgtccctctgcttccttctcggcgctgcgagcagcgtccgcaccgcgacgttttccccttctcagcagcagaacctggcggaggacaagtcgcggctggggtcgacgccgccgagctgccgcaaccggtgcagcgcctgcaacccctgcatgcccgtccagtgccgggaatctgcggcacgagcccacctgttt

SEQ ID NO: 56002 - DNA, 664 bp, Zea Mays
ttgcatttcactcctcgatctcgatccctgagaacgagtgatgatggcgggcgcagtagaacgccactgctgtgtgtttaccaaagcaaagcagtgataggttacaaggtggtggtcaccactcaaccggtcctcacagtccttgccttgccgtggcgtccgtcgtccccccacgtttgtacatatatatgcccatgtcatcgtcgtctccttcctctgctccgatcccctttgcaaccttcctcgtcataggccaggcaactgcggccctgcttgcttcgcttgtgctcctgcgccaccgtcactgctcatctcctccatagccatagcttttagactaggttttagattctggaagaagaacctatacacgagacagaagctagctagctagcttatttctgtttcttcagtaacctctcggtctagcaaccagcaagcttcccattgccctcgatcgatccgccccaaacatccatccatccatccacccttcttcattcctggctgtaagaagagatggtctcatggccgtgagctcacctcgccgagcgctcatcgcggccgtgtccctctgcttccttctcggcgctgcgagcagcgtccgcaccgcgacgttttccccttctcagcgcgtcgggtgtctcgtctccgtgaggcgcag

SEQ ID NO: 56003 - DNA, 121 bp, Zea Mays
taatctttcccggcataataatttgcgcgagagagaacggcgcaagaaactctggggggagggagtgagggagcgcatatatatttaccggattggtggtttggggacgaaggaccgaatt

SEQ ID NO: 56004 - DNA, 72 bp, Zea Mays
ccttgccgtcctcgcactcccccatcacttcacttccctgtagcattccaaaggactgataatccattacga

SEQ ID NO: 56005 - DNA, 740 bp, Zea Mays
tccgtcgccaccagcatgtaccccatctccaggtgccgcagcctgggcatgctgcacgcgatggcgtgcgcctcgtcgtgctggcacgccctgtccgccaggtcgatcgggtgcatcacccgccgcagccccgccagggacttgcagtgcttgccgaacgcctccaggccgcgggcccccatcttcgtgcagctgctgatgtcgaggaaagtgacgttcggcagccgcggcgccacggattccaccatggagtcgctgatctcgctcctggggatctccaaggtccggagagctcgtgcgctagccagttttcagcaaaagaggaagcaggatcaagccggtgtgtaattgtgaccgcctgatcactgtatgcatgtgcgcgtgccggtgccagtacttgtgtgtgtacttccaataattcgtattgcgcgtggacaatgaatatctaatcctatagttcgatcgtaatgcaaataattcagaacaataatacacatcaactgatcaacttctcagtgaatacatgtcctacaagtcagattcaagactaatcatgctgcaagctcggggcatatctaccattttggttctacgtactgagacaaaaaaaaaacagcagtttagattcataatctctgcgatagcaggtttttatttgctccaaagatccagaccaaatctcatcaaagtttaactaggcccacttctagccctgctaatcagaaaaatcagaatggtct

SEQ ID NO: 56006 - DNA, 1605 bp, Zea Mays
cttttattcgcatttcacctaacaggtgtacagttgttttttatcagatcatgtagttatcacttctttctctttctaacatgagaataaatgctgcctggtattttgatgcatacgagcgagtgcagatccactaaagaaatcaacaatggttatgaaaatggatttgcacctccttgatggtttgaataaatgatgcctgatattttggtgcatgctagtgacatgcagattcactgtagaaattagctgtacaattaacacctatggatgctacaaggaaaaagaaaataatgactatggtggatccttctttcctttgcattctagcattagtttgtaacttaaaataacccagtgctaagttttagactcttggtatagtggtatgataatccttccggtcacaacatgaacatacatttgactttgcatggtctttaatgcgtatctttgaccactaattacttctataatatattcataaaatgcttcaaatataagatattttgcatgtgctttgaacacaaatcgacacatataactgaataattatgataggaaactatggaagcactgaaatattggatggaacaagatcatgtgtcggagcttttctgcaggctgttaatagtagtttatggtatcctctggggctttagtgctccaggtccaggagctgatcctaaggtggattatgcttgcaccccagaagaagtgcaacagcatttccaagcttgtggaactgtcaacagggtgacaatcttgactgacaagtttggacagccaaaaggttttgcttatgttgaatttctggaacaggaaggtgttcaggaagctcttaacttgaatgaatctgaattgcatggtcgccagattaaggtcgccccaaagaggactaatgttcctgggatgaagcagcgtccaccacgtgggtataatccataccatggctacccttatagatcatacggggcaccgtatttccccccatatggttatgggagggctcctagattccgccgccctatgcgctacagaccttacttctgaagtacggggtagggtaatgaagttcaatgcaaaaccagcccatggtcactggtcagtcccgggaataatcaactgtatcgtttgcactgttgcggctcaatgctcctgtatcagctgccttttctgacctttgtttcaagtgccgccataagcgacggacatgttgtattggcttgtaatacaggacgtagtaagtgcacacactttctgtaagcgtgctttcccacttcccagggttactactgtttgcaatttctgtagttctttgggtcggtcggttaggacatgggagtggatcgttctatgcccatttgaggtagattagttatatgaagagaaagcttcgcatgcggggctgtcttgtttgcagattgccactacctcagtacggttccaggttcctcaaggtatccgctgagcatctgttctggtgtcggattccgagttcaggtcttgtaactaataaaaaacggaaattataatgtctctctttaccagactgttttaccgcgggcaaatttgatccgctgttactgcagggccgacataaat

SEQ ID NO: 56007 - DNA, 3647 bp, Zea Mays
aaggctcatgaaactttcgacccattggaggcccacgacctctccgtccgatccctaggcggcggatccttcctccaccaaacccgcacctgccgcaactgaatcgggtcagatcgggccatcggggaggcgagggagctcacgcggcgccatggacgaggaggagcacgaggtttacggccaggaaatcccggaggacggcgacatggacggcgctgacgttgatatggctgcctccggggatgacgcggcgaagctgcaggagctcgacgagatgaagcgcaggctgaaggagatggaggaggaagccgccgccctccgcgatatgcaggccaaggtcgccaaggagatgcaaggaggtgaccctagtgcatctacagctgaggcaaaggagcaggtggatgcccgttctgtgtatgttggaaatggctagtgtgcttgagcaagcctttcaaattgactataatggcctaatgggcactgggtgatgttttagagttagcatagagtgaaaaagaaaaaaaaagaaaaaaagatagaaggacctctgaaaaaatataaaaaagtgcatggaaaaagaaaggaaaaagaggaaagaagtaaaaaacggataataaatatcataagttagatgacatccttggcgaagcaaaagaagtcagcacagagctgctgtctacactcgggatgggactttttgactggagctggcatggcggcatctgatgtggttcgtagctgctggtccactgatatcacctgggtggtgcgtaagtatgacatgtaagtgtaacagtagggaactttaatcttgactctattctttgctgtttctgaacttgtgctctggctaccttcctaccttttcccttttattcgcatttcacctaacaggtgtacagttgttttttatcagatcatgtagttatcacttctttctctttctaacatgagaataaatgctgcctggtattttgatgcatacgagcgagtgcagatccactaaagaaatcaacaatggttatgaaaatggatttgcacctccttgatggtttgaataaatgatgcctgatattttggtgcatgctagtgacatgcagattcactgtagaaattagctgtacaattaacacctatggatgctacaaggaaaaagaaaataatgactatggtggatccttctttcctttgcattctagcattagtttgtaacttaaaataacccagtgctaagttttagactcttggtatagtggtatgataatccttccggtcacaacatgaacatacatttgactttgcatggtctttaatgcgtatctttgaccactaattacttctataatatattcataaaatgcttcaaatataagatattttgcatgtgctttgaacacaaatcgacacatataactgaataattatgataggaaactatggaagcactgaaatattggatggaacaagatcatgtgtcggagcttttctgcaggctgttaatagtagtttatggtatcctctggggctttagtgctccaggtccaggagctgatcctaaggtcacccaccgtgctcaattaatccttctatatagtggaggtgctggtagccgttgtttgtagtgtttgatggctcatctttagctaatccttcgctaggagtgtatgtgctgggtgtctcatgcttgttttattctccttttcatattattaaatgacttgcagctcttctgcacagcttgaggacaaaaacaaattgacacatataaatgatatgcttccagaccaagagtctctttatatcattctgtattgataggaatagagattttggtgaaaaatgtctccgacaactttaatttctctattctggatttctcgctcgccaaaaatggagattgggggtgcagctgtgtgcacaagatatagagaaattgttgtgatggaaagatatagggaacactttttattcaaattgctctcctaatgaggatttagggagtgagtttaagaaagacttctcgagatgctctaatgtgtgtaatagttattggcgtttgcattttttatggtttggtcaaatgttgtcctaaatatcgtttttgtgacctgatggagtattaagtattgattttttgtgtattttctgttgattatcttcaacatacccttttctatgatgtttgttttacacattagttaacttggcgtgtcagttctccattacgaacctgcaaaaaatggtactctatagtgtcacccagacctaaggttcaatgccatttaaaatgcacattgtttctcacttcaacagattcttgtactttgccatacttgtgccttagaaaggaagtctattagagagccaacctttaaaataaataaccttctaggactgcaggttcatttatggaaggaacacttgtgtcttaaagcgtttcaatgttcagcatcaactaatttgcccctatactgtggtcactgcttaagtgacgttttttccccatatatacaagactagcatcaactatcaattactcgactcagttgcattttctgttgtggtactttttcacctgtctggtctttggtgcttagtatcaattactcttactccagtccctggttgttggttaatgggacacatagtttctagccttacatttctgtgtctacccagagcagtccacactaagttaacaccatttgaactgatacaatcatgtactgcaggtggattatgcttgcaccccagaagaagtgcaacagcatttccaagcttgtggaactgtcaacagggtgacaatcttgactgacaagtttggacagccaaaaggttttgcttatgttgaatttctggaacaggaaggtgttcaggaagctcttaacttgaatgaatctgaattgcatggtcgccagattaaggtcgccccaaagaggactaatgttcctgggatgaagcagcgtccaccacgtgggtataatccataccatggctacccttatagatcatacggggcaccgtatttccccccatatggttatgggagggctcctagattccgccgccctatgcgctacagaccttacttctgaagtacggggtagggtaatgaagttcaatgcaaaaccagcccatggtcactggtcagtcccgggaataatcaactgtatcgtttgcactgttgcggctcaatgctcctgtatcagctgccttttctgacctttgtttcaagtgccgccataagcgacggacatgttgtattggcttgtaatacaggacgtagtaagtgcacacactttctgtaagcgtgctttcccacttcccagggttactactgtttgcaatttctgtagttctttgggtcggtcggttaggacatgggagtggatcgttctatgcccatttgaggtagattagttatatgaagagaaagcttcgcatgcggggctgtcttgtttgcagattgccactacctcagtacggttccaggttcctcaaggtatccgctgagcatctgttctggtgtcggattccgagttcaggtcttgtaactaataaaaaacggaaattataatgtctctctttaccagactgttttaccgcgggcaaatttgatccgctgttactgcagggccgacataaat

SEQ ID NO: 56008 - DNA, 4178 bp, Zea Mays
aaggctcatgaaactttcgacccattggaggcccacgacctctccgtccgatccctaggcggcggatccttcctccaccaaacccgcacctgccgcaactgaatcgggtcagatcgggccatcggggaggcgagggagctcacgcggcgccatggacgaggaggagcacgaggtttacggccaggaaatcccggaggacggcgacatggacggcgctgacgttgatatggctgcctccggggatgacgcggcgaagctgcaggagctcgacgagatgaagcgcaggctgaaggagatggaggaggaagccgccgccctccgcgatatgcaggccaaggtcgccaaggagatgcaaggaggtgaccctagtgcatctacagctgaggcaaaggagcaggtggatgcccgttctgtgtatgttggaaatgtaagaatttataataatctccctctctttattgtgactctgcatattagcgggaatatgttatgttgctttgaaatttttatttaatatatatttcttgatattttacgtgtatgaagcatggagtttgaaacatccctatatcttttatgtgatacagtggtagacacatacatattgcctagtagctaatagatattttattggcactcgcttagttatgaattgtttatctcaagaagccaactaccttgttacttaccttcagaacttgtatggttggtgcctactgaaaaaatgtctgtgttggatgtctttattggcaggcagaattgtcaaagcttcttcctaatttgatgtttcctccttgctcccatttttcgttgcgttccttagaatgcaccacactgctattatgaaatgctctgtgtgcttatcatcatcctttgctatcaatactcctttgatctgtcttcatgtgttttattttattgttttcgtgcattaattaagaaatggtgatggtcgcagggctagtgtgcttgagcaagcctttcaaattgactataatggcctaatgggcactgggtgatgttttagagttagcatagagtgaaaaagaaaaaaaaagaaaaaaagatagaaggacctctgaaaaaatataaaaaagtgcatggaaaaagaaaggaaaaagaggaaagaagtaaaaaacggataataaatatcataagttagatgacatccttggcgaagcaaaagaagtcagcacagagctgctgtctacactcgggatgggactttttgactggagctggcatggcggcatctgatgtggttcgtagctgctggtccactgatatcacctgggtggtgcgtaagtatgacatgtaagtgtaacagtagggaactttaatcttgactctattctttgctgtttctgaacttgtgctctggctaccttcctaccttttcccttttattcgcatttcacctaacaggtgtacagttgttttttatcagatcatgtagttatcacttctttctctttctaacatgagaataaatgctgcctggtattttgatgcatacgagcgagtgcagatccactaaagaaatcaacaatggttatgaaaatggatttgcacctccttgatggtttgaataaatgatgcctgatattttggtgcatgctagtgacatgcagattcactgtagaaattagctgtacaattaacacctatggatgctacaaggaaaaagaaaataatgactatggtggatccttctttcctttgcattctagcattagtttgtaacttaaaataacccagtgctaagttttagactcttggtatagtggtatgataatccttccggtcacaacatgaacatacatttgactttgcatggtctttaatgcgtatctttgaccactaattacttctataatatattcataaaatgcttcaaatataagatattttgcatgtgctttgaacacaaatcgacacatataactgaataattatgataggaaactatggaagcactgaaatattggatggaacaagatcatgtgtcggagcttttctgcaggctgttaatagtagtttatggtatcctctggggctttagtgctccaggtccaggagctgatcctaaggtcacccaccgtgctcaattaatccttctatatagtggaggtgctggtagccgttgtttgtagtgtttgatggctcatctttagctaatccttcgctaggagtgtatgtgctgggtgtctcatgcttgttttattctccttttcatattattaaatgacttgcagctcttctgcacagcttgaggacaaaaacaaattgacacatataaatgatatgcttccagaccaagagtctctttatatcattctgtattgataggaatagagattttggtgaaaaatgtctccgacaactttaatttctctattctggatttctcgctcgccaaaaatggagattgggggtgcagctgtgtgcacaagatatagagaaattgttgtgatggaaagatatagggaacactttttattcaaattgctctcctaatgaggatttagggagtgagtttaagaaagacttctcgagatgctctaatgtgtgtaatagttattggcgtttgcattttttatggtttggtcaaatgttgtcctaaatatcgtttttgtgacctgatggagtattaagtattgattttttgtgtattttctgttgattatcttcaacatacccttttctatgatgtttgttttacacattagttaacttggcgtgtcagttctccattacgaacctgcaaaaaatggtactctatagtgtcacccagacctaaggttcaatgccatttaaaatgcacattgtttctcacttcaacagattcttgtactttgccatacttgtgccttagaaaggaagtctattagagagccaacctttaaaataaataaccttctaggactgcaggttcatttatggaaggaacacttgtgtcttaaagcgtttcaatgttcagcatcaactaatttgcccctatactgtggtcactgcttaagtgacgttttttccccatatatacaagactagcatcaactatcaattactcgactcagttgcattttctgttgtggtactttttcacctgtctggtctttggtgcttagtatcaattactcttactccagtccctggttgttggttaatgggacacatagtttctagccttacatttctgtgtctacccagagcagtccacactaagttaacaccatttgaactgatacaatcatgtactgcaggtggattatgcttgcaccccagaagaagtgcaacagcatttccaagcttgtggaactgtcaacagggtgacaatcttgactgacaagtttggacagccaaaaggttttgcttatgttgaatttctggaacaggaaggtgttcaggaagctcttaacttgaatgaatctgaattgcatggtcgccagattaaggtcgccccaaagaggactaatgttcctgggatgaagcagcgtccaccacgtgggtataatccataccatggctacccttatagatcatacggggcaccgtatttccccccatatggttatgggagggctcctagattccgccgccctatgcgctacagaccttacttctgaagtacggggtagggtaatgaagttcaatgcaaaaccagcccatggtcactggtcagtcccgggaataatcaactgtatcgtttgcactgttgcggctcaatgctcctgtatcagctgccttttctgacctttgtttcaagtgccgccataagcgacggacatgttgtattggcttgtaatacaggacgtagtaagtgcacacactttctgtaagcgtgctttcccacttcccagggttactactgtttgcaatttctgtagttctttgggtcggtcggttaggacatgggagtggatcgttctatgcccatttgaggtagattagttatatgaagagaaagcttcgcatgcggggctgtcttgtttgcagattgccactacctcagtacggttccaggttcctcaaggtatccgctgagcatctgttctggtgtcggattccgagttcaggtcttgtaactaataaaaaacggaaattataatgtctctctttaccagactgttttaccgcgggcaaatttgatccgctgttactgcagggccgacataaat

SEQ ID NO: 56009 - DNA, 1276 bp, Zea Mays
aaggctcatgaaactttcgacccattggaggcccacgacctctccgtccgatccctaggcggcggatccttcctccaccaaacccgcacctgccgcaactgaatcgggtcagatcgggccatcggggaggcgagggagctcacgcggcgccatggacgaggaggagcacgaggtttacggccaggaaatcccggaggacggcgacatggacggcgctgacgttgatatggctgcctccggggatgacgcggcgaagctgcaggagctcgacgagatgaagcgcaggctgaaggagatggaggaggaagccgccgccctccgcgatatgcaggccaaggtcgccaaggagatgcaaggaggtgaccctagtgcatctacagctgaggcaaaggagcaggtggatgcccgttctgtgtatgttggaaatgtggattatgcttgcaccccagaagaagtgcaacagcatttccaagcttgtggaactgtcaacagggaaggtgttcaggaagctcttaacttgaatgaatctgaattgcatggtcgccagattaaggtcgccccaaagaggactaatgttcctgggatgaagcagcgtccaccacgtgggtataatccataccatggctacccttatagatcatacggggcaccgtatttccccccatatggttatgggagggctcctagattccgccgccctatgcgctacagaccttacttctgaagtacggggtagggtaatgaagttcaatgcaaaaccagcccatggtcactggtcagtcccgggaataatcaactgtatcgtttgcactgttgcggctcaatgctcctgtatcagctgccttttctgacctttgtttcaagtgccgccataagcgacggacatgttgtattggcttgtaatacaggacgtagtaagtgcacacactttctgtaagcgtgctttcccacttcccagggttactactgtttgcaatttctgtagttctttgggtcggtcggttaggacatgggagtggatcgttctatgcccatttgaggtagattagttatatgaagagaaagcttcgcatgcggggctgtcttgtttgcagattgccactacctcagtacggttccaggttcctcaaggtatccgctgagcatctgttctggtgtcggattccgagttcaggtcttgtaactaataaaaaacggaaattataatgtctctctttaccagactgttttaccgcgggcaaatttgatccgctgttactgcagggccgacataaat

SEQ ID NO: 56010 - DNA, 2192 bp, Zea Mays
agaacttcctgataggctagaatcagcctaaggctcatgaaactttcgacccattggaggcccacgacctctccgtccgatccctaggcggcggatccttcctccaccaaacccgcacctgccgcaactgaatcgggtcagatcgggccatcggggaggcgagggagctcacgcggcgccatggacgaggaggagcacgaggtttacggccaggaaatcccggaggacggcgacatggacggcgctgacgttgatatggctgcctccggggatgacgcggcgaagctgcaggagctcgacgagatgaagcgcaggctgaaggagatggaggaggaagccgccgccctccgcgatatgcaggccaaggtcgccaaggagatgcaaggaggtgaccctagtgcatctacagctgaggcaaaggagcaggtggatgcccgttctgtgtatgttggaaatgtaagaatttataataatctccctctctttattgtgactctgcatattagcgggaatatgttatgttgctttgaaatttttatttaatatatatttcttgatattttacgtgtatgaagcatggagtttgaaacatccctatatcttttatgtgatacagtggtagacacatacatattgcctagtagctaatagatattttattggcactcgcttagttatgaattgtttatctcaagaagccaactaccttgttacttaccttcagaacttgtatggttggtgcctactgaaaaaatgtctgtgttggatgtctttattggcaggcagaattgtcaaagcttcttcctaatttgatgtttcctccttgctcccatttttcgttgcgttccttagaatgcaccacactgctattatgaaatgctctgtgtgcttatcatcatcctttgctatcaatactcctttgatctgtcttcatgtgttttattttattgttttcgtgcattaattaagaaatggtgatggtcgcagggctagtgtgcttgagcaagcctttcaaattgactataatggcctaatgggcactgggtgatgttttagagttagcatagagtgaaaaagaaaaaaaaagaaaaaaagatagaaggacctctgaaaaaatataaaaaagtgcatggaaaaagaaaggaaaaagaggaaagaagtaaaaaacggataataaatatcataagttagatgacatccttggcgaagcaaaagaagtcagcacagagctgctgtctacactcgggatgggactttttgactggagctggcatggcggcatctgatgtggttcgtagctgctggtccactgatatcacctgggtggtgcgtaagtatgacatgtggattatgcttgcaccccagaagaagtgcaacagcatttccaagcttgtggaactgtcaacagggaaggtgttcaggaagctcttaacttgaatgaatctgaattgcatggtcgccagattaaggtcgccccaaagaggactaatgttcctgggatgaagcagcgtccaccacgtgggtataatccataccatggctacccttatagatcatacggggcaccgtatttccccccatatggttatgggagggctcctagattccgccgccctatgcgctacagaccttacttctgaagtacggggtagggtaatgaagttcaatgcaaaaccagcccatggtcactggtcagtcccgggaataatcaactgtatcgtttgcactgttgcggctcaatgctcctgtatcagctgccttttctgacctttgtttcaagtgccgccataagcgacggacatgttgtattggcttgtaatacaggacgtagtaagtgcacacactttctgtaagcgtgctttcccacttcccagggttactactgtttgcaatttctgtagttctttgggtcggtcggttaggacatgggagtggatcgttctatgcccatttgaggtagattagttatatgaagagaaagcttcgcatgcggggctgtcttgtttgcagattgccactacctcagtacggttccaggttcctcaaggtatccgctgagcatctgttctggtgtcggattccgagttcaggtcttgtaactaataaaaaacggaaattataatgtctctctttaccagactgttttaccgcgggcaaatttgatccgctgttactgcagggccgacataaat

SEQ ID NO: 56011 - DNA, 1664 bp, Zea Mays
attagaacttcctgataggctagaatcagcctaaggctcatgaaactttcgacccattggaggcccacgacctctccgtccgatccctaggcggcggatccttcctccaccaaacccgcacctgccgcaactgaatcgggtcagatcgggccatcggggaggcgagggagctcacgcggcgccatggacgaggaggagcacgaggtttacggccaggaaatcccggaggacggcgacatggacggcgctgacgttgatatggctgcctccggggatgacgcggcgaagctgcaggagctcgacgagatgaagcgcaggctgaaggagatggaggaggaagccgccgccctccgcgatatgcaggccaaggtcgccaaggagatgcaaggaggtgaccctagtgcatctacagctgaggcaaaggagcaggtggatgcccgttctgtgtatgttggaaatggctagtgtgcttgagcaagcctttcaaattgactataatggcctaatgggcactgggtgatgttttagagttagcatagagtgaaaaagaaaaaaaaagaaaaaaagatagaaggacctctgaaaaaatataaaaaagtgcatggaaaaagaaaggaaaaagaggaaagaagtaaaaaacggataataaatatcataagttagatgacatccttggcgaagcaaaagaagtcagcacagagctgctgtctacactcgggatgggactttttgactggagctggcatggcggcatctgatgtggttcgtagctgctggtccactgatatcacctgggtggtgcgtaagtatgacatgtggattatgcttgcaccccagaagaagtgcaacagcatttccaagcttgtggaactgtcaacagggaaggtgttcaggaagctcttaacttgaatgaatctgaattgcatggtcgccagattaaggtcgccccaaagaggactaatgttcctgggatgaagcagcgtccaccacgtgggtataatccataccatggctacccttatagatcatacggggcaccgtatttccccccatatggttatgggagggctcctagattccgccgccctatgcgctacagaccttacttctgaagtacggggtagggtaatgaagttcaatgcaaaaccagcccatggtcactggtcagtcccgggaataatcaactgtatcgtttgcactgttgcggctcaatgctcctgtatcagctgccttttctgacctttgtttcaagtgccgccataagcgacggacatgttgtattggcttgtaatacaggacgtagtaagtgcacacactttctgtaagcgtgctttcccacttcccagggttactactgtttgcaatttctgtagttctttgggtcggtcggttaggacatgggagtggatcgttctatgcccatttgaggtagattagttatatgaagagaaagcttcgcatgcggggctgtcttgtttgcagattgccactacctcagtacggttccaggttcctcaaggtatccgctgagcatctgttctggtgtcggattccgagttcaggtcttgtaactaataaaaaacggaaattataatgtctctctttaccagactgttttaccgcgggcaaatttgatccgctgttactgcagggccgacataaat

SEQ ID NO: 56012 - DNA, 1822 bp, Zea Mays
tcagacagcgcttgaaattttaaacaaaccttcttggaagaagcagcgaatgaatagaaagttcaaacaaggctacttcagcttcattctggagtctggactctggaccatgaatgaggacaggacatctgaatatctgacgtacggttgttgcattccgtttctactccagcacaaaggaaatccagcatttgttctacctgcaggtaagcaggttacattccgtttctactcctgtacaaatttacaaggtaatttacaaataggatcggtacgtctcgtgtttttcattcaatttcaaccgaatttggagcaagagcaaccagcacgaaatcggcgccctgttccccgcagaccaaaagacgccaatttcttccccgtgtgaaagaagatcactttcaagctagctagtttctacgctcaaaaatctgttgttcccattctacgtgcgaacctgttgcgtagctgacttctcctcgtccgccgctgccgccacctcgcgggagcgggacgcagcgccggacacgccgccgcctccgatgcggtcaaggcggacgctgcccttagcactagcaagagcgtcggcggcatcaacggcggccacgcgcttccctctcgccctcgtggacgacgaggacgacacctctcccagctcggccgagctgaccgttatcctggacgccgaaaagaaggacagcttcccggagaaggtccccgcgagaagcgactgccatctgctcgcccggccgaggggggcgcttcggccgcctcggctgcttccttccccggctcttcgcccgcgacgcagtcgcatgctctgctcgcccgcggcgaccatctccctgcgcacgtgctccggcagccgcagcgtgaaccgctccaggtcgcggtcgagccggacggcgagggagtgtcccgtagagtgcgaccgggcgagctgcgtcgggaccggcttgcgccccgaccgcgaccgcatggcgcgccgctgggtccctatctgctgcagctccagcgcctcctgccgccgcgcctcttcctcctcctcggtgatcacatcgatcaccacggccacagggtcgaggttgcagcggcagacggggcaggtcacgtggctggcgagccactcgccgatgcattccgggtggaaggcgtggctgcacttgggcaagagcctgagccgctcctcgtcctcgaactcgctgaggcacactgcgcactcgagcgcgccgcccttgcccacccggagcgccttggcctcggcgtacttcatggtggggaaagcctcgaccacctcggcgtccagcccgcgcggccgccgctgcctccgcgaccgcgagatgaaggcgtcgaaattgggcacggctctggcgcggtcgtagtcgtccgacgtggccgcggagccggtgcagtggcggaggtagacggtgaatgaggcgatgaacacgaacaccgcgatgacggcgaccaggagcgcgatcatggccgtgctgacctggccctggccgccgtcatcgtagctcggctgcgcgctggctgcgccgaccgcggacacgaggagcgcggcgagcagcgcttggccgtggcgagccatgggcgtccttgcgcgcggcaggcggcagtgcagacggcagagagaggcgagggcccgggagacgagagcgggttgactagcctgacggtgcagcaggcagtgtggaactatatagacggggaggaggagtttgagccaaaaaggtcaggatcccgcgggccgcggcgctcggcgggtctcgcggaaggaagccgccggcaggtgttcagctcagcagccgcgatcggggag

SEQ ID NO: 56013 - DNA, 2942 bp, Zea Mays
gaatcaaaccctagctcgtcgtccgcatcgatttcccctatccatcggatccccaccagcaccaggcgactcgccggaaccctagctagccgcagatcctacgcgccgtgcgcgcggccgcctccatggcgactctcaaggatctcctaccggcgcccaagacgtcggcgtccaccttctacgaccatagtagcgacccctggttcaaggagcggtacggcggggagtcggcgcaggcggccgcggcagcgaggcccgcggccgccgccaggctcatgcctccgtacgggaagcgagcggggttcgtgccgagacggccggaggacttcggggatggcggcgccttcccggagatccacgtcgcgcagtacccgctcggcatgggacgccgcgacgataagggcgggtccaggatccttgcgctcaccgtcgacgcacacgggagcgtcgccttcgacgccgtcgtcaagcagggggagaacgcaggcaagatcgtctactccaagcatagcgacctcgtgccgaagatagccactgccgattctcaggcgatgtcagacgacgacgaggagcagaagcagatcgaggagaccactgaacggaccaaggccgccttggagaaggttgttaacgtccgcctctctgcagtgcagctcagcccaagaacgtgccgactcatgattctgagtccaagttcatcaagtataagccgtcccagcaatccgcggccttcaattcaggtgcaaaggagaggatcattaggatgtcagaggtggcggtggatcctcttgagccaccaaaattcaagcacaagcgtgtgccccgggcatctgggtcaccacctgtgccagtgatgcactcgcctccaaggccggttactgtgaaggatcagcaggattggaagatcccgccttgcatttcaaattggaaaaacccaaagggttacacgatcccacttgataaaaggttggcggctgatgggagggggctgcaggaggtgcagatcaacgataactttgcaaagctttctgaagcattgtatgtggcagagcagaaggcgagggaggcagtacagatgcgctccaaggttcagagggaacttatgctgaaggagaaggagaggaaggagcaagagctaagggctcttgctcagagggcacgcatggagaggactggtgccccacctgcaccatcaggtgtgcctgctggtggcggcaggggagcagttgagggcttgaggctgtcgatgaagatatggatatggagcgaccacgtgaaccgcgtgagcagcgcagggagtctagagaagagagggaagcacggattgagcgtgataaaattcgtgaggagcgcaggcgcgagagggagagggagaggaggctggaagccaaggatgctgcaatgggcaagaagagtaagatcacgagagacagggatcgtgatatcagcgagaagattgctcttggtatggcaagcactggtgctgcaaaagctggtgaggtcatgtatgaccagcggttgttcaaccaggacaagggaatggactctggctttgccacagatgatcagtacaacatctactctaagggtctcttcacagcgcagtccactatgtccacgctatacaggcctaagaaggacggggattctgatgtatacggtgatgcagatgaacagttggagaaggttatgaagacagagaggttcaagcctgacaagggatttactggtgcttcagagaggactggcaagcgagacaggcctgttgaatttgataagcaggaagaaaatgatccgttcggtctggatcagttcttgactgaggtgaagaagggtaagaaagctgtggagaagattggcggcggaggaagcatgaaggcgagtggtggatcctcaatgagggatgattatgatggtggatcagggaggtcgcgcattaattttgagagggggcgctgagatgtgggtggatctacgtactgtgaatacacgaattgtcagcagcctgtattgaaatgactgaactgttatgatcgttacttcaagatgtgggtggatctacatactgtgaatacacgaactgtcagcagcctgtattgaaatgactgaactgttatgatcgttacttcaagtcatgtggggactgtggagtgtggacagtctggtcaattgttggttggctgcaattttggggcacccattttgcccatgtgaccatgtgaattactgaatgcagctcatgtctcttatgcacgatccaccttgctgacgaatcatctgaaccctgcgatcaaagtaagtttgcaagaaagggtaccctatacttttggacgacattgttaaattagatctgttattttattgttagataactgtgagctcttaatacgctacaatctgtgttttccaacaaatagatcctccttgcgatcctgggtgaccagggagctcgacaggaattttattaattatgaactttcttcagctagtcgctcatgtatgtaatatcaggctgcaccacatatgtatgctaagcaagttgtgccatggttaggattacgacgttctgtaaaaaaaatggtgagttaaatgtgctggaggttcattaatttatgtgagggtttcatttaggtgcatcaactttaaaagttgatcttgagatccataaacttttaaagttattcacagcaggttcataccggtccatgtgtacatctagcagtgacatgcatgctgattgggcagttgctggtaggggtgaaaatggctaaggtatacctgtcgacgagtaccggatactaaaatacctttttttaagatgcggattcagatacttttatatttgagacggatacgagcaatacttggatagtacaatttcgaatttgggtcgtattcggagcgagaaataaccggtaaatatgtggatattcagatcggat

SEQ ID NO: 56014 - DNA, 2935 bp, Zea Mays
gaatcaaaccctagctcgtcgtccgcatcgatttcccctatccatcggatccccaccagcaccaggcgactcgccggaaccctagctagccgcagatcctacgcgccgtgcgcgcggccgcctccatggcgactctcaaggatctcctaccggcgcccaagacgtcggcgtccaccttctacgaccatagtagcgacccctggttcaaggagcggtacggcggggagtcggcgcaggcggccgcggcagcgaggcccgcggccgccgccaggctcatgcctccgtacgggaagcgagcggggttcgtgccgagacggccggaggacttcggggatggcggcgccttcccggagatccacgtcgcgcagtacccgctcggcatgggacgccgcgacgataagggcgggtccaggatccttgcgctcaccgtcgacgcacacgggagcgtcgccttcgacgccgtcgtcaagcagggggagaacgcaggcaagatcgtctactccaagcatagcgacctcgtgccgaagatagccactgccgattctcaggcgatgtcagacgacgacgaggagcagaagcagatcgaggagaccactgaacggaccaaggccgccttggagaaggttgttaacgtccgcctctctgcagtgcagctcagcccaagaacgtgccgactcatgattctgagtccaagttcatcaagtataagccgtcccagcaatccgcggccttcaattcaggtgcaaaggagaggatcattaggatgtcagaggtggcggtggatcctcttgagccaccaaaattcaagcacaagcgtgtgccccgggcatctgggtcaccacctgtgccagtgatgcactcgcctccaaggccggttactgtgaaggatcagcaggattggaagatcccgccttgcatttcaaattggaaaaacccaaagggttacacgatcccacttgataaaaggttggcggctgatgggagggggctgcaggaggtgcagatcaacgataactttgcaaagctttctgaagcattgtatgtggcagagcagaaggcgagggaggcagtacagatgcgctccaaggttcagagggaacttatgctgaaggagaaggagaggaaggagcaagagctaagggctcttgctcagagggcacgcatggagaggactggtgccccacctgcaccatcaggtgtgcctgctggtggcggcaggggagcagttgagggcttgaggctgtcgatgaagatatggatatggagcgaccacgtgaaccgcgtgagcagcgcagggagtctagagaagagagggaagcacggattgagcgtgataaaattcgtgaggagcgcaggcgcgagagggagagggagaggaggctggaagccaaggatgctgcaatgggcaagaagagtaagatcacgagagacagggatcgtgatatcagcgagaagattgctcttggtatggcaagcactggtgctgcaaaagctggtgaggtcatgtatgaccagcggttgttcaaccaggacaagggaatggactctggctttgccacagatgatcagtacaacatctactctaagggtctcttcacagcgcagtccactatgtccacgctatacaggcctaagaaggacggggattctgatgtatacggtgatgcagatgaacagttggagaaggttatgaagacagagaggttcaagcctgacaagggatttactggtgcttcagagaggactggcaagcgagacaggcctgttgaatttgataagcaggaagaaaatgatccgttcggtctggatcagttcttgactgaggtgaagaagggtaagaaagctgtggagaagattggcggcggaggaagcatgaaggcgagtggtggatcctcaatgagggatgattatgatggtggatcagggaggtcgcgcattaattttgagagggggcgctgagatgtgggtggatctacgtactgtgaatacacgaattgtcagcagcctgtattgaaatgactgaactgttatgatcgttacttcaagatgtgggtggatctacatactgtgaatacacgaactgtcagcagcctgtattgaaatgactgaactgttatgatcgttacttcaagcaggtacaaacagatacgcaaacctacacatgctttctatatccacaaaccttgatcataatgctgctataacagctggcttaacctgcggctgcagctcatgtctcttatgcacgatccaccttgctgacgaatcatctgaaccctgcgatcaaagtaagtttgcaagaaagggtaccctatacttttggacgacattgttaaattagatctgttattttattgttagataactgtgagctcttaatacgctacaatctgtgttttccaacaaatagatcctccttgcgatcctgggtgaccagggagctcgacaggaattttattaattatgaactttcttcagctagtcgctcatgtatgtaatatcaggctgcaccacatatgtatgctaagcaagttgtgccatggttaggattacgacgttctgtaaaaaaaatggtgagttaaatgtgctggaggttcattaatttatgtgagggtttcatttaggtgcatcaactttaaaagttgatcttgagatccataaacttttaaagttattcacagcaggttcataccggtccatgtgtacatctagcagtgacatgcatgctgattgggcagttgctggtaggggtgaaaatggctaaggtatacctgtcgacgagtaccggatactaaaatacctttttttaagatgcggattcagatacttttatatttgagacggatacgagcaatacttggatagtacaatttcgaatttgggtcgtattcggagcgagaaataaccggtaaatatgtggatattcagatcggat

SEQ ID NO: 56015 - DNA, 2752 bp, Zea Mays
gaatcaaaccctagctcgtcgtccgcatcgatttcccctatccatcggatccccaccagcaccaggcgactcgccggaaccctagctagccgcagatcctacgcgccgtgcgcgcggccgcctccatggcgactctcaaggatctcctaccggcgcccaagacgtcggcgtccaccttctacgaccatagtagcgacccctggttcaaggagcggtacggcggggagtcggcgcaggcggccgcggcagcgaggcccgcggccgccgccaggctcatgcctccgtacgggaagcgagcggggttcgtgccgagacggccggaggacttcggggatggcggcgccttcccggagatccacgtcgcgcagtacccgctcggcatgggacgccgcgacgataagggcgggtccaggatccttgcgctcaccgtcgacgcacacgggagcgtcgccttcgacgccgtcgtcaagcagggggagaacgcaggcaagatcgtctactccaagcatagcgacctcgtgccgaagatagccactgccgattctcaggcgatgtcagacgacgacgaggagcagaagcagatcgaggagaccactgaacggaccaaggccgccttggagaaggttgttaacgtccgcctctctgcagtgcagctcagcccaagaacgtgccgactcatgattctgagtccaagttcatcaagtataagccgtcccagcaatccgcggccttcaattcaggtgcaaaggagaggatcattaggatgtcagaggtggcggtggatcctcttgagccaccaaaattcaagcacaagcgtgtgccccgggcatctgggtcaccacctgtgccagtgatgcactcgcctccaaggccggttactgtgaaggatcagcaggattggaagatcccgccttgcatttcaaattggaaaaacccaaagggttacacgatcccacttgataaaaggttggcggctgatgggagggggctgcaggaggtgcagatcaacgataactttgcaaagctttctgaagcattgtatgtggcagagcagaaggcgagggaggcagtacagatgcgctccaaggttcagagggaacttatgctgaaggagaaggagaggaaggagcaagagctaagggctcttgctcagagggcacgcatggagaggactggtgccccacctgcaccatcaggtgtgcctgctggtggcggcaggggagcagttgagggcttgaggctgtcgatgaagatatggatatggagcgaccacgtgaaccgcgtgagcagcgcagggagtctagagaagagagggaagcacggattgagcgtgataaaattcgtgaggagcgcaggcgcgagagggagagggagaggaggctggaagccaaggatgctgcaatgggcaagaagagtaagatcacgagagacagggatcgtgatatcagcgagaagattgctcttggtatggcaagcactggtgctgcaaaagctggtgaggtcatgtatgaccagcggttgttcaaccaggacaagggaatggactctggctttgccacagatgatcagtacaacatctactctaagggtctcttcacagcgcagtccactatgtccacgctatacaggcctaagaaggacggggattctgatgtatacggtgatgcagatgaacagttggagaaggttatgaagacagagaggttcaagcctgacaagggatttactggtgcttcagagaggactggcaagcgagacaggcctgttgaatttgataagcaggaagaaaatgatccgttcggtctggatcagttcttgactgaggtgaagaagggtaagaaagctgtggagaagattggcggcggaggaagcatgaaggcgagtggtggatcctcaatgagggatgattatgatggtggatcagggaggtcgcgcattaattttgagagggggcgctgagatgtgggtggatctacgtactgtgaatacacgaattgtcagcagcctgtattgaaatgactgaactgttatgatcgttacttcaagctcatgtctcttatgcacgatccaccttgctgacgaatcatctgaaccctgcgatcaaagtaagtttgcaagaaagggtaccctatacttttggacgacattgttaaattagatctgttattttattgttagataactgtgagctcttaatacgctacaatctgtgttttccaacaaatagatcctccttgcgatcctgggtgaccagggagctcgacaggaattttattaattatgaactttcttcagctagtcgctcatgtatgtaatatcaggctgcaccacatatgtatgctaagcaagttgtgccatggttaggattacgacgttctgtaaaaaaaatggtgagttaaatgtgctggaggttcattaatttatgtgagggtttcatttaggtgcatcaactttaaaagttgatcttgagatccataaacttttaaagttattcacagcaggttcataccggtccatgtgtacatctagcagtgacatgcatgctgattgggcagttgctggtaggggtgaaaatggctaaggtatacctgtcgacgagtaccggatactaaaatacctttttttaagatgcggattcagatacttttatatttgagacggatacgagcaatacttggatagtacaatttcgaatttgggtcgtattcggagcgagaaataaccggtaaatatgtggatattcagatcggat

SEQ ID NO: 56016 - DNA, 2858 bp, Zea Mays
aacctatcattagaatcaaaccctagctcgtcgtccgcatcgatttcccctatccatcggatccccaccagcaccaggcgactcgccggaaccctagctagccgcagatcctacgcgccgtgcgcgcggccgcctccatggcgactctcaaggatctcctaccggcgcccaagacgtcggcgtccaccttctacgaccatagtagcgacccctggttcaaggagcggtacggcggggagtcggcgcaggcggccgcggcagcgaggcccgcggccgccgccaggctcatgcctccgtacgggaagcgagcggggttcgtgccgagacggccggaggacttcggggatggcggcgccttcccggagatccacgtcgcgcagtacccgctcggcatgggacgccgcgacgataagggcgggtccaggatccttgcgctcaccgtcgacgcacacgggagcgtcgccttcgacgccgtcgtcaagcagggggagaacgcaggcaagatcgtctactccaagcatagcgacctcgtgccgaagatagccactgccgattctcaggcgatgtcagacgacgacgaggagcagaagcagatcgaggagaccactgaacggaccaaggccgccttggagaaggttgttaacgtccgcctctctgcagtgcagctcagcccaagaacgtgccgactcatgattctgagtccaagttcatcaagtataagccgtcccagcaatccgcggccttcaattcaggtgcaaaggagaggatcattaggatgtcagaggtggcggtggatcctcttgagccaccaaaattcaagcacaagcgtgtgccccgggcatctgggtcaccacctgtgccagtgatgcactcgcctccaaggccggttactgtgaaggatcagcaggattggaagatcccgccttgcatttcaaattggaaaaacccaaagggttacacgatcccacttgataaaaggttggcggctgatgggagggggctgcaggaggtgcagatcaacgataactttgcaaagctttctgaagcattgtatgtggcagagcagaaggcgagggaggcagtacagatgcgctccaaggttcagagggaacttatgctgaaggagaaggagaggaaggagcaagagctaagggctcttgctcagagggcacgcatggagaggactggtgccccacctgcaccatcaggtgtgcctgctggtggcggcaggggagcagttgagggcttgaggctgtcgatgaagatatggatatggagcgaccacgtgaaccgcgtgagcagcgcagggagtctagagaagagagggaagcacggattgagcgtgataaaattcgtgaggagcgcaggcgcgagagggagagggagaggaggctggaagccaaggatgctgcaatgggcaagaagagtaagatcacgagagacagggatcgtgatatcagcgagaagattgctcttggtatggcaagcactggtgctgcaaaagctggtgaggtcatgtatgaccagcggttgttcaaccaggacaagggaatggactctggctttgccacagatgatcagtacaacatctactctaagggtctcttcacagcgcagtccactatgtccacgctatacaggcctaagaaggacggggattctgatgtatacggtgatgcagatgaacagttggagaaggttatgaagacagagaggttcaagcctgacaagggatttactggtgcttcagagaggactggcaagcgagacaggcctgttgaatttgataagcaggaagaaaatgatccgttcggtctggatcagttcttgactgaggtgaagaagggtaagaaagctgtggagaagattggcggcggaggaagcatgaaggcgagtggtggatcctcaatgagggatgattatgatggtggatcagggaggtcgcgcattaattttgagagggggcgctgagatgtgggtggatctacgtactgtgaatacacgaattgtcagcagcctgtattgaaatgactgaactgttatgatcgttacttcaaggtacaaacagatacgcaaacctacacatgctttctatatccacaaaccttgatcataatgctgctataacagctggcttaacctgcggctgcagctcatgtctcttatgcacgatccaccttgctgacgaatcatctgaaccctgcgatcaaagtaagtttgcaagaaagggtaccctatacttttggacgacattgttaaattagatctgttattttattgttagataactgtgagctcttaatacgctacaatctgtgttttccaacaaatagatcctccttgcgatcctgggtgaccagggagctcgacaggaattttattaattatgaactttcttcagctagtcgctcatgtatgtaatatcaggctgcaccacatatgtatgctaagcaagttgtgccatggttaggattacgacgttctgtaaaaaaaatggtgagttaaatgtgctggaggttcattaatttatgtgagggtttcatttaggtgcatcaactttaaaagttgatcttgagatccataaacttttaaagttattcacagcaggttcataccggtccatgtgtacatctagcagtgacatgcatgctgattgggcagttgctggtaggggtgaaaatggctaaggtatacctgtcgacgagtaccggatactaaaatacctttttttaagatgcggattcagatacttttatatttgagacggatacgagcaatacttggatagtacaatttcgaatttgggtcgtattcggagcgagaaataaccggtaaatatgtggatattcagatcggat

SEQ ID NO: 56017 - DNA, 3366 bp, Zea Mays
aaaacctatcattagaatcaaaccctagctcgtcgtccgcatcgatttcccctatccatcggatccccaccagcaccaggcgactcgccggaaccctagctagccgcagatcctacgcgccgtgcgcgcggccgcctccatggcgactctcaaggatctcctaccggcgcccaagacgtcggcgtccaccttctacgaccatagtagcgacccctggttcaaggagcggtacggcggggagtcggcgcaggcggccgcggcagcgaggcccgcggccgccgccaggctcatgcctccgtacgggaagcgagcggggttcgtgccgagacggccggaggacttcggggatggcggcgccttcccggagatccacgtcgcgcagtacccgctcggcatgggacgccgcgacgataagggcgggtccaggatccttgcgctcaccgtcgacgcacacgggagcgtcgccttcgacgccgtcgtcaagcagggggagaacgcaggcaagatcgtctactccaagcatagcgacctcgtgccgaagatagccactgccgattctcaggcgatgtcagacgacgacgaggagcagaagcagatcgaggagaccactgaacggaccaaggccgccttggagaaggttgttaacgtccgcctctctgcagtgcagctcagcccaagaacgtgccgactcatgattctgagtccaagttcatcaagtataagccgtcccagcaatccgcggccttcaattcaggtgcaaaggagaggatcattaggatgtcagaggtggcggtggatcctcttgagccaccaaaattcaagcacaagcgtgtgccccgggcatctgggtcaccacctgtgccagtgatgcactcgcctccaaggccggttactgtgaaggatcagcaggattggaagatcccgccttgcatttcaaattggaaaaacccaaagggttacacgatcccacttgataaaaggttggcggctgatgggagggggctgcaggaggtgcagatcaacgataactttgcaaagctttctgaagcattgtatgtggcagagcagaaggcgagggaggcagtacagatgcgctccaaggttcagagggaacttatgctgaaggagaaggagaggaaggagcaagagctaagggctcttgctcagagggcacgcatggagaggactggtgccccacctgcaccatcaggtgtgcctgctggtggcggcaggggagcagttgagggcttgaggctgtcgatgaagatatggatatggagcgaccacgtgaaccgcgtgagcagcgcagggagtctagagaagagagggaagcacggattgagcgtgataaaattcgtgaggagcgcaggcgcgagagggagagggagaggaggctggaagccaaggatgctgcaatgggcaagaagagtaagatcacgagagacagggatcgtgatatcagcgagaagattgctcttggtatggcaagcactggtgctgcaaaagctggtgaggtcatgtatgaccagcggttgttcaaccaggacaagggaatggactctggctttgccacagatgatcagtacaacatctactctaagggtctcttcacagcgcagtccactatgtccacgctatacaggcctaagaaggacggggattctgatgtatacggtgatgcagatgaacagttggagaaggttatgaagacagagaggttcaagcctgacaagggatttactggtgcttcagagaggactggcaagcgagacaggcctgttgaatttgataagcaggaagaaaatgatccgttcggtctggatcagttcttgactgaggtgaagaagggtaagaaagctgtggagaagattggcggcggaggaagcatgaaggcgagtggtggatcctcaatgagggatgattatgatggtggatcagggaggtcgcgcattaattttgagagggggcgctgaggtatttgctctgcttctgcagtttttgtctgctttctcgaatattttctagcaggatgtcattagaagctgaactctgataagaaagagtgtggcacctgtactgttatagctcgtgtgcctactttcaatggttgtgctaaatagtgtgtaatatatggatcctatgatgtctaagtactatgtgtgtacctgttcattataggatctatgaactttgtttagtcatgttccatcaatttttatattacatgttattgggctgtgagatttcatcagttacccttctgggatatggatggactcagtgtggctatttgttgcctgatgtgggtggatctacgtactgtgaatacacgaattgtcagcagcctgtattgaaatgactgaactgttatgatcgttacttcaagatgtgggtggatctacatactgtgaatacacgaactgtcagcagcctgtattgaaatgactgaactgttatgatcgttacttcaaggtacaaacagatacgcaaacctattttggaaaattattgtagtgggaagtgggatctgaagatgtgtcttatactcttcttcagtcatgtggggactgtggagtgtggacagtctggtcaattgttggttggctgcaattttggggcacccattttgcccatgtgaccatgtgaattactgaatgcagctcatgtctcttatgcacgatccaccttgctgacgaatcatctgaaccctgcgatcaaagtaagtttgcaagaaagggtaccctatacttttggacgacattgttaaattagatctgttattttattgttagataactgtgagctcttaatacgctacaatctgtgttttccaacaaatagatcctccttgcgatcctgggtgaccagggagctcgacaggaattttattaattatgaactttcttcagctagtcgctcatgtatgtaatatcaggctgcaccacatatgtatgctaagcaagttgtgccatggttaggattacgacgttctgtaaaaaaaatggtgagttaaatgtgctggaggttcattaatttatgtgagggtttcatttaggtgcatcaactttaaaagttgatcttgagatccataaacttttaaagttattcacagcaggttcataccggtccatgtgtacatctagcagtgacatgcatgctgattgggcagttgctggtaggggtgaaaatggctaaggtatacctgtcgacgagtaccggatactaaaatacctttttttaagatgcggattcagatacttttatatttgagacggatacgagcaatacttggatagtacaatttcgaatttgggtcgtattcggagcgagaaataaccggtaaatatgtggatattcagatcggat

SEQ ID NO: 56018 - DNA, 2729 bp, Zea Mays
aaaaaacctatcattagaatcaaaccctagctcgtcgtccgcatcgatttcccctatccatcggatccccaccagcaccaggcgactcgccggaaccctagctagccgcagatcctacgcgccgtgcgcgcggccgcctccatggcgactctcaaggatctcctaccggcgcccaagacgtcggcgtccaccttctacgaccatagtagcgacccctggttcaaggagcggtacggcggggagtcggcgcaggcggccgcgacgacgacgaggagcagaagcagatcgaggagaccactgaacggaccaaggccgccttggagaaggttgttaacgtccgcctctctgcagtgcagctcagcccaagaacgtgccgactcatgattctgagtccaagttcatcaagtataagccgtcccagcaatccgcggccttcaattcaggtgcaaaggagaggatcattaggatgtcagaggtggcggtggatcctcttgagccaccaaaattcaagcacaagcgtgtgccccgggcatctgggtcaccacctgtgccagtgatgcactcgcctccaaggccggttactgtgaaggatcagcaggattggaagatcccgccttgcatttcaaattggaaaaacccaaagggttacacgatcccacttgataaaaggttggcggctgatgggagggggctgcaggaggtgcagatcaacgataactttgcaaagctttctgaagcattgtatgtggcagagcagaaggcgagggaggcagtacagatgcgctccaaggttcagagggaacttatgctgaaggagaaggagaggaaggagcaagagctaagggctcttgctcagagggcacgcatggagaggactggtgccccacctgcaccatcaggtgtgcctgctggtggcggcaggggagcagttgagggcttgaggctgtcgatgaagatatggatatggagcgaccacgtgaaccgcgtgagcagcgcagggagtctagagaagagagggaagcacggattgagcgtgataaaattcgtgaggagcgcaggcgcgagagggagagggagaggaggctggaagccaaggatgctgcaatgggcaagaagagtaagatcacgagagacagggatcgtgatatcagcgagaagattgctcttggtatggcaagcactggtgctgcaaaagctggtgaggtcatgtatgaccagcggttgttcaaccaggacaagggaatggactctggctttgccacagatgatcagtacaacatctactctaagggtctcttcacagcgcagtccactatgtccacgctatacaggcctaagaaggacggggattctgatgtatacggtgatgcagatgaacagttggagaaggttatgaagacagagaggttcaagcctgacaagggatttactggtgcttcagagaggactggcaagcgagacaggcctgttgaatttgataagcaggaagaaaatgatccgttcggtctggatcagttcttgactgaggtgaagaagggtaagaaagctgtggagaagattggcggcggaggaagcatgaaggcgagtggtggatcctcaatgagggatgattatgatggtggatcagggaggtcgcgcattaattttgagagggggcgctgagatgtgggtggatctacgtactgtgaatacacgaattgtcagcagcctgtattgaaatgactgaactgttatgatcgttacttcaagatgtgggtggatctacatactgtgaatacacgaactgtcagcagcctgtattgaaatgactgaactgttatgatcgttacttcaaggtacaaacagatacgcaaacctattttggaaaattattgtagtgggaagtgggatctgaagatgtgtcttatactcttcttcagtcatgtggggactgtggagtgtggacagtctggtcaattgttggttggctgcaattttggggcacccattttgcccatgtgaccatgtgaattactgaatgcagctcatgtctcttatgcacgatccaccttgctgacgaatcatctgaaccctgcgatcaaagtaagtttgcaagaaagggtaccctatacttttggacgacattgttaaattagatctgttattttattgttagataactgtgagctcttaatacgctacaatctgtgttttccaacaaatagatcctccttgcgatcctgggtgaccagggagctcgacaggaattttattaattatgaactttcttcagctagtcgctcatgtatgtaatatcaggctgcaccacatatgtatgctaagcaagttgtgccatggttaggattacgacgttctgtaaaaaaaatggtgagttaaatgtgctggaggttcattaatttatgtgagggtttcatttaggtgcatcaactttaaaagttgatcttgagatccataaacttttaaagttattcacagcaggttcataccggtccatgtgtacatctagcagtgacatgcatgctgattgggcagttgctggtaggggtgaaaatggctaaggtatacctgtcgacgagtaccggatactaaaatacctttttttaagatgcggattcagatacttttatatttgagacggatacgagcaatacttggatagtacaatttcgaatttgggtcgtattcggagcgagaaataaccggtaaatatgtggatattcagatcggat

SEQ ID NO: 56019 - DNA, 2947 bp, Zea Mays
aaaaaaacctatcattagaatcaaaccctagctcgtcgtccgcatcgatttcccctatccatcggatccccaccagcaccaggcgactcgccggaaccctagctagccgcagatcctacgcgccgtgcgcgcggccgcctccatggcgactctcaaggatctcctaccggcgcccaagacgtcggcgtccaccttctacgaccatagtagcgacccctggttcaaggagcggtacggcggggagtcggcgcaggcggccgcggcagcgaggcccgcggccgccgccaggctcatgcctccgtacgggaagcgagcggggttcgtgccgagacggccggaggacttcggggatggcggcgccttcccggagatccacgtcgcgcagtacccgctcggcatgggacgccgcgacgataagggcgggtccaggatccttgcgctcaccgtcgacgcacacgggagcgtcgccttcgacgccgtcgtcaagcagggggagaacgcaggcaagatcgtctactccaagcatagcgacctcgtgccgaagatagccactgccgattctcaggcgatgtcagacgacgacgaggagcagaagcagatcgaggagaccactgaacggaccaaggccgccttggagaaggttgttaacgtccgcctctctgcagtgcagctcagcccaagaacgtgccgactcatgattctgagtccaagttcatcaagtataagccgtcccagcaatccgcggccttcaattcaggtgcaaaggagaggatcattaggatgtcagaggtggcggtggatcctcttgagccaccaaaattcaagcacaagcgtgtgccccgggcatctgggtcaccacctgtgccagtgatgcactcgcctccaaggccggttactgtgaaggatcagcaggattggaagatcccgccttgcatttcaaattggaaaaacccaaagggttacacgatcccacttgataaaaggttggcggctgatgggagggggctgcaggaggtgcagatcaacgataactttgcaaagctttctgaagcattgtatgtggcagagcagaaggcgagggaggcagtacagatgcgctccaaggttcagagggaacttatgctgaaggagaaggagaggaaggagcaagagctaagggctcttgctcagagggcacgcatggagaggactggtgccccacctgcaccatcaggtgtgcctgctggtggcggcaggggagcagttgagggcttgaggctgtcgatgaagatatggatatggagcgaccacgtgaaccgcgtgagcagcgcagggagtctagagaagagagggaagcacggattgagcgtgataaaattcgtgaggagcgcaggcgcgagagggagagggagaggaggctggaagccaaggatgctgcaatgggcaagaagagtaagatcacgagagacagggatcgtgatatcagcgagaagattgctcttggtatggcaagcactggtgctgcaaaagctggtgaggtcatgtatgaccagcggttgttcaaccaggacaagggaatggactctggctttgccacagatgatcagtacaacatctactctaagggtctcttcacagcgcagtccactatgtccacgctatacaggcctaagaaggacggggattctgatgtatacggtgatgcagatgaacagttggagaaggttatgaagacagagaggttcaagcctgacaagggatttactggtgcttcagagaggactggcaagcgagacaggcctgttgaatttgataagcaggaagaaaatgatccgttcggtctggatcagttcttgactgaggtgaagaagggtaagaaagctgtggagaagattggcggcggaggaagcatgaaggcgagtggtggatcctcaatgagggatgattatgatggtggatcagggaggtcgcgcattaattttgagagggggcgctgagatgtgggtggatctacgtactgtgaatacacgaattgtcagcagcctgtattgaaatgactgaactgttatgatcgttacttcaagatacgcaaacctattttggaaaattattgtagtgggaagtgggatctgaagatgtgtcttatactcttcttcagtcatgtggggactgtggagtgtggacagtctggtcaattgttggttggctgcaattttggggcacccattttgcccatgtgaccatgtgaattactgaatgcagctcatgtctcttatgcacgatccaccttgctgacgaatcatctgaaccctgcgatcaaagtaagtttgcaagaaagggtaccctatacttttggacgacattgttaaattagatctgttattttattgttagataactgtgagctcttaatacgctacaatctgtgttttccaacaaatagatcctccttgcgatcctgggtgaccagggagctcgacaggaattttattaattatgaactttcttcagctagtcgctcatgtatgtaatatcaggctgcaccacatatgtatgctaagcaagttgtgccatggttaggattacgacgttctgtaaaaaaaatggtgagttaaatgtgctggaggttcattaatttatgtgagggtttcatttaggtgcatcaactttaaaagttgatcttgagatccataaacttttaaagttattcacagcaggttcataccggtccatgtgtacatctagcagtgacatgcatgctgattgggcagttgctggtaggggtgaaaatggctaaggtatacctgtcgacgagtaccggatactaaaatacctttttttaagatgcggattcagatacttttatatttgagacggatacgagcaatacttggatagtacaatttcgaatttgggtcgtattcggagcgagaaataaccggtaaatatgtggatattcagatcggat

SEQ ID NO: 56020 - DNA, 3109 bp, Zea Mays
caattatatgtcagtttttcatataggcgaattgtaacaaaattttaaaatagtaatgacataggtaaaaaaacctatcattagaatcaaaccctagctcgtcgtccgcatcgatttcccctatccatcggatccccaccagcaccaggcgactcgccggaaccctagctagccgcagatcctacgcgccgtgcgcgcggccgcctccatggcgactctcaaggatctcctaccggcgcccaagacgtcggcgtccaccttctacgaccatagtagcgacccctggttcaaggagcggtacggcggggagtcggcgcaggcggccgcggcagcgaggcccgcggccgccgccaggctcatgcctccgtacgggaagcgagcggggttcgtgccgagacggccggaggacttcggggatggcggcgccttcccggagatccacgtcgcgcagtacccgctcggcatgggacgccgcgacgataagggcgggtccaggatccttgcgctcaccgtcgacgcacacgggagcgtcgccttcgacgccgtcgtcaagcagggggagaacgcaggcaagatcgtctactccaagcatagcgacctcgtgccgaagatagccactgccgattctcaggcgatgtcagacgacgacgaggagcagaagcagatcgaggagaccactgaacggaccaaggccgccttggagaaggttgttaacgtccgcctctctgcagtgcagctcagcccaagaacgtgccgactcatgattctgagtccaagttcatcaagtataagccgtcccagcaatccgcggccttcaattcaggtgcaaaggagaggatcattaggatgtcagaggtggcggtggatcctcttgagccaccaaaattcaagcacaagcgtgtgccccgggcatctgggtcaccacctgtgccagtgatgcactcgcctccaaggccggttactgtgaaggatcagcaggattggaagatcccgccttgcatttcaaattggaaaaacccaaagggttacacgatcccacttgataaaaggttggcggctgatgggagggggctgcaggaggtgcagatcaacgataactttgcaaagctttctgaagcattgtatgtggcagagcagaaggcgagggaggcagtacagatgcgctccaaggttcagagggaacttatgctgaaggagaaggagaggaaggagcaagagctaagggctcttgctcagagggcacgcatggagaggactggtgccccacctgcaccatcaggtgtgcctgctggtggcggcaggggagcagttgagggcttgaggctgtcgatgaagatatggatatggagcgaccacgtgaaccgcgtgagcagcgcagggagtctagagaagagagggaagcacggattgagcgtgataaaattcgtgaggagcgcaggcgcgagagggagagggagaggaggctggaagccaaggatgctgcaatgggcaagaagagtaagatcacgagagacagggatcgtgatatcagcgagaagattgctcttggtatggcaagcactggtgctgcaaaagctggtgaggtcatgtatgaccagcggttgttcaaccaggacaagggaatggactctggctttgccacagatgatcagtacaacatctactctaagggtctcttcacagcgcagtccactatgtccacgctatacaggcctaagaaggacggggattctgatgtatacggtgatgcagatgaacagttggagaaggttatgaagacagagaggttcaagcctgacaagggatttactggtgcttcagagaggactggcaagcgagacaggcctgttgaatttgataagcaggaagaaaatgatccgttcggtctggatcagttcttgactgaggtgaagaagggtaagaaagctgtggagaagattggcggcggaggaagcatgaaggcgagtggtggatcctcaatgagggatgattatgatggtggatcagggaggtcgcgcattaattttgagagggggcgctgagatgtgggtggatctacgtactgtgaatacacgaattgtcagcagcctgtattgaaatgactgaactgttatgatcgttacttcaagatgtgggtggatctacatactgtgaatacacgaactgtcagcagcctgtattgaaatgactgaactgttatgatcgttacttcaaggtacaaacagatacgcaaacctattttggaaaattattgtagtgggaagtgggatctgaagatgtgtcttatactcttcttcagtcatgtggggactgtggagtgtggacagtctggtcaattgttggttggctgcaattttggggcacccattttgcccatgtgaccatgtgaattactgaatgcagctcatgtctcttatgcacgatccaccttgctgacgaatcatctgaaccctgcgatcaaagtaagtttgcaagaaagggtaccctatacttttggacgacattgttaaattagatctgttattttattgttagataactgtgagctcttaatacgctacaatctgtgttttccaacaaatagatcctccttgcgatcctgggtgaccagggagctcgacaggaattttattaattatgaactttcttcagctagtcgctcatgtatgtaatatcaggctgcaccacatatgtatgctaagcaagttgtgccatggttaggattacgacgttctgtaaaaaaaatggtgagttaaatgtgctggaggttcattaatttatgtgagggtttcatttaggtgcatcaactttaaaagttgatcttgagatccataaacttttaaagttattcacagcaggttcataccggtccatgtgtacatctagcagtgacatgcatgctgattgggcagttgctggtaggggtgaaaatggctaaggtatacctgtcgacgagtaccggatactaaaatacctttttttaagatgcggattcagatacttttatatttgagacggatacgagcaatacttggatagtacaatttcgaatttgggtcgtattcggagcgagaaataaccggtaaatatgtggatattcagatcggat

SEQ ID NO: 56021 - DNA, 3488 bp, Zea Mays
caattatatgtcagtttttcatataggcgaattgtaacaaaattttaaaatagtaatgacataggtaaaaaaacctatcattagaatcaaaccctagctcgtcgtccgcatcgatttcccctatccatcggatccccaccagcaccaggcgactcgccggaaccctagctagccgcagatcctacgcgccgtgcgcgcggccgcctccatggcgactctcaaggatctcctaccggcgcccaagacgtcggcgtccaccttctacgaccatagtagcgacccctggttcaaggagcggtacggcggggagtcggcgcaggcggccgcggcagcgaggcccgcggccgccgccaggctcatgcctccgtacgggaagcgagcggggttcgtgccgagacggccggaggacttcggggatggcggcgccttcccggagatccacgtcgcgcagtacccgctcggcatgggacgccgcgacgataagggcgggtccaggatccttgcgctcaccgtcgacgcacacgggagcgtcgccttcgacgccgtcgtcaagcagggggagaacgcaggcaagatcgtctactccaagcatagcgacctcgtgccgaagatagccactgccgattctcaggcgatgtcagacgacgacgaggagcagaagcagatcgaggagaccactgaacggaccaaggccgccttggagaaggttgttaacgtccgcctctctgcagtgcagctcagcccaagaacgtgccgactcatgattctgagtccaagttcatcaagtataagccgtcccagcaatccgcggccttcaattcaggtgcaaaggagaggatcattaggatgtcagaggtggcggtggatcctcttgagccaccaaaattcaagcacaagcgtgtgccccgggcatctgggtcaccacctgtgccagtgatgcactcgcctccaaggccggttactgtgaaggatcagcaggattggaagatcccgccttgcatttcaaattggaaaaacccaaagggttacacgatcccacttgataaaaggttggcggctgatgggagggggctgcaggaggtgcagatcaacgataactttgcaaagctttctgaagcattgtatgtggcagagcagaaggcgagggaggcagtacagatgcgctccaaggttcagagggaacttatgctgaaggagaaggagaggaaggagcaagagctaagggctcttgctcagagggcacgcatggagaggactggtgccccacctgcaccatcaggtgtgcctgctggtggcggcaggggagcagttgagggcttgaggctgtcgatgaagatatggatatggagcgaccacgtgaaccgcgtgagcagcgcagggagtctagagaagagagggaagcacggattgagcgtgataaaattcgtgaggagcgcaggcgcgagagggagagggagaggaggctggaagccaaggatgctgcaatgggcaagaagagtaagatcacgagagacagggatcgtgatatcagcgagaagattgctcttggtatggcaagcactggtgctgcaaaagctggtgaggtcatgtatgaccagcggttgttcaaccaggacaagggaatggactctggctttgccacagatgatcagtacaacatctactctaagggtctcttcacagcgcagtccactatgtccacgctatacaggcctaagaaggacggggattctgatgtatacggtgatgcagatgaacagttggagaaggttatgaagacagagaggttcaagcctgacaagggatttactggtgcttcagagaggactggcaagcgagacaggcctgttgaatttgataagcaggaagaaaatgatccgttcggtctggatcagttcttgactgaggtgaagaagggtaagaaagctgtggagaagattggcggcggaggaagcatgaaggcgagtggtggatcctcaatgagggatgattatgatggtggatcagggaggtcgcgcattaattttgagagggggcgctgagatgtgggtggatctacatactgtgaatacacgaactgtcagcagcctgtattgaaatgactgaactgttatgatcgttacttcaaggtaaattttagttctttttggcccttgtaaattttggagtcctggtttctactattggtcctgtaaacctgtccaggatattctcatttatacaacttgttcattttcgaagaacaaaaccttccgagagcatttttttgatagaaatgtatcaagttgctcaacctatatttgttattaaaacctcattagtttctttaaaagaaagtgatatttcctaatgactgagcatctgagcgatgaatgcatggcagatttgctataactattaagaccattgcttgattgtttgcatgagccacggatgactgcaactgaggcaaagcaattactttgcttactgttatgttctagttgagttctattagtagagtatatatctttctgtgcatgcttgctaccacagatttgatgacagtttcgaattataccgaagcaaattctcgtgtatgcaggtacaaacagatacgcaaacctacacatgctttctatatccacaaaccttgatcataatgctgctataacagctggcttaacctgcggctgcagtcatgtggggactgtggagtgtggacagtctggtcaattgttggttggctgcaattttggggcacccattttgcccatgtgaccatgtgaattactgaatgcagctcatgtctcttatgcacgatccaccttgctgacgaatcatctgaaccctgcgatcaaagtaagtttgcaagaaagggtaccctatacttttggacgacattgttaaattagatctgttattttattgttagataactgtgagctcttaatacgctacaatctgtgttttccaacaaatagatcctccttgcgatcctgggtgaccagggagctcgacaggaattttattaattatgaactttcttcagctagtcgctcatgtatgtaatatcaggctgcaccacatatgtatgctaagcaagttgtgccatggttaggattacgacgttctgtaaaaaaaatggtgagttaaatgtgctggaggttcattaatttatgtgagggtttcatttaggtgcatcaactttaaaagttgatcttgagatccataaacttttaaagttattcacagcaggttcataccggtccatgtgtacatctagcagtgacatgcatgctgattgggcagttgctggtaggggtgaaaatggctaaggtatacctgtcgacgagtaccggatactaaaatacctttttttaagatgcggattcagatacttttatatttgagacggatacgagcaatacttggatagtacaatttcgaatttgggtcgtattcggagcgagaaataaccggtaaatatgtggatattcagatcggat

SEQ ID NO: 56022 - DNA, 3600 bp, Zea Mays
gactgcagcgtgcgtgacagtggatacaattatatgtcagtttttcatataggcgaattgtaacaaaattttaaaatagtaatgacataggtaaaaaaacctatcattagaatcaaaccctagctcgtcgtccgcatcgatttcccctatccatcggatccccaccagcaccaggcgactcgccggaaccctagctagccgcagatcctacgcgccgtgcgcgcggccgcctccatggcgactctcaaggatctcctaccggcgcccaagacgtcggcgtccaccttctacgaccatagtagcgacccctggttcaaggagcggtacggcggggagtcggcgcaggcggccgcggcagcgaggcccgcggccgccgccaggctcatgcctccgtacgggaagcgagcggggttcgtgccgagacggccggaggacttcggggatggcggcgccttcccggagatccacgtcgcgcagtacccgctcggcatgggacgccgcgacgataagggcgggtccaggatccttgcgctcaccgtcgacgcacacgggagcgtcgccttcgacgccgtcgtcaagcagggggagaacgcaggcaagatcgtctactccaagcatagcgacctcgtgccgaagatagccactgccgattctcaggcgatgtcagacgacgacgaggagcagaagcagatcgaggagaccactgaacggaccaaggccgccttggagaaggttgttaacgtccgcctctctgcagtgcagctcagcccaagaacgtgccgactcatgattctgagtccaagttcatcaagtataagccgtcccagcaatccgcggccttcaattcaggtgcaaaggagaggatcattaggatgtcagaggtggcggtggatcctcttgagccaccaaaattcaagcacaagcgtgtgccccgggcatctgggtcaccacctgtgccagtgatgcactcgcctccaaggccggttactgtgaaggatcagcaggattggaagatcccgccttgcatttcaaattggaaaaacccaaagggttacacgatcccacttgataaaaggttggcggctgatgggagggggctgcaggaggtgcagatcaacgataactttgcaaagctttctgaagcattgtatgtggcagagcagaaggcgagggaggcagtacagatgcgctccaaggttcagagggaacttatgctgaaggagaaggagaggaaggagcaagagctaagggctcttgctcagagggcacgcatggagaggactggtgccccacctgcaccatcaggtgtgcctgctggtggcggcaggggagcagttgagggcttgaggctgtcgatgaagatatggatatggagcgaccacgtgaaccgcgtgagcagcgcagggagtctagagaagagagggaagcacggattgagcgtgataaaattcgtgaggagcgcaggcgcgagagggagagggagaggaggctggaagccaaggatgctgcaatgggcaagaagagtaagatcacgagagacagggatcgtgatatcagcgagaagattgctcttggtatggcaagcactggtgctgcaaaagctggtgaggtcatgtatgaccagcggttgttcaaccaggacaagggaatggactctggctttgccacagatgatcagtacaacatctactctaagggtctcttcacagcgcagtccactatgtccacgctatacaggcctaagaaggacggggattctgatgtatacggtgatgcagatgaacagttggagaaggttatgaagacagagaggttcaagcctgacaagggatttactggtgcttcagagaggactggcaagcgagacaggcctgttgaatttgataagcaggaagaaaatgatccgttcggtctggatcagttcttgactgaggtgaagaagggtaagaaagctgtggagaagattggcggcggaggaagcatgaaggcgagtggtggatcctcaatgagggatgattatgatggtggatcagggaggtcgcgcattaattttgagagggggcgctgagatgtgggtggatctacgtactgtgaatacacgaattgtcagcagcctgtattgaaatgactgaactgttatgatcgttacttcaagatgtgggtggatctacatactgtgaatacacgaactgtcagcagcctgtattgaaatgactgaactgttatgatcgttacttcaaggtaaattttagttctttttggcccttgtaaattttggagtcctggtttctactattggtcctgtaaacctgtccaggatattctcatttatacaacttgttcattttcgaagaacaaaaccttccgagagcatttttttgatagaaatgtatcaagttgctcaacctatatttgttattaaaacctcattagtttctttaaaagaaagtgatatttcctaatgactgagcatctgagcgatgaatgcatggcagatttgctataactattaagaccattgcttgattgtttgcatgagccacggatgactgcaactgaggcaaagcaattactttgcttactgttatgttctagttgagttctattagtagagtatatatctttctgtgcatgcttgctaccacagatttgatgacagtttcgaattataccgaagcaaattctcgtgtatgcaggtacaaacagatacgcaaacctacacatgctttctatatccacaaaccttgatcataatgctgctataacagctggcttaacctgcggctgcagtcatgtggggactgtggagtgtggacagtctggtcaattgttggttggctgcaattttggggcacccattttgcccatgtgaccatgtgaattactgaatgcagctcatgtctcttatgcacgatccaccttgctgacgaatcatctgaaccctgcgatcaaagtaagtttgcaagaaagggtaccctatacttttggacgacattgttaaattagatctgttattttattgttagataactgtgagctcttaatacgctacaatctgtgttttccaacaaatagatcctccttgcgatcctgggtgaccagggagctcgacaggaattttattaattatgaactttcttcagctagtcgctcatgtatgtaatatcaggctgcaccacatatgtatgctaagcaagttgtgccatggttaggattacgacgttctgtaaaaaaaatggtgagttaaatgtgctggaggttcattaatttatgtgagggtttcatttaggtgcatcaactttaaaagttgatcttgagatccataaacttttaaagttattcacagcaggttcataccggtccatgtgtacatctagcagtgacatgcatgctgattgggcagttgctggtaggggtgaaaatggctaaggtatacctgtcgacgagtaccggatactaaaatacctttttttaagatgcggattcagatacttttatatttgagacggatacgagcaatacttggatagtacaatttcgaatttgggtcgtattcggagcgagaaataaccggtaaatatgtggatattcagatcggat

SEQ ID NO: 56023 - DNA, 2808 bp, Zea Mays
gactgcagcgtgcgtgacagtggatacaattatatgtcagtttttcatataggcgaattgtaacaaaattttaaaatagtaatgacataggtaaaaaaacctatcattagaatcaaaccctagctcgtcgtccgcatcgatttcccctatccatcggatccccaccagcaccaggcgactcgccggaaccctagctagccgcagatcctacgcgccgtgcgcgcggccgcctccatggcgactctcaaggatctcctaccggcgcccaagacgtcggcgtccaccttctacgaccatagtagcgacccctggttcaaggagcggtacggcggggagtcggcgcaggcggccgcggcagcgaggcccgcggccgccgccaggctcatgcctccgtacgggaagcgagcggggttcgtgccgagacggccggaggacttcggggatggcggcgccttcccggagatccacgtcgcgcagtacccgctcggcatgggacgccgcgacgataagggcgggtccaggatccttgcgctcaccgtcgacgcacacgggagcgtcgccttcgacgccgtcgtcaagcagggggagaacgcaggcaagatcgtctactccaagcatagcgacctcgtgccgaagatagccactgccgattctcaggcgatgtcagacgacgacgaggagcagaagcagatcgaggagaccactgaacggaccaaggccgccttggagaaggttgttaacgtccgcctctctgcagtgcagctcagcccaagaacgtgccgactcatgattctgagtccaagttcatcaagtataagccgtcccagcaatccgcggccttcaattcaggtgcaaaggagaggatcattaggatgtcagaggtggcggtggatcctcttgagccaccaaaattcaagcacaagcgtgtgccccgggcatctgggtcaccacctgtgccagtgatgcactcgcctccaaggccggttactgtgaaggatcagcaggattggaagatcccgccttgcatttcaaattggaaaaacccaaagggttacacgatcccacttgataaaaggttggcggctgatgggagggggctgcaggaggtgcagatcaacgataactttgcaaagctttctgaagcattgtatgtggcagagcagaaggcgagggaggcagtacagatgcgctccaaggttcagagggaacttatgctgaaggagaaggagaggaaggagcaagagctaagggctcttgctcagagggcacgcatggagaggactggtgccccacctgcaccatcaggtgtgcctgctggtggcggcaggggagcagttgagggcttgaggctgtcgatgaagatatggatatggagcgaccacgtgaaccgcgtgagcagcgcagggagtctagagaagagagggaagcacggattgagcgtgataaaattcgtgaggagcgcaggcgcgagagggagagggagaggaggctggaagccaaggatgctgcaatgggcaagaagagtaagatcacgagagacagggatcgtgatatcagcgagaagattgctcttggtatggcaagcactggtgctgcaaaagctggtgaggtcatgtatgaccagcggttgttcaaccaggacaagggaatggactctggctttgccacagatgatcagtacaacatctactctaagggtctcttcacagcgcagtccactatgtccacgctatacaggcctaagaaggacggggattctgatgtatacggtgatgcagatgaacagttggagaaggttatgaagacagagaggttcaagcctgacaagggatttactggtgcttcagagaggactggcaagcgagacaggcctgttgaatttgataagcaggaagaaaatgatccgttcggtctggatcagttcttgactgaggtgaagaagggtaagaaagctgtggagaagattggcggcggaggaagcatgaaggcgagtggtggatcctcaatgagggatgattatgatggtggatcagggaggtcgcgcattaattttgagagggggcgctgagatgtgggtggatctacgtactgtgaatacacgaattgtcagcagcctgtattgaaatgactgaactgttatgatcgttacttcaagatgtgggtggatctacatactgtgaatacacgaactgtcagcagcctgtattgaaatgactgaactgttatgatcgttacttcaaggtacaaacagatacgcaaacctacacatgctttctatatccacaaaccttgatcataatgctgctataacagctggcttaacctgcggctgcagctcatgtctcttatgcacgatccaccttgctgacgaatcatctgaaccctgcgatcaaaatcctccttgcgatcctgggtgaccagggagctcgacaggaattttattaattatgaactttcttcagctagtcgctcatgtatgtaatatcaggctgcaccacatatgtatgctaagcaagttgtgccatggttaggattacgacgttctgtaaaaaaaatggttcataccggtccatgtgtacatctagcagtgacatgcatgctgattgggcagttgctggtaggggtgaaaatggctaaggtatacctgtcgacgagtaccggatactaaaatacctttttttaagatgcggattcagatacttttatatttgagacggatacgagcaatacttggatagtacaatttcgaatttgggtcgtattcggagcgagaaataaccggtaaatatgtggatattcagatcggat

SEQ ID NO: 56024 - DNA, 967 bp, Zea Mays
aaattgagtgaccatggtgcacctatgagcaggcgcgctctcgctcttccgaccttgtcttgagaggaaaaaggtacaatttaggacttagtccagtatgattcctgaccttattgatcggcatagaaaaattctcaatttggcagcaatcaatttctaaagcgtgacaattgggtctgcaggtgctgaattcgtggtattcagaccctcagagattgctgccagtgttgctcttgcggcgatcggggaatgcagcagttctgtaattgagagagctgctactatctgcaactatttggacaaggagagggttttaagatgtcatgaaatgattcaagagaagattgctgtgggaagcattgtcctaaagtctgctggatcatcaatttcctctgtgccacgaagccccataggcgtcctggatgccgctgcctgtctgagtcaacaaagcgatgatgctactgttggatctcctgcagtatgctaccatagttcttccacgagcaagagaagaaggatcactagacgtctactctagttgtgttgcctgaatggaacaacaaaacatgcacactactcagtgttccatataaagagagagagaaaaataacaagcagcgtcctgcgagccagtgttgcgattccagttcatgcaattggcatccgtaaggggaatgcaagcgcaagacactagagtccagggatgctggtgtaggtagagagggggaacaaggaatttacatacggcatagagatgagagctctctcgtaccattttgtaccttcaattcgcaatgaactttaggcaaggattgccttgggcaattgaacatttgtcgggtgagaagaatccaaagatggatcggcagaggaatagaacaatttgatatatttccataaactacagatatgttttattttttcttaatggtgagctgtcacttgttgatagtaatatggtattcgg

SEQ ID NO: 56025 - DNA, 988 bp, Zea Mays
aaattgagtgaccatggtgcacctatgagcaggcgcgctctcgctcttccgaccttgtcttgagaggaaaaaggtacaatttaggacttagtccagtatgattcctgaccttattgatcggcatagaaaaattctcaatttggcagcaatcaatttctaaagcgtgacaattgggtctgcaggtgctgaattcgtggtattcagaccctcagagattgctgccagtgttgctcttgcggcgatcggggaatgcagcagttctgtaattgagagagctgctactatctgcaactatttggacaaggagagggttttaagatgtcatgaaatgattcaagagaagattgctgtgggaagcattgtcctaaagtctgctggatcatcaatttcctctgtgccacgaagccccataggcgtcctggatgccgctgcctgtctgagtcaacaaagcgatgatgctactgttggatctcctgcagtatgctaccatagttcttccacgagcaagagaagaaggatcactagacgtctactctagttgtggattatggtttcgtcaagtagttgcctgaatggaacaacaaaacatgcacactactcagtgttccatataaagagagagagaaaaataacaagcagcgtcctgcgagccagtgttgcgattccagttcatgcaattggcatccgtaaggggaatgcaagcgcaagacactagagtccagggatgctggtgtaggtagagagggggaacaaggaatttacatacggcatagagatgagagctctctcgtaccattttgtaccttcaattcgcaatgaactttaggcaaggattgccttgggcaattgaacatttgtcgggtgagaagaatccaaagatggatcggcagaggaatagaacaatttgatatatttccataaactacagatatgttttattttttcttaatggtgagctgtcacttgttgatagtaatatggtattcgg

SEQ ID NO: 56026 - DNA, 1152 bp, Zea Mays
caagcagctcctcttcttcggctcaatcgtcatgcccccgcgcgcgtccatgccgcagcagcagccgcctccgcccccacacccgcatctgcacagcatcgggggcgtaaaaaaggaaagttgaaaatttcctccttccgtctgctaccttcttcttctccttttgagattctattataacttttgatcgtaggatctagagtagccttattaacacatgttctctgatttttgtttcggccattcaaattcttgtgctggcttaacaatatatatagagacaagttaggcgaattaattaatcaattattgttgctttcatatgatttgaaatctgactcaattttttgctttgctacattgacagtccatgtccatcagcagcaatttacagccggcaaagcccggactagctagctagaagcatttgcagcaactagcacaggcctaagggatacacgtcctggtgccccccaccacctcccattcattatccttggtcttcacctccacctacacctacatctccatctaccgaacatcagacccctccaactaccttgccgacacatgaacgagaagatgggttaggctttatcgaaaccctcttcgctagtggaggtatcgaccatcactcgtcactgtaacccgatggtgatcggcgaccgtgagcttccatgttattgtgttctaatacttgagacttttattatgactatgtatgagatattgtctcctattagtactagatgatgagatgtgtcttattatgactatggatgagacttctgtgatgtaatagttgatgagactatggatttaaatattgttatgtgattgtgtgtgagatgttttatatgaaaatatgttgtgatatatagctgttgatatatttgttatgttgtggaatgtggtgtaaaataaaaataaacaacatttgtaatgctggtcaaattaacttcctagaagcttattgggttgtaggaagttagctagctaacttccgaggggctacagtcagccgcaggaagttagccagataacttcctaggggctacagtcagccgtaggaagttatccagctaacttcctagggctacagtcagccgtaggaagttagtcagctgacggcgctgacggcgtgaagctact

SEQ ID NO: 56027 - DNA, 1612 bp, Zea Mays
cacacctgtcgcggccggcccggccctgtctgccatggccgcccccgccctggcccgcctccgaccccggccaagcagctcctcttcttcggctcaatcgtcatgcccccgcgcgcgtccatgccgcagcagcagccgcctccgcccccacacccgcatctgcacagcatcgggggcgtaaaaaaggaaagttgaaaatttcctccttccgtctgctaccttcttcttctccttttgagattctattataacttttgatcgtaggatctagagtagccttattaacacatgttctctgatttttgtttcggccattcaaattcttgtgctggcttaacaatatatatagagacaagttaggcgaattaattaatcaattattgttgctttcatatgatttgaaatctgactcaattttttgctttgctacattgacagtccatgtccatcagcagcaatttacagccggcaaagcccggactagctagctagaagcatttgcagatggagaatgcgtgtgttgtgctggattaaattaggcgtgcacatttaattcaaaatcaagtatactggaagatcatgaagttttctaaggatgtatgtgttttcactttattttgttggatttttgtattcttacgaatagtgcttggtgccaaaatcgtgtacattttcctagcttttccctaactataacatttaccttcatttgttattaaatacacttggtgcagataacttacataaggatagtggtcagccataatattttggaatatcatcttccttttagaaacaggtttacgcaaactttcagtgacaacgtttgcatatatttttttcattcacactatccatctcgtagtatgtgaatgagttcgacaaatttgtagcaactagcacaggcctaagggatacacgtcctggtgccccccaccacctcccattcattatccttggtcttcacctccacctacacctacatctccatctaccgaacatcagacccctccaactaccttgccgacacatgaacgagaagatgggttaggctttatcgaaaccctcttcgctagtggaggtatcgaccatcactcgtcactgtaacccgatggtgatcggcgaccgtgagcttccatgttattgtgttctaatacttgagacttttattatgactatgtatgagatattgtctcctattagtactagatgatgagatgtgtcttattatgactatggatgagacttctgtgatgtaatagttgatgagactatggatttaaatattgttatgtgattgtgtgtgagatgttttatatgaaaatatgttgtgatatatagctgttgatatatttgttatgttgtggaatgtggtgtaaaataaaaataaacaacatttgtaatgctggtcaaattaacttcctagaagcttattgggttgtaggaagttagctagctaacttccgaggggctacagtcagccgcaggaagttagccagataacttcctaggggctacagtcagccgtaggaagttatccagctaacttcctagggctacagtcagccgtaggaagttagtcagctgacggcgctgacggcgtgaagctact

SEQ ID NO: 56028 - DNA, 1387 bp, Zea Mays
ccgcccacacctgtcgcggccggcccggccctgtctgccatggccgcccccgccctggcccgcctccgaccccggccaagcagctcctcttcttcggctcaatcgtcatgcccccgcgcgcgtccatgccgcagcagcagccgcctccgcccccacacccgcatctgcacagcatcgggggcgtaaaaaaggaaagttgaaaatttcctccttccgtctgctaccttcttcttctccttttgagattctattataacttttgatcgtaggatctagagtagccttattaacacatgttctctgatttttgtttcggccattcaaattcttgtgctggcttaacaatatatatagagacaagttaggcgaattaattaatcaattattgttgctttcatatgatttgaaatctgactcaattttttgctttgctacattgacagtccatgtccatcagcagcaatttacagccggcaaagcccggactagctagctagaagcatttgcagataacttacataaggatagtggtcagccataatattttggaatatcatcttccttttagaaacaggtttacgcaaactttcagtgacaacgtttgcatatatttttttcattcacactatccatctcgtagtatgtgaatgagttcgacaaatttgtagcaactagcacaggcctaagggatacacgtcctggtgccccccaccacctcccattcattatccttggtcttcacctccacctacacctacatctccatctaccgaacatcagacccctccaactaccttgccgacacatgaacgagaagatgggttaggctttatcgaaaccctcttcgctagtggaggtatcgaccatcactcgtcactgtaacccgatggtgatcggcgaccgtgagcttccatgttattgtgttctaatacttgagacttttattatgactatgtatgagatattgtctcctattagtactagatgatgagatgtgtcttattatgactatggatgagacttctgtgatgtaatagttgatgagactatggatttaaatattgttatgtgattgtgtgtgagatgttttatatgaaaatatgttgtgatatatagctgttgatatatttgttatgttgtggaatgtggtgtaaaataaaaataaacaacatttgtaatgctggtcaaattaacttcctagaagcttattgggttgtaggaagttagctagctaacttccgaggggctacagtcagccgcaggaagttagccagataacttcctaggggctacagtcagccgtaggaagttatccagctaacttcctagggctacagtcagccgtaggaagttagtcagctgacggcgctgacggcgtgaagctact

SEQ ID NO: 56029 - DNA, 1879 bp, Zea Mays
caagcagctcctcttcttcggctcaatcgtcatgcccccgcgcgcgtccatgccgcagcagcagccgcctccgcccccacacccgcatctgcacagcatcgggggcgtaaaaaaggaaagttgaaaatttcctccttccgtctgctaccttcttcttctccttttgagattctattataacttttgatcgtaggatctagagtagccttattaacacatgttctctgatttttgtttcggccattcaaattcttgtgctggcttaacaatatatatagagacaagttaggcgaattaattaatcaattattgttgctttcatatgatttgaaatctgactcaattttttgctttgctacattgacagtccatgtccatcagcagcaatttacagccggcaaagcccggactagctagctagaagcatttgcaggtcagttgtttaacttctgaatcgtctcatcttctcatcggtactgctcaccatctcttgtttatattatgagtgctagtgctagcagcactcttgttttcattttcgtgcttttgccgattgccacttttctgtactgttgctcactctttgtccatactacatatgtataccatggtgcatcttgccataatgtagtagatcgtatggtaggcatttattagctacgcaccacaacacaagcaaaatggaagacttctcttgtgcttttacgcaaggtcaactgaaaaataaccctaccgtagcctaaatcatgtcatgtgtagtttgatttgtctgggccttgagtggtatagactccaatagttctttatgactctctagcagccttgagtggtatatacatgtatagatgttgtgtctactgacaaaagtaccgttggtacgttgtacgttgtaagctggaaaaggcaatggggagttatggggcaggaaaaaaatatccaggagcagtgtctgcatgcatgtttttgcttgttacacgttctttctaccctttgcatatggttgttcaattcatctttttttctaaacttacatcccttagtcggggtattatcttaagaacagcttcttgtgatctcgatctcacaaagaataaaggaagtcctccgtataaactacatttgtggaaacaaaaaattaaaaatcatgtgtaacttagactcttataggcgcgaaatatgtaaatgctaattaaccaacatatttctgtcgtttagcaaggaacatgcattgagatgaatagccaagttcgttaattgtccaaacataagttgcaccccattgccattttttgtagaacacatgttgccgcgtaccatataccttagttaaccactgtcactgtgatatgatagacctactatagccaatgaccattatcttaaataatggtgtgatgattgaatgatcaggctgattattgcataatgcgtatattagttccatattgatttttctgcggttctccttccttcatattcctagagagaaagggctgaattttggcgctcatataaagaacatatataaccacatctctgtcatattactctttgtacgtacatgtaagatatgttacacatacaaaaaaaagatgaggtcctttaagtatattaacaatatatgcacatacagaagggctaaatcttttaagtatattatcacaatacttgtgtttattttgtattacacattaaggtccttttttcgaattgttaccgtttacatgttggggaagcaattgttggaatgtaacaatctagcccgcggattgtcaaaacttatattggttacaatctgggaattcttaaagtcaacttgtagattttaacaaagctggaagctgcatatataatctgtgcaagctaaaaacatatatat

SEQ ID NO: 56030 - DNA, 893 bp, Zea Mays
ctgaaacgaaagagttgcgggggtaaaagaaaaaaaatctagatccttctctcgttcaagcccacagaatccaccaagccacggcgtcaccgccagcgctactgccatctcggggaaggaaccgaaccgacccctgaaaagaattcggtgcgtcggaaggaagagcaaccctgcggtggtggagcgaggacccgggttgagggatgtggtgggagtgggagggcgacggtggtgaggcgccgcgggaggagactcctgtggacttcgatttcatcgccctcctcgccaagcccaaggattactacaagatactggaagtagattactatgcgtctgaggagacgatcaggtccagctatatccgccttgcactgaaatggcaccctgacaagaagcaggggcagggcgaagagaattcaacctccaaatttcaggaaattaacgaggcataccaagttctgagtaatccagcaaaaaggcaagagtatgacaaaaaaggcattctatacgttcaagatcagaatgtagtggattacctgaaccggcacaaggggctaatacttacgtgcaatggtcttggtataaggtactcagtatggtgaacacgctcaagggcccacagtttgcactcatctgcagtcttggagaatctgtaatggaagcctttgatctgaaaatggtatagtgcagcagtgccatgtttgaaagccaaatattgaccacttgagttcatcctacaaggctacaacagagttgatttttatttgtcgatcagctgttgttgaatgaaagaggcagatatgttcctgctgctccttgtatgtaacatactgttcctaaccatgcaatggatgtggttactacattatagaagaggatttcaaaaagaaagg

SEQ ID NO: 56031 - DNA, 771 bp, Zea Mays
ctcgatcctgccacggattactacaagatactggaagtagattactatgcgtctgaggagacgatcaggtccagctatatccgccttgcactgaaatggcaccctgacaagaagcaggggcagggcgaagagaattcaacctccaaatttcaggaaattaacgaggcataccaagttctgagtaatccagcaaaaaggcaagagtatgacaaaaaaggcattctatacgttcaagatcagaatgtagtggattacctgaaccggcacaaggggctaatacttacgtgcaatggtcttggtataaggtactcagtatggtgaacacgctcaagggcccacagtttgcactcatctgcagtcttggagaatctgtaatggaagcctttgatctgaaaatggtatagtgcagcagtgccatgtttgaaagccaaatattgaccacttgagttcatcctacaaggctacaacagagttgatttttatttgtcgatcagctgttgttgaatgaaagaggcagatatgttcctgctgctccttgtatgtaacatactgttcctaaccatgcaatgtaagcgtttgtttctgtcttggcgctttgtattgacgttatgtggacctgaatgtctgtggaaaaacagagtggtatcatgctccttccccggaaactagtacatctatatcctcattaacatactctctccgtttttattagatactgtgttagctttgtcattgattttaaaaaatatatagattcatgttatttggttc

SEQ ID NO: 56032 - DNA, 2737 bp, Zea Mays
ctcccccgctagacacgtagcactctgctacacccccccattgtacacctggatcctctccttacgcctataaaaggaaggaccagggccctcttagagaaggttggccgcgcggggacgaggacgagaacaggcgctcgctccctctcccgcgtggacgcttgtaaccccctactgcaagcgcacccgacctgagcgcgggacgaacacgaaggccgcgggattcccacctctctcacgccggtctccggccgcctcgctctccccccttcgcgctcgccctcgcgctcgaccaatctgggctggggcacgcgacgacattcactcgtcggcccagggaccccccggtctcgaaacgccgacaataatgtcataccttcatgtaattcacaacgatctaatggttatcgtttttggggtctgtagaatctgattgaagtttgtgaagttggctagtcttgatcctatatgtgccacatactttttgggtggtgatgacaatttgtctttgttaaggtaacttctatattggtcatcgtcctgtgattaagtacaataagaactgtcaattcattttgctagtttaaagtagaagtgcagtagttttctctttttttctttagaaaacatgtatcaggggagaatggatccaatatctttattgtggtattaagaggagacatctatgtaactttaggaacatatagaagctaaatgtattgttatacaaatttatctctgtatttttttagagcacgagaatatgcaaacatgtgttgtgcctggcaaatagatgtgattaggttgtatccaaccaatattaaataggaattgtttaccatattttctgcgttatgcaagagaaggttattgtaaatagaataaatctattgttgacgtagtaatctctcagtatatgtaaatagttaaataaatagatcataaagcacatggaacacacaaaagtaatgggttaaagtatttaagaggctaaataacatattatcaccgcatatcatgcaacggatcggtgatgccttacatgtaaggaaaacaggataatgcaactgctacctataaagtgttctatcaacgtgtaagcaaagcaagttgatgtaagtgttacctactacctataaaatgttctctcaacgaagttaatccaagtggcgatatcaatgctatttacatagaaataaacataacacatgcaagacacaaactaagtgggacaataaaatgttagtcttcataaatcatgcaacggaccaatagagtcttacacgtatggagaacaggctttggtaagtgccaattacctcgttggatgaagtctctaaggatcagtgctattattccacgcgtttcaacccaaaaaggtgctgtcagatacaccagattagttaaaaacaaaaaaggggatagcaggacgtgtaatttaccaagtcggacatgtggaatttttacctgtccttgcaaattaattttttcacatgtatgtatatacacacaattcagacctgtggaattataatttgctgctgcaaattaatctttttacatgtatgaacgacacttctgttgctttctttcttgtcaaaaggagctactatggagagtatataaatctagttgtcctacattaagagaaaaaataaaatataaagggttatcttatattagaaaaaagtggcatatggtatccttccacttttattagatatatgcacaactgcaaaataaggagcaaagcacgaatgtatgagaacaaaataacattatatctaaaatagggcgagagcaggagatgtgtgctgatgcaatggtccaatttatacctaggtaaatccttctaggtttctgccttgctgtgtcataacctgctatcaagcggagtgggacaaatggctcatgatgccaacacagagagacagattggcccataaaagtttgaggtgatttggcgctagactcaaatcagctcctgactgggagcaactgatttggatcatgtcgagtttgagtaaaagaaattctaggtttagccattataaaggagttgactacagaagagaggctgcatatacaaacttttgcaaagtaattgaaccacaaaattgatgtgattgtgtccactatatccaactcattggctacagcaggccctgctctattttttcatagtagattagggtgtgttaagtccaccttgtcagagcacacgacaaaaaaatgacagtaatgaacataaaccaaacatagacctatctgtgttcatttggtaagattatacagtatcctaaggctagaataaagaagttaagaaatgtactgaaggtactatcagaaattggaaatcaatatttcataaattggaaatcaatatttcagaaataaagcttcttcataacaatagcaagaaaaaaatgcatacatgtaaacaatgtcattgtgctgagaaggggctggggcttgttggtgttctaaacgtttgaagctcagtgtctattatgcttccaaaatattggcacttgtaaatcaaatctattttatctaagaaaacattaacagagccggagtacattaacagaatgggagtctgggcaccagagatctttacactatcaacaaaagcatcatcacctaagctgattagaacattgcaacaaacaaaaaattctccctccccaccattctgaaggccaagtatttaccaaacaaatccttttggactgct

SEQ ID NO: 56033 - DNA, 762 bp, Zea Mays
aatatcgccccactggccagtggccacgcactatccgacactaggccaccaccagcgggcgggctccagtcgcaactcgcaacacagacgccgccgccgcccaaagaaagacgtcaactccaggagacaagatagtgagaactgaagagaaggatgggcttcgagaagcagatcctgagatccggcaccggccccaagccgataaagggccagaaggtcaccgttcactgcaccggctacgggaaggatcgtgatctgtccaagaaattttggagcaccaaggaccctgggcagcagccattcagtttcagcattggtcagggttcagtgatcaaaggatgggacgagggagttatgaccatgcaagtgggtgaagttgctcgtatccagtgcacgcctgattatgcttatggagccggcgggttcccagcctggggaattcaaccaaactcagtgcttgtgttcgagattgaagtcctcagtgcccagtaattcgcatctgtcagctatggaaacgttggccatgcttctcaagtaatgaaataattccgttgtcacctcatgctacatacagcagattggtgttacgagttaaatcctgtgaaactttagcattctgtaaccgtggatgtcgagtttatggagttccttgtgtggcgcctcaagtcaagttctcgtcaaagattgtaatctgatggcttccattgtgacttgtaggcggctgcaataaacttacttgatgcaattattgcaaaaaaagaa

SEQ ID NO: 56034 - DNA, 674 bp, Zea Mays
aatatcgccccactggccagtggccacgcactatccgacactaggccaccaccagcgggcgggctccagtcgcaactcgcaacacagacgccgccgccgcccaaagaaagacgtcaactccaggagacaagatagtgagaactgaagagaaggatgggcttcgagaagcagatcctgagatccggcaccggccccaagccgataaagggccagaaggtcaccgttcactgcaccggctacgggaaggatcgtgatctgtccaagaaattttggagcaccaaggaccctgggcagcagccattcagtttcagcattggtcagggttcagtgatcaaaggatgggacgagggagttatgaccatgcaagtgggtgaagttgctcgtatccagtgcacgcctgattatgcttatggagccggcgggttcccagcctggggaattcaaccaaactcagtgcttgtgttcgagattgaagtcctcagtgcccagtaattcgcatctgtcagctatggaaacgttggccatgcttctcaagtaatgaaataattccgttgtcacctcatgctacatacagcagattggtgttacgagttaaatcctgtgaaactttagcattctgtaaccgtggatgtcgagtttatggagttccttgtgtggcgcctcaaaaaaaagaa

SEQ ID NO: 56035 - DNA, 540 bp, Zea Mays
tagcattcttctgtgtatatcatctggagctgtgatctgagtgctgccatcgttctgcatttcatcaaagttccgttacaaagtttgatagccagttgtctgaaaatcctttataacagtcatacaagtgcctgactagtatttcctctttacatgtggtgttcttgggcagtgtgagcaactactgtatcaaccatgtgggctgccctgttgttgtgatcaaggggacatgatattccatcagcccagcattctttggtgtacttccattcaaggtttttgaggcttctgctgtgacatgtgtaatcctgtacgatatattactgcacattactatgcttttgttggtgctgctgagggatgaaagttgctatgtggtccctttcgttataaaggaggaagctttgtcggtcgtgtaatcgtggtaataagttggtcctgtggcggattcttgtgtatattcttgtaatcgttcaaagacatggttctgtctgaagtcccaacagcgcaaaattaccagagtctcggtttgtttgtttg

SEQ ID NO: 56036 - DNA, 1181 bp, Zea Mays
atgcctttgtctctgcgttccaccggcgacgccaaggacaacacccttcgctcctgctccgccgccacaggggaagggacagcttcggcggcgggtgccggcaccgatgggaagcccatgtcgagcatgtaccatgagcgcgatgccggtgatggtgccccaagagttgccaagcttggtagcggcgagctggaggtcggcgaggcagccggcgagcatgacagagatgagcgggatagtgtagttgagaccagcaagaagacactgatcctccatggtaccaagactagtgctgtgttgaactctgtgctgtcagatatttaccacctaaagcgtgataatgctgtgaaatataccaagaagaatgacaacattaggccttttgaaagtggtggagaatcttctctggagtttttctctcttaaggcagactgtagccttatagtgtatggttctcattcaaagaagaggcccaacaatctgattttgggtagaacgtatgaccaccacatatatgaccttgttgaagtaggagttgagaactacaagtcaatggaatcttatgtttatgataagaagctagcaccattacttggatcgaagcctttctttgctttcataggggaacactttgagagtgctgaagagctgaaacatttgaaagaagtgctgcttgatcttttcagaggagaggtcgtagagaatctgaaccttgctggtgtggatcggatctatgtgtgcactgcaatctctcccactaccgtctacatgatgcactgtgctctccgtctaaaaaggtcaggtacatctattcctaggatggaactggtcgaagttggaccttcgatggatctggttgtaaggaggcacagacttccagctgaaagtttaaagaaagaagctatgaagaccgctgaacatgctaagaagatgaaaaacgtcactaaggatccagtgcagggcaagctgggcaaggtctacatgccagaccagcaggttggaaagttgaccttatcaaacgacataaagggactaaagagggagcgccgtgaagccaagaaaaaccaggactcaaagaagcaaaaggtcaaccccgagtaaagatcactgaagtttacctttgcattggatacagagatttggagtactgcgactatgacgaatagatgggtgaaggcata

SEQ ID NO: 56037 - DNA, 1511 bp, Zea Mays
tagccaccgtggcgttgcgagggccaactaccctgtcacctccgctcatggccaggaagaagaaacacacgcatggggaaaaacgcacaggaaagaagaaacacaagggaagatagaggaaagggagagggggttgagaccagcaagaagacactgatcctccatggtaccaagactagtgctgtgttgaactctgtgctgtcagatatttaccacctaaagcgtgataatgctgtgaaatataccaagaagaatgacaacattaggccttttgaaagtggtggagaatcttctctggagtttttctctcttaaggcagactgtagccttatagtgtatggttctcattcaaagaagaggcccaacaatctgattttgggtagaacgtatgaccaccacatatatgaccttgttgaagtaggagttgagaactacaagtcaatggaatcttatgtttatgataagaagctagcaccattacttggatcgaagcctttctttgctttcataggggaacactttgagagtgctgaagagctgaaacatttgaaagaagtgctgcttgatcttttcagaggagaggtcgtagagaatctgaaccttgctggtgtggatcggatctatgtgtgcactgcaatctctcccactaccgtctacatgatgcactgtgctctccgtctaaaaaggtcaggtacatctattcctaggatggaactggtcgaagttggaccttcgatggatctggttgtaaggaggcacagacttccagctgaaagtttaaagaaagaagctatgaagaccgctgaacatgctaagaagatgaaaaacgtcactaaggatccagtgcagggcaagctgggcaaggtctacatgccagaccagcaggttggaaagttgaccttatcaaacgacataaagggactaaagagggagcgccgtgaagccaagaaaaaccaggactcaaagaagcaaaaggtcaaccccgagtaaagatcactgaagtttacctttgcattggatacaggtcaggttaagaaaccctggtttgtatctgttcccatctgctgtgttatccaattagaagttgctcgttgtcagattgtgttaaatagtttagggccatcttgttaggctaaagacatgtgtacgactttcacaacaatattgcgtaccaattcatgttaagacgtaagcatggaaaaatttgggagtgttatcctatcaaatatcttttgatgtctcaagcttggataaatgaggagggttacgataggcttggcgagccaacgttaaaggtagcaattctggagattgaaacataaaatacctaaagatttagccttgattaggaatgcatgaaaaacagctgtctatgttgatgtgtttgaatcttgactcgtggtttttcgtctcctgaaaaaaaataatctgtcctttacaacatgtcaacatcctctaaaatatccggtcctctatattttcttcatctccagcaacgacacttaaaagtt

SEQ ID NO: 56038 - DNA, 1582 bp, Zea Mays
aatcgctgtgactatgtctcagatccccatcatcccatcggaatctgaggttccccttgcaggcaacattggaggagctgatccaccgtcgattaacgacgggaatcaatctcctcgacaccagcagggagatcgagaaggaggaggaggcgggtctacgctgcaagacgcagtcgcaatgatggctaggaactacaacgacggttgagaccagcaagaagacactgatcctccatggtaccaagactagtgctgtgttgaactctgtgctgtcagatatttaccacctaaagcgtgataatgctgtgaaatataccaagaagaatgacaacattaggccttttgaaagtggtggagaatcttctctggagtttttctctcttaaggcagactgtagccttatagtgtatggttctcattcaaagaagaggcccaacaatctgattttgggtagaacgtatgaccaccacatatatgaccttgttgaagtaggagttgagaactacaagtcaatggaatcttatgtttatgataagaagctagcaccattacttggatcgaagcctttctttgctttcataggggaacactttgagagtgctgaagagctgaaacatttgaaagaagtgctgcttgatcttttcagaggagaggtcgtagagaatctgaaccttgctggtgtggatcggatctatgtgtgcactgcaatctctcccactaccgtctacatgatgcactgtgctctccgtctaaaaaggtcaggtacatctattcctaggatggaactggtcgaagttggaccttcgatggatctggttgtaaggaggcacagacttccagctgaaagtttaaagaaagaagctatgaagaccgctgaacatgctaagaagatgaaaaacgtcactaaggatccagtgcagggcaagctgggcaaggtctacatgccagaccagcaggttggaaagttgaccttatcaaacgacataaagggactaaagagggagcgccgtgaagccaagaaaaaccaggactcaaagaagcaaaaggtcaaccccgagtaaagatcactgaagtttacctttgcattggatacaggtcaggttaagaaaccctggtttgtatctgttcccatctgctgtgttatccaattagaagttgctcgttgtcagattgtgttaaatagtttagggccatcttgttaggctaaagacatgtgtacgactttcacaacaatattgcgtaccaattcatgttaagacgtaagcatggaaaaatttgggagtgttatcctatcaaatatcttttgatgtctcaagcttggataaatgaggagggttacgataggcttggcgagccaacgttaaaggtagcaattctggagattgaaacataaaatacctaaagatttagccttgattaggaatgcatgaaaaacagctgtctatgttgatgtgtttgaatcttgactcgtggtttttcgtctcctgaaaaaaaataatctgtcctttacaacatgtcaacatcctctaaaatatccggtcctctatattttcttcatctccagcaacgacacttaaaagtt

SEQ ID NO: 56039 - DNA, 485 bp, Zea Mays
tatggtgtactgctgtggggcgtacacatctttctttttcgacaccataacctacgccgaatcggtctggatcgtcctgcttaatgatggtgcagaaaagcttattagaaaggcaatggcgctgcacagaagctgtaaagatgctgcttcgtctgccttgagggacctgggcctcgacaactacaatgcatagacaccagtgaccagtcacaccatagaaaatgtgcgtcgagttagtttggtagcggtagaatgttttggaggagaaatacattgtatgagttatcgaggtgccgcactgaaatgagtttgtagaattgcgctactgtggttgcatcaatggtttcagtttgttgggcaatcaaacttcagggctattaggttgtttccagcaaatcgtacatatgatcatacaaaacacttcttttatagagtgagctttaaaatagtagatggagatatataatgaataagttgtttgagac

SEQ ID NO: 56040 - DNA, 1526 bp, Zea Mays
aagcaatgagttccatttagcagcaccggcggcacggcaccccgcagtcccgggctcccggcgtcccgcacccacgccctacaggcagaccaagcaaatggcgatctcgatctcgcaggaggccttcgactccatggtccgggagaacatggaggacctcggcatggaccccgatgaggccctcgctgacgccgttgaggcgctcgtcgccctgtgcgcgtccgctcgggtcgagcaggagaggctgcttgcttcggccttgaagagtctgagctccgtactccgtgatgtggcaagcactgaaaagttcagacgaagtgagggacccagaattgtcatggatctcttgcaaggaggctcagaaaattcagatttattggatgctggatttagtgttgtggcagcaggttctgctggcaatgaagttgtgaaagagtcctttatggacctgaaggtcgatgaactcattctgcgggttatgaaggataaatcaaaatctaatgtgcaaagtttgtatgatgccattcgtgttctgttgaaacctgatgacaaccgagtggtagcttctcaggtatatggatactcccggagatttgctgaaatcggggttgcagaagttcttgtcaatgcacttcgtgagcaagtcgctccttccagtttgccatctgcttgtgctgctttaaagtcgattgcagtcaatgatgaaatatgccgttccatatctgaaaatggtggaattgatgtgcttcttcaatgcatcgacggggctggtgagcagaagaacaaagctgtagcaagatcttgctgctctttgttgtccaagcttgctgcaagcgatgcaaacaagtccattatcattcagcgaggtggttttgataggttcctaaagttgacatccagattttctgaagatcctgctataattcaagaggttatgtctatggtgacggtcctcacactgaggtcaccagaaaatgcagcacgtgcaatggaagaaggctatgggacactggctatacagtcaatgcaaaggttcccctcctccgtgcagactcagaagcaagcatgccttatgattcgcaatcttgttgcccgaaaccctgagaataggatcgtcctgcttaatgatggtgcagaaaagcttattagaaaggcaatggcgctgcacagaagctgtaaagatgctgcttcgtctgccttgagggacctgggcctcgacaactacaatgcatagacaccagtgaccagtcacaccatagaaaatgtgcgtcgagttagtttggtagcggtagaatgttttggaggagaaatacattgtatgagttatcgaggtgccgcactgaaatgagtttgtagaattgcgctactgtggttgcatcaatggtttcagtttgttgggcaatcaaacttcagggctattaggttgtttccagcaaatcgtacatatgatcatacaaaacacttcttttatagagtgagctttaaaatagtagatggagatatataatgaataagttgtttgagac

SEQ ID NO: 56041 - DNA, 1643 bp, Zea Mays
aagcaatgagttccatttagcagcaccggcggcacggcaccccgcagtcccgggctcccggcgtcccgcacccacgccctacaggcagaccaagcaaatggcgatctcgatctcgcaggaggccttcgactccatggtccgggagaacatggaggacctcggcatggaccccgatgaggccctcgctgacgccgttgaggcgctcaccctccagggcgccgatctctcaggtatcgttaagcgcgtgccgggagaggccaccgcggcggaggtgagcccggtggtgcgggttctggacgaactgaaggcctctctcagcgccagcggcgggtcggagcaggatctcgacggacttgtctctctgctcgatgagttgcgcaatctgtgctgctccggcgagggttcggagaatgcagcgatcgcggtacggaatggcgtcgtggaggcgctcgtcgccctgtgcgcgtccgctcgggtcgagcaggagaggctgcttgcttcggccttgaagagtctgagctccgtactccgtgatgtggcaagcactgaaaagttcagacgaagtgagggacccagaattgtcatggatctcttgcaaggaggctcagaaaattcagatttattggatgctggatttagtgttgtggcagcaggttctgctggcaatgaagttgtgaaagagtcctttatggacctgaaggtcgatgaactcattctgcgggttatgaaggataaatcaaaatctaatgtgcaaagtttgtatgatgccattcgtgttctgttgaaacctgatgacaaccgagtggtagcttctcaggatgaaatatgccgttccatatctgaaaatggtggaattgatgtgcttcttcaatgcatcgacggggctggtgagcagaagaacaaagctgtagcaagatcttgctgctctttgttgtccaagcttgctgcaagcgatgcaaacaagtccattatcattcagcgaggtggttttgataggttcctaaagttgacatccagattttctgaagatcctgctataattcaagaggttatgtctatggtgacggtcctcacactgaggtcaccagaaaatgcagcacgtgcaatggaagaaggctatgggacactggctatacagtcaatgcaaaggttcccctcctccgtgcagactcagaagcaagcatgccttatgattcgcaatcttgttgcccgaaaccctgagaataggatcgtcctgcttaatgatggtgcagaaaagcttattagaaaggcaatggcgctgcacagaagctgtaaagatgctgcttcgtctgccttgagggacctgggcctcgacaactacaatgcatagacaccagtgaccagtcacaccatagaaaatgtgcgtcgagttagtttggtagcggtagaatgttttggaggagaaatacattgtatgagttatcgaggtgccgcactgaaatgagtttgtagaattgcgctactgtggttgcatcaatggtttcagtttgttgggcaatcaaacttcagggctattaggttgtttccagcaaatcgtacatatgatcatacaaaacacttcttttatagagtgagctttaaaatagtagatggagatatataatgaataagttgtttgagac

SEQ ID NO: 56042 - DNA, 1716 bp, Zea Mays
aagcaatgagttccatttagcagcaccggcggcacggcaccccgcagtcccgggctcccggcgtcccgcacccacgccctacaggcagaccaagcaaatggcgatctcgatctcgcaggaggccttcgactccatggtccgggagaacatggaggacctcggcatggaccccgatgaggccctcgctgacgccgttgaggcgctcaccctccagggcgccgatctctcaggtatcgttaagcgcgtgccgggagaggccaccgcggcggaggtgagcccggtggtgcgggttctggacgaactgaaggcctctctcagcgccagcggcgggtcggagcaggatctcgacggacttgtctctctgctcgatgagttgcgcaatctgtgctgctccggcgagggttcggagaatgcagcgatcgcggtacggaatggcgtcgtggaggcgctcgtcgccctgtgcgcgtccgctcgggtcgagcaggagaggctgcttgcttcggccttgaagagtctgagctccgtactccgtgatgtggcaagcactgaaaagttcagacgaagtgagggacccagaattgtcatggatctcttgcaaggaggctcagaaaattcagatttattggatgctggatttagtgttgtggcagcaggttctgctggcaatgaagttgtgaaagagtcctttatggacctgaaggtcgatgaactcattctgcgggttatgaaggataaatcaaaatctaatgtgcaaagtttgtatgatgccattcgtgttctgttgaaacctgatgacaaccgagtggtagcttctcaggtatatggatactcccggagatttgctgaaatcggggttgcagaagttcttgtcaatgcacttcgtgagcaagtcgctccttccagtttgccatctgcttgtgctgctttaaagtcgattgcagtcaatgatgaaatatgccgttccatatctgaaaatggtggaattgatgtgcttcttcaatgcatcgacggggctggtgagcagaagaacaaagctgtagcaagatcttgctgctctttgttgtccaaggttcctaaagttgacatccagattttctgaagatcctgctataattcaagaggttatgtctatggtgacggtcctcacactgaggtcaccagaaaatgcagcacgtgcaatggaagaaggctatgggacactggctatacagtcaatgcaaaggttcccctcctccgtgcagactcagaagcaagcatgccttatgattcgcaatcttgttgcccgaaaccctgagaataggatcgtcctgcttaatgatggtgcagaaaagcttattagaaaggcaatggcgctgcacagaagctgtaaagatgctgcttcgtctgccttgagggacctgggcctcgacaactacaatgcatagacaccagtgaccagtcacaccatagaaaatgtgcgtcgagttagtttggtagcggtagaatgttttggaggagaaatacattgtatgagttatcgaggtgccgcactgaaatgagtttgtagaattgcgctactgtggttgcatcaatggtttcagtttgttgggcaatcaaacttcagggctattaggttgtttccagcaaatcgtacatatgatcatacaaaacacttcttttatagagtgagctttaaaatagtagatggagatatataatgaataagttgtttgagac

SEQ ID NO: 56043 - DNA, 1683 bp, Zea Mays
caccgccccaccccaaaccacacacaagccgctcgcccgcaccgccgcacccgcacgccagaaacagctctcgcgttgcttccgcacgccgcccatggcgagcctgtcgtcgccgagtctcctctcttccttcctcggcgaccgcctcgcactctccactaggcctctccttctccgctccgctgtcccaggcagcaggcggctggcgtatcaagcaacgagaacgctatgcaacttggtggatatcctatttaacaggagaaatcaggatgatgcaccagaaaacaaccctagacgcctgcgtcctgggaaagtatctccacgccttagtgttcccaatcatatacaacggcctccatatgtcaattctcgtcaacaacgacctggtatgaataatggacctgaaatacatgatgagaacgggatcgagtgcatgagagcttctggaaagcttgctgcacaggttttgaaatttgctgggactcttgtaaaggtaatgtcatgttgctacaaaagcttgaccttttcaatcagtaaactgtcttttccactagataaaccttattcattctacagtttttaaagtagtttactgcttgatgtttcttccatagtgctaaggctttggacagaacgaaattgtgaacagtaactctcattttttctggtatgggcattaattaagtcgtgttgtgtcatttgtttcttggtgtcatttatatctggaaatattgaaatagaaatcactataggaaggaggcaagacacttggttttctttccatctgatccaggcataacgactgatgaaattgataaagcagtgcaccaaatgataattgataatggagcatatccttcacctcttggttattgtggatacccaaagagtgtctgcacttcagtgaatgaatgcatctgtcatgggattccggattctcgtccccttgaggatggagatatcatcaatattgatgttactgtctacctcaatggctaccatggtgatacatctgctacatttctttgcggtgatgttgatgacgaagctaagaaattagttaaggtgacaagagaatgtctcgacaaggctatatcgatttgttcacctggggtggagatcaaacaaattggtagaactatacaggatcatgcagacaagttcaagtttggtgtagttagacagtttgttggccatggggttggcaaagtttttcatgctgagcctgttgtgcttcatttcagaaacaatgaatggggacgtatgatgttgaatcaaacatttactatagagcccatgctaaccatagggagcatcaaccctgtcatgtggtccgatgactggaccgcagtgacagaagacggcagcttgtcagcacagtttgagcacacgatacttattaccgaagatggccctgaaatactgacacagtgttaatggaaggccaaataacaaagaacaatcgttagtcagctggcaagatcctgcatttctttttggggactaattggtccaacctaaactctgatgcaaaatggcaaactcacattgtaatctcggttcatcggtacaacgatatatgtatagaaattgtactattttcgaagttatatttgagagtgtgttttgttggtgctcgggtgagatgtcatcggtctgccgacgccgagtggttgcaagtag

SEQ ID NO: 56044 - DNA, 1723 bp, Zea Mays
caccgccccaccccaaaccacacacaagccgctcgcccgcaccgccgcacccgcacgccagaaacagctctcgcgttgcttccgcacgccgcccatggcgagcctgtcgtcgccgagtctcctctcttccttcctcggcgaccgcctcgcactctccactaggcctctccttctccgctccgctgtcccaggcagcaggcggctggcgtatcaagcaacgagaacgctatgcaacttggtggatatcctatttaacaggagaaatcaggatgatgcaccagaaaacaaccctagacgcctgcgtcctgggaaagtatctccacgccttagtgttcccaatcatatacaacggcctccatatgtcaattctcgtcaacaacgacctggtatgaataatggacctgaaatacatgatgagaacgggatcgagtgcatgagagcttctggaaagcttgctgcacaggttttgaaatttgctgggactcttgtaaagccaggcataacgactgatgaaattgataaagcagtgcaccaaatgataattgataatggagcatatccttcacctcttggttattgtggatacccaaagagtgtctgcacttcagtgaatgaatgcatctgtcatgggattccggattctcgtccccttgaggatggagatatcatcaatattgatgttactgtctacctcaatggctaccatggtgatacatctgctacatttctttgcggtgatgttgatgacgaagctaagaaattagttaaggtgacaagagaatgtctcgacaaggctatatcgatttgttcacctggggtggagatcaaacaaattggtagaactatacaggatcatgcagacaagttcaagtttggtgtagttagacagtttgttggccatggggttggcaaagtttttcatgctgagcctgttgtgcttcatttcagaaacaatgaatggggacgtatgatgttgaatcaaacatttactataggtacacctttccacagcttgcccgtgttctattaacctgtgattaaaattgctgctctttttctattgacctgtgattaaaatttcacactgtggaacctagagataacatttaaaaaaaaacaggtacattattttgtggttctttcagccatgatctaataacattgcatttggtcactgtcatctttctgcacataagtactagctttttttttgtcttgagcatattttttacactgatgccatgcgatgttttttcattggctagtaaacaaggtaaagcatatgaagctatctcacttcatcacccttttctatcattccatgtcatcagagcccatgctaaccatagggagcatcaaccctgtcatgtggtccgatgactggaccgcagtgacagaagacggcagcttgtcagcacagtttgagcacacgatacttattaccgaagatggccctgaaatactgacacagtgttaatggaaggccaaataacaaagaacaatcgttagtcagctggcaagatcctgcatttctttttggggactaattggtccaacctaaactctgatgcaaaatggcaaactcacattgtaatctcggttcatcggtacaacgatatatgtatagaaattgtactattttcgaagttatatttgagagtgtgttttgttggtgctcgggtgagatgtcatcggtctgccgacgccgagtggttgcaagtag

SEQ ID NO: 56045 - DNA, 2033 bp, Zea Mays
caccgccccaccccaaaccacacacaagccgctcgcccgcaccgccgcacccgcacgccagaaacagctctcgcgttgcttccgcacgccgcccatggcgagcctgtcgtcgccgagtctcctctcttccttcctcggcgaccgcctcgcactctccactaggcctctccttctccgctccgctgtcccaggcagcaggcggctggcgtatcaagcaacgagaacgctatgcaacttggtggatatcctatttaacaggaggatgatgcaccagaaaacaaccctagacgcctgcgtcctgggaaagtatctccacgccttagtgttcccaatcatatacaacggcctccatatgtcaattctcgtcaacaacgacctggtatgaataatggacctgaaatacatgatgagaacgggatcgagtgcatgagagcttctggaaagcttgctgcacaggttttgaaatttgctgggactcttgtaaagccaggcataacgactgatgaaattgataaagcagtgcaccaaatgataattgataatggagcatatccttcacctcttggttattgtggatacccaaagagtgtctgcacttcagtgaatgaatgcatctgtcatgggattccggattctcgtccccttgaggatggagatatcatcaatattgatgttactgtctacctcaatggctaccatggtgatacatctgctacatttctttgcggtgatgttgatgacgaagctaagaaattagttaaggtgacaagagaatgtctcgacaaggctatatcgatttgttcacctggggtggagatcaaacaaattggtagaactatacagtatgtaatttctgagtaaccaagcttttaaacagatgcacatatttttttattatctttatcttaaaaaacaacattcagtttatcgataagctgtattgtcttaatttgtatgcgtaacagatctggtaatcaaaacgaactcttgttccaactactatacttacgacatttaatctttgaagggatcatgcagacaagttcaagtttggtgtagttagacagtttgttggccatggggttggcaaagtttttcatgctgagcctgttgtgcttcatttcagtgagttccccactttaacgaaaacatctttttattaattgctgtcttgcctcccggctatctcaaggttctggttgcactctgcaccatattaggatgtgatatctgtgccaatgacttcgaaatttgcaggaaacaatgaatggggacgtatgatgttgaatcaaacatttactataggtacacctttccacagcttgcccgtgttctattaacctgtgattaaaattgctgctctttttctattgacctgtgattaaaatttcacactgtggaacctagagataacatttaaaaaaaaacaggtacattattttgtggttctttcagccatgatctaataacattgcatttggtcactgtcatctttctgcacataagtactagctttttttttgtcttgagcatattttttacactgatgccatgcgatgttttttcattggctagtaaacaaggtaaagcatatgaagctatctcacttcatcacccttttctatcattccatgtcatcagagcccatgctaaccatagggagcatcaaccctgtcatgtggtccgatgactggaccgcagtgacagaagacggcagcttgtcagcacagtttgagcacacgatacttattaccgaagatggccctgaaatactgacacagtgttaatggaaggccaaataacaaagaacaatcgttagtcagctggcaagatcctgcatttctttttggggactaattggtccaacctaaactctgatgcaaaatggcaaactcacattgtaatctcggttcatcggtacaacgatatatgtatagaaattgtactattttcgaagttatatttgagagtgtgttttgttggtgctcgggtgagatgtcatcggtctgccgacgccgagtggttgcaagtag

SEQ ID NO: 56046 - DNA, 1749 bp, Zea Mays
caccgccccaccccaaaccacacacaagccgctcgcccgcaccgccgcacccgcacgccagaaacagctctcgcgttgcttccgcacgccgcccatggcgagcctgtcgtcgccgagtctcctctcttccttcctcggcgaccgcctcgcactctccactaggcctctccttctccgctccgctgtcccaggcagcaggcggctggcgtatcaagcaacgagaacgctatgcaacttggtggatatcctatttaacaggagaaatcaggatgatgcaccagaaaacaaccctagacgcctgcgtcctgggaaagtatctccacgccttagtgttcccaatcatatacaacggcctccatatgtcaattctcgtcaacaacgacctggtatgaataatggacctgaaatacatgatgagaacgggatcgagtgcatgagagcttctggaaagcttgctgcacaggttttgaaatttgctgggactcttgtaaagaaatcactataggaaggaggcaagacacttggttttctttccatctgatgcataacgactgatgaaattgataaagcagtgcaccaaatgataattgataatggagcatatccttcacctcttggttattgtggatacccaaagagtgtctgcacttcagtgaatgaatgcatctgtcatgggattccggattctcgtccccttgaggatggagatatcatcaatattgatgttactgtctacctcaatggctaccatggtgatacatctgctacatttctttgcggtgatgttgatgacgaagctaagaaattagttaaggtgacaagagaatgtctcgacaaggctatatcgatttgttcacctggggtggagatcaaacaaattggtagaactatacagtatgtaatttctgagtaaccaagcttttaaacagatgcacatatttttttattatctttatcttaaaaaacaacattcagtttatcgataagctgtattgtcttaatttgtatgcgtaacagatctggtaatcaaaacgaactcttgttccaactactatacttacgacatttaatctttgaagggatcatgcagacaagttcaagtttggtgtagttagacagtttgttggccatggggttggcaaagtttttcatgctgagcctgttgtgcttcatttcagtgagttccccactttaacgaaaacatctttttattaattgctgtcttgcctcccggctatctcaaggttctggttgcactctgcaccatattaggatgtgatatctgtgccaatgacttcgaaatttgcaggaaacaatgaatggggacgtatgatgttgaatcaaacatttactatagagcccatgctaaccatagggagcatcaaccctgtcatgtggtccgatgactggaccgcagtgacagaagacggcagcttgtcagcacagtttgagcacacgatacttattaccgaagatggccctgaaatactgacacagtgttaatggaaggccaaataacaaagaacaatcgttagtcagctggcaagatcctgcatttctttttggggactaattggtccaacctaaactctgatgcaaaatggcaaactcacattgtaatctcggttcatcggtacaacgatatatgtatagaaattgtactattttcgaagttatatttgagagtgtgttttgttggtgctcgggtgagatgtcatcggtctgccgacgccgagtggttgcaagtag

SEQ ID NO: 56047 - DNA, 1581 bp, Zea Mays
caccgccccaccccaaaccacacacaagccgctcgcccgcaccgccgcacccgcacgccagaaacagctctcgcgttgcttccgcacgccgcccatggcgagcctgtcgtcgccgagtctcctctcttccttcctcggcgaccgcctcgcactctccactaggcctctccttctccgctccgctgtcccaggcagcaggcggctggcgtatcaagcaacgagaacgctatgcaacttggtggatatcctatttaacaggagaaatcaggatgatgcaccagaaaacaaccctagacgcctgcgtcctgggaaagtatctccacgccttagtgttcccaatcatatacaacggcctccatatgtcaattctcgtcaacaacgacctggtatgaataatggacctgaaatacatgatgagaacgggatcgagtgcatgagagcttctggaaagcttgctgcacaggttttgaaatttgctgggactcttgtaaagccaggcataacgactgatgaaattgataaagcagtgcaccaaatgataattgataatggagcatatccttcacctcttggttattgtggatacccaaagagtgtctgcacttcagtgaatgaatgcatctgtcatgggattccggattctcgtccccttgaggatggagatatcatcaatattgatgttactgtctacctcaatggctaccatggtgatacatctgctacatttctttgcggtgatgttgatgacgaagctaagaaattagttaaggtgacaagagaatgtctcgacaaggctatatcgatttgttcacctggggtggagatcaaacaaattggtagaactatacaatctggtaatcaaaacgaactcttgttccaactactatacttacgacatttaatctttgaagggatcatgcagacaagttcaagtttggtgtagttagacagtttgttggccatggggttggcaaagtttttcatgctgagcctgttgtgcttcatttcagtgagttccccactttaacgaaaacatctttttattaattgctgtcttgcctcccggctatctcaaggttctggttgcactctgcaccatattaggatgtgatatctgtgccaatgacttcgaaatttgcaggaaacaatgaatggggacgtatgatgttgaatcaaacatttactatagagcccatgctaaccatagggagcatcaaccctgtcatgtggtccgatgactggaccgcagtgacagaagacggcagcttgtcagcacagtttgagcacacgatacttattaccgaagatggccctgaaatactgacacagtgttaatggaaggccaaataacaaagaacaatcgttagtcagctggcaagatcctgcatttctttttggggactaattggtccaacctaaactctgatgcaaaatggcaaactcacattgtaatctcggttcatcggtacaacgatatatgtatagaaattgtactattttcgaagttatatttgagagtgtgttttgttggtgctcgggtgagatgtcatcggtctgccgacgccgagtggttgcaagtag

SEQ ID NO: 56048 - DNA, 1449 bp, Zea Mays
caccgccccaccccaaaccacacacaagccgctcgcccgcaccgccgcacccgcacgccagaaacagctctcgcgttgcttccgcacgccgcccatggcgagcctgtcgtcgccgagtctcctctcttccttcctcggcgaccgcctcgcactctccactaggcctctccttctccgctccgctgtcccaggcagcaggcggctggcgtatcaagcaacgagaacgctatgcaacttggtggatatcctatttaacaggagaaatcaggatgatgcaccagaaaacaaccctagacgcctgcgtcctgggaaagtatctccacgccttagtgttcccaatcatatacaacggcctccatatgtcaattctcgtcaacaacgacctggtatgaataatggacctgaaatacatgatgagaacgggatcgagtgcatgagagcttctggaaagcttgctgcacaggttttgaaatttgctgggactcttgtaaaggcataacgactgatgaaattgataaagcagtgcaccaaatgataattgataatggagcatatccttcacctcttggttattgtggatacccaaagagtgtctgcacttcagtgaatgaatgcatctgtcatgggattccggattctcgtccccttgaggatggagatatcatcaatattgatgttactgtctacctcaatggctaccatggtgatacatctgctacatttctttgcggtgatgttgatgacgaagctaagaaattagttaaggtgacaagagaatgtctcgacaaggctatatcgatttgttcacctggggtggagatcaaacaaattggtagaactatacaggatcatgcagacaagttcaagtttggtgtagttagacagtttgttggccatggggttggcaaagtttttcatgctgagcctgttgtgcttcatttcagaaacaatgaatggggacgtatgatgttgaatcaaacatttactatagtaaacaaggtaaagcatatgaagctatctcacttcatcacccttttctatcattccatgtcatcagagcccatgctaaccatagggagcatcaaccctgtcatgtggtccgatgactggaccgcagtgacagaagacggcagcttgtcagcacagtttgagcacacgatacttattaccgaagatggccctgaaatactgacacagtgttaatggaaggccaaataacaaagaacaatcgttagtcagctggcaagatcctgcatttctttttggggactaattggtccaacctaaactctgatgcaaaatggcaaactcacattgtaatctcggttcatcggtacaacgatatatgtatagaaattgtactattttcgaagttatatttgagagtgtgttttgttggtgctcgggtgagatgtcatcggtctgccgacgccgagtggttgcaagtag

SEQ ID NO: 56049 - DNA, 1923 bp, Zea Mays
gcgggagacggcaggggcccaccgccccaccccaaaccacacacaagccgctcgcccgcaccgccgcacccgcacgccagaaacagctctcgcgttgcttccgcacgccgcccatggcgagcctgtcgtcgccgagtctcctctcttccttcctcggcgaccgcctcgcactctccactaggcctctccttctccgctccgctgtcccaggcagcaggcggctggcgtatcaagcaacgagaacgctatgcaacttggtggatatcctatttaacaggagaaatcaggatgatgcaccagaaaacaaccctagacgcctgcgtcctgggaaagtatctccacgccttagtgttcccaatcatatacaacggcctccatatgtcaattctcgtcaacaacgacctggtatgaataatggacctgaaatacatgatgagaacgggatcgagtgcatgagagcttctggaaagcttgctgcacaggttttgaaatttgctgggactcttgtaaaggcataacgactgatgaaattgataaagcagtgcaccaaatgataattgataatggagcatatccttcacctcttggttattgtggatacccaaagagtgtctgcacttcagtgaatgaatgcatctgtcatgggattccggattctcgtccccttgaggatggagatatcatcaatattgatgttactgtctacctcaatggctaccatggtgatacatctgctacatttctttgcggtgatgttgatgacgaagctaagaaattagttaaggtgacaagagaatgtctcgacaaggctatatcgatttgttcacctggggtggagatcaaacaaattggtagaactatacagtatgtaatttctgagtaaccaagcttttaaacagatgcacatatttttttattatctttatcttaaaaaacaacattcagtttatcgataagctgtattgtcttaatttgtatgcgtaacagatctggtaatcaaaacgaactcttgttccaactactatacttacgacatttaatctttgaagggatcatgcagacaagttcaagtttggtgtagttagacagtttgttggccatggggttggcaaagtttttcatgctgagcctgttgtgcttcatttcagaaacaatgaatggggacgtatgatgttgaatcaaacatttactataggtacacctttccacagcttgcccgtgttctattaacctgtgattaaaattgctgctctttttctattgacctgtgattaaaatttcacactgtggaacctagagataacatttaaaaaaaaacaggtacattattttgtggttctttcagccatgatctaataacattgcatttggtcactgtcatctttctgcacataagtactagctttttttttgtcttgagcatattttttacactgatgccatgcgatgttttttcattggctagtaaacaaggtaaagcatatgaagctatctcacttcatcacccttttctatcattccatgtcatcagagcccatgctaaccatagggagcatcaaccctgtcatgtggtccgatgactggaccgcagtgacagaagacggcagcttgtcagcacagtttgagcacacgatacttattaccgaagatggccctgaaatactgacacagtgttaatggaaggccaaataacaaagaacaatcgttagtcagctggcaagatcctgcatttctttttggggactaattggtccaacctaaactctgatgcaaaatggcaaactcacattgtaatctcggttcatcggtacaacgatatatgtatagaaattgtactattttcgaagttatatttgagagtgtgttttgttggtgctcgggtgagatgtcatcggtctgccgacgccgagtggttgcaagtag

SEQ ID NO: 56050 - DNA, 1476 bp, Zea Mays
gtctgattcagcccacggcctactacgcaggtgagaacagcgccctagacctagagccaggcaggcaggcccgcgcgggagacggcaggggcccaccgccccaccccaaaccacacacaagccgctcgcccgcaccgccgcacccgcacgccagaaacagctctcgcgttgcttccgcacgccgcccatggcgagcctgtcgtcgccgagtctcctctcttccttcctcggcgaccgcctcgcactctccactaggcctctccttctccgctccgctgtcccaggcagcaggcggctggcgtatcaagcaacgagaacgctatgcaacttggtggatatcctatttaacaggagaaatcaggatgatgcaccagaaaacaaccctagacgcctgcgtcctgggaaagtatctccacgccttagtgttcccaatcatatacaacggcctccatatgtcaattctcgtcaacaacgacctggtatgaataatggacctgaaatacatgatgagaacgggatcgagtgcatgagagcttctggaaagcttgctgcacaggttttgaaatttgctgggactcttgtaaaggcataacgactgatgaaattgataaagcagtgcaccaaatgataattgataatggagcatatccttcacctcttggttattgtggatacccaaagagtgtctgcacttcagtgaatgaatgcatctgtcatgggattccggattctcgtccccttgaggatggagatatcatcaatattgatgttactgtctacctcaatggctaccatggtgatacatctgctacatttctttgcggtgatgttgatgacgaagctaagaaattagttaaggtgacaagagaatgtctcgacaaggctatatcgatttgttcacctggggtggagatcaaacaaattggtagaactatacaggatcatgcagacaagttcaagtttggtgtagttagacagtttgttggccatggggttggcaaagtttttcatgctgagcctgttgtgcttcatttcagaaacaatgaatggggacgtatgatgttgaatcaaacatttactatagagcccatgctaaccatagggagcatcaaccctgtcatgtggtccgatgactggaccgcagtgacagaagacggcagcttgtcagcacagtttgagcacacgatacttattaccgaagatggccctgaaatactgacacagtgttaatggaaggccaaataacaaagaacaatcgttagtcagctggcaagatcctgcatttctttttggggactaattggtccaacctaaactctgatgcaaaatggcaaactcacattgtaatctcggttcatcggtacaacgatatatgtatagaaattgtactattttcgaagttatatttgagagtgtgttttgttggtgctcgggtgagatgtcatcggtctgccgacgccgagtggttgcaagtag

SEQ ID NO: 56051 - DNA, 1229 bp, Zea Mays
caccgccccaccccaaaccacacacaagccgctcgcccgcaccgccgcacccgcacgccagaaacagctctcgcgttgcttccgcacgccgcccatggcgagcctgtcgtcgccgagtctcctctcttccttcctcggcgaccgcctcgcactctccactaggcctctccttctccgctccgctgtcccaggcagcaggcggctggcgtatcaagcaacgagaacgctatgcaacttggtggatatcctatttaacaggaggtaagacaacttccggtcattgtattaagaaggagacattctcacttagatcaagaaaaccgagaagatctatctcactcatacaaatctgcaccatagcccatgtgaacgaacgcgaccagccgggctttagacatgtgctttgttgtgggacagataagaggtctttttaacctcctaaaatttgctcctacgggaagtcgaacgttgaactcatgacctgagccctttcaccttctacaaatatcattgtgttgtttcagtttacatgtgcaaaaaagtctaaggagtgatttaatatcttacgcagttgctgtaggattagatatgcagtacttgcagtgattgagattaaggccatgtttggaagcaacttagtttttaagaatccagtttctataaactggtttatgaaaaaaaactgatttatggtgtttggaaccacctcagtttttataaactagtttcagctaggggaggctagctccttggtttttaaataactaggaatctagtttctataaactggtatgtttggaaccacctcagttttcataaaccagtttcttaaaaattgggtgcttccaaacaggccctaattaaacactatgaactttcgaaaaaaaactactgagtactgaccttatggaatgtggtggaccatgtcttaattctgctgcataatgtattactgtggcaaaagggcctctagctgagttgattaggtggtttgattagcactccttatgtcttggattcgactccctgtaagagtggattttaggctgtgatttaaaaaatctcatcgtctgtcacatgccaaagcataggtctgaggtccggtcccagtcgtggtcggttctcatatgggctacaatgttgctatgtatgggtggtaggggttcagggttttcttgacctgcgtgataaggtattcttcttaatataatgtacagggactgtcttac

SEQ ID NO: 56052 - DNA, 1694 bp, Zea Mays
caaaccgccgcacggatcaccccttctcactgcctgtccaggcgccgccgcttcgccgctgcccgtttcttcgaaccactccgaagctgccccgccatggacagctccgccactgacggcgcgaggctaccgccgccaagggccgggagtcgcctctgcgtcaggtgcggcgagaggaaggccgcgctgaagcggcccaaaaccctagaacagatctgtagggaatgcttctatatcatctttgaggacgaaattcatcaaactattgtccagaattctctgtttaaagctggtgagcgtgtggcaatcggagcttctggtggaaaagattcaaccgtgcttgcatatgtgttatcggagttaaaccgtcagcacaactatggtcttgatttgttccttttatctgtcgatgaaggaatcacaggatatagagatgactcactagaaactgttaaaaggaatgaaatacagtacggcctgccactgaagattgtttcctataaagatttgtatggctggacaatggatgatattgtcaaagcaattggtctaaaaaacaattgtactttctgtggagtttttcgacgtcaggcactagatcgaggtgctgctctcctgaaagctgataagattgtaactgggcataatgcagatgacattgcagaaaccgtcttgctgaacattctgcgtggtgatattgcaaggttaagtagatgtacctttataactactggtgaagatgggccaataccaagatgcaagcccttcaagtatacctatgagaaggagatcgttatatatcctgtctatgaaatatcttatattttcatttttttactatgttgacttcatttaatatattttaaatccttaactgcatgacacgtatgcatacttcaaaaagctggattacttttccacagaatgtaatgtctggatcttttttctgttcagttcttttcattttttcccgcattgaaggagaccactttattccaatatcagaaaatgctaggatgtcacttgaatcaaaatataggtctcaaacatcactgtcagctctaccatttataggttatactgtgttctcttccactaagaccgtaaacttaagtgcacttctgctcaacttcattcctccaaacgtaacgtatatcagaaatatattaattctattgacctgtgccacgattctgttagaattgagaatgggttaatttggctatatcatgatccaggcatctattcaccaaatgcataccgtggttttgctcgtgaatttattaaagatttagaaagaatgagcagccttggctcagtagacgatgaatgttgcaggcctagagctatactagacatcataaaatccggtgaaaatttcagaatctccacaacaacaaggatgccagagcaaggaacgtgtgaacgatgtggctacatttctagtcagaaattatgcaaagcatgcgtcttgctggatggattgaatcgaggcttgccgaaactaggcattggaagtaccaaagcaggtgctagagctgacagtgatgtcgtgaaccaaaagaaattatgtggccacaattttgacgccatctttagtttgcttaaatcccaaaaactgccatgcttttggcgatacataagaacgtcttcaacagatcccaataatcctaattctgaatcttaatttaagg

SEQ ID NO: 56053 - DNA, 1601 bp, Zea Mays
caaaccgccgcacggatcaccccttctcactgcctgtccaggcgccgccgcttcgccgctgcccgtttcttcgaaccactccgaagctgccccgccatggacagctccgccactgacggcgcgaggctaccgccgccaagggccgggagtcgcctctgcgtcaggtgcggcgagaggaaggccgcgctgaagcggcccaaaaccctagaacagaattctctgtttaaagctggtgagcgtgtggcaatcggagcttctggtggaaaagattcaaccgtgcttgcatatgtgttatcggagttaaaccgtcagcacaactatggtcttgatttgttccttttatctgtcgatgaaggaatcacaggatatagagatgactcactagaaactgttaaaaggaatgaaatacagtacggcctgccactgaagattgtttcctataaagatttgtatggctggacaatggatgatattgtcaaagcaattggtctaaaaaacaattgtactttctgtggagtttttcgacgtcaggcactagatcgaggtgctgctctcctgaaagctgataagattgtaactgggcataatgcagatgacattgcagaaaccgtcttgctgaacattctgcgtggtgatattgcaaggttaagtagatgtacctttataactactggtgaagatgggccaataccaagatgcaagcccttcaagtatacctatgagaaggagatcgttatatatcctgtctatgaaatatcttatattttcatttttttactatgttgacttcatttaatatattttaaatccttaactgcatgacacgtatgcatacttcaaaaagctggattacttttccacagaatgtaatgtctggatcttttttctgttcagttcttttcattttttcccgcattgaaggagaccactttattccaatatcagaaaatgctaggatgtcacttgaatcaaaatataggtctcaaacatcactgtcagctctaccatttataggttatactgtgttctcttccactaagaccgtaaacttaagtgcacttctgctcaacttcattcctccaaacgtaacgtatatcagaaatatattaattctattgacctgtgccacgattctgttagaattgagaatgggttaatttggctatatcatgatccaggcatctattcaccaaatgcataccgtggttttgctcgtgaatttattaaagatttagaaagaatgaggcctagagctatactagacatcataaaatccggtgaaaatttcagaatctccacaacaacaaggatgccagagcaaggaacgtgtgaacgatgtggctacatttctagtcagaaattatgcaaagcatgcgtcttgctggatggattgaatcgaggcttgccgaaactaggcattggaagtaccaaagcaggtgctagagctgacagtgatgtcgtgaaccaaaagaaattatgtggccacaattttgacgccatctttagtttgcttaaatcccaaaaactgccatgcttttggcgatacataagaacgtcttcaacagatcccaataatcctaattctgaatcttaatttaagg

SEQ ID NO: 56054 - DNA, 1231 bp, Zea Mays
caaaccgccgcacggatcaccccttctcactgcctgtccaggcgccgccgcttcgccgctgcccgtttcttcgaaccactccgaagctgccccgccatggacagctccgccactgacggcgcgaggctaccgccgccaagggccgggagtcgcctctgcgtcaggtgcggcgagaggaaggccgcgctgaagcggcccaaaaccctagaacagatctgtagggaatgcttctatatcatctttgaggacgaaattcatcaaactattgtccagaattctctgtttaaagctggtgagcgtgtggcaatcggagcttctggtggaaaagattcaaccgtgcttgcatatgtgttatcggagttaaaccgtcagcacaactatggtcttgatttgttccttttatctgtcgatgaaggaatcacaggatatagagatgactcactagaaactgttaaaaggaatgaaatacagtacggcctgccactgaagattgtttcctataaagatttgtatggctggacaatggatgatattgtcaaagcaattggtctaaaaaacaattgtactttctgtggagtttttcgacgtcaggcactagatcgaggtgctgctctcctgaaagctgataagattgtaactgggcataatgcagatgacattgcagaaaccgtcttgctgaacattctgcgtggtgatattgcaaggttaagtagatgtacctttataactactggtgaagatgggccaataccaagatgcaagcccttcaaaattgagaatgggttaatttggctatatcatgatccaggcatctattcaccaaatgcataccgtggttttgctcgtgaatttattaaagatttagaaagaatgaggcctagagctatactagacatcataaaatccggtgaaaatttcagaatctccacaacaacaaggatgccagagcaaggaacgtgtgaacgatgtggctacatttctagtcagaaattatgcaaagcatgcgtcttgctggatggattgaatcgaggcttgccgaaactaggcattggaagtaccaaagcaggtgctagagctgacagtgatgtcgtgaaccaaaagaaattatgtggccacaattttgacgccatctttagtttgcttaaatcccaaaaactgccatgcttttggcgatacataagaacgtcttcaacagatcccaataatcctaattctgaatcttaatttaagg

SEQ ID NO: 56055 - DNA, 1253 bp, Zea Mays
caaaccgccgcacggatcaccccttctcactgcctgtccaggcgccgccgcttcgccgctgcccgtttcttcgaaccactccgaagctgccccgccatggacagctccgccactgacggcgcgaggctaccgccgccaagggccgggagtcgcctctgcgtcaggtgcggcgagaggaaggccgcgctgaagcggcccaaaaccctagaacagggaatgcttctatatcatctttgaggacgaaattcatcaaactattgtccagaattctctgtttaaagctggtgagcgtgtggcaatcggagcttctggtggaaaagattcaaccgtgcttgcatatgtgttatcggagttaaaccgtcagcacaactatggtcttgatttgttccttttatctgtcgatgaaggaatcacaggatatagagatgactcactagaaactgttaaaaggaatgaaatacagtacggcctgccactgaagattgtttcctataaagatttgtatggctggacaatggatgatattgtcaaagcaattggtctaaaaaacaattgtactttctgtggagtttttcgacgtcaggcactagatcgaggtgctgctctcctgaaagctgataagattgtaactgggcataatgcagatgacattgcagaaaccgtcttgctgaacattctgcgtggtgatattgcaaggttaagtagatgtacctttataactactggtgaagatgggccaataccaagatgcaagcccttcaagtatacctatgagaaggagatcgttatgtatgcatacttcaaaaagctggattacttttccacagaatgcatctattcaccaaatgcataccgtggttttgctcgtgaatttattaaagatttagaaagaatgaggcctagagctatactagacatcataaaatccggtgaaaatttcagaatctccacaacaacaaggatgccagagcaaggaacgtgtgaacgatgtggctacatttctagtcagaaattatgcaaagcatgcgtcttgctggatggattgaatcgaggcttgccgaaactaggcattggaagtaccaaagcaggtgctagagctgacagtgatgtcgtgaaccaaaagaaattatgtggccacaattttgacgccatctttagtttgcttaaatcccaaaaactgccatgcttttggcgatacataagaacgtcttcaacagatcccaataatcctaattctgaatcttaatttaagg

SEQ ID NO: 56056 - DNA, 1704 bp, Zea Mays
gggattcgaggcaggccggaatccagccaaatattttcttttctggaagaaagctaggctgtgtcacaagtcgatcctatttgggccaaaagcccaattccggagcccacttgactgttcgcgcctttccccaaaccgccgcacggatcaccccttctcactgcctgtccaggcgccgccgcttcgccgctgcccgtttcttcgaaccactccgaagctgccccgccatggacagctccgccactgacggcgcgaggctaccgccgccaagggccgggagtcgcctctgcgtcaggtgcggcgagaggaaggccgcgctgaagcggcccaaaaccctagaacagatctgtagggaatgcttctatatcatctttgaggacgaaattcatcaaactattgtccagaattctctgtttaaagctggtgagcgtgtggcaatcggagcttctggtggaaaagattcaaccgtgcttgcatatgtgttatcggagttaaaccgtcagcacaactatggtcttgatttgttccttttatctgtcgatgaaggaatcacaggatatagagatgactcactagaaactgttaaaaggaatgaaatacagtacggcctgccactgaagattgtttcctataaagatttgtatggctggacaatggatgatattgtcaaagcaattggtctaaaaaacaattgtactttctgtggagtttttcgacgtcaggcactagatcgaggtgctgctctcctgaaagctgataagattgtaactgggcataatgcagatgacattgcagaaaccgtcttgctgaacattctgcgtggtgatattgcaaggttaagtagatgtacctttataactactggtgaagatgggccaataccaagatgcaagcccttcaagtatacctatgagaaggagatcgttatgtatgcatacttcaaaaagctggattacttttccacagaatgtaatgtctggatcttttttctgttcagttcttttcattttttcccgcattgaaggagaccactttattccaatatcagaaaatgctaggatgtcacttgaatcaaaatataggtctcaaacatcactgtcagctctaccatttataggttatactgtgttctcttccactaagaccgtaaacttaagtgcacttctgctcaacttcattcctccaaacgtaacgtatatcagaaatatattaattctattgacctgtgccacgattctgttagaattgagaatgggttaatttggctatatcatgatccaggcatctattcaccaaatgcataccgtggttttgctcgtgaatttattaaagatttagaaagaatgaggcctagagctatactagacatcataaaatccggtgaaaatttcagaatctccacaacaacaaggatgccagagcaaggaacgtgtgaacgatgtggctacatttctagtcagaaattatgcaaagcatgcgtcttgctggatggattgaatcgaggcttgccgaaactaggcattggaagtaccaaagcaggtgctagagctgacagtgatgtcgtgaaccaaaagaaattatgtggccacaattttgacgccatctttagtttgcttaaatcccaaaaactgccatgcttttggcgatacataagaacgtcttcaacagatcccaataatcctaattctgaatcttaatttaagg

SEQ ID NO: 56057 - DNA, 405 bp, Zea Mays
tggtagcggcaagaagggcgtcgccgacgacatggcagcgtccaatcaggagctatgaccgtgccgatgggagagacgagacaggcatggggagtgggtgcacagcgccacacacttcacatgcatgaagcttacttttgctcggctcctccttcctgatgctgttgttcgatgaacctcttgaatagtgcttgccatcatcgacccatgggctagctagctaggttttgtagattgttgtcagcgagtctgcttattgtgtgctaggtggcctggccgctgaaaagagccacccaaaaaaatgtgtgtaattttcttgtatatatattctaagtgctatgatattctctctatccagcaagatgtccactcactagcagatccatgcccagtgtttgcttcttt

SEQ ID NO: 56058 - DNA, 2144 bp, Zea Mays
cacacgtgctgatgttctttctggaattgaaagtttcttaaaacccttgagccgtctccaggtacttatcatatcttatgagactttccgcatgcattcttcaaaatttgaaagacctggcagctgtgaccttctcatatgtgatgaggcccacaggctgaaaaatgatcagacactgacaaataaggctttggctgcccttccatgtacacggcgtattctcttgtccggtaccccaatgcagaatgatttggaagaattcttttcaatggtgaatttcacaaatccaggggttttgggggacgcttcatattttcgtcgttattatgaagcaccaatcatctgtgggagagaacccactgcaagtgcagaagaaaagaaattgggatctgagagatctgcagagcttagtgcaaaagtaaatcagtttatcttgagacgaacaaatgctctgttatccaatcacttgcctccaaagattattgaagtcgtttgctgcaagctgactcctttgcaaacaacactgtacaaccacttcatccattccaaaaacattaaacgcttgatatctgaagaaacaaagcaatccaaaattctagcatatattaccgctcttaagaaattatgcaatcatccaaagctgatctacgacaccataaaaagtaacaattcaggtgtatctggttttgatgactgtctacactttttcccgccagatcttttttcaggaagatctggatcatggactggcggaggaggaatgtgggtagagctatccggaaaaatgcatgtattagcaagattactggggcatctacgtcagaaaaccgatgatcgtattgttcttgtatcaaattatactcagacattggatctatttgttcaattatgccgggaaagaagatacccatatgttagacttgacggatcaacatccatcaataaaaggcagaagctggtgaaccaattcaacgatctatctagggacgagtttgtctttctacttagtagcaaggcaggtggctgtgggcttaacctggtaggtggaaatcgtttggttctcttcgaccctgattggaaccctgccaatgataagcaggctgctgctagagtgtggagagatggacagaaaaagagagtttacatatataggttcttaagcacaggaactatcgaggagaaggtatatcagcgtcaaatgtcgaaagaaggcctgcaaaaagttattcagcaggagcaagcggacaataaaatgcaggggaattctctttcaacagaagatctgcgcgatctttttatttttcatgaacatgtcaggtctgaaatacataaaaatttgaagtgtagccgctgtgacaaggatggagatccagctttggatggtactggttttgcagccactggtcataaggcttcaatacctggagtgcaagattatgctgatattggtgggtttggtgagatatctggatgtttgcagaaaatgaatagcacacatcagcagattggaagacctactgaagaagacttaggaagttggggacatcactgtgacccatcaactgtacctgatactatactgcagtgttctgctggcgaagaggtttcttttgttttcaccaatcaggttgatggaaaacttgttccagttgaatctatggtgcgatcagcagctcatcaacaaaacggaatagcagccaccggagaaaaaggagtgcagatacccaattctcctagcaaacctggaaagcaatccttaaatggcaagaatttgaagatgggatttcatttaaagaattcgtctttgaaatgttcaaccaaatccagaccatcaccaaattgcttgcaagggttgatgaaaaccagcccctttttggatcaacctcaaattaaaaagcttcatgttgcttctgatatatctgacgatgattttgtttgagtgtcaattcagaattacttagtctcatatatgttgatgtgctatctgttgcatatataatgccatcagctttgtcggtgcctattgcatcttttattcaggtttctacaattttcttttaataaaaaataggtcctaataaggtatgtacatagaaaagcaaaaactacttacaatttggaatggagtataaacaatcatttta

SEQ ID NO: 56059 - DNA, 1012 bp, Zea Mays
cttccctttcctaccgccaaaatttttgcatccccttgcccaaaatccattcaactcccaatcgaaaccgcggccgcctctccacttgctagtcccgaaagccgaaacagcaatcgaagcatctcagagccagctccattcatccccattccgtttattcaccgtccgttgcagcgaatgccctcgaggagccagtacgaccgccgcggcagcgatggcgacgaggacgagatcatttcagtcccatccgacctggaggaatcagagtcggaggcgaaccgcggggccgaggcggacgacgacgaatacgtgggggaaagcagtgacgcgagcggcggggacgaagcggaggaaggaggcagcagcgattgcggcgagggctgggacggggacgaccacggtggcaacgtcaggcggccacttcggggcctgcaacgcggcgtggcggctcccgataaggagatgaaatcgcagaacgtcgatgctcttgtcaggggcaacctggttgtaaggaggcaaccactcattccacgtattctttcagtttctgatgcagcagcaatagttcgtaagccattcaaacctccatgccaaaatggatatagtgacagtaatgagcagcttgctcgacgcctttcagctcgtaagagatttgtcccgtggggttcaacacagacatttgcaattaatattatacaccatcttccacagtcaccagttgttgcttctgatagttcatcagaaaaggaggaacctcttccacctggtattgagccattgattttgtggcaacgcgatgagtgtgagaaggaaaattgcaattctgcttctatcgaagttgaccacttgctcgtgcgttacctccgaccccatcaaagggaaggagttcagtttatgtttgattgtgtctctgggtcactgagtgctgatggtatttctggttgcattttagctgatgatatgggattggggaagactttacagtcgataacattactatatacccttcttt

SEQ ID NO: 56060 - DNA, 994 bp, Zea Mays
ggtaccctgcatacagatagtggctgggaaaccatggggaagaagttgaagaaacccgggcaagccgaggggagaaagtgggcaccatggagttccacaaatgtgacacctaacacagcaaggccagcatggggtggcagtggttcctcgcacccttctggaaccagctgggctcaagctccagatcatggtgctgctaccagaggcaatcctagaccaccatcacaaacatcgcgccctgttctgactccacctctagcaaatggttggcagtggcaatccaggcctcgcccatctggatctgaagtcaagaaggatgatgctcctccatctggttctgtccctgagttctttgaagtattgaatacattgagtttggaacaaattaatggacaaactcggcaatggcattgcccggcatgcaaaaatggacctggggcgattgactggtacaaagggctgcaacctttagtgactcatgctagaacaaagggttctacaagggttaaacttcacagggaattggctgcattgctggaagaggagctttctcgcaggggaacttcagtgttaccagcgggtgaacaatttgggaaatggaagggactgcaagaaagcactgatcgtgagatagtgtggccaccaatggttattgttatgaataccttcttggaaaaagatgaagatgataagttgggttccctcatcccttttaagcataacttaacacttatgcatcttcttagagcctttgatctgactgaacaaaggtgcaatatgctccctaagtggatcagtttatattacctttctatatttattttgtgttgtgcatgttgaccacaatgatcctctttattatcttatatataatatcattcttctaattggcttcaatacattacgtccccacatttttgtgagctgagttggattataaatgcttctttctaagatcttatagaaaaagacctttatatcttttcaagggcca

SEQ ID NO: 56061 - DNA, 988 bp, Zea Mays
atcgttctggttcgcatggtctacacattgtaccggaaggttcatccatcagaacgatgcccaaactgcttaatcttccttgcaatgtttctctgctcaatctgctcttgcaatttttatttagtcagccccgctctctttaatgctttgcccttcaattgcttcagtacctattggatcaacaatttactcgtaaaatcggttggtggtcatcataaacacaaatacatttctatacagtggagttattttatttctagacagtggcttcagtacctctgccaaagatgaagatggcatcagaccaagtatagacaaattatctttaagttctatttccagtgcaatcagaggttcggcgggcacaataacatgtggtgagctccatagttacttagtgttagtcatctaggttcttgtgtttaggtgttttgatgattttcctttaaaaaatactaatacaggctacaagcaccacatcctcgcaaacagcaacaaccagacaatctcaaaactaaccaccaccgattcaattcaaaattgcagagcagaccaagctatgagtacgttgactaaaggggaagagagcatgttcgtgtgaggggataaaaggcccgaggaccgctcagctcaacagtaaccctcatggaggggctgaggagggataggagagagggcactcacgatgtcatctaggtggagacaatcgacgttggtggcacgaccaaatcagagaacaaggaccttgtcgaggcttatcgcagacggtggcatccacctcactcttcagccacattgtttgcagcaacactgaccccatctccgcacctgtcatctctcctcatgtcgctccttggtggagtgtgcctctgtgcgcgatcgaggctggcgttgtggcccccggcaagtggaataacgacgaccgacgataggggcagtgggaggaagattaagagctgcgacgtgagggggagacgacagttgtgac

SEQ ID NO: 56062 - DNA, 1580 bp, Zea Mays
gagatgtatactccagttttctcaatctactaccaacatataacactaaactagtttggtgaccgtgcgttgctacagagatcatataagttcatgtgttttgctatgtgatgtgagggatctacattattaaaagtcatttttcatttttctattagacctagtgaggtactcgtacctgttatcaaacaaagaccatataaatctattgattttgtcatttacattataataatttctttactgtgcaacttccactagttacatcagcatttcttacacggacacctcgtacctgttatccctagcctcagtcatgagaacctgccaagatcaaacaaagcgacatcatggtaactaaaagagaatgttttcaggtgatattgtttataataatagaacaatatactaactgatggtgcactctattcttattcatgcattccagatgaattatgtgtccacactacaacacactaatatcctttcagagtgaaagactgtaaaagaagagggaagtcttctataaatccggaaactagaaagttcagagtgatgtttcagataacgaaatctaagtacataatggaccaaaagattttggataacaatttggtagccatagtactcatcaaaccaatttgcgcttacgtctctattaccttttgtgttttagtcggattttatttgatagtcttttgtgcacttgaatggcacattttcatcttggatgttgagttcatctacacatgagaattaatgtgtatctctaatgtgttttatggttaaagaaataaaaaaggaaatgcatgaaaacaaagtttaagcatagaaaacgaaaggttaagcaaattaatgcatttcatattatgttatataacgaggattttcaacatgaaatacatatcagttactaatttcacgatgacaagctgaatcatactattatatttttttagaaacaataaagtaacttaacaaaaaaaatgatcttgactgtggcgagcatcctatctaacagaaaagtcgtgtgttcgaagagactggtgatctataccttctgtttcagcaatgatttgcagagattttatgccttttttgttcgctttgcagcctaaatcccgcatgctaaactctacgcccactcctacgacttgacgattaatgttcggtgtagcagtagaagtccttttgaatggcttggcaattttaggaataggcaaaatacttgactcttttaggaactttattgaggaactccacttgtttagtatcctataaccataaaaaacaaatagacctccgtccatttagtgatcttgcgttcatcttaaaaaagaaaagcgacaggaaaatcaaggattctactctctagtgcattcttaggaacgaattaagatgtagggccagtaaatcaatttggcatttctttctggacgcgagggtgcataatcggtcattcctacaaacagtttgagaaatgcaagcacaacaacaaagaccccctaccctgcatggacattgcttcttacacaaccagaaatgcaagtttcatctggcgagtcaacctggacccccta

SEQ ID NO: 56063 - DNA, 1129 bp, Zea Mays
cccgcccccatacctcgacgactaccaggtgacttcggcttcgaccctctgggcctcggcgaggagcccgaagccttgaagtggtacgttcaggccgagctcgtgcactgccggttcgccatggcaggggtcgccggcatccttttcactgacttgctccgcgtatcagggaacagcgacctccccgtgtggttcgaagcaggcgcggcgaaattcgacttcgcgaacaccacggcgctcttcttcgtccagctcttcttgatggggttcgctgaaaccaagaggtacatggacttcaaaaatccaggatcgcaagcagaggaagggacattcatagggttagaggctgcactcgcaggtcaacagccaggctaccccgggggtccactgttcaatccactaggactcgcaaaggatatagagaatgctcatgacgagaagctcaaagaaatcaagaacgggaggttggcaatggtagccatgcttggcttcatggtgcaagcatccgtaactcatgccggccccatcgacaatctcttgacacacctttcggacccgttcaacaaaaatatcattcacacattctcctcttcctaagtactcgtcccaatgcccggatgctatggcacaaaaaggtcacaatgtttttgaacacaacagaacaacatgattattgatttacgtccttctccccaccgaataggggaaggaaggttagggaagcgttcaatcaattcaatgagatagtgtaatctatagcaaactcagatacgctatgatgtgagatgaagcgtacttcgtgcaatcaataagttccatttattcatatggacaacaaagttcctctctgatcattttgaaacaacaattcatattaatgaaatatatcaaagatttgtgtcgttatacttatggaagctccgtccggagaagatgctacaagtgctaggttaccaatggtcgatccctgtagcgctggcactatttacctatttataggactatgtcaatgtaaatttttatatggagttataagaatatacatcctattatacaagtagctctatgtaagcgaagatgtttaattatgtcttttatggtagagacattccatatatgtcttttcttc

SEQ ID NO: 56064 - DNA, 1427 bp, Zea Mays
  misc_feature (1)..(2): n is a, c, g, or t
nnttcttctgaaatagtgaaattcaaatagtttgttagtattcatacctgaatttgagaccctttggaattccagagaaccttttgtactttagcacattcttacatctttttcatcaatacttgtacattgtttactttattaggttttcaaaagtctatcatttttttttacatttttgtcaatcatcacagtgcatttagttttttttagcaaaaaggcactatggagcttctttgtgacgatgatctaatgttaatcaccatagagcatttgacaaagtgaaatgcagtcgacgtccatcagataactgaaccatagatctttagtgtccatcagataaaaggcactatggagtagttcataagagttgtccttttcttcttaaattagtttatcagacaaggaactgctgtaacttccatttgtgaatagttgcttcttggattctgatttatgacaatatagcttattgtcagaaatatttctgatgaactagaacatgtcagctttgcagccttgtatgactaagttctttgtgtagtgagatcgcattctttatatctgctgttgtttagtaaatgactatcttttctaatttgcaggttgaaatgttggagaagcaaaagaatgagcgaacttggttggtgtgaaggaaattgttttctacaaaaggaattctataatctgtggattcccttgtcatgaagtattacagtcaaccttatcaacatcatgagtatcgtatagctctacgatcatatcactttggctctttgtgtgtacttggttggcaatggatggtttgaaacctcaacaattattactgaaaaatagaagtttttctgaatttgtggtttccgtgacttgttggcacgagaaatgtcattgtccattggcagctactgatacccagagacttgagttcaaactataagtctatcatgcccataaatttgactcaagcaataccttatatgtgaagtaaacctgtagagaaactggaaaacgattaaggccaagaggtgtggatgtggttaattgtgttttcttacaactggggctaggtggtagcatttaagctggttaaatgatttcgaatttctctgaaatgattggccaacttccacaactgttgttgtcatgctgtctgcttttctgtatgcagtttgcctcttgatactaatactgtattataaggttacctatgtttttatcaatgttttactcaagctcttcccactatgttaatagaagcagcctatctgtgatcttatgttggtctaataaaactgagaacggccaagaaaatatgcagcccctgttttaccaccaaatgttaaaaagtgtttgtgtaggataaactatcgtggtgtgctgatgttatgagaaatgaaaccaataagattgatggtcaactgtcactt

SEQ ID NO: 56065 - DNA, 1242 bp, Zea Mays
gacacctgtccacccattcccctcgcctcgccgccgcggacttcccttcccgcacccgcatcaaattcctcttgttccgcggaatttcccttgctaatcctggtatctcctgtcgctaagccactctactccgcctaacccccgctctgagctcaccggactggcggctccgtccggctctctcagcgtgcgcgtgctcgtgaggagggctctttcgaagcgtgtgaatccggtgggcgacgtgaaccagggatggatttcccgggaggaagcgggaggcggccgcagcagcaggagccggagcacctgccgccgatgacgccgctcccgctggcgaggcaggggtcggtgtactctctcacgttcgacgagttccagagctcgctcggcggggccgccaaggacttcggctccatgaacatggacgagctcctccgcagcatctggtccgcggaggaggtacacagcgtcgcggccgccagcgcgtcggcggcggaccacgcccacgccgccgcgcgggggcccgtgtccatccagcaccagggctcgctcaccctcccccgcacgctcagccagaagaccgtcgacgaggtctggcgcgacctcacgtgcgtcggcggaggaccctcctccggctccgccgcgcccgcagcgccgcccccgccggcccagcggcacccgacgctcggggagatcacgctggaggagttcctcgtccgcgcgggcgtggtgcgggaggacatgacggcgccgccgcccgtaccgccggcgccggtgtgcccggctcctgctccgcgcccgccagtgctgtttccccatggcaatgtgttggctcccttggtgcctccactgcaattcgggaatgggttcgtgtcgggggctgtcggtcagcagcgaggtggtcccgtgccccccgcggtatcgcccaggcctgtgacggccagcgcgttcgggaagatggagggagacgacttgtcatccttgtcgccatcaccggtcccgtacattttcggtggtgggttgaggggaaggaagccaccggctatggagaaggtggttgagaggaggcagcgccggatgatcaagaaccgggagtcggccgcgaggtcgcgccaaaggaaacaggagagggaaacagggaagagacttgggacagctaccaggcgtaatggattgtggtatatggatcatgaggggactaatggtacaatatgcactatgctggcaacaagaatggaagag

SEQ ID NO: 56066 - DNA, 2366 bp, Zea Mays
aaaaagaaaaagggcaaaaaagccgagcgggtttgaacgaagcgaaagcggagctgctctccccgcccgcgctcgctccatcgctttactatcattttgctcttttggtcgtttctcagcggctcacggatcgcgcgcgctcccccgctcgtcgtggcgcggccgcgctccacgtttcaatccgtttttgctgccgtgcggtgacgtgacgcctctaccgttggcgctttctgcagacggtgggactgggaccacgcggcgcggccgatccagatcccgcgcactcgtccgcgctgctgcctctcaccagcggcggcagcggcagcggctttgcctcgcggggcacggttgcgccagacgaggaagaggggagagacggggcgagctcggctgaatcgcaggaagtggcagaagcagcaaacgattcgttctcctactcactaagagagtgccagaagcagcggcgtctcaagtcagagaggtctgcactggtgcggccaccggcctcgcataagctcaataatgccggaggtattgagcttctagtgctctcgccgaggtgcttgattggtggtaacccgggaggaatgagcaagagctcaacgacatcatcccggagcagatcaggcacaggcacgttcccaagccctgggactccgagctgcaaccggcattgtgcaggcagcatgcagtactccaagggttggagttcagagcgcgtgccactgggcactggtaggaatagaaggtatgggggcagtggggttgtgcttccatttaacaatgggaggaagctgccatcgaaatgggaggatgcagagaagtggatcctaagtccagtttcctgtgatgggttggggaggatgtctgcaccagctccacatcatagacggcccaagtcgaagagtgggccacttggccatccagctggcattccaggggcttatgcggctgtttcaccgcttgttccttgctttgatggtgtgctggcagcagctaatttcgcagcacattcacctttctctgctggggttctcataccagagcacgggcgcattggcgacttcagcagtggaagagacagatgtggtgatgacggtagcagcagatcctactccgctgagaaagagtcctatatattaagatctgcaagcatacatgcatggacagaaacacttatggaggcatctgcttttgctaatatctcagaagaaaccgtacaagatgataaactgcaacgccagacagaagcaacttccatgatttccagtccaatcataaagaaagacatcggcacacagatgagtcctgaggatagtatatcttctccaaaagcgagacattcctgctccagtctgccttcaggacatctgataaaggaagcaaatagtcatatacctaaacctgaaattcgggacgtgcaggttgatgaccaagtaactgtgacccggtggtccaagcgacatgtaacacgaggctctgataagaggtcaacaaatattattgaatggaggaagaagaccactgaaacccgaactccatcttttgatgaaaaagaaagagaaagatgcatgtcacagtgcaaaagggaggaagcaaagatcacagcttgggaaaatctacagaaagcaaaagcagaggcagctatccgtaagctggagatgaaacttgaaaagaaacggtcatcatcaatggacaaaattttaggcaaactccgctctgctcagaagaaagcacaagacatgcgaagtgtagtttcttctagtgaaggtcagtgtagtgtgagggcaaccaagaagacatcttcctctgtcaaaactggcaggcctttcagctgctgctttacctaccgtgcttgctagttgtgatacacagttggtgcctgtggatacagcaatggatataggtctattcgttatggacgcgaagggaagtcagttgggttttgactacaaggcctaattgttaatgagatttgcactgatgaatgagatatcgttatggagcagcagacgaagaaagccacgcgaaatccactcatgtaactgatggagtggactaatgcagtctagtatgcgacgatcaatctctgtacacccggtagaaaaagttcatgagcttcatggcagttagaatcaggattgagctgatattcatcccgcttgatgtgtagctagcattcttgtaactggaattgtgtgtgtaatgcaaatcatgggcgcattagactgtaatgaagaaaaagtcagggctgcgcctttagaatgcagcttgctcactttttgagtttagtactgagactgggcttgtttgttattggttggcagcaattggaactgtgacgacgtatattttccttttttttg

SEQ ID NO: 56067 - DNA, 2384 bp, Zea Mays
aaaaagaaaaagggcaaaaaagccgagcgggtttgaacgaagcgaaagcggagctgctctccccgcccgcgctcgctccatcgctttactatcattttgctcttttggtcgtttctcagcggctcacggatcgcgcgcgctcccccgctcgtcgtggcgcggccgcgctccacgtttcaatccgtttttgctgccgtgcggtgacgtgacgcctctaccgttggcgctttctgcagacggtgggactgggaccacgcggcgcggccgatccagatcccgcgcactcgtccgcgctgctgcctctcaccagcggcggcagcggcagcggctttgcctcgcggggcacggttgcgccagacgaggaagaggggagagacggggcgagctcggctgaatcgcaggaagtggcagaagcagcaaacgattcgttctcctactcactaagagagtgccagaagcagcggcgtctcaagtcagagaggtctgcactggtgcggccaccggcctcgcataagctcaataatgccggaggtattgagcttctagtgctctcgccgaggtgcttgattggtggtaacccgggaggaatgagcaagagctcaacgacatcatcccggagcagatcaggcacaggcacgttcccaagccctgggactccgagctgcaaccggcattgtgcaggcagcatgcagtactccaagggttggagttcagagcgcgtgccactgggcactggtaggaatagaaggtatgggggcagtggggttgtgcttccatttaacaatgggaggaagctgccatcgaaatgggaggatgcagagaagtggatcctaagtccagtttcctgtgatgggttggggaggatgtctgcaccagctccacatcatagacggcccaagtcgaagagtgggccacttggccatccagctggcattccaggggcttatgcggctgtttcaccgcttgttccttgctttgatggtgtgctggcagcagctaatttcgcagcacattcacctttctctgctggggttctcataccagagcacgggcgcattggcgacttcagcagtggaagagacagatgtggtgatgacggtagcagcagatcctactccgctgagaaagagtcctatatattaagatctgcaagcatacatgcatggacagaaacacttatggaggcatctgcttttgctaatatctcagaagaaaccgtacaagatgataaactgcaacgccagacagaagcaacttccatgatttccagtccaatcataaagaaagacatcggcacacagatgagtcctgaggatagtatatcttctccaaaagcgagacattcctgctccagtctgccttcaggacatctgataaaggaagcaaatagtcatatacctaaacctgaaattcgggacgtgcaggttgatgaccaagtaactgtgacccggtggtccaagcgacatgtaacacgaggctctgataagaggtcaacaaatattattgaatggaggaagaagaccactgaaacccgaactccatcttttgatgaaaaagaaagagaaagatgcatgtcacgtgcaaaagggaggaagcaaagatcacagcttgggaaaatctacagaaagcaaaagcagaggcagctatccgtaagctggagatgaaacttgaaaagaaacggtcatcatcaatggacaaaattttaggcaaactccgctctgctcagaagaaagcacaagacatgcgaagtgtagtttcttctagtgaaggtcagtgtagtgtgagggcaaccaagaagacatcttcctctgtcaaaactggcaggcctttcagctgctgctttacctaccgtgcttgctagttgtgatacacagttggtgcctgtggatacagcaatggatataggtctattcgacctcttctcaggcaacagttatggacgcgaagggaagtcagttgggttttgactacaaggcctaattgttaatgagatttgcactgatgaatgagatatcgttatggagcagcagacgaagaaagccacgcgaaatccactcatgtaactgatggagtggactaatgcagtctagtatgcgacgatcaatctctgtacacccggtagaaaaagttcatgagcttcatggcagttagaatcaggattgagctgatattcatcccgcttgatgtgtagctagcattcttgtaactggaattgtgtgtgtaatgcaaatcatgggcgcattagactgtaatgaagaaaaagtcagggctgcgcctttagaatgcagcttgctcactttttgagtttagtactgagactgggcttgtttgttattggttggcagcaattggaactgtgacgacgtatattttccttttttttg

SEQ ID NO: 56068 - DNA, 2203 bp, Zea Mays
aaaaagaaaaagggcaaaaaagccgagcgggtttgaacgaagcgaaagcggagctgctctccccgcccgcgctcgctccatcgctttactatcattttgctcttttggtcgtttctcagcggctcacggatcgcgcgcgctcccccgctcgtcgtggcgcggccgcgctccacgtttcaatccgtttttgctgccgtgcggtgacgtgacgcctctaccgttggcgctttctgcagacggtgggactgggaccacgcggcgcggccgatccagatcccgcgcactcgtccgcgctgctgcctctcaccagcggcggcagcggcagcggctttgcctcgcggggcacggttgcgccagacgaggaagaggggagagacggggcgagctcggctgaatcgcaggaagtggcagaagcagcaaacgattcgttctcctactcactaagagagtgccagaagcagcggcgtctcaagtcagagaggtctgcactggtgcggccaccggcctcgcataagctcaataatgccggaggtattgagcttctagtgctctcgccgaggtgcttgattggtggtaacccgggaggaatgagcaagagctcaacgacatcatcccggagcagatcaggcacaggcacgttcccaagccctgggactccgagctgcaaccggcattgtgcaggcagcatgcagtactccaagggttggagttcagagcgcgtgccactgggcactggtaggaatagaaggtatgggggcagtggggttgtgcttccatttaacaatgggaggaagctgccatcgaaatgggaggatgcagagaagtggatcctaagtccagtttcctgtgatgggttggggaggatgtctgcaccagctccacatcatagacggcccaagtcgaagagtgggccacttggccatccagctggcattccaggggcttatgcggctgtttcaccgcttgttccttgctttgatggtgtgctggcagcagctaatttcgcagcacattcacctttctctgctggggttctcataccagagcacgggcgcattggcgacttcagcagtggaagagacagatgtggtgatgacggtagcagcagatcctactccgctgagaaagagtcctatatattaagatctgcaagcatacatgcatggacagaaacacttatggaggcatctgcttttgctaatatctcagaagaaaccgtacaagatgataaactgcaacgccagacagaagcaacttccatgatttccagtccaatcataaagaaagacatcggcacacagatgagtcctgaggatagtatatcttctccaaaagttgatgaccaagtaactgtgacccggtggtccaagcgacatgtaacacgaggctctgataagaggtcaacaaatattattgaatggaggaagaagaccactgaaacccgaactccatcttttgatgaaaaagaaagagaaagatgcatgtcacagtgcaaaagggaggaagcaaagatcacagcttgggaaaatctacagaaagcaaaagcagaggcagctatccgtaagctggagatgaaacttgaaaagaaacggtcatcatcaatggacaaaattttaggcaaactccgctctgctcagaagaaagcacaagacatgcgaagtgtagtttcttctagtgaagttgtgatacacagttggtgcctgtggatacagcaatggatataggtctattcgacctcttctcaggcaacagttatggacgcgaagggaagtcagttgggttttgactacaaggcctaattgttaatgagatttgcactgatgaatgagatatcgttatggagcagcagacgaagaaagccacgcgaaatccactcatgtaactgatggagtggactaatgcagtctagtatgcgacgatcaatctctgtacacccggtagaaaaagttcatgagcttcatggcagttagaatcaggattgagctgatattcatcccgcttgatgtgtagctagcattcttgtaactggaattgtgtgtgtaatgcaaatcatgggcgcattagactgtaatgaagaaaaagtcagggctgcgcctttagaatgcagcttgctcactttttgagtttagtactgagactgggcttgtttgttattggttggcagcaattggaactgtgacgacgtatattttccttttttttg

SEQ ID NO: 56069 - DNA, 2257 bp, Zea Mays
actccccgtttttctccgcaccgccctgctccccgaccccaactgccgtctccttcctcggggaatgcgaccgcgcgccagagcatgctccgcccggagcccgcgctagggttccccgccgccggccccgcccgcgcgcccgagcgccgccgtaagaagcagccgccgacgaggcggaggcgaccggccggtgccacaacggtgggactgggaccacgcggcgcggccgatccagatcccgcgcactcgtccgcgctgctgcctctcaccagcggcggcagcggcagcggctttgcctcgcggggcacggttgcgccagacgaggaagaggggagagacggggcgagctcggctgaatcgcaggaagtggcagaagcagcaaacgattcgttctcctactcactaagagagtgccagaagcagcggcgtctcaagtcagagaggtctgcactggtgcggccaccggcctcgcataagctcaataatgccggaggtattgagcttctagtgctctcgccgaggtgcttgattggtggtaacccgggaggaatgagcaagagctcaacgacatcatcccggagcagatcaggcacaggcacgttcccaagccctgggactccgagctgcaaccggcattgtgcaggcagcatgcagtactccaagggttggagttcagagcgcgtgccactgggcactggtaggaatagaaggtatgggggcagtggggttgtgcttccatttaacaatgggaggaagctgccatcgaaatgggaggatgcagagaagtggatcctaagtccagtttcctgtgatgggttggggaggatgtctgcaccagctccacatcatagacggcccaagtcgaagagtgggccacttggccatccagctggcattccaggggcttatgcggctgtttcaccgcttgttccttgctttgatggtgtgctggcagcagctaatttcgcagcacattcacctttctctgctggggttctcataccagagcacgggcgcattggcgacttcagcagtggaagagacagatgtggtgatgacggtagcagcagatcctactccgctgagaaagagtcctatatattaagatctgcaagcatacatgcatggacagaaacacttatggaggcatctgcttttgctaatatctcagaagaaaccgtacaagatgataaactgcaacgccagacagaagcaacttccatgatttccagtccaatcataaagaaagacatcggcacacagatgagtcctgaggatagtatatcttctccaaaagttgatgaccaagtaactgtgacccggtggtccaagcgacatgtaacacgaggctctgataagaggtcaacaaatattattgaatggaggaagaagaccactgaaacccgaactccatcttttgatgaaaaagaaagagaaagatgcatgtcacagtgcaaaagggaggaagcaaagatcacagcttgggaaaatctacagaaagcaaaagcagaggcagctatccgtaagctggagatgaaacttgaaaagaaacggtcatcatcaatggacaaaattttaggcaaactccgctctgctcagaagaaagcacaagacatgcgaagtgtagtttcttctagtgaaggtcagtgtagtgtgagggcaaccaagaagacatcttcctctgtcaaaactggcaggcctttcagctgctgctttacctaccgtgcttgctagttgtgatacacagttggtgcctgtggatacagcaatggatataggtctattcgacctcttctcaggcaacagttatggacgcgaagggaagtcagttgggttttgactacaaggcctaattgttaatgagatttgcactgatgaatgagatatcgttatggagcagcagacgaagaaagccacgcgaaatccactcatgtaactgatggagtggactaatgcagtctagtatgcgacgatcaatctctgtacacccggtagaaaaagttcatgagcttcatggcagttagaatcaggattgagctgatattcatcccgcttgatgtgtagctagcattcttgtaactggaattgtgtgtgtaatgcaaatcatgggcgcattagactgtaatgaagaaaaagtcagggctgcgcctttagaatgcagcttgctcactttttgagtttagtactgagactgggcttgtttgttattggttggcagcaattggaactgtgacgacgtatattttccttttttttg

SEQ ID NO: 56070 - DNA, 563 bp, Zea Mays
cagaaccgaacaaatgtttgtatattagagcgcctacctgagctttgaaccatggtattcaaagactggtcattgagaactctgatttcagcaaaattttcctggccagcgagggtctgagtgaagtttgaaatagaggatgcgataggagatgtcataggggagctgctgaagacagcctaagaggaacccaagtggatatttttctcgcatggtgcaaaagggaggaagcaaagatcacagcttgggaaaatctacagaaagcaaaagcagaggcagctatccgtaagctggagatgaaacttgaaaagaaacggtcatcatcaatggacaaaattttaggcaaactccgctctgctcagaagaaagcacaagacatgcgaagtgtagtttcttctagtgaaggtcagtgtagtgtgagggcaaccaagaagacatcttcctctgtcaaaactggcaggcctttcagctgctgctttacctaccgtgcttgctagttgtgatacacagttggtgcctgtggatacagcaatggatataggtctattcgtttctaatgctag

SEQ ID NO: 56071 - DNA, 1855 bp, Zea Mays
acccgtgagatcgcgggacccacactcagcctcagcgaacccctctgcgttccgccgcagcttccgaagacatcgatgtcctagcaagttggaaacccccctccctcccctcatattcgcctccgcctccctctccctccgtccctcgtcaaatccacgcgaccgcgagagctctcagaaggccctagcacgcaaaaaccccacgagagagacgaatcttccgaatctctcggtggcgatggcgctctccgaccgctcccgcgagtcgctcctcccgagcttcctctacggctcctcggcgcgctctttcgctgccacaggagccgccgcgcgcctccctgtctcctccccggcgcctgccgcggctggagcaggaggcggcgtgccgttctcgatccaggcgcccaaggagaagatcgagatgtactcgccggccttctatgccgcctgcactgccggaggaatcgccagctgcgggctcacccacatggccgtcacgcctctcgacctcgtcaagtgcaatatgcagattgacccagcgaaatacaagagtatctcatctggatttggtatcctgttaaaggagcaaggggccaggggtttcttcaggggatgggtgcctactttgcttggttacagtgctcagggggcttgcaagtttggcttctatgagttctttaagaagtattactcggacatcgcagggcctgagtatgcccaaaagtacaagactctaatctacctcgcaggatctgcatctgctgaggtaattgctgatgtggctctctgcccttttgaagctgtgaaggtacgtgtgcagacacaacctggatttgctcgtggattgagtgatgggctccccaaatttgtccgatctgagggtgttcttgggctctacaagggaattgttcctctctggggtcgtcagattccttataccatgatgaagtttgcttcctttgagaccatcgttgagcttatctacaagcatgctgtgcctgttccgaagtctgagtgcagcaagactacccagttgggtattagctttgctggtggttacgttgccggtgtcttctgtgctattgtttctcacccggctgacaaccttgtgtctttcctgaacaatgccaagggagctacagtgggagatgctgttaagaagcttggtctctggggtctcttcactagaggacttcctcttcgtatcgtcatgattggtacccttactggtgctcagtggggaatttacgatgcattcaaagtgatggttggactcccaacaacgggaggtgttacacctgccccagcagcagaggctgaattgaaagccagtgcttgattttttttttctgtgttccctgagatcatatttggtagagtggaattgtatcagccagtcgagagcttagttcccgaatctttttttaatcgtaacggaaaatttgtccgtcatccttctgatgagaggaactcattaaacaggctgaattgaaagccagtgcttgattttttttttctgtgttccctgagatcatatttggtggagtggaattgtatcagccggtcgagagcttagttcccgaatcttttttaatcttaacggaaaatttgtccgtcatccttctgatgagaggaactcattaaacaggcgaaataggtcttttttgcgctgggaaaagtttacgcttgatgcataataatttgtaggacggcaacgctctagagcgcaggttttgttcacctcctgtaccgaggaatgcttaaagttacatttcacattatggtctttatgaaagagtgcacctcggttgatgttccttttgccgttgctggaactatgcgatttgctgtaatt

SEQ ID NO: 56072 - DNA, 1566 bp, Zea Mays
atgggcaaggccggcagcgttttccctagccctgcgccggcaaccaggtccagccgctgccggtgtgggtgtggcgcggtcgttgaaaaggtggtggtcaacggcaagtgcgtatccgtgctgttcctggcagtcagcgggttcctctcggccttcttcctgctgcttcgtctccggacatcaggagacgtccccgatgatcctggcatactcgccggtagcttcacagactggaatgctcgaaaaagagatatatacccaaataggtgtccccaacagcaaggtttcagtttccatgcaaccatacgtatatgcagacaccacttatgtgaagtttggtgttcttccagacccaagaaatacctccatgagcacagaatccatcgacgcactgagagcgtccttgataaaacttacgctacagcagctgaatctgtctctgacaccgtctgtttttggagacacgttttgcttggagattctagggttcccaggagggatcacggtactgcttccgcatagtgctccgcatgctgacttgagagaacctctcttcaatgtcacgtttaactcgaccattcatgaaataaggggggttcttgaggagatgaagattgagcttggatccacactagagcaaacaccagatgaggaattatatgtcgagttaacgaatatgaatggctcaacggttgcaacaccagttacagttcaagtttccatctcccccgttgaccacagcatctatctaggaaactacaggctcgaacagctagccagaatcataacaaactggagtgcaaggaaccttggcctaaatacctcaattttcggcgagattataggtttgacgttgtctccactcctacaagccttccttccatccagtgctcctagcttctctccaatatcaccgccatccatgccctggcctccaataccggaggggccaaaaatctacccttccagggaaatctcatgccctcctttggttaaaattcaaaatgcaaccactcaacatcgcagactaatgcgtgtgccatccaagacgatttctccacaattgtcgacacggtttcataggaagcacacatctgagggcaagaaaaatagtattgcagtgccagcaacaacattcgctgcaccagcacccaagcagaaatgaatgcttgatctctaggtgcctcaaaggttccataagtttccaaacccctgcctagttacaccaaggtgggtatgaagtagctgtgtgtgtgcctaggctaaagttgtaagaaatctccgtcaagtgtaagtagaaaatgggaagttagtagccagaaagctggataactcccaaacttcatgtataatagtatggcaatagctaaagaaatggctggccatctgtcaattatgataattttccaaactcgtgcatctccatgaagaatgtcattctaacaaaatttccaagagccacctgcatgttgttcactggtataacttgttcctgtattgagctttctattcttatttctgtttttttttgttctacatccggttgcctagatttcacttctttac

SEQ ID NO: 56073 - DNA, 1784 bp, Zea Mays
caaacccatccccatccgcgtcgccgttgcggcaacggcgacgtcgcgacgagccccggcggcagctttccagctgctccccaaccccaacgcaacgcagccgcctgcatgctctccagctgtgtgatcactggcgagcttaagagagactagtgcgcgctgacagatgcgctcaccatgggcaaggccggcagcgttttccctagccctgcgccggcaaccaggtccagccgctgccggtgtgggtgtggcgcggtcgttgaaaaggtggtggtcaacggcaagtgcgtatccgtgctgttcctggcagtcagcgggttcctctcggccttcttcctgctgcttcgtctccggacatcaggagacgtccccgatgatcctggcatactcgccgaaatcgaggcaggcttcattttgtcagtgccacactcacaggtagcttcacagactggaatgctcgaaaaagagatatatacccaaataggtgtccccaacagcaaggtttcagtttccatgcaaccatacgtatatgcagacaccacttatgtgaagtttggtgttcttccagacccaagaaatacctccatgagcacagaatccatcgacgcactgagagcgtccttgataaaacttacgctacagcagctgaatctgtctctgacaccgtctgtttttggagacacgttttgcttggagattctagggttcccaggagggatcacggtactgcttccgcatagtgctccgcatgctgacttgagagaacctctcttcaatgtcacgtttaactcgaccattcatgaaataaggggggttcttgaggagatgaagattgagcttggatccacactagagcaaacaccagatgaggaattatatgtcgagttaacgaatatgaatggctcaacggttgcaacaccagttacagttcaagtttccatctcccccgttgaccacagcatctatctaggaaactacaggctcgaacagctagccagaatcataacaaactggagtgcaaggaaccttggcctaaatacctcaattttcggcgagattataggtttgacgttgtctccactcctacaagccttccttccatccagtgctcctagcttctctccaatatcaccgccatccatgccctggcctccaataccggaggggccaaaaatctacccttccagggaaatctcatgccctcctttggttaaaattcaaaatgcaaccactcaacatcgcagactaatgcgtgtgccatccaagacgatttctccacaattgtcgacacggtttcataggaagcacacatctgagggcaagaaaaatagtattgcagtgccagcaacaacattcgctgcaccagcacccaagcagaaatgaatgcttgatctctaggtgcctcaaaggttccataagtttccaaacccctgcctagttacaccaaggtgggtatgaagtagctgtgtgtgtgcctaggctaaagttgtaagaaatctccgtcaagtgtaagtagaaaatgggaagttagtagccagaaagctggataactcccaaacttcatgtataatagtatggcaatagctaaagaaatggctggccatctgtcaattatgataattttccaaactcgtgcatctccatgaagaatgtcattctaacaaaatttccaagagccacctgcatgttgttcactggtataacttgttcctgtattgagctttctattcttatttctgtttttttttgttctacatccggttgcctagatttcacttctttac

SEQ ID NO: 56074 - DNA, 1058 bp, Zea Mays
aactgctacccggcttcctcagccgtcgtctcatctgccgccgccatactcctgtccacctgagtacctgaccggcatccttccccctcctgcccgatccctcgaggcggagatccctaggccgtcggccgggatggcgggggcgctggccctcgcggtgttgctcgccgtcgcgtcgctccatgctgaggcggtgtggctggacgtgccacagtcggggaccaagtgcgtgtcggaggagatccagtctaacgtggtggtgctcaccgactattccatcatgttacttcaccatatgggaacaccttgcatcacagtgagaattctacagttggtcaatttgcattcacaaccgcagaagctggaaactacgttgcatgcttctgggttgatagtgcagagaaaggatcaggagtatctgtgaatcttgactggaagattgggatcgcaacaaaagattgggatgctattgctaagaaggaaaaaattgagggtgtagaactagagcttcggaaacttgaagtggcagtgcaggccattcatcagaacttgatatacctcaaagaaagggaagcagagatgcgaactgtgagtgagacaacaaattcaagggtcgtctggttcagtactctgtcgctatgggtctgcattgcggtatcggttttgcaagtccgacaccttcaagggttcttcagaaagaagaagctcatttagagtctctctgtaagatgttgcgctgtggttcagatgttgttcaccttggaagggtacaattttgccttttacatggaacatttcacaccagtgatgactgatgggctacttgtactgtatgtaatttaagtacgattggatcgaaaatctatatttcagggaaaaaaatcttatatttaggctccagcacatacatgtaagtgtaaccaggggatagcccatctaggcatgttgtagaatgagactgaactcatcgtgacagcaaaatcgtggatacttaggcacttgttgccttccgatcggtcttatcgatgctagccctcgattattacgatccaaacgaa

SEQ ID NO: 56075 - DNA, 1093 bp, Zea Mays
aactgctacccggcttcctcagccgtcgtctcatctgccgccgccatactcctgtccacctgagtacctgaccggcatccttccccctcctgcccgatccctcgaggcggagatccctaggccgtcggccgggatggcgggggcgctggccctcgcggtgttgctcgccgtcgcgtcgctccatgctgaggcggtgtggctggacgtgccacagtcggggaccaagtgcgtgtcggaggagatccagtctaacgtggtggtgctcaccgactattccatcatgtacgagtcccacccctattcgcaccccaccatcgccgtcaaggttacttcaccatatgggaacaccttgcatcacagtgagaattctacagttggtcaatttgcattcacaaccgcagaagctggaaactacgttgcatgcttctgggttgatagtgcagagaaaggatcaggagtatctgtgaatcttgactggaagattgggatcgcaacaaaagattgggatgctattgctaagaaggaaaaaattgagggtgtagaactagagcttcggaaacttgaagtggcagtgcaggccattcatcagaacttgatatacctcaaagaaagagatgcgaactgtgagtgagacaacaaattcaagggtcgtctggttcagtactctgtcgctatgggtctgcattgcggtatcggttttgcaagtccgacaccttcaagggttcttcagaaagaagaagctcatttagagtctctctgtaagatgttgcgctgtggttcagatgttgttcaccttggaagggtacaattttgccttttacatggaacatttcacaccagtgatgactgatgggctacttgtactgtatgtaatttaagtacgattggatcgaaaatctatatttcagggaaaaaaatcttatatttaggctccagcacatacatgtaagtgtaaccaggggatagcccatctaggcatgttgtagaatgagactgaactcatcgtgacagcaaaatcgtggatacttaggcacttgttgccttccgatcggtcttatcgatgctagccctcgattattacgatccaaacgaa

SEQ ID NO: 56076 - DNA, 1563 bp, Zea Mays
tgctcatttgtacagatgaacttactagagagagacggttatgtgtgatcatgatatacttgccaaaacaaaggacactgttattttctcctaccttgcgtgtggagcaagctcagaatctgcaactacttcagttaataacaggtcgtacatgcaaagatctgatgatgtcacagtagatagtactatttctgggaagaagaccataagattttctctgaaaaacagagatgttgatagaaacacagctgacagctcaagaacattgatatcattcaaacgcaagttgagtgagaggggaccacgagctggtaagcaacttccacagaggccaactattgcagcagagaaactggaagatgaagacaagaagacaactgataagaagagagaaatgtttcaaaaagagctcgttatgacattagatcaagcttctacacagaatcaacgtcttcctaagggatatgcttatgttcctcgggattccttatcaaaagagaagctatggaatcgaaatacacagccacttaatccgcaggagcctggtggataggatcagttgaaatcaagtcggttcatttctctcgaggaaggtcatgagaaacttgtgcaggcatgttctttgcaactgaaaacgacaagcggcaagcaggggctggccagtgctattgccgcaagggttacagccaatccgtgatcttttttggacccaagttgcataatggtgcagactgaggtattcgtgtgaatgtatggtgtggcaccataacaagaaggctgcccccacccaggtaacgcgaatgatcagcaatatgggtgaattgacctacttgtgctataccaaagacagcgtgccaactgtatatatgagttttattagtgtgcagatttcataaaattgccctgtacattctttcctttgcaaatgctagtttagttgtgcaggagaaaaagaattataaatccgttttggttggataagaaaagaaattagtttggttctttatcatggttcagaagaaaatgcagtggtgcttgcgggcaacgttgggcagctgtttgcctgatacatgtactctgtaaggatggtgaaggtgccaaaaataaggtcatgtcactgcttttcgccaactatttgttggtgctaactgggaagtggtatcatacaggctgagaaactgtgttttagctcttgtcgccggtggtttccgagagccccctttttttaaggggaacagtggtctctttaccggtttttagatatcaagatagcaacaatgttgaagttgggctgtaagttcttaggttgagaaggtatgatagctgagctttttttttttcaatttacatgtggggtatattgtatctgagacaggtttttttcctgcttgccgtccagattataaccttggttgggcctgtttagtaatttgttcggaagcggttcatgttttcaattctattgctcgatgtctgcagagatcgcctattacatgcaaaatttatttccaaattttaggttacattagctttgttaagtcaaccatttgtaattttggcaag

SEQ ID NO: 56077 - DNA, 5612 bp, Zea Mays
ctccgcccactggatccgagacccacgcgcaaaactcgggccgggaaaaactcgccaggaaagagaacgctcggaagggaaacacaggctcgggctcgagacgaaaccctaaccctacctccgcttgcctcgacgtccctcctcgccggaggcctcccccggagacgcagcctccgctgagggctccggcggcgatgcgcccctcccagttggaggcgttatgagcggggaaatggcgcgcgccgaggccttgccagagggggaggcccccgggttcggtgtcgacctgtatgcgcaagccaccaaggctgtgtccctgcggacgccgttcgagggcgatgaggcggcgcccagggttcccacgctgcccgcgcggctcgtcagctgggcagggccaggggacgcccggaagaagcacaagaagattctgcctccccctcctgatgatgctgctccggagcctccaccacagtcacctgtagtcacccctgcgaaggttggcttgtgggaccagtttgaggcgtatttccgtcccgtaacactggctgacgtcgaaatgttaagaccaaagctcccatttggctacagcaaggttgactcatgtatgctagtaccatttctgggcagtggcaatgagtcaacaacccaagctgagacatatgacgtggctgtggctgaaacaaccttgtatttgggtgttggtggtgaagaagtggtcactaatcgggagcgcggcgtgcaaagtgtgcatctggctagtcagaaagagaggaatgatcaaagcattgaacatgacatacatgatgtggttgtgcaacagatggtcagcgacaaagagcttaataggcacagaggggtacagggcatacacgaagtttctattcagttgggagggagatcatctggagtggatcaagctgggagcagtagtggcattgttttaggacaatttgtcaatgaggaaggaacttcacttaattggctgctaggagcaacaggccggtttgttctcacttcagagcgacccaacaagaagagaaagcttctgggtgtcgatgctgggttagagcagcttgttctgcttccacgcgtaggggctgaggcatctgcaagctgtgatgtttgttgtcttggagaaagttccatggagtccaataggatagttaactgcagcaactgcaaggtgtcagtgcaccagaagtgttatggtttgcatgctgtgcctgatgggcaatggttgtgtgcttggtgtacatatctagagtctacagggtggtcattgaaggaagatgctggtaacacccagtcgatgccttgtgctttatgcccaaaggagaaaggagctcttaaacctgttaaagtggagtctactcgaaatgagggtattggccaccaaaaatttgtgcacttgtactgtagtctctgggcaccagaggtttttgttgaggacatggagtcaatggaacctgtacttagccttgaaaatgtccaagagaatcggatgaagttgacgtgcagtatctgcaagattaagcatggtgcatgtgtccgatgtagtcatgggacgtgtcggacgccctttcaccctatatgtgcaagagagtcaaagcatcaaatggagatatgggggaaatccaggcaccctaatgttgagttgagagcattttgctcaaagcattctgcagttgaatacgccagttctgtagataccagtaaccttgcatctgaacagaatcctagaaaatctggcccatacaataccaccctcaattctgggaaaattccagtaattaggttcacacgcaaaaacaaggacaaattcatcagttgtggaaccagtgcctctagttctggtaacctgatcagagtcaagacaatagagcaagatgctttagctaacacagttagaaatgcaaattctcaacctattcgaatatgggaaacaggtactggtcatccctctgttagtggtgatcatatcagaagttctggtgatattgctgtagtgcttagaaagctaattgacagtggaaaagttagtgttagtgatgtagcatctgaagtcggtatttcttcggaatccttggaagctgctcttgtgggtgaaactaccacgttttcccatggtttgacgctgaaaattatcaagtggctccaaaattctgtgcatatgcatgatgatgacaagggtgtacttgttgatgtgccggatttcgctgtaactgaacctgcacgaacaagatctaaaagcaacagcaagatactgaaagaaaataatgcaacatgcgcaacaggtgtgactattgtgcaaaatggagaaaagaacatggttaaagaagattctaatcccgagtgtgctgctaaagaatttgcaaacgaatctactcaggggttttctccaagcagcagcaaggatgttttaaaggacgaacatggaatattgatactgaacgacacctctggaaacaaagaatctggtacctccacacagataccaaatgaaaagcaaggtgcattacttggaagaaaaaataatgacttaactgaggtcgaactgggtccatgcttagagaaaggagtaccttcacatggccattgttttgttcagggtgataatggtgtagatggggtaggttcagttgaaaatagcttcaacacttcaaattgctctcatggacaaccttttttcaactttgatgattcacattcttatattcacccattcattaagaaaaaggtatctcatcattgggacattactttcaatcagaataaggaaactctgaatcactatatacaagagtcatcatatccttcacatgagaaaataccaactgattccttggtagaagtagagagtacagcagatacaaccgtgacagatcaagttttgaaagcaaggtcttcaaaaattcttgagcattcacctgatgatgaagttgaaggagagatggtgtacttacaatctaggctgcttgacaatgctgttgttctgaagcacagatatgaaaaattgatagcaaaggttgtccaaaatctttgtcgcgagctggatgctttcagtaaaagaaaatgggatcttatctttgtgaatcagtttcttcgtgatgttagagaagctaaaaaacgtgggagaaaagaaaagagacataaggaagcccaagctgtactagctgcagctgcagctgctattgcatcctcctcacggaactcaactgtgagaaaagatgcaaaggagaatgcaccagagagttctccaaaacttgttgctggatcttcaagggttggtcaacggactttttcattgccacggattaatgattcatcaaagtcatccaacaacaaagtatcatcagataacaaatttggaagttttcatatgccaatttcttcaaaagaaaatgggctatactgtgatgtatgcatgcgaactgaaactctgttgaaccgaatatttgtctgctccagatgcaagattgctacagaaatctggaaaattctattgggccctggaactgcgaactttgtgaagatgaagacatttcatcagaagctacaagtacaaccgttagtgataaatcacattgtaatggcaagttaccctttgcacagtgtggcatgtgccatggcacatcaggtgcttttagaaagactgtagatgggaagtgggttcatgctttctgtgctgagtggttgttggataccaagtatgtaaggggacaagatagccctgtagaaggaatggaaaaccttgtagagggaaaagacacttgttgtctctgcctctgcaatgttggcatgtgcttaaggtgtagtagtggggattgcaacattactttccatcctacttgcgctagaagttctggtttatacatgaacacgaaagggtttggtactacatcacagcacaaagcatactgtgacaaacacagcgtagaacagaaagaggctgatgcacagcaatatggacctgaggagctcaggagcatgaaacgaatgagggttgaattggagaaactacgcctgttgtgtgagagaataattaagagagagaaggtgaagagagagacggttatgtgtgatcatgatatacttgccaaaacaaaggacactgttattttctcctaccttgcgtgtggagcaagctcagaatctgcaactacttcagttaataacaggtcgtacatgcaaagatctgatgatgtcacagtagatagtactatttctgggaagaagaccataagattttctctgaaaaacagagatgttgatagaaacacagctgacagctcaagaacattgatatcattcaaacgcaagttgagtgagaggggaccacgagctggtaagcaacttccacagaggccaactattgcagcagagaaactggaagatgaagacaagaagacaactgataagaagataattatgcaacagagagaaatgtttcaaaaagagctcgttatgacattagatcaagcttctacacagaatcaacgtcttcctaagggatatgcttatgttcctcgggattccttatcaaaagagaagctatggaatcgaaatacacagccacttaatccgcaggagcctggtggataggatcagttgaaatcaagtcggttcatttctctcgaggaaggtcatgagaaacttgtgcaggcatgttctttgcaactgaaaacgacaagcggcaagcaggggctggccagtgctattgccgcaagggttacagccaatccgtgatcttttttggacccaagttgcataatggtgcagactgaggtattcgtgtgaatgtatggtgtggcaccataacaagaaggctgcccccacccaggtaacgcgaatgatcagcaatatgggtgaattgacctacttgtgctataccaaagacagcgtgccaactgtatatatgagttttattagtgtgcagatttcataaaattgccctgtacattctttcctttgcaaatgctagtttagttgtgcaggagaaaaagaattataaatccgttttggttggataagaaaagaaattagtttggttctttatcatggttcagaagaaaatgcagtggtgcttgcgggcaacgttgggcagctgtttgcctgatacatgtactctgtaaggatggtgaaggtgccaaaaataaggtcatgtcactgcttttcgccaactatttgttggtgctaactgggaagtggtatcatacaggctgagaaactgtgttttagctcttgtcgccggtggtttccgagagccccctttttttaaggggaacagtggtctctttaccggtttttagatatcaagatagcaacaatgttgaagttgggctgtaagttcttaggttgagaaggtatgatagctgagctttttttttttcaatttacatgtggggtatattgtatctgagacaggtttttttcctgcttgccgtccagattataaccttggttgggcctgtttagtaatttgttcggaagcggttcatgttttcaattctattgctcgatgtctgcagagatcgcctattacatgcaaaatttatttccaaattttaggttacattagctttgttaagtcaaccatttgtaattttggcaag

SEQ ID NO: 56078 - DNA, 5515 bp, Zea Mays
ctccgcccactggatccgagacccacgcgcaaaactcgggccgggaaaaactcgccaggaaagagaacgctcggaagggaaacacaggctcgggctcgagacgaaaccctaaccctacctccgcttgcctcgacgtccctcctcgccggaggcctcccccggagacgcagcctccgctgagggctccggcggcgatgcgcccctcccagttggaggcgttatgagcggggaaatggcgcgcgccgaggccttgccagagggggaggcccccgggttcggtgtcgacctgtatgcgcaagccaccaaggctgtgtccctgcggacgccgttcgagggcgatgaggcggcgcccagggttcccacgctgcccgcgcggctcgtcagctgggcagggccaggggacgcccggaagaagcacaagaagattctgcctccccctcctgatgatgctgctccggagcctccaccacagtcacctgtagtcacccctgcgaaggttggcttgtgggaccagtttgaggcgtatttccgtcccgtaacactggctgacgtcgaaatgttaagaccaaagctcccatttggctacagcaaggttgactcatgtatgctagtaccatttctgggcagtggcaatgagtcaacaacccaagctgagacatatgacgtggctgtggctgaaacaaccttgtatttgggtgttggtggtgaagaagtggtcactaatcgggagcgcggcgtgcaaagtgtgcatctggctagtcagaaagagaggaatgatcaaagcattgaacatgacatacatgatgtggttgtgcaacagatggtcagcgacaaagagcttaataggcacagaggggtacagggcatacacgaagtttctattcagttgggagggagatcatctggagtggatcaagctgggagcagtagtggcattgttttaggacaatttgtcaatgaggaaggaacttcacttaattggctgctaggagcaacaggccggtttgttctcacttcagagcgacccaacaagaagagaaagcttctgggtgtcgatgctgggttagagcagcttgttctgcttccacgcgtaggggctgaggcatctgcaagctgtgatgtttgttgtcttggagaaagttccatggagtccaataggatagttaactgcagcaactgcaaggtgtcagtgcaccagaagtgttatggtttgcatgctgtgcctgatgggcaatggttgtgtgcttggtgtacatatctagagtctacagggtggtcattgaaggaagatgctggtaacacccagtcgatgccttgtgctttatgcccaaaggagaaaggagctcttaaacctgttaaagtggagtctactcgaaatgagggtattggccaccaaaaatttgtgcacttgtactgtagtctctgggcaccagaggtttttgttgaggacatggagtcaatggaacctgtacttagccttgaaaatgtccaagagaatcggatgaagttgacgtgcagtatctgcaagattaagcatggtgcatgtgtccgatgtagtcatgggacgtgtcggacgccctttcaccctatatgtgcaagagagtcaaagcatcaaatggagatatgggggaaatccaggcaccctaatgttgagttgagagcattttgctcaaagcattctgcagttgaatacgccagttctgtagataccagtaaccttgcatctgaacagaatcctagaaaatctggcccatacaataccaccctcaattctgggaaaattccagtaattaggttcacacgcaaaaacaaggacaaattcatcagttgtggaaccagtgcctctagttctggtaacctgatcagagtcaagacaatagagcaagatgctttagctaacacagttagaaatgcaaattctcaacctattcgaatatgggaaacaggtactggtcatccctctgttagtggtgatcatatcagaagttctggtgatattgctgtagtgcttagaaagctaattgacagtggaaaagttagtgttagtgatgtagcatctgaagtcggtatttcttcggaatccttggaagctgctcttgtgggtgaaactaccacgttttcccatggtttgacgctgaaaattatcaagtggctccaaaattctgtgcatatgcatgatgatgacaagggtgtacttgttgatgtgccggatttcgctgtaactgaacctgcacgaacaagatctaaaagcaacagcaagatactgaaagaaaataatgcaacatgcgcaacaggtgtgactattgtgcaaaatggagaaaagaacatggttaaagaagattctaatcccgagtgtgctgctaaagaatttgcaaacgaatctactcaggggttttctccaagcagcagcaaggatgttttaaaggacgaacatggaatattgatactgaacgacacctctggaaacaaagaatctggtacctccacacagataccaaatgaaaagcaagggtgataatggtgtagatggggtaggttcagttgaaaatagcttcaacacttcaaattgctctcatggacaaccttttttcaactttgatgattcacattcttatattcacccattcattaagaaaaaggtatctcatcattgggacattactttcaatcagaataaggaaactctgaatcactatatacaagagtcatcatatccttcacatgagaaaataccaactgattccttggtagaagtagagagtacagcagatacaaccgtgacagatcaagttttgaaagcaaggtcttcaaaaattcttgagcattcacctgatgatgaagttgaaggagagatggtgtacttacaatctaggctgcttgacaatgctgttgttctgaagcacagatatgaaaaattgatagcaaaggttgtccaaaatctttgtcgcgagctggatgctttcagtaaaagaaaatgggatcttatctttgtgaatcagtttcttcgtgatgttagagaagctaaaaaacgtgggagaaaagaaaagagacataaggaagcccaagctgtactagctgcagctgcagctgctattgcatcctcctcacggaactcaactgtgagaaaagatgcaaaggagaatgcaccagagagttctccaaaacttgttgctggatcttcaagggttggtcaacggactttttcattgccacggattaatgattcatcaaagtcatccaacaacaaagtatcatcagataacaaatttggaagttttcatatgccaatttcttcaaaagaaaatgggctatactgtgatgtatgcatgcgaactgaaactctgttgaaccgaatatttgtctgctccagatgcaaggctgctgtgcacatagattgctacagaaatctggaaaattctattgggccctggaactgcgaactttgtgaagatgaagacatttcatcagaagctacaagtacaaccgttagtgataaatcacattgtaatggcaagttaccctttgcacagtgtggcatgtgccatggcacatcaggtgcttttagaaagactgtagatgggaagtgggttcatgctttctgtgctgagtggttgttggataccaagtatgtaaggggacaagatagccctgtagaaggaatggaaaaccttgtagagggaaaagacacttgttgtctctgcctctgcaatgttggcatgtgcttaaggtgtagtagtggggattgcaacattactttccatcctacttgcgctagaagttctggtttatacatgaacacgaaagggtttggtactacatcacagcacaaagcatactgtgacaaacacagcgtagaacagaaagaggctgatgcacagcaatatggacctgaggagctcaggagcatgaaacgaatgagggttgaattggagaaactacgcctgttgtgtgagagaataattaagagagagaaggtgaagagagagacggttatgtgtgatcatgatatacttgccaaaacaaaggacactgttattttctcctaccttgcgtgtggagcaagctcagaatctgcaactacttcagttaataacaggtcgtacatgcaaagatctgatgatgtcacagtagatagtactatttctgggaagaagaccataagattttctctgaaaaacagagatgttgatagaaacacagctgacagctcaagaacattgatatcattcaaacgcaagttgagtgagaggggaccacgagctggtaagcaacttccacagaggccaactattgcagcagagaaactggaagatgaagacaagaagacaactgataagaagagagaaatgtttcaaaaagagctcgttatgacattagatcaagcttctacacagaatcaacgtcttcctaagggatatgcttatgttcctcgggattccttatcaaaagagaagctatggaatcgaaatacacagccacttaatccgcaggagcctggtggataggatcagttgaaatcaagtcggttcatttctctcgaggaaggtcatgagaaacttgtgcaggcatgttctttgcaactgaaaacgacaagcggcaagcaggggctggccagtgctattgccgcaagggttacagccaatccgtgatcttttttggacccaagttgcataatggtgcagactgaggtattcgtgtgaatgtatggtgtggcaccataacaagaaggctgcccccacccaggtaacgcgaatgatcagcaatatgggtgaattgacctacttgtgctataccaaagacagcgtgccaactgtatatatgagttttattagtgtgcagatttcataaaattgccctgtacattctttcctttgcaaatgctagtttagttgtgcaggagaaaaagaattataaatccgttttggttggataagaaaagaaattagtttggttctttatcatggttcagaagaaaatgcagtggtgcttgcgggcaacgttgggcagctgtttgcctgatacatgtactctgtaaggatggtgaaggtgccaaaaataaggtcatgtcactgcttttcgccaactatttgttggtgctaactgggaagtggtatcatacaggctgagaaactgtgttttagctcttgtcgccggtggtttccgagagccccctttttttaaggggaacagtggtctctttaccggtttttagatatcaagatagcaacaatgttgaagttgggctgtaagttcttaggttgagaaggtatgatagctgagctttttttttttcaatttacatgtggggtatattgtatctgagacaggtttttttcctgcttgccgtccagattataaccttggttgggcctgtttagtaatttgttcggaagcggttcatgttttcaattctattgctcgatgtctgcagagatcgcctattacatgcaaaatttatttccaaattttaggttacattagctttgttaagtcaaccatttgtaattttggcaag

SEQ ID NO: 56079 - DNA, 6203 bp, Zea Mays
ggcagcacgctctcctccctccggcctccgcccactggatccgagacccacgcgcaaaactcgggccgggaaaaactcgccaggaaagagaacgctcggaagggaaacacaggctcgggctcgagacgaaaccctaaccctacctccgcttgcctcgacgtccctcctcgccggaggcctcccccggagacgcagcctccgctgagggctccggcggcgatgcgcccctcccagttggaggcgttatgagcggggaaatggcgcgcgccgaggccttgccagagggggaggcccccgggttcggtgtcgacctgtatgcgcaagccaccaaggctgtgtccctgcggacgccgttcgagggcgatgaggcggcgcccagggttcccacgctgcccgcgcggctcgtcagctgggcagggccaggggacgcccggaagaagcacaagaagattctgcctccccctcctgatgatgctgctccggagcctccaccacagtcacctgtagtcacccctgcgaaggttggcttgtgggaccagtttgaggcgtatttccgtcccgtaacactggctgacgtcgaaatgttaagaccaaagctcccatttggctacagcaaggttgactcatgtatgctagtaccatttctgggcagtggcaatgagtcaacaacccaagctgagacatatgacgtggctgtggctgaaacaaccttgtatttgggtgttggtggtgaagaagtggtcactaatcgggagcgcggcgtgcaaagtgtgcatctggctagtcagaaagagaggaatgatcaaagcattgaacatgacatacatgatgtggttgtgcaacagatggtcagcgacaaagagcttaataggcacagaggggtacagggcatacacgaagtttctattcagttgggagggagatcatctggagtggatcaagctgggagcagtagtggcattgttttaggacaatttgtcaatgaggaaggaacttcacttaattggctgctaggagcaacaggccggtttgttctcacttcagagcgacccaacaagaagagaaagcttctgggtgtcgatgctgggttagagcagcttgttctgcttccacgcgtaggggctgaggcatctgcaagctgtgatgtttgttgtcttggagaaagttccatggagtccaataggatagttaactgcagcaactgcaaggtgtcagtgcaccagaagtgttatggtttgcatgctgtgcctgatgggcaatggttgtgtgcttggtgtacatatctagagtctacagggtggtcattgaaggaagatgctggtaacacccagtcgatgccttgtgctttatgcccaaaggagaaaggagctcttaaacctgttaaagtggagtctactcgaaatgagggtattggccaccaaaaatttgtgcacttgtactgtagtctctgggcaccagaggtttttgttgaggacatggagtcaatggaacctgtacttagccttgaaaatgtccaagagaatcggatgaagttgacgtgcagtatctgcaagattaagcatggtgcatgtgtccgatgtagtcatgggacgtgtcggacgccctttcaccctatatgtgcaagagagtcaaagcatcaaatggagatatgggggaaatccaggcaccctaatgttgagttgagagcattttgctcaaagcattctgcagttgaatacgccagttctgtagataccagtaaccttgcatctgaacagaatcctagaaaatctggcccatacaataccaccctcaattctgggaaaattccagtaattaggttcacacgcaaaaacaaggacaaattcatcagttgtggaaccagtgcctctagttctggtaacctgatcagagtcaagacaatagagcaagatgctttagctaacacagttagaaatgcaaattctcaacctattcgaatatgggaaacaggtactggtcatccctctgttagtggtgatcatatcagaagttctggtgatattgctgtagtgcttagaaaggtaactgttacccaacaatatttggatagagaatgaattacctttctaaccatggcgaagcaaaaacattaatatctgcactggtttggcagctaattgacagtggaaaagttagtgttagtgatgtagcatctgaagtcggtatttcttcggaatccttggaagctgctcttgtgggtgaaactaccacgttttcccatggtttgacgctgaaaattatcaagtggctccaaaattctgtgcatatgcatggcgctcaaggaaatgtttgtaaagggagctcaggggtggtgcaagataacaaatcagatggattggacaccacagatactgttgatgtgaaaaatgcattggtcctagatgatgacaagggtgtacttgttgatgtgccggatttcgctgtaactgaacctgcacgaacaagatctaaaagcaacagcaagatactgaaagaaaataatgcaacatgcgcaacaggtgtgactattgtgcaaaatggagaaaagaacatggttaaagaagattctaatcccgagtgtgctgctaaagaatttgcaaacgaatctactcaggggttttctccaagcagcagcaaggatgttttaaaggacgaacatggaatattgatactgaacgacacctctggaaacaaagaatctggtacctccacacagataccaaatgaaaagcaaggtgcattacttggaagaaaaaataatgacttaactgaggtcgaactgggtccatgcttagagaaaggagtaccttcacatggccattgttttgttcagggtgataatggtgtagatggggtaggttcagttgaaaatagcttcaacacttcaaattgctctcatggacaaccttttttcaactttgatgattcacattcttatattcacccattcattaagaaaaaggtatctcatcattgggacattactttcaatcagaataaggaaactctgaatcactatatacaagagtcatcatatccttcacatgagaaaataccaactgattccttggtagaagtagagagtacagcagatacaaccgtgacagatcaagttttgaaagcaaggtcttcaaaaattcttgagcattcacctgatgatgaagttgaaggagagatggtgtacttacaatctaggctgcttgacaatgctgttgttctgaagcacagatatgaaaaattgatagcaaaggttgtccaaaatctttgtcgcgagctggatgctttcagtaaaagaaaatgggatcttatctttgtgaatcagtttcttcgtgatgttagagaagctaaaaaacgtgggagaaaagaaaagagacataaggaagcccaagctgtactagctgcagctgcagctgctattgcatcctcctcacggaactcaactgtgagaaaagatgcaaaggagaatgcaccagagagttctccaaaacttgttgctggatcttcaagggttggtcaacggactttttcattgccacggattaatgattcatcaaagtcatccaacaacaaagtatcatcagataacaaatttggaagttttcatatgccaatttcttcaaaagaaaatgggctatactgtgatgtatgcatgcgaactgaaactctgttgaaccgaatatttgtctgctccagatgcaagattgctacagaaatctggaaaattctattgggccctggaactgcgaactttgtgaagatgaagacatttcatcagaagctacaagtacaaccgttagtgataaatcacattgtaatggcaagttaccctttgcacagtgtggcatgtgccatggcacatcaggtgcttttagaaagactgtagatgggaagtgggttcatgctttctgtgctgagtggttgttggataccaagtatgtaaggggacaagatagccctgtagaaggaatggaaaaccttgtagagggaaaagacacttgttgtctctgcctctgcaatgttggcatgtgcttaaggtgtagtagtggggattgcaacattactttccatcctacttgcgctagaagttctggtttatacatgaacacgaaagggtttggtactacatcacagcacaaagcatactgtgacaaacacagcgtagaacagaaagaggctgatgcacagcaatatggacctgaggagctcaggagcatgaaacgaatgaggtatcagatgcaagagctcattactcactgccacttatgaagagatcagtctgaaaccaacaaattatctttagctaccttgtgaaaactctgtggtttgcttgtatcattcgagttagctatttacagttttgggaatacattatgctgccacagcacttcatggggcagaactcatcagtcattattcatagaggaaacaatatatttaggaattgtttttcttatgcaaccaaccttgtgcattcctgacttcccgtactcatgttccatgcagtacatgtttatttggatgttattgaataccgagtgaagctgcacatagtatccttttagactatcctcctgactccgtcccatggttttgagaagctcaacttacgttgaattggagaaactacgcctgttgtgtgagagaataattaagagagagaaggtgaagagagagacggttatgtgtgatcatgatatacttgccaaaacaaaggacactgttattttctcctaccttgcgtgtggagcaagctcagaatctgcaactacttcagttaataacaggtcgtacatgcaaagatctgatgatgtcacagtagatagtactatttctgggaagaagaccataagattttctctgaaaaacagagatgttgatagaaacacagctgacagctcaagaacattgatatcattcaaacgcaagttgagtgagaggggaccacgagctggtaagcaacttccacagaggccaactattgcagcagagaaactggaagatgaagacaagaagacaactgataagaagagagaaatgtttcaaaaagagctcgttatgacattagatcaagcttctacacagaatcaacgtcttcctaagggatatgcttatgttcctcgggattccttatcaaaagagaagctatggaatcgaaatacacagccacttaatccgcaggagcctggtggataggatcagttgaaatcaagtcggttcatttctctcgaggaaggtcatgagaaacttgtgcaggcatgttctttgcaactgaaaacgacaagcggcaagcaggggctggccagtgctattgccgcaagggttacagccaatccgtgatcttttttggacccaagttgcataatggtgcagactgaggtattcgtgtgaatgtatggtgtggcaccataacaagaaggctgcccccacccaggtaacgcgaatgatcagcaatatgggtgaattgacctacttgtgctataccaaagacagcgtgccaactgtatatatgagttttattagtgtgcagatttcataaaattgccctgtacattctttcctttgcaaatgctagtttagttgtgcaggagaaaaagaattataaatccgttttggttggataagaaaagaaattagtttggttctttatcatggttcagaagaaaatgcagtggtgcttgcgggcaacgttgggcagctgtttgcctgatacatgtactctgtaaggatggtgaaggtgccaaaaataaggtcatgtcactgcttttcgccaactatttgttggtgctaactgggaagtggtatcatacaggctgagaaactgtgttttagctcttgtcgccggtggtttccgagagccccctttttttaaggggaacagtggtctctttaccggtttttagatatcaagatagcaacaatgttgaagttgggctgtaagttcttaggttgagaaggtatgatagctgagctttttttttttcaatttacatgtggggtatattgtatctgagacaggtttttttcctgcttgccgtccagattataaccttggttgggcctgtttagtaatttgttcggaagcggttcatgttttcaattctattgctcgatgtctgcagagatcgcctattacatgcaaaatttatttccaaattttaggttacattagctttgttaagtcaaccatttgtaattttggcaag

SEQ ID NO: 56080 - DNA, 5752 bp, Zea Mays
caccaccagggcagcacgctctcctccctccggcctccgcccactggatccgagacccacgcgcaaaactcgggccgggaaaaactcgccaggaaagagaacgctcggaagggaaacacaggctcgggctcgagacgaaaccctaaccctacctccgcttgcctcgacgtccctcctcgccggaggcctcccccggagacgcagcctccgctgagggctccggcggcgatgcgcccctcccagttggaggcgttatgagcggggaaatggcgcgcgccgaggccttgccagagggggaggcccccgggttcggtgtcgacctgtatgcgcaagccaccaaggctgtgtccctgcggacgccgttcgagggcgatgaggcggcgcccagggttcccacgctgcccgcgcggctcgtcagctgggcagggccaggggacgcccggaagaagcacaagaagattctgcctccccctcctgatgatgctgctccggagcctccaccacagtcacctgtagtcacccctgcgaaggttggcttgtgggaccagtttgaggcgtatttccgtcccgtaacactggctgacgtcgaaatgttaagaccaaagctcccatttggctacagcaaggttgactcatgtatgctagtaccatttctgggcagtggcaatgagtcaacaacccaagctgagacatatgacgtggctgtggctgaaacaaccttgtatttgggtgttggtggtgaagaagtggtcactaatcgggagcgcggcgtgcaaagtgtgcatctggctagtcagaaagagaggaatgatcaaagcattgaacatgacatacatgatgtggttgtgcaacagatggtcagcgacaaagagcttaataggcacagaggggtacagggcatacacgaagtttctattcagttgggagggagatcatctggagtggatcaagctgggagcagtagtggcattgttttaggacaatttgtcaatgaggaaggaacttcacttaattggctgctaggagcaacaggccggtttgttctcacttcagagcgacccaacaagaagagaaagcttctgggtgtcgatgctgggttagagcagcttgttctgcttccacgcgtaggggctgaggcatctgcaagctgtgatgtttgttgtcttggagaaagttccatggagtccaataggatagttaactgcagcaactgcaaggtgtcagtgcaccagaagtgttatggtttgcatgctgtgcctgatgggcaatggttgtgtgcttggtgtacatatctagagtctacagggtggtcattgaaggaagatgctggtaacacccagtcgatgccttgtgctttatgcccaaaggagaaaggagctcttaaacctgttaaagtggagtctactcgaaatgagggtattggccaccaaaaatttgtgcacttgtactgtagtctctgggcaccagaggtttttgttgaggacatggagtcaatggaacctgtacttagccttgaaaatgtccaagagaatcggatgaagttgacgtgcagtatctgcaagattaagcatggtgcatgtgtccgatgtagtcatgggacgtgtcggacgccctttcaccctatatgtgcaagagagtcaaagcatcaaatggagatatgggggaaatccaggcaccctaatgttgagttgagagcattttgctcaaagcattctgcagttgaatacgccagttctgtagataccagtaaccttgcatctgaacagaatcctagaaaatctggcccatacaataccaccctcaattctgggaaaattccagtaattaggttcacacgcaaaaacaaggacaaattcatcagttgtggaaccagtgcctctagttctggtaacctgatcagagtcaagacaatagagcaagatgctttagctaacacagttagaaatgcaaattctcaacctattcgaatatgggaaacaggtactggtcatccctctgttagtggtgatcatatcagaagttctggtgatattgctgtagtgcttagaaagctaattgacagtggaaaagttagtgttagtgatgtagcatctgaagtcggtatttcttcggaatccttggaagctgctcttgtgggtgaaactaccacgttttcccatggtttgacgctgaaaattatcaagtggctccaaaattctgtgcatatgcatgatgatgacaagggtgtacttgttgatgtgccggatttcgctgtaactgaacctgcacgaacaagatctaaaagcaacagcaagatactgaaagaaaataatgcaacatgcgcaacaggtgtgactattgtgcaaaatggagaaaagaacatggttaaagaagattctaatcccgagtgtgctgctaaagaatttgcaaacgaatctactcaggggttttctccaagcagcagcaaggatgttttaaaggacgaacatggaatattgatactgaacgacacctctggaaacaaagaatctggtacctccacacagataccaaatgaaaagcaaggtgcattacttggaagaaaaaataatgacttaactgaggtcgaactgggtccatgcttagagaaaggagtaccttcacatggccattgttttgttcagggtgataatggtgtagatggggtaggttcagttgaaaatagcttcaacacttcaaattgctctcatggacaaccttttttcaactttgatgattcacattcttatattcacccattcattaagaaaaaggtatctcatcattgggacattactttcaatcagaataaggaaactctgaatcactatatacaagagtcatcatatccttcacatgagaaaataccaactgattccttggtagaagtagagagtacagcagatacaaccgtgacagatcaagttttgaaagcaaggtcttcaaaaattcttgagcattcacctgatgatgaagttgaaggagagatggtgtacttacaatctaggctgcttgacaatgctgttgttctgaagcacagatatgaaaaattgatagcaaaggttgtccaaaatctttgtcgcgagctggatgctttcagtaaaagaaaatgggatcttatctttgtgaatcagtttcttcgtgatgttagagaagctaaaaaacgtgggagaaaagaaaagagacataaggaagcccaagctgtactagctgcagctgcagctgctattgcatcctcctcacggaactcaactgtgagaaaagatgcaaaggagaatgcaccagagagttctccaaaacttgttgctggatcttcaagggttggtcaacggactttttcattgccacggattaatgattcatcaaagtcatccaacaacaaagtatcatcagataacaaatttggaagttttcatatgccaatttcttcaaaagaaaatgggctatactgtgatgtatgcatgcgaactgaaactctgttgaaccgaatatttgtctgctccagatgcaaggctgctgtgcacatagattgctacagaaatctggaaaattctattgggccctggaactgcgaactttgtgaagatgaagacatttcatcagaagctacaagtacaaccgttagtgataaatcacattgtaatggcaagttaccctttgcacagtgtggcatgtgccatggcacatcaggtgcttttagaaagactgtagatgggaagtgggttcatgctttctgtgctgagtggttgttggataccaagtatgtaaggggacaagatagccctgtagaaggaatggaaaaccttgtagagggaaaagacacttgttgtctctgcctctgcaatgttggcatgtgcttaaggtgtagtagtggggattgcaacattactttccatcctacttgcgctagaagttctggtttatacatgaacacgaaagggtttggtactacatcacagcacaaagcatactgtgacaaacacagcgtagaacagaaagaggctgatgcacagcaatatggacctgaggagctcaggagcatgaaacgaatgaggtacatgtttatttggatgttattgaataccgagtgaagctgcacatagtatccttttagactatcctcctgactccgtcccatggttttgagaagctcaacttacgttgaattggagaaactacgcctgttgtgtgagagaataattaagagagagaaggtgaagagagagacggttatgtgtgatcatgatatacttgccaaaacaaaggacactgttattttctcctaccttgcgtgtggagcaagctcagaatctgcaactacttcagttaataacaggtcgtacatgcaaagatctgatgatgtcacagtagatagtactatttctgggaagaagaccataagattttctctgaaaaacagagatgttgatagaaacacagctgacagctcaagaacattgatatcattcaaacgcaagttgagtgagaggggaccacgagctggtaagcaacttccacagaggccaactattgcagcagagaaactggaagatgaagacaagaagacaactgataagaagagagaaatgtttcaaaaagagctcgttatgacattagatcaagcttctacacagaatcaacgtcttcctaagggatatgcttatgttcctcgggattccttatcaaaagagaagctatggaatcgaaatacacagccacttaatccgcaggagcctggtggataggatcagttgaaatcaagtcggttcatttctctcgaggaaggtcatgagaaacttgtgcaggcatgttctttgcaactgaaaacgacaagcggcaagcaggggctggccagtgctattgccgcaagggttacagccaatccgtgatcttttttggacccaagttgcataatggtgcagactgaggtattcgtgtgaatgtatggtgtggcaccataacaagaaggctgcccccacccaggtaacgcgaatgatcagcaatatgggtgaattgacctacttgtgctataccaaagacagcgtgccaactgtatatatgagttttattagtgtgcagatttcataaaattgccctgtacattctttcctttgcaaatgctagtttagttgtgcaggagaaaaagaattataaatccgttttggttggataagaaaagaaattagtttggttctttatcatggttcagaagaaaatgcagtggtgcttgcgggcaacgttgggcagctgtttgcctgatacatgtactctgtaaggatggtgaaggtgccaaaaataaggtcatgtcactgcttttcgccaactatttgttggtgctaactgggaagtggtatcatacaggctgagaaactgtgttttagctcttgtcgccggtggtttccgagagccccctttttttaaggggaacagtggtctctttaccggtttttagatatcaagatagcaacaatgttgaagttgggctgtaagttcttaggttgagaaggtatgatagctgagctttttttttttcaatttacatgtggggtatattgtatctgagacaggtttttttcctgcttgccgtccagattataaccttggttgggcctgtttagtaatttgttcggaagcggttcatgttttcaattctattgctcgatgtctgcagagatcgcctattacatgcaaaatttatttccaaattttaggttacattagctttgttaagtcaaccatttgtaattttggcaag

SEQ ID NO: 56081 - DNA, 5741 bp, Zea Mays
cccaccaccagggcagcacgctctcctccctccggcctccgcccactggatccgagacccacgcgcaaaactcgggccgggaaaaactcgccaggaaagagaacgctcggaagggaaacacaggctcgggctcgagacgaaaccctaaccctacctccgcttgcctcgacgtccctcctcgccggaggcctcccccggagacgcagcctccgctgagggctccggcggcgatgcgcccctcccagttggaggcgttatgagcggggaaatggcgcgcgccgaggccttgccagagggggaggcccccgggttcggtgtcgacctgtatgcgcaagccaccaaggctgtgtccctgcggacgccgttcgagggcgatgaggcggcgcccagggttcccacgctgcccgcgcggctcgtcagctgggcagggccaggggacgcccggaagaagcacaagaagattctgcctccccctcctgatgatgctgctccggagcctccaccacagtcacctgtagtcacccctgcgaaggttggcttgtgggaccagtttgaggcgtatttccgtcccgtaacactggctgacgtcgaaatgttaagaccaaagctcccatttggctacagcaaggttgactcatgtatgctagtaccatttctgggcagtggcaatgagtcaacaacccaagctgagacatatgacgtggctgtggctgaaacaaccttgtatttgggtgttggtggtgaagaagtggtcactaatcgggagcgcggcgtgcaaagtgtgcatctggctagtcagaaagagaggaatgatcaaagcattgaacatgacatacatgatgtggttgtgcaacagatggtcagcgacaaagagcttaataggcacagaggggtacagggcatacacgaagtttctattcagttgggagggagatcatctggagtggatcaagctgggagcagtagtggcattgttttaggacaatttgtcaatgaggaaggaacttcacttaattggctgctaggagcaacaggccggtttgttctcacttcagagcgacccaacaagaagagaaagcttctgggtgtcgatgctgggttagagcagcttgttctgcttccacgcgtaggggctgaggcatctgcaagctgtgatgtttgttgtcttggagaaagttccatggagtccaataggatagttaactgcagcaactgcaaggtgtcagtgcaccagaagtgttatggtttgcatgctgtgcctgatgggcaatggttgtgtgcttggtgtacatatctagagtctacagggtggtcattgaaggaagatgctggtaacacccagtcgatgccttgtgctttatgcccaaaggagaaaggagctcttaaacctgttaaagtggagtctactcgaaatgagggtattggccaccaaaaatttgtgcacttgtactgtagtctctgggcaccagaggtttttgttgaggacatggagtcaatggaacctgtacttagccttgaaaatgtccaagagaatcggatgaagttgacgtgcagtatctgcaagattaagcatggtgcatgtgtccgatgtagtcatgggacgtgtcggacgccctttcaccctatatgtgcaagagagtcaaagcatcaaatggagatatgggggaaatccaggcaccctaatgttgagttgagagcattttgctcaaagcattctgcagttgaatacgccagttctgtagataccagtaaccttgcatctgaacagaatcctagaaaatctggcccatacaataccaccctcaattctgggaaaattccagtaattaggttcacacgcaaaaacaaggacaaattcatcagttgtggaaccagtgcctctagttctggtaacctgatcagagtcaagacaatagagcaagatgctttagctaacacagttagaaatgcaaattctcaacctattcgaatatgggaaacaggtactggtcatccctctgttagtggtgatcatatcagaagttctggtgatattgctgtagtgcttagaaagctaattgacagtggaaaagttagtgttagtgatgtagcatctgaagtcggtatttcttcggaatccttggaagctgctcttgtgggtgaaactaccacgttttcccatggtttgacgctgaaaattatcaagtggctccaaaattctgtgcatatgcatggcgctcaaggaaatgtttgtaaagggagctcaggggtggtgcaagataacaaatcagatggattggacaccacagatactgttgatgtgaaaaatgcattggtcctagatgatgacaagggtgtacttgttgatgtgccggatttcgctgtaactgaacctgcacgaacaagatctaaaagcaacagcaagatactgaaagaaaataatgcaacatgcgcaacaggtgtgactattgtgcaaaatggagaaaagaacatggttaaagaagattctaatcccgagtgtgctgctaaagaatttgcaaacgaatctactcaggggttttctccaagcagcagcaaggatgttttaaaggacgaacatggaatattgatactgaacgacacctctggaaacaaagaatctggtacctccacacagataccaaatgaaaagcaaggtgcattacttggaagaaaaaataatgacttaactgaggtcgaactgggtccatgcttagagaaaggagtaccttcacatggccattgttttgttcagggtgataatggtgtagatggggtaggttcagttgaaaatagcttcaacacttcaaattgctctcatggacaaccttttttcaactttgatgattcacattcttatattcacccattcattaagaaaaaggtatctcatcattgggacattactttcaatcagaataaggaaactctgaatcactatatacaagagtcatcatatccttcacatgagaaaataccaactgattccttggtagaagtagagagtacagcagatacaaccgtgacagatcaagttttgaaagcaaggtcttcaaaaattcttgagcattcacctgatgatgaagttgaaggagagatggtgtacttacaatctaggctgcttgacaatgctgttgttctgaagcacagatatgaaaaattgatagcaaaggttgtccaaaatctttgtcgcgagctggatgctttcagtaaaagaaaatgggatcttatctttgtgaatcagtttcttcgtgatgttagagaagctaaaaaacgtgggagaaaagaaaagagacataaggaagcccaagctgtactagctgcagctgcagctgctattgcatcctcctcacggaactcaactgtgagaaaagatgcaaaggagaatgcaccagagagttctccaaaacttgttgctggatcttcaagggttggtcaacggactttttcattgccacggattaatgattcatcaaagtcatccaacaacaaagtatcatcagataacaaatttggaagttttcatatgccaatttcttcaaaagaaaatgggctatactgtgatgtatgcatgcgaactgaaactctgttgaaccgaatatttgtctgctccagatgcaagattgctacagaaatctggaaaattctattgggccctggaactgcgaactttgtgaagatgaagacatttcatcagaagctacaagtacaaccgttagtgataaatcacattgtaatggcaagttaccctttgcacagtgtggcatgtgccatggcacatcaggtgcttttagaaagactgtagatgggaagtgggttcatgctttctgtgctgagtggttgttggataccaagtatgtaaggggacaagatagccctgtagaaggaatggaaaaccttgtagagggaaaagacacttgttgtctctgcctctgcaatgttggcatgtgcttaaggtgtagtagtggggattgcaacattactttccatcctacttgcgctagaagttctggtttatacatgaacacgaaagggtttggtactacatcacagcacaaagcatactgtgacaaacacagcgtagaacagaaagaggctgatgcacagcaatatggacctgaggagctcaggagcatgaaacgaatgagggttgaattggagaaactacgcctgttgtgtgagagaataattaagagagagaaggtgaagagagagacggttatgtgtgatcatgatatacttgccaaaacaaaggacactgttattttctcctaccttgcgtgtggagcaagctcagaatctgcaactacttcagttaataacaggtcgtacatgcaaagatctgatgatgtcacagtagatagtactatttctgggaagaagaccataagattttctctgaaaaacagagatgttgatagaaacacagctgacagctcaagaacattgatatcattcaaacgcaagttgagtgagaggggaccacgagctggtaagcaacttccacagaggccaactattgcagcagagaaactggaagatgaagacaagaagacaactgataagaagagagaaatgtttcaaaaagagctcgttatgacattagatcaagcttctacacagaatcaacgtcttcctaagggatatgcttatgttcctcgggattccttatcaaaagagaagctatggaatcgaaatacacagccacttaatccgcaggagcctggtggataggatcagttgaaatcaagtcggttcatttctctcgaggaaggtcatgagaaacttgtgcaggcatgttctttgcaactgaaaacgacaagcggcaagcaggggctggccagtgctattgccgcaagggttacagccaatccgtgatcttttttggacccaagttgcataatggtgcagactgaggtattcgtgtgaatgtatggtgtggcaccataacaagaaggctgcccccacccaggtaacgcgaatgatcagcaatatgggtgaattgacctacttgtgctataccaaagacagcgtgccaactgtatatatgagttttattagtgtgcagatttcataaaattgccctgtacattctttcctttgcaaatgctagtttagttgtgcaggagaaaaagaattataaatccgttttggttggataagaaaagaaattagtttggttctttatcatggttcagaagaaaatgcagtggtgcttgcgggcaacgttgggcagctgtttgcctgatacatgtactctgtaaggatggtgaaggtgccaaaaataaggtcatgtcactgcttttcgccaactatttgttggtgctaactgggaagtggtatcatacaggctgagaaactgtgttttagctcttgtcgccggtggtttccgagagccccctttttttaaggggaacagtggtctctttaccggtttttagatatcaagatagcaacaatgttgaagttgggctgtaagttcttaggttgagaaggtatgatagctgagctttttttttttcaatttacatgtggggtatattgtatctgagacaggtttttttcctgcttgccgtccagattataaccttggttgggcctgtttagtaatttgttcggaagcggttcatgttttcaattctattgctcgatgtctgcagagatcgcctattacatgcaaaatttatttccaaattttaggttacattagctttgttaagtcaaccatttgtaattttggcaag

SEQ ID NO: 56082 - DNA, 6042 bp, Zea Mays
cccagtcccagtcccaccaccagggcagcacgctctcctccctccggcctccgcccactggatccgagacccacgcgcaaaactcgggccgggaaaaactcgccaggaaagagaacgctcggaagggaaacacaggctcgggctcgagacgaaaccctaaccctacctccgcttgcctcgacgtccctcctcgccggaggcctcccccggagacgcagcctccgctgagggctccggcggcgatgcgcccctcccagttggaggcgttatgagcggggaaatggcgcgcgccgaggccttgccagagggggaggcccccgggttcggtgtcgacctgtatgcgcaagccaccaaggctgtgtccctgcggacgccgttcgagggcgatgaggcggcgcccagggttcccacgctgcccgcgcggctcgtcagctgggcagggccaggggacgcccggaagaagcacaagaagattctgcctccccctcctgatgatgctgctccggagcctccaccacagtcacctgtagtcacccctgcgaaggttggcttgtgggaccagtttgaggcgtatttccgtcccgtaacactggctgacgtcgaaatgttaagaccaaagctcccatttggctacagcaaggttgactcatgtatgctagtaccatttctgggcagtggcaatgagtcaacaacccaagctgagacatatgacgtggctgtggctgaaacaaccttgtatttgggtgttggtggtgaagaagtggtcactaatcgggagcgcggcgtgcaaagtgtgcatctggctagtcagaaagagaggaatgatcaaagcattgaacatgacatacatgatgtggttgtgcaacagatggtcagcgacaaagagcttaataggcacagaggggtacagggcatacacgaagtttctattcagttgggagggagatcatctggagtggatcaagctgggagcagtagtggcattgttttaggacaatttgtcaatgaggaaggaacttcacttaattggctgctaggagcaacaggccggtttgttctcacttcagagcgacccaacaagaagagaaagcttctgggtgtcgatgctgggttagagcagcttgttctgcttccacgcgtaggggctgaggcatctgcaagctgtgatgtttgttgtcttggagaaagttccatggagtccaataggatagttaactgcagcaactgcaaggtgtcagtgcaccagaagtgttatggtttgcatgctgtgcctgatgggcaatggttgtgtgcttggtgtacatatctagagtctacagggtggtcattgaaggaagatgctggtaacacccagtcgatgccttgtgctttatgcccaaaggagaaaggagctcttaaacctgttaaagtggagtctactcgaaatgagggtattggccaccaaaaatttgtgcacttgtactgtagtctctgggcaccagaggtttttgttgaggacatggagtcaatggaacctgtacttagccttgaaaatgtccaagagaatcggatgaagttgacgtgcagtatctgcaagattaagcatggtgcatgtgtccgatgtagtcatgggacgtgtcggacgccctttcaccctatatgtgcaagagagtcaaagcatcaaatggagatatgggggaaatccaggcaccctaatgttgagttgagagcattttgctcaaagcattctgcagttgaatacgccagttctgtagataccagtaaccttgcatctgaacagaatcctagaaaatctggcccatacaataccaccctcaattctgggaaaattccagtaattaggttcacacgcaaaaacaaggacaaattcatcagttgtggaaccagtgcctctagttctggtaacctgatcagagtcaagacaatagagcaagatgctttagctaacacagttagaaatgcaaattctcaacctattcgaatatgggaaacaggtactggtcatccctctgttagtggtgatcatatcagaagttctggtgatattgctgtagtgcttagaaagctaattgacagtggaaaagttagtgttagtgatgtagcatctgaagtcggtatttcttcggaatccttggaagctgctcttgtgggtgaaactaccacgttttcccatggtttgacgctgaaaattatcaagtggctccaaaattctgtgcatatgcatgatgatgacaagggtgtacttgttgatgtgccggatttcgctgtaactgaacctgcacgaacaagatctaaaagcaacagcaagatactgaaagaaaataatgcaacatgcgcaacaggtgtgactattgtgcaaaatggagaaaagaacatggttaaagaagattctaatcccgagtgtgctgctaaagaatttgcaaacgaatctactcaggggttttctccaagcagcagcaaggatgttttaaaggacgaacatggaatattgatactgaacgacacctctggaaacaaagaatctggtacctccacacagataccaaatgaaaagcaaggtgcattacttggaagaaaaaataatgacttaactgaggtcgaactgggtccatgcttagagaaaggagtaccttcacatggccattgttttgttcagggtgataatggtgtagatggggtaggttcagttgaaaatagcttcaacacttcaaattgctctcatggacaaccttttttcaactttgatgattcacattcttatattcacccattcattaagaaaaaggtatctcatcattgggacattactttcaatcagaataaggaaactctgaatcactatatacaagagtcatcatatccttcacatgagaaaataccaactgattccttggtagaagtagagagtacagcagatacaaccgtgacagatcaagttttgaaagcaaggtcttcaaaaattcttgagcattcacctgatgatgaagttgaaggagagatggtgtacttacaatctaggctgcttgacaatgctgttgttctgaagcacagatatgaaaaattgatagcaaaggttgtccaaaatctttgtcgcgagctggatgctttcagtaaaagaaaatgggatcttatctttgtgaatcagtttcttcgtgatgttagagaagctaaaaaacgtgggagaaaagaaaagagacataaggaagcccaagctgtactagctgcagctgcagctgctattgcatcctcctcacggaactcaactgtgagaaaagatgcaaaggagaatgcaccagagagttctccaaaacttgttgctggatcttcaagggttggtcaacggactttttcattgccacggattaatgattcatcaaagtcatccaacaacaaagtatcatcagataacaaatttggaagttttcatatgccaatttcttcaaaagaaaatgggctatactgtgatgtatgcatgcgaactgaaactctgttgaaccgaatatttgtctgctccagatgcaaggctgctgtgcacatagattgctacagaaatctggaaaattctattgggccctggaactgcgaactttgtgaagatgaagacatttcatcagaagctacaagtacaaccgttagtgataaatcacattgtaatggcaagttaccctttgcacagtgtggcatgtgccatggcacatcaggtgcttttagaaagactgtagatgggaagtgggttcatgctttctgtgctgagtggttgttggataccaagtatgtaaggggacaagatagccctgtagaaggaatggaaaaccttgtagagggaaaagacacttgttgtctctgcctctgcaatgttggcatgtgcttaaggtgtagtagtggggattgcaacattactttccatcctacttgcgctagaagttctggtttatacatgaacacgaaagggtttggtactacatcacagcacaaagcatactgtgacaaacacagcgtagaacagaaagaggctgatgcacagcaatatggacctgaggagctcaggagcatgaaacgaatgaggtatcagatgcaagagctcattactcactgccacttatgaagagatcagtctgaaaccaacaaattatctttagctaccttgtgaaaactctgtggtttgcttgtatcattcgagttagctatttacagttttgggaatacattatgctgccacagcacttcatggggcagaactcatcagtcattattcatagaggaaacaatatatttaggaattgtttttcttatgcaaccaaccttgtgcattcctgacttcccgtactcatgttccatgcagtacatgtttatttggatgttattgaataccgagtgaagctgcacatagtatccttttagactatcctcctgactccgtcccatggttttgagaagctcaacttacgttgaattggagaaactacgcctgttgtgtgagagaataattaagagagagaaggtgaagagagagacggttatgtgtgatcatgatatacttgccaaaacaaaggacactgttattttctcctaccttgcgtgtggagcaagctcagaatctgcaactacttcagttaataacaggtcgtacatgcaaagatctgatgatgtcacagtagatagtactatttctgggaagaagaccataagattttctctgaaaaacagagatgttgatagaaacacagctgacagctcaagaacattgatatcattcaaacgcaagttgagtgagaggggaccacgagctggtaagcaacttccacagaggccaactattgcagcagagaaactggaagatgaagacaagaagacaactgataagaagagagaaatgtttcaaaaagagctcgttatgacattagatcaagcttctacacagaatcaacgtcttcctaagggatatgcttatgttcctcgggattccttatcaaaagagaagctatggaatcgaaatacacagccacttaatccgcaggagcctggtggataggatcagttgaaatcaagtcggttcatttctctcgaggaaggtcatgagaaacttgtgcaggcatgttctttgcaactgaaaacgacaagcggcaagcaggggctggccagtgctattgccgcaagggttacagccaatccgtgatcttttttggacccaagttgcataatggtgcagactgaggtattcgtgtgaatgtatggtgtggcaccataacaagaaggctgcccccacccaggtaacgcgaatgatcagcaatatgggtgaattgacctacttgtgctataccaaagacagcgtgccaactgtatatatgagttttattagtgtgcagatttcataaaattgccctgtacattctttcctttgcaaatgctagtttagttgtgcaggagaaaaagaattataaatccgttttggttggataagaaaagaaattagtttggttctttatcatggttcagaagaaaatgcagtggtgcttgcgggcaacgttgggcagctgtttgcctgatacatgtactctgtaaggatggtgaaggtgccaaaaataaggtcatgtcactgcttttcgccaactatttgttggtgctaactgggaagtggtatcatacaggctgagaaactgtgttttagctcttgtcgccggtggtttccgagagccccctttttttaaggggaacagtggtctctttaccggtttttagatatcaagatagcaacaatgttgaagttgggctgtaagttcttaggttgagaaggtatgatagctgagctttttttttttcaatttacatgtggggtatattgtatctgagacaggtttttttcctgcttgccgtccagattataaccttggttgggcctgtttagtaatttgttcggaagcggttcatgttttcaattctattgctcgatgtctgcagagatcgcctattacatgcaaaatttatttccaaattttaggttacattagctttgttaagtcaaccatttgtaattttggcaag

SEQ ID NO: 56083 - DNA, 5671 bp, Zea Mays
agccagccaggcaaggcaagtgagcacggactgcacggtgcagttaactttacaaaactgaagccgtgacctgtgatgtgacctccctcccggtcccagtcccagtcccaccaccagggcagcacgctctcctccctccggcctccgcccactggatccgagacccacgcgcaaaactcgggccgggaaaaactcgccaggaaagagaacgctcggaagggaaacacaggctcgggctcgagacgaaaccctaaccctacctccgcttgcctcgacgtccctcctcgccggaggcctcccccggagacgcagcctccgctgagggctccggcggcgatgcgcccctcccagttggaggcgttatgagcggggaaatggcgcgcgccgaggccttgccagagggggaggcccccgggttcggtgtcgacctgtatgcgcaagccaccaaggctgtgtccctgcggacgccgttcgagggcgatgaggcggcgcccagggttcccacgctgcccgcgcggctcgtcagctgggcagggccaggggacgcccggaagaagcacaagaagattctgcctccccctcctgatgatgctgctccggagcctccaccacagtcacctgtagtcacccctgcgaaggttggcttgtgggaccagtttgaggcgtatttccgtcccgtaacactggctgacgtcgaaatgttaagaccaaagctcccatttggctacagcaaggttgactcatgtatgctagtaccatttctgggcagtggcaatgagtcaacaacccaagctgagacatatgacgtggctgtggctgaaacaaccttgtatttgggtgttggtggtgaagaagtggtcactaatcgggagcgcggcgtgcaaagtgtgcatctggctagtcagaaagagaggaatgatcaaagcattgaacatgacatacatgatgtggttgtgcaacagatggtcagcgacaaagagcttaataggcacagaggggtacagggcatacacgaagtttctattcagttgggagggagatcatctggagtggatcaagctgggagcagtagtggcattgttttaggacaatttgtcaatgaggaaggaacttcacttaattggctgctaggagcaacaggccggtttgttctcacttcagagcgacccaacaagaagagaaagcttctgggtgtcgatgctgggttagagcagcttgttctgcttccacgcgtaggggctgaggcatctgcaagctgtgatgtttgttgtcttggagaaagttccatggagtccaataggatagttaactgcagcaactgcaaggtgtcagtgcaccagaagtgttatggtttgcatgctgtgcctgatgggcaatggttgtgtgcttggtgtacatatctagagtctacagggtggtcattgaaggaagatgctggtaacacccagtcgatgccttgtgctttatgcccaaaggagaaaggagctcttaaacctgttaaagtggagtctactcgaaatgagggtattggccaccaaaaatttgtgcacttgtactgtagtctctgggcaccagaggtttttgttgaggacatggagtcaatggaacctgtacttagccttgaaaatgtccaagagaatcggatgaagttgacgtgcagtatctgcaagattaagcatggtgcatgtgtccgatgtagtcatgggacgtgtcggacgccctttcaccctatatgtgcaagagagtcaaagcatcaaatggagatatgggggaaatccaggcaccctaatgttgagttgagagcattttgctcaaagcattctgcagttgaatacgccagttctgtagataccagtaaccttgcatctgaacagaatcctagaaaatctggcccatacaataccaccctcaattctgggaaaattccagtaattaggttcacacgcaaaaacaaggacaaattcatcagttgtggaaccagtgcctctagttctggtaacctgatcagagtcaagacaatagagcaagatgctttagctaacacagttagaaatgcaaattctcaacctattcgaatatgggaaacaggtactggtcatccctctgttagtggtgatcatatcagaagttctggtgatattgctgtagtgcttagaaagctaattgacagtggaaaagttagtgttagtgatgtagcatctgaagtcggtatttcttcggaatccttggaagctgctcttgtgggtgaaactaccacgttttcccatggtttgacgctgaaaattatcaagtggctccaaaattctgtgcatatgcatgatgatgacaagggtgtacttgttgatgtgccggatttcgctgtaactgaacctgcacgaacaagatctaaaagcaacagcaagatactgaaagaaaataatgcaacatgcgcaacaggtgtgactattgtgcaaaatggagaaaagaacatggttaaagaagattctaatcccgagtgtgctgctaaagaatttgcaaacgaatctactcaggggttttctccaagcagcagcaaggatgttttaaaggacgaacatggaatattgatactgaacgacacctctggaaacaaagaatctggtacctccacacagataccaaatgaaaagcaaggtgcattacttggaagaaaaaataatgacttaactgaggtcgaactgggtccatgcttagagaaaggagtaccttcacatggccattgttttgttcagggtgataatggtgtagatggggtaggttcagttgaaaatagcttcaacacttcaaattgctctcatggacaaccttttttcaactttgatgattcacattcttatattcacccattcattaagaaaaaggtatctcatcattgggacattactttcaatcagaataaggaaactctgaatcactatatacaagagtcatcatatccttcacatgagaaaataccaactgattccttggtagaagtagagagtacagcagatacaaccgtgacagatcaagttttgaaagcaaggtcttcaaaaattcttgagcattcacctgatgatgaagttgaaggagagatggtgtacttacaatctaggctgcttgacaatgctgttgttctgaagcacagatatgaaaaattgatagcaaaggttgtccaaaatctttgtcgcgagctggatgctttcagtaaaagaaaatgggatcttatctttgtgaatcagtttcttcgtgatgttagagaagctaaaaaacgtgggagaaaagaaaagagacataaggaagcccaagctgtactagctgcagctgcagctgctattgcatcctcctcacggaactcaactgtgagaaaagatgcaaaggagaatgcaccagagagttctccaaaacttgttgctggatcttcaagggttggtcaacggactttttcattgccacggattaatgattcatcaaagtcatccaacaacaaagtatcatcagataacaaatttggaagttttcatatgccaatttcttcaaaagaaaatgggctatactgtgatgtatgcatgcgaactgaaactctgttgaaccgaatatttgtctgctccagatgcaaggctgctgtgcacatagattgctacagaaatctggaaaattctattgggccctggaactgcgaactttgtgaagatgaagacatttcatcagaagctacaagtacaaccgttagtgataaatcacattgtaatggcaagttaccctttgcacagtgtggcatgtgccatggcacatcaggtgcttttagaaagactgtagatgggaagtgggttcatgctttctgtgctgagtggttgttggataccaagtatgtaaggggacaagatagccctgtagaaggaatggaaaaccttgtagagggaaaagacacttgttgtctctgcctctgcaatgttggcatgtgcttaaggtgtagtagtggggattgcaacattactttccatcctacttgcgctagaagttctggtttatacatgaacacgaaagggtttggtactacatcacagcacaaagcatactgtgacaaacacagcgtagaacagaaagaggctgatgcacagcaatatggacctgaggagctcaggagcatgaaacgaatgagggttgaattggagaaactacgcctgttgtgtgagagaataattaagagagagaaggtgaagagagagacggttatgtgtgatcatgatatacttgccaaaacaaaggacactgttattttctcctaccttgcgtgtggagcaagctcagaatctgcaactacttcagttaataacagagatgttgatagaaacacagctgacagctcaagaacattgatatcattcaaacgcaagttgagtgagaggggaccacgagctggtaagcaacttccacagaggccaactattgcagcagagaaactggaagatgaagacaagaagacaactgataagaagagagaaatgtttcaaaaagagctcgttatgacattagatcaagcttctacacagaatcaacgtcttcctaagggatatgcttatgttcctcgggattccttatcaaaagagaagctatggaatcgaaatacacagccacttaatccgcaggagcctggtggataggatcagttgaaatcaagtcggttcatttctctcgaggaaggtcatgagaaacttgtgcaggcatgttctttgcaactgaaaacgacaagcggcaagcaggggctggccagtgctattgccgcaagggttacagccaatccgtgatcttttttggacccaagttgcataatggtgcagactgaggtattcgtgtgaatgtatggtgtggcaccataacaagaaggctgcccccacccaggtaacgcgaatgatcagcaatatgggtgaattgacctacttgtgctataccaaagacagcgtgccaactgtatatatgagttttattagtgtgcagatttcataaaattgccctgtacattctttcctttgcaaatgctagtttagttgtgcaggagaaaaagaattataaatccgttttggttggataagaaaagaaattagtttggttctttatcatggttcagaagaaaatgcagtggtgcttgcgggcaacgttgggcagctgtttgcctgatacatgtactctgtaaggatggtgaaggtgccaaaaataaggtcatgtcactgcttttcgccaactatttgttggtgctaactgggaagtggtatcatacaggctgagaaactgtgttttagctcttgtcgccggtggtttccgagagccccctttttttaaggggaacagtggtctctttaccggtttttagatatcaagatagcaacaatgttgaagttgggctgtaagttcttaggttgagaaggtatgatagctgagctttttttttttcaatttacatgtggggtatattgtatctgagacaggtttttttcctgcttgccgtccagattataaccttggttgggcctgtttagtaatttgttcggaagcggttcatgttttcaattctattgctcgatgtctgcagagatcgcctattacatgcaaaatttatttccaaattttaggttacattagctttgttaagtcaaccatttgtaattttggcaag

SEQ ID NO: 56084 - DNA, 4266 bp, Zea Mays
gtcccagtcccaccaccagggcagcacgctctcctccctccggcctccgcccactggatccgagacccacgcgcaaaactcgggccgggaaaaactcgccaggaaagagaacgctcggaagggaaacacaggctcgggctcgagacgaaaccctaaccctacctccgcttgcctcgacgtccctcctcgccggaggcctcccccggagacgcagcctccgctgagggctccggcggcgatgcgcccctcccagttggaggcgttatgagcggggaaatggcgcgcgccgaggccttgccagagggggaggcccccgggttcggtgtcgacctgtatgcgcaagccaccaaggctgtgtccctgcggacgccgttcgagggcgatgaggcggcgcccagggttcccacgctgcccgcgcggctcgtcagctgggcagggccaggggacgcccggaagaagcacaagaagattctgcctccccctcctgatgatgctgctccggagcctccaccacagtcacctgtagtcacccctgcgaaggttggcttgtgggaccagtttgaggcgtatttccgtcccgtaacactggctgacgtcgaaatgttaagaccaaagctcccatttggctacagcaaggttgactcatgtatgctagtaccatttctgggcagtggcaatgagtcaacaacccaagctgagacatatgacgtggctgtggctgaaacaaccttgtatttgggtgttggtggtgaagaagtggtcactaatcgggagcgcggcgtgcaaagtgtgcatctggctagtcagaaagagaggaatgatcaaagcattgaacatgacatacatgatgtggttgtgcaacagatggtcagcgacaaagagcttaataggcacagaggggtacagggcatacacgaagtttctattcagttgggagggagatcatctggagtggatcaagctgggagcagtagtggcattgttttaggacaatttgtcaatgaggaaggaacttcacttaattggctgctaggagcaacaggccggtttgttctcacttcagagcgacccaacaagaagagaaagcttctgggtgtcgatgctgggttagagcagcttgttctgcttccacgcgtaggggctgaggcatctgcaagctgtgatgtttgttgtcttggagaaagttccatggagtccaataggatagttaactgcagcaactgcaaggtgtcagtgcaccagaagtgttatggtttgcatgctgtgcctgatgggcaatggttgtgtgcttggtgtacatatctagagtctacagggtggtcattgaaggaagatgctggtaacacccagtcgatgccttgtgctttatgcccaaaggagaaaggagctcttaaacctgttaaagtggagtctactcgaaatgagggtattggccaccaaaaatttgtgcacttgtactgtagtctctgggcaccagaggtttttgttgaggacatggagtcaatggaacctgtacttagccttgaaaatgtccaagagaatcggatgaagttgacgtgcagtatctgcaagattaagcatggtgcatgtgtccgatgtagtcatgggacgtgtcggacgccctttcaccctatatgtgcaagagagtcaaagcatcaaatggagatatgggggaaatccaggcaccctaatgttgagttgagagcattttgctcaaagcattctgcagttgaatacgccagttctgtagataccagtaaccttgcatctgaacagaatcctagaaaatctggcccatacaataccaccctcaattctgggaaaattccagtaattaggttcacacgcaaaaacaaggacaaattcatcagttgtggaaccagtgcctctagttctggtaacctgatcagagtcaagacaatagagcaagatgctttagctaacacagttagaaatgcaaattctcaacctattcgaatatgggaaacaggtactggtcatccctctgttagtggtgatcatatcagaagttctggtgatattgctgtagtgcttagaaagctaattgacagtggaaaagttagtgttagtgatgtagcatctgaagtcggtatttcttcggaatccttggaagctgctcttgtgggtgaaactaccacgttttcccatggtttgacgctgaaaattatcaagtggctccaaaattctgtgcatatgcatggcgctcaaggaaatgtttgtaaagggagctcaggggtggtgcaagataacaaatcagatggattggacaccacagatactgttgatgtgaaaaatgcattggtcctagatgatgacaagggtgtacttgttgatgtgccggatttcgctgtaactgaacctgcacgaacaagatctaaaagcaacagcaagatactgaaagaaaataatgcaacatgcgcaacaggtgtgactattgtgcaaaatggagaaaagaacatggttaaagaagattctaatcccgagtgtgctgctaaagaatttgcaaacgaatctactcaggggttttctccaagcagcagcaaggatgttttaaaggacgaacatggaatattgatactgaacgacacctctggaaacaaagaatctggtacctccacacagataccaaatgaaaagcaaggtgcattacttggaagaaaaaataatgacttaactgaggtcgaactgggtccatgcttagagaaaggagtaccttcacatggccattgttttgttcagggtgataatggtgtagatggggtaggttcagttgaaaatagcttcaacacttcaaattgctctcatggacaaccttttttcaactttgatgattcacattcttatattcacccattcattaagaaaaaggtatctcatcattgggacattactttcaatcagaataaggaaactctgaatcactatatacaagagtcatcatatccttcacatgagaaaataccaactgattccttggtagaagtagagagtacagcagatacaaccgtgacagatcaagttttgaaagcaaggtcttcaaaaattcttgagcattcacctgatgatgaagttgaaggagagatggtgtacttacaatctaggctgcttgacaatgctgttgttctgaagcacagatatgaaaaattgatagcaaaggttgtccaaaatctttgtcgcgagctggatgctttcagtaaaagaaaatgggatcttatctttgtgaatcagtttcttcgtgatgttagagaagctaaaaaacgtgggagaaaagaaaagagacataaggaagcccaagctgtactagctgcagctgcagctgctattgcatcctcctcacggaactcaactgtgagaaaagatgcaaaggagaatgcaccagagagttctccaaaacttgttgctggatcttcaagggttggtcaacggactttttcattgccacggattaatgattcatcaaagtcatccaacaacaaagtatcatcagataacaaatttggaagttttcatatgccaatttcttcaaaagaaaatgggctatactgtgatgtatgcatgcgaactgaaactctgttgaaccgaatatttgtctgctccagatgcaaggctgctgtgcacatagattgctacagaaatctggaaaattctattgggccctggaactgcgaactttgtgaagatgaagacatttcatcagaagctacaagtacaaccgttagtgataaatcacattgtaatggcaagttaccctttgcacagtgtggcatgtgccatggcacatcaggtgcttttagaaagactgtagatgggaagtgggttcatgctttctgtgctgagtggttgttggataccaagtatgtaaggggacaagatagccctgtagaaggaatggaaaaccttgtagagggaaaagacacttgttgtctctgcctctgcaatgttggcatgtgcttaaggtgtagtagtggggattgcaacattactttccatcctacttgcgctagaagttctggtttatacatgaacacgaaagggtttggtactacatcacagcacaaagcatactgtgacaaacacagcgtagaacagaaagaggctgatgcacagcaatatggacctgaggagctcaggagcatgaaacgaatgagggttgaattggagaaactacgcctgttgtgtgagagaataattaagagagagaaggtgaagctaatcccattaatggttctttgattccaaataagg

SEQ ID NO: 56085 - DNA, 4404 bp, Zea Mays
cctccctccggcctccgcccactggatccgagacccacgcgcaaaactcgggccgggaaaaactcgccaggaaagagaacgctcggaagggaaacacaggctcgggctcgagacgaaaccctaaccctacctccgcttgcctcgacgtccctcctcgccggaggcctcccccggagacgcagcctccgctgagggctccggcggcgatgcgcccctcccagttggaggcgttatgagcggggaaatggcgcgcgccgaggccttgccagagggggaggcccccgggttcggtgtcgacctgtatgcgcaagccaccaaggctgtgtccctgcggacgccgttcgagggcgatgaggcggcgcccagggttcccacgctgcccgcgcggctcgtcagctgggcagggccaggggacgcccggaagaagcacaagaagattctgcctccccctcctgatgatgctgctccggagcctccaccacagtcacctgtagtcacccctgcgaaggttggcttgtgggaccagtttgaggcgtatttccgtcccgtaacactggctgacgtcgaaatgttaagaccaaagctcccatttggctacagcaaggttgactcatgtatgctagtaccatttctgggcagtggcaatgagtcaacaacccaagctgagacatatgacgtggctgtggctgaaacaaccttgtatttgggtgttggtggtgaagaagtggtcactaatcgggagcgcggcgtgcaaagtgtgcatctggctagtcagaaagagaggaatgatcaaagcattgaacatgacatacatgatgtggttgtgcaacagatggtcagcgacaaagagcttaataggcacagaggggtacagggcatacacgaagtttctattcagttgggagggagatcatctggagtggatcaagctgggagcagtagtggcattgttttaggacaatttgtcaatgaggaaggaacttcacttaattggctgctaggagcaacaggccggtttgttctcacttcagagcgacccaacaagaagagaaagcttctgggtgtcgatgctgggttagagcagcttgttctgcttccacgcgtaggggctgaggcatctgcaagctgtgatgtttgttgtcttggagaaagttccatggagtccaataggatagttaactgcagcaactgcaaggtgtcagtgcaccagaagtgttatggtttgcatgctgtgcctgatgggcaatggttgtgtgcttggtgtacatatctagagtctacagggtggtcattgaaggaagatgctggtaacacccagtcgatgccttgtgctttatgcccaaaggagaaaggagctcttaaacctgttaaagtggagtctactcgaaatgagggtattggccaccaaaaatttgtgcacttgtactgtagtctctgggcaccagaggtttttgttgaggacatggagtcaatggaacctgtacttagccttgaaaatgtccaagagaatcggatgaagttgacgtgcagtatctgcaagattaagcatggtgcatgtgtccgatgtagtcatgggacgtgtcggacgccctttcaccctatatgtgcaagagagtcaaagcatcaaatggagatatgggggaaatccaggcaccctaatgttgagttgagagcattttgctcaaagcattctgcagttgaatacgccagttctgtagataccagtaaccttgcatctgaacagaatcctagaaaatctggcccatacaataccaccctcaattctgggaaaattccagtaattaggttcacacgcaaaaacaaggacaaattcatcagttgtggaaccagtgcctctagttctggtaacctgatcagagtcaagacaatagagcaagatgctttagctaacacagttagaaatgcaaattctcaacctattcgaatatgggaaacaggtactggtcatccctctgttagtggtgatcatatcagaagttctggtgatattgctgtagtgcttagaaagctaattgacagtggaaaagttagtgttagtgatgtagcatctgaagtcggtatttcttcggaatccttggaagctgctcttgtgggtgaaactaccacgttttcccatggtttgacgctgaaaattatcaagtggctccaaaattctgtgcatatgcatggcgctcaaggaaatgtttgtaaagggagctcaggggtggtgcaagataacaaatcagatggattggacaccacagatactgttgatgtgaaaaatgcattggtcctagatgatgacaagggtgtacttgttgatgtgccggatttcgctgtaactgaacctgcacgaacaagatctaaaagcaacagcaagatactgaaagaaaataatgcaacatgcgcaacaggtgtgactattgtgcaaaatggagaaaagaacatggttaaagaagattctaatcccgagtgtgctgctaaagaatttgcaaacgaatctactcaggggttttctccaagcagcagcaaggatgttttaaaggacgaacatggaatattgatactgaacgacacctctggaaacaaagaatctggtacctccacacagataccaaatgaaaagcaaggtgcattacttggaagaaaaaataatgacttaactgaggtcgaactgggtccatgcttagagaaaggagtaccttcacatggccattgttttgttcagggtgataatggtgtagatggggtaggttcagttgaaaatagcttcaacacttcaaattgctctcatggacaaccttttttcaactttgatgattcacattcttatattcacccattcattaagaaaaaggtatctcatcattgggacattactttcaatcagaataaggaaactctgaatcactatatacaagagtcatcatatccttcacatgagaaaataccaactgattccttggtagaagtagagagtacagcagatacaaccgtgacagatcaagttttgaaagcaaggtcttcaaaaattcttgagcattcacctgatgatgaagttgaaggagagatggtgtacttacaatctaggctgcttgacaatgctgttgttctgaagcacagatatgaaaaattgatagcaaaggttgtccaaaatctttgtcgcgagctggatgctttcagtaaaagaaaatgggatcttatctttgtgaatcagtttcttcgtgatgttagagaagctaaaaaacgtgggagaaaagaaaagagacataaggaagcccaagctgtactagctgcagctgcagctgctattgcatcctcctcacggaactcaactgtgagaaaagatgcaaaggagaatgcaccagagagttctccaaaacttgttgctggatcttcaagggttggtcaacggactttttcattgccacggattaatgattcatcaaagtcatccaacaacaaagtatcatcagataacaaatttggaagttttcatatgccaatttcttcaaaagaaaatgggctatactgtgatgtatgcatgcgaactgaaactctgttgaaccgaatatttgtctgctccagatgcaaggtgatttggatttgttgaagttttcatgtcttatgctatattgtgttcttaacttcttttttaacaggctgctgtgcacatagattgctacagaaatctggaaaattctattgggccctggaactgcgaactttgtgaagatgaagacatttcatcagaagctacaagtacaaccgttagtgataaatcacattgtaatggcaagttaccctttgcacagtgtggcatgtgccatggcacatcaggtgcttttagaaagactgtagatgggaagtgggttcatgctttctgtgctgagtggttgttggataccaagtatgtaaggggacaagatagccctgtagaaggaatggaaaaccttgtagagggaaaagacacttgttgtctctgcctctgcaatgttggcatgtgcttaaggtgtagtagtggggattgcaacattactttccatcctacttgcgctagaagttctggtttatacatgaacacgaaagggtttggtactacatcacagcacaaagcatactgtgacaaacacagcgtagaacagaaagaggctgatgcacagcaatatggacctgaggagctcaggagcatgaaacgaatgaggatgcaagagctcattactcactgccacttatgaagagatcagtctgaaaccaacaaattatctttagctaccttgtgaaaactctgtggtttgcttgtatcattcgagttagctatttacagttttgggaatacattatgctgccacagcacttcatggggcagaactcatcagtcattattcatagaggaaacaatat

SEQ ID NO: 56086 - DNA, 480 bp, Zea Mays
tggtctcggcaacaagcccgcaagcaaggtcattcaagagaccaacgaatcatgggagaaattggtaaagagaaatattcccgctggagagctctcgttggcctgattttggcccatggaagccaccacattcttttgaactgctttcgtgagcatgtcgttttgtatgctgtgaccatgcttcttcgtttgcattccaaaccttttttacgaactgtttaacaaaaatgatcttgtcggataaataatgattctggtgcgagtttaccagaacggcaaggagtttctcaagtaaatgcagcgtatttttctatacatacaaatgtgtaatttataaagttggaacacaccattcaactgagcaaaagcagtttgaggtcgttaagcaagtcttcccacaccgtgctttgtgatgttggatggatagcggaaaatagaagacgtggcactgtagatgtaacattgcgtctagagaaattc

SEQ ID NO: 56087 - DNA, 2052 bp, Zea Mays
atggcgcccaagcgccggggaaatgaaatgggggttaaagagttggatagccttatgactttgattgctgagaagaagcggcaaatggaacaacaagaatcagagacaaatatgcaaatattgctagtcttcttacactgccttagaaagcaaaagctagaagagttgaatgagattcaaactgatctacaatacatcaaagaggatataagttctgtggagagacatagggcagaattatatcgcacaaaagaaaggtactccatgaagctgcgcatgcttttagatgagcctactgcgcaaaaaatgtggccctctcctatagacaaagctagctgtcgctttcttcccaactctcggacaccacttagtggatcatgtccaggaactttacagaataagaagcttgatttgaaagctcaagtaagccatcaaggatttcaaaggagagatgctctaacttcttctgatcctcctaactcccctatacaatcgggtaatgttattgctaggaagaggcgagttcaagcacagttcaatgagcttcaagaatactacctgcaaagacgtcgtactggagcacaggcacgcagacaagaagaaagagatatagttgcaatgaatagagaaggctatcatgcaggtcttcaggatttccagtctgtgctaacaacgttcactcgatacagtcgtctacgtgtcattgcggaactaagacatggagacttgtttcactctgccaatattgtatccagtattgaatttgatcgtgatgatgaactatttgctaccgctggagtctcgaaacgtattaaagtcttcgaattttccactgttgttaatgaaccatcagatgtgcattgcccagttgttgaaatggctaccagatctaaacttagctgcctaagctggaacaagtactcaaaaaatattattgcaagcagtgactatgagggtatagtaactgtgtgggatgttcagacccgtcagagtgtgatggaatatgaagagcatgagaagagagcatggagtgttgatttttctcgcacagactcttcaatgctagtatctgggagtgatgattgcaaggtgaaagtgtggtgcacaaatcaagaagcaagtgtgatcaatattgatatgaaagcaaatatttgctcggttaaatataatcctggatcaagcttctacgttgcagtcggatctgctgatcaccatattcattactttgatttacgtaatccaagttcgcctgtccatatttttggggggcacaagaaagcagtatcatatgtgaaattcttatctaacaatgagcttgcgtctgcatcaacagatagcacattacgcttatgggatgtcaaggataactgcccggtacggacattcagaggacacaaaaatgaaaagaactttgttggcttgtctgtgaacaatgaatatattgcttgtggaagtgagacaaatgaggtttttgtttatcacaaggctatctcgaaaccggcagcaagccatagatttgtatcttctgacctggatgatgccgatgatgatcctggttcttatttcattagtgctgtctgctggaagagtgatagccctacgatgttaactgctaacagtcaggggaccataaaagttcttgtacttgctccttgatgttatggagggcgttcaagaggttcacagtactgtccagttgtttcctttcgtgtcattatattcccccaaaattgggaacgggggcataattgatctccggttagggaatgaagttttgcagatggtcagctgacgtagggttttgaggtatcagaatgtgcatagtcatgtttatgttgtataggtgtaattgtgtaaagcagccaagttattggttacaagtgtaacacgagaaatacacattaataaaaaaaaaacctccagctcgtttgtacagagattgtgcttgaacccagaaccttatgtggtaattgcgattggtaatatatctacctgatatgatcaaacggatgccgtaatcagcaattgtttctttcaggtgtgtttttttcc

SEQ ID NO: 56088 - DNA, 1905 bp, Zea Mays
atggcgcccaagcgccggggaaatgaaatgggggttaaagagttggatagccttatgactttgattgctgagaagaagcggcaaatggaacaacaagaatcagagacaaatatgcaaatattgctagtcttcttacactgccttagaaagcaaaagctagaagagttgaatgagattcaaactgatctacaatacatcaaagaggatataagttctgtggagagacatagggcagaattatatcgcacaaaagaaaggaactttacagaataagaagcttgatttgaaagctcaagtaagccatcaaggatttcaaaggagagatgctctaacttcttctgatcctcctaactcccctatacaatcgggtaatgttattgctaggaagaggcgagttcaagcacagttcaatgagcttcaagaatactacctgcaaagacgtcgtactggagcacaggcacgcagacaagaagaaagagatatagttgcaatgaatagagaaggctatcatgcaggtcttcaggatttccagtctgtgctaacaacgttcactcgatacagtcgtctacgtgtcattgcggaactaagacatggagacttgtttcactctgccaatattgtatccagtattgaatttgatcgtgatgatgaactatttgctaccgctggagtctcgaaacgtattaaagtcttcgaattttccactatgtgcattgcccagttgttgaaatggctaccagatctaaacttagctgcctaagctggaacaagtactcaaaaaatattattgcaagcagtgactatgagggtatagtaactgtgtgggatgttcagacccgtcagagtgtgatggaatatgaagagcatgagaagagagcatggagtgttgatttttctcgcacagactcttcaatgctagtatctgggagtgatgattgcaaggtgaaagtgtggtgcacaaatcaagaagcaagtgtgatcaatattgatatgaaagcaaatatttgctcggttaaatataatcctggatcaagcttctacgttgcagtcggatctgctgatcaccatattcattactttgatttacgtaatccaagttcgcctgtccatatttttggggggcacaagaaagcagtatcatatgtgaaattcttatctaacaatgagcttgcgtctgcatcaacagatagcacattacgcttatgggatgtcaaggataactgcccggtacggacattcagaggacacaaaaatgaaaagaactttgttggcttgtctgtgaacaatgaatatattgcttgtggaagtgagacaaatgaggtttttgtttatcacaaggctatctcgaaaccggcagcaagccatagatttgtatcttctgacctggatgatgccgatgatgatcctggttcttatttcattagtgctgtctgctggaagagtgatagccctacgatgttaactgctaacagtcaggggaccataaaagttcttgtacttgctccttgatgttatggagggcgttcaagaggttcacagtactgtccagttgtttcctttcgtgtcattatattcccccaaaattgggaacgggggcataattgatctccggttagggaatgaagttttgcagatggtcagctgacgtagggttttgaggtatcagaatgtgcatagtcatgtttatgttgtataggtgtaattgtgtaaagcagccaagttattggttacaagtgtaacacgagaaatacacattaataaaaaaaaaacctccagctcgtttgtacagagattgtgcttgaacccagaaccttatgtggtaattgcgattggtaatatatctacctgatatgatcaaacggatgccgtaatcagcaattgtttctttcaggtgtgtttttttcc

SEQ ID NO: 56089 - DNA, 2262 bp, Zea Mays
atggcgcccaagcgccggggaaatgaaatgggggttaaagagttggatagccttatgactttgattgctgagaagaagcggcaaatggaacaacaagaatcagagacaaatatgcaaatattgctagtcttcttacactgccttagaaagcaaaagctagaagagttgaatgagattcaaactgatctacaatacatcaaagaggatataagttctgtggagagacatagggcagaattatatcgcacaaaagaaaggtactccatgaagctgcgcatgcttttagatgagcctactgcgcaaaaaatgtggccctctcctatagacaaagctagctgtcgctttcttcccaactctcggacaccacttagtggatcatgtccaggaactttacagaataagaagcttgatttgaaagctcaagtaagccatcaaggatttcaaaggagagatgctctaacttcttctgatcctcctaactcccctatacaatcgggtaatgttattgctaggaagaggcgagttcaagcacaggtgtgtttctcactccatgcattactacatttcttaaggcacagtttcctcccacattacacccaaaaagtaggcctcttatgtgttgcatacatgttttgaacagtatacagtacacacatggccttttacttaacttcgtgttagataaaatggcaccgatcttatgccatttattttttaaatctaattctatgaggaactttgcagttcaatgagcttcaagaatactacctgcaaagacgtcgtactggagcacaggcacgcagacaagaagaaagagatatagttgcaatgaatagagaaggctatcatgcaggtcttcaggatttccagtctgtgctaacaacgttcactcgatacagtcgtctacgtgtcattgcggaactaagacatggagacttgtttcactctgccaatattgtatccagtattgaatttgatcgtgatgatgaactatttgctaccgctggagtctcgaaacgtattaaagtcttcgaattttccactgttgttaatgaaccatcagatgtgcattgcccagttgttgaaatggctaccagatctaaacttagctgcctaagctggaacaagtactcaaaaaatattattgcaagcagtgactatgagggtatagtaactgtgtgggatgttcagacccgtcagagtgtgatggaatatgaagagcatgagaagagagcatggagtgttgatttttctcgcacagactcttcaatgctagtatctgggagtgatgattgcaaggtgaaagtgtggtgcacaaatcaagaagcaagtgtgatcaatattgatatgaaagcaaatatttgctcggttaaatataatcctggatcaagcttctacgttgcagtcggatctgctgatcaccatattcattactttgatttacgtaatccaagttcgcctgtccatatttttggggggcacaagaaagcagtatcatatgtgaaattcttatctaacaatgagcttgcgtctgcatcaacagatagcacattacgcttatgggatgtcaaggataactgcccggtacggacattcagaggacacaaaaatgaaaagaactttgttggcttgtctgtgaacaatgaatatattgcttgtggaagtgagacaaatgaggtttttgtttatcacaaggctatctcgaaaccggcagcaagccatagatttgtatcttctgacctggatgatgccgatgatgatcctggttcttatttcattagtgctgtctgctggaagagtgatagccctacgatgttaactgctaacagtcaggggaccataaaagttcttgtacttgctccttgatgttatggagggcgttcaagaggttcacagtactgtccagttgtttcctttcgtgtcattatattcccccaaaattgggaacgggggcataattgatctccggttagggaatgaagttttgcagatggtcagctgacgtagggttttgaggtatcagaatgtgcatagtcatgtttatgttgtataggtgtaattgtgtaaagcagccaagttattggttacaagtgtaacacgagaaatacacattaataaaaaaaaaacctccagctcgtttgtacagagattgtgcttgaacccagaaccttatgtggtaattgcgattggtaatatatctacctgatatgatcaaacggatgccgtaatcagcaattgtttctttcaggtgtgtttttttcc

SEQ ID NO: 56090 - DNA, 2388 bp, Zea Mays
atcacacatcccaccgccgccgccaccaccaccacccgccctatacccgtatataattactcgtacccggacgccaccgccgcctgcgccatgggcgactcctcggtggccggcgcgctcgtgccgtccgtgcccaagccggagcccgcgccgtccggtgacacctccgcggcggccgcggcgactacagcggcgctggcgatgccggaggaggcgggtatgcgcgcggcgtcggcgtcgcctcaggggcctgcggaggagggggagggccccgccgatagggacctcctctgcccgatctgcatggccgtcatcaaggacgccttcctcaccgcatgcggccacagcttctgctacatgtgcatcgtcacgcacctcagcaacaagagcgactgcccctgctgcgggcattaccttaccaaggcccagctctaccccaactttctccttgacaaggttctgaagaaaatatcagcccaacaaatagcaaaaacagcatcgccgatcgatcaatttcgatgtgcattgcaacagggaaatgaaatgggggttaaagagttggatagccttatgactttgattgctgagaagaagcggcaaatggaacaacaagaatcagagacaaatatgcaaatattgctagtcttcttacactgccttagaaagcaaaagctagaagagttgaatgagattcaaactgatctacaatacatcaaagaggatataagttctgtggagagacatagggcagaattatatcgcacaaaagaaaggtactccatgaagctgcgcatgcttttagatgagcctactgcgcaaaaaatgtggccctctcctatagacaaagctagctgtcgctttcttcccaactctcggacaccacttagtggatcatgtccaggaactttacagaataagaagcttgatttgaaagctcaagtaagccatcaaggatttcaaaggagagatgctctaacttcttctgatcctcctaactcccctatacaatcgggtaatgttattgctaggaagaggcgagttcaagcacagttcaatgagcttcaagaatactacctgcaaagacgtcgtactggagcacaggcacgcagacaagaagaaagagatatagttgcaatgaatagagaaggctatcatgcaggtcttcaggatttccagtctgtgctaacaacgttcactcgatacagtcgtctacgtgtcattgcggaactaagacatggagacttgtttcactctgccaatattgtatccagtattgaatttgatcgtgatgatgaactatttgctaccgctggagtctcgaaacgtattaaagtcttcgaattttccactgttgttaatgaaccatcagatgtgcattgcccagttgttgaaatggctaccagatctaaacttagctgcctaagctggaacaagtactcaaaaaatattattgcaagcagtgactatgagggtatagtaactgtgtgggatgttcagacccgtcagagtgtgatggaatatgaagagcatgagaagagagcatggagtgttgatttttctcgcacagactcttcaatgctagtatctgggagtgatgattgcaaggtgaaagtgtggtgcacaaatcaagaagcaagtgtgatcaatattgatatgaaagcaaatatttgctcggttaaatataatcctggatcaagcttctacgttgcagtacggacattcagaggacacaaaaatgaaaagaactttgttggcttgtctgtgaacaatgaatatattgcttgtggaagtgagacaaatgaggtttttgtttatcacaaggctatctcgaaaccggcagcaagccatagatttgtatcttctgacctggatgatgccgatgatgatcctggttcttatttcattagtgctgtctgctggaagagtgatagccctacgatgttaactgctaacagtcaggggaccataaaagttcttgtacttgctccttgatgttatggagggcgttcaagaggttcacagtactgtccagttgtttcctttcgtgtcattatattcccccaaaattgggaacgggggcataattgatctccggttagggaatgaagttttgcagatggtcagctgacgtagggttttgaggtatcagaatgtgcatagtcatgtttatgttgtataggtgtaattgtgtaaagcagccaagttattggttacaagtgtaacacgagaaatacacattaataaaaaaaaaacctccagctcgtttgtacagagattgtgcttgaacccagaaccttatgtggtaattgcgattggtaatatatctacctgatatgatcaaacggatgccgtaatcagcaattgtttctttcaggtgtgtttttttcc

SEQ ID NO: 56091 - DNA, 2778 bp, Zea Mays
atcacacatcccaccgccgccgccaccaccaccacccgccctatacccgtatataattactcgtacccggacgccaccgccgcctgcgccatgggcgactcctcggtggccggcgcgctcgtgccgtccgtgcccaagccggagcccgcgccgtccggtgacacctccgcggcggccgcggcgactacagcggcgctggcgatgccggaggaggcgggtatgcgcgcggcgtcggcgtcgcctcaggggcctgcggaggagggggagggccccgccgatagggacctcctctgcccgatctgcatggccgtcatcaaggacgccttcctcaccgcatgcggccacagcttctgctacatgtgcatcgtcacgcacctcagcaacaagagcgactgcccctgctgcgggcattaccttaccaaggcccagctctaccccaactttctccttgacaaggttctgaagaaaatatcagcccaacaaatagcaaaaacagcatcgccgatcgatcaatttcgatgtgcattgcaacagggaaatgaaatgggggttaaagagttggatagccttatgactttgattgctgagaagaagcggcaaatggaacaacaagaatcagagacaaatatgcaaatattgctagtcttcttacactgccttagaaagcaaaagctagaagagttgaatgagattcaaactgatctacaatacatcaaagaggatataagttctgtggagagacatagggcagaattatatcgcacaaaagaaaggtactccatgaagctgcgcatgcttttagatgagcctactgcgcaaaaaatgtggccctctcctatagacaaagctagctgtcgctttcttcccaactctcggacaccacttagtggatcatgtccaggaactttacagaataagaagcttgatttgaaagctcaagtaagccatcaaggatttcaaaggagagatgctctaacttcttctgatcctcctaactcccctatacaatcgggtaatgttattgctaggaagaggcgagttcaagcacaggtgtgtttctcactccatgcattactacatttcttaaggcacagtttcctcccacattacacccaaaaagtaggcctcttatgtgttgcatacatgttttgaacagtatacagtacacacatggccttttacttaacttcgtgttagataaaatggcaccgatcttatgccatttattttttaaatctaattctatgaggaactttgcagttcaatgagcttcaagaatactacctgcaaagacgtcgtactggagcacaggcacgcagacaagaagaaagagatatagttgcaatgaatagagaaggctatcatgcaggtcttcaggatttccagtctgtgctaacaacgttcactcgatacagtcgtctacgtgtcattgcggaactaagacatggagacttgtttcactctgccaatattgtatccagtattgaatttgatcgtgatgatgaactatttgctaccgctggagtctcgaaacgtattaaagtcttcgaattttccactgttgttaatgaaccatcagatgtgcattgcccagttgttgaaatggctaccagatctaaacttagctgcctaagctggaacaagtactcaaaaaatattattgcaagcagtgactatgagggtatagtaactgtgtgggatgttcagacccgtcagagtgtgatggaatatgaagagcatgagaagagagcatggagtgttgatttttctcgcacagactcttcaatgctagtatctgggagtgatgattgcaaggtgaaagtgtggtgcacaaatcaagaagcaagtgtgatcaatattgatatgaaagcaaatatttgctcggttaaatataatcctggatcaagcttctacgttgcagtcggatctgctgatcaccatattcattactttgatttacgtaatccaagttcgcctgtccatatttttggggggcacaagaaagcagtatcatatgtgaaattcttatctaacaatgagcttgcgtctgcatcaacagatagcacattacgcttatgggatgtcaaggataactgcccggtacggacattcagaggacacaaaaatgaaaagaactttgttggcttgtctgtgaacaatgaatatattgcttgtggaagtgagacaaatgaggtttttgtttatcacaaggctatctcgaaaccggcagcaagccatagatttgtatcttctgacctggatgatgccgatgatgatcctggttcttatttcattagtgctgtctgctggaagagtgatagccctacgatgttaactgctaacagtcaggggaccataaaagttcttgtacttgctccttgatgttatggagggcgttcaagaggttcacagtactgtccagttgtttcctttcgtgtcattatattcccccaaaattgggaacgggggcataattgatctccggttagggaatgaagttttgcagatggtcagctgacgtagggttttgaggtatcagaatgtgcatagtcatgtttatgttgtataggtgtaattgtgtaaagcagccaagttattggttacaagtgtaacacgagaaatacacattaataaaaaaaaaacctccagctcgtttgtacagagattgtgcttgaacccagaaccttatgtggtaattgcgattggtaatatatctacctgatatgatcaaacggatgccgtaatcagcaattgtttctttcaggtgtgtttttttcc

SEQ ID NO: 56092 - DNA, 2452 bp, Zea Mays
ccctcgcgctccccctctcccgcatcacacatcccaccgccgccgccaccaccaccacccgccctatacccgtatataattactcgtacccggacgccaccgccgcctgcgccatgggcgactcctcggtggccggcgcgctcgtgccgtccgtgcccaagccggagcccgcgccgtccggtgacacctccgcggcggccgcggcgactacagcggcgctggcgatgccggaggaggcgggtatgcgcgcggcgtcggcgtcgcctcaggggcctgcggaggagggggagggccccgccgatagggacctcctctgcccgatctgcatggccgtcatcaaggacgccttcctcaccgcatgcggccacagcttctgctacatgtgcatcgtcacgcacctcagcaacaagagcgactgcccctgctgcgggcattaccttaccaaggcccagctctaccccaactttctccttgacaaggttctgaagaaaatatcagcccaacaaatagcaaaaacagcatcgccgatcgatcaatttcgatgtgcattgcaacagggaaatgaaatgggggttaaagagttggatagccttatgactttgattgctgagaagaagcggcaaatggaacaacaagaatcagagacaaatatgcaaatattgctagtcttcttacactgccttagaaagcaaaagctagaagagttgaatgagattcaaactgatctacaatacatcaaagaggatataagttctgtggagagacatagggcagaattatatcgcacaaaagaaaggtactccatgaagctgcgcatgcttttagatgagcctactgcgcaaaaaatgtggccctctcctatagacaaagctagctgtcgctttcttcccaactctcggacaccacttagtggatcatgtccaggaactttacagaataagaagcttgatttgaaagctcaagtaagccatcaaggatttcaaaggagagatgctctaacttcttctgatcctcctaactcccctatacaatcgggtaatgttattgctaggaagaggcgagttcaagcacagttcaatgagcttcaagaatactacctgcaaagacgtcgtactggagcacaggcacgcagacaagaagaaagagatatagttgcaatgaatagagaaggctatcatgcaggtcttcaggatttccagtctgtgctaacaacgttcactcgatacagtcgtctacgtgtcattgcggaactaagacatggagacttgtttcactctgccaatattgtatccagtattgaatttgatcgtgatgatgaactatttgctaccgctggagtctcgaaacgtattaaagtcttcgaattttccactgttgttaatgaaccatcagatgtgcattgcccagttgttgaaatggctaccagatctaaacttagctgcctaagctggaacaagtactcaaaaaatattattgcaagcagtgactatgagggtatagtaactgtgtgggatgttcagacccgtcagagtgtgatggaatatgaagagcatgagaagagagcatggagtgttgatttttctcgcacagactcttcaatgctagtatctgggagtgatgattgcaaggtgaaagtgtggtgcacaaatcaagaagcaagtgtgatcaatattgatatgaaagcaaatatttgctcggttaaatataatcctggatcaagcttctacgttgcaatagcacattacgcttatgggatgtcaaggataactgcccggtacggacattcagaggacacaaaaatgaaaagaactttgttggcttgtctgtgaacaatgaatatattgcttgtggaagtgagacaaatgaggtttttgtttatcacaaggctatctcgaaaccggcagcaagccatagatttgtatcttctgacctggatgatgccgatgatgatcctggttcttatttcattagtgctgtctgctggaagagtgatagccctacgatgttaactgctaacagtcaggggaccataaaagttcttgtacttgctccttgatgttatggagggcgttcaagaggttcacagtactgtccagttgtttcctttcgtgtcattatattcccccaaaattgggaacgggggcataattgatctccggttagggaatgaagttttgcagatggtcagctgacgtagggttttgaggtatcagaatgtgcatagtcatgtttatgttgtataggtgtaattgtgtaaagcagccaagttattggttacaagtgtaacacgagaaatacacattaataaaaaaaaaacctccagctcgtttgtacagagattgtgcttgaacccagaaccttatgtggtaattgcgattggtaatatatctacctgatatgatcaaacggatgccgtaatcagcaattgtttctttcaggtgtgtttttttcc

SEQ ID NO: 56093 - DNA, 1212 bp, Zea Mays
cccatataaaaaaatgaacaaaaccgcgacgccgcgaaaaccctagcttggtgccgcctcaccagcttgccaaatctctaaccctaggtgcagcggcggagatggcccccaagcgctcggctccacctccgccgcctccgcccccggctgcctcctccgaggagaccgcctctggttcgggctccgaggaggaggaggaggaggaggaggaggaggaggaggatgatttggagaccgcccactcaccgcctcccgtcgctcccaagagcgttgctccgctgccgcagaaggtccaggaacccgaagcgtccgacgaggatgagtatgacgatgaagatgacgagccgcagaaggtccaggaacccgaagcgtccgatgaggatgaagacgacgaagaggaggatatcgaagaggacgagaaggccaaccacgtggtcccttcttccgccaccaagaacccgcctccgccgccgcagactggcgaggattccgaggcttccgacgaagaagaggatagggaggcggacgacgagatgccgcagacgaagcccgctccaaatcaagaggtggaggctaagggtgcaaagcggccgagcgcgccgttccagcgcacctggtcgattgacgacgacttccgcatcctggaggccctcgctgcgcaacgcctggagcacggcgcgctgcctcaaacggacgtgctggccgacgccctcgctggcaagctcgacaatagtggctgcagcctctccgatctcaagaggaaggtgaggagtttgcagagccggtacgccaaagcggtcaagaaaggcgcgccaccgagcaaggatcaggatcgccgtctcttcgacctctgcaagaacgtctggccttctgttagcaatgccaagcctgttaccaaggcggttaccaaggcgtcggctaacggtggtgctgggagggagcctgacgagatgtgtgagctgtacccataccttgcggaggaggtgagggcgcttcagagggcacacccaggcttgttcaagcgggagtttgggatgatcgaagacagcaaggcccgtacactggacgagaggatcaagaagcagaggcgtgcactgatgaacctacatcttcgtcgccacgacctgaccaaggaagtgaccaggacgctcatggacctggctgagtgatgcagtggactgagattttttttatgaatctgatggagctgtg

SEQ ID NO: 56094 - DNA, 1205 bp, Zea Mays
atataaaaaaatgaacaaaaccgcgacgccgcgaaaaccctagcttggtgccgcctcaccagcttgccaaatctctaaccctaggtgcagcggcggagatggcccccaagcgctcggctccacctccgccgcctccgcccccggctgcctcctccgaggagaccgcctctggttcgggctccgaggaggaggaggaggaggaggaggaggaggaggaggatgatttggagaccgcccactcaccgcctcccgtcgctcccaagagcgttgctccgctgccgcagaaggtccaggaacccgaagcgtccgacgaggatgagtatgacgatgaagatgacgagccgcagaaggtccaggaacccgaagcgtccgatgaggatgaagacgacgaagaggaggatatcgaagaggacgagaaggccaaccacgtggtcccttcttccgccaccaagaacccgcctccgccgccgcagactggcgaggattccgaggcttccgacgaagaagaggatagggaggcggacgacgagatgccgcagacgaagcccgctccaaatcaagaggtggaggctaagggtgcaaagcggccgagcgcgccgttccagcgcacctggtcgattgacgacgacttccgcatcctggaggccctcgctgcgcaacgcctggagcacggcgcgctgcctcaaacggacgtgctggccgacgccctcgctggcaagctcgacaatagtggctgcagcctctccgatctcaagaggaaggtgaggagtttgcagagccggtacgccaaagcggtcaagaaaggcgcgccaccgagcaaggatcaggatcgccgtctcttcgacctctgcaagaacgtctggccttctgttagcaatgccaagcctgttaccaaggcggttaccaaggcgtcggctaacggtggtgctgggagggagcctgacgagatgtgtgagctgtacccataccttgcggaggaggtgagggcgcttcagagggcacacccaggcttgttcaagcgggagtttgggatgatcgaagacagcaaggcccgtacactggacgagaggatcaagaagcagaggcgtgcactgatgaacctacatcttcgtcgccacgacctgaccaaggaagtgaccaggacgctcatggacctggctgagtgatgcagtggactgaattgctcatatcaatcttgagtatct

SEQ ID NO: 56095 - DNA, 838 bp, Zea Mays
gcagactccgccgtgcctgattgccacttccgctagcttttccagctcctactactgctaccccctagatgggcaagtgcgacctcccatcgacggtctgaactgaagcagcagcggcgaggaccgtaacgccagcggccatctcgaggaacaaaagaatcgatggcaggcaggaggcagcacagcagctcagctcatcagtcgccctagagactggactggactctgggggacgccggaatctttgcccaccctttcagactttctttaccgctgcagctttgactccagccccgcagcgacgccgtagaacgaacatcgctgtactaggctgtagctgtacgccttcctttttgcagctttggctaatggtgggtgtgtgtgtggatatgtttgtttagtcatgaccagcactactacttctactactagcatgctactattaaaatctgatgaccagtacgtatagattaattaatttaaatggtttagccttttgcgcccatgtgacccactacggtttgtctcgactcgagtgagcattttgactcttgttccgtcatcggctcaaatgtgcgtgccggaggcggaaatggtgcttagcgtggacgacaatgcacactactggcagcagcacccgcactcgagtagtgctactagtcaaatgtctgccctttggcgagcaattaaaaccttggaaatggaggatttgtgccgaattgctttggaacgtttcagatctcaaagcaaggctgttttttttcgattctgtaaataaacactgtctaaagcttcattattggacttctctactaatggggaagtcaaaaaaaaaaaa

SEQ ID NO: 56096 - DNA, 2601 bp, Zea Mays
tgaatttctgatatgttttttcccggagctggtatttgcaaacgagaattagtgctgtgctgagatttacagtcatatcttgcagaactgacaatatttttgtgccctcataccaagaagttccttatattgctcgacaatcgcccatggttgctagatcaggatacaaaacctgctcatctatggcaattgatggttactaagtcaaggttttcccctttcgccaactctagggctaggagaaggagggatgaaactgatgaaaagcttgtgtactcaacaagctcagtatctgctccccatttacagaataaatcttccagatggtattccttgatcgacgacgctatgcgggaaaagaagcttcaagtaaataagttgaaggatgcccgcatactgaacagggagcttcatcagactttatatggttttatcatttttgaggtagactgggctgatgtgcgtggcatcaattatttgaatgaacttcagacggatacatcaatggttgtggagtctaaaataatgaagagatgggagtttgatagtgtcaaacaagcttcaacattgatcgcttcttggttctctggaaatccttttgaatgtcagctcctacaggattatttgaccaacatctcttctaacggagatatattttatgatgctcaaaatgatttcttaacacctgaatgggatagtgagaatttaccaagtgatagtgatgattctagccatgttcaaatcatcagagagtcatcaggtttcacagactcatcttacactacacctccttgctctggaccttacaagagaagaaaaataacaaaatcagatgatggaagtagttcgactgaagaatcatacacagaaattgtggcctcgccaaaacattcgtcatcttcgtgttcatcatgtgacagtgataatgagaatgctaagccgctattggagcctagcacgtataaggatgtactgatctgcttccgctttgatgatcatgaccttccattcggactgaaagaagtcatactatctgacgtcagactgttgacgctacttgagtatggccttccatcgtgggttatatttcttcagtcatatccggtgttttgcaagatatatcggccatggatgtgccctcttgccagagcattgtatgtcttgatgtcattaatcactgttcttataggattttatgacctctacaagaacgtgcccatgctgaaggcaactgcctcaagattgtttggccctttatttgattggatagaaacatgggaaatgatatcaagacttaagtatcttggaactatgcttttcctgcataattttcagcaggcttttacatggtcccttaagattgtgggtgctgctaagtctgctcttagtgttttgacaaagccaattgcgggaccaattctggaggtttttgaacttacgatgccaatttggaacctttgtgctgagacagtaggatatctgagttcagttgtcatgttatctgtagaagtgtcttggagtgtagttattgatacagtggagatgattgtctggccattttggtttgtcttcagtactatggttagcattgtgaattcaattctgtaccctataatttggctcctcggagagatactagctgcacctttccgactagtcattgggctatcaagttttgtagtggacctttttgttgatattatcaattttctaagggggagctggtcaacactaagtgccttatatcaagttggatctgttcccagatcacctgtgcttacatctgataataacatctgggcctcactgtggaaagatcttttgtatcagattttccgtgcactacggagcattttgtatggttttgttgccttcttttcaacatgtaataggcaccgactcagcatttacaatcacattcaagtgttcctccggcgcatatctcatgtcccagctggtgcacgatttaccgcctaccttgatgggactaggaagtatagcagccagaatcatcataagagaaggaaagccaagacgagataacagtgcagttggcaggtcactgagcaattaacaagctaactcggcgcaaatccgagctcaaaaaaagcaaagaaacaaaacaatgtaagccgaacgaaatatggagagcgaacaatcgataacaagagtttgattggagccttcggagaacataaaaaccaaggaagagtccagtacaggagttgtacattgacgctgaaagttccgttacattagctctaaccagtgaccagcagttcccttgtgtaccaaatacctggcgagcagtggaggaaaacctgcagctgtacatacgcggatcttgtagctgctgtttgttgtaaaatgagtaatagctagctttgtatagtaggcctgtgcatatcctgatatcctcttgtagttgccctccggacagcgattttgcaatgcatgtgtatgtcaagtgttgagttttcttcgcgaagaagtgtcatccttttgtcttactgatctcatttcagcagttatttctatggtcattgtccatgtgcacgccatgtaaacactacgtagtagcttacaatacatgtttaacca

SEQ ID NO: 56097 - DNA, 2835 bp, Zea Mays
gccgcgtggggaaaaagggaggcgggcgggcggtgtctttaccgcccgcgcgcgggcattaactccgggctgtggtacctgaccaccctggcttgcggataagcacaacgccatgggagcacagagctgacctcgaggaaggtacttgaggaggaagcctctccgattccaccatattcgcacccggatttgggggactccagcgtctgatctgccgtttgatgcaagaacttgccgtttctcagctaggctgctgcggcgagatggtgcgggccggcgagaataggcatttcttcccgctcaccagcttgcaaatcggaactgacaatatttttgtgccctcataccaagaagttccttatattgctcgacaatcgcccatggttgctagatcaggatacaaaacctgctcatctatggcaattgatggttactaagtcaaggttttcccctttcgccaactctagggctaggagaaggagggatgaaactgatgaaaagcttgtgtactcaacaagctcagtatctgctccccatttacagaataaatcttccagatggtattccttgatcgacgacgctatgcgggaaaagaagcttcaagtaaataagttgaaggatgcccgcatactgaacagggagcttcatcagactttatatggttttatcatttttgaggtagactgggctgatgtgcgtggcatcaattatttgaatgaacttcagacggatacatcaatggttgtggagtctaaaataatgaagagatgggagtttgatagtgtcaaacaagcttcaacattgatcgcttcttggttctctggaaatccttttgaatgtcagctcctacaggattatttgaccaacatctcttctaacggagatatattttatgatgctcaaaatgatttcttaacacctgaatgggatagtgagaatttaccaagtgatagtgatgattctagccatgttcaaatcatcagagagtcatcaggtttcacagactcatcttacactacacctccttgctctggaccttacaagagaagaaaaataacaaaatcagatgatggaagtagttcgactgaagaatcatacacagaaattgtggcctcgccaaaacattcgtcatcttcgtgttcatcatgtgacagtgataatgagaatgctaagccgctattggagcctagcacgtataaggatgtactgatctgcttccgctttgatgatcatgaccttccattcggactgaaagaagtcatactatctgacgtcagactgttgacgctacttgagtatggccttccatcgtgggttatatttcttcagtcatatccggtgttttgcaagatatatcggccatggatgtgccctcttgccagagcattgtatgtcttgatgtcattaatcactgttcttataggattttatgacctctacaagaacgtgcccatgctgaaggcaactgcctcaagattgtttggccctttatttgattggatagaaacatgggaaatgatatcaagacttaagtatcttggaactatgcttttcctgcataattttcagcaggcttttacatggtcccttaagattgtgggtgctgctaagtctgctcttagtgttttgacaaagccaattgcgggaccaattctggaggtttttgaacttacgatgccaatttggaacctttgtgctgagacagtaggatatctgagttcagttgtcatgttatctgtagaagtgtcttggagtgtagttattgatacagtggagatgattgtctggccattttggtttgtcttcagtactatggttagcattgtgaattcaattctgtaccctataatttggctcctcggagagatactagctgcacctttccgactagtcattgggctatcaagttttgtagtggacctttttgttgatattatcaattttctaagggggagctggtcaacactaagtgccttatatcaagttggatctgttcccagatcacctgtgcttacatctgataataacatctgggcctcactgtggaaagatcttttgtatcagattttccgtgcactacggagcattttgtatggttttgttgccttcttttcaacatgtaataggcaccgactcagcatttacaatcacattcaagtgttcctccggcgcatatctcatgtcccagctggtgcacgatttaccgcctaccttgatgggactaggaagtatagcagccagaatcatcataagagaaggaaagccaagacgagataacagtgcagttggcaggtcactgagcaattaacaagctaactcggcgcaaatccgagctcaaaaaaagcaaagaaacaaaacaatgtaagccgaacgaaatatggagagcgaacaatcgataacaagagtttgattggagccttcggagaacataaaaaccaaggaagagtccagtacaggagttgtacattgacgctgaaagttccgttacattagctctaaccagtgaccagcagttcccttgtgtaccaaatacctggcgagcagtggaggaaaacctgcagctgtacatacgcggatcttgtagctgctgtttgttgtaaaatgagtaatagctagctttgtatagtaggcctgtgcatatcctgatatcctcttgtagttgccctccggacagcgattttgcaatgcatgtgtatgtcaagtgttgagttttcttcgcgaagaagtgtcatccttttgtcttactgatctcatttcagcagttatttctatggtcattgtccatgtgcacgccatgtaaacactacgtagtagcttacaatacatgtttaacca

SEQ ID NO: 56098 - DNA, 2754 bp, Zea Mays
gccgcgtggggaaaaagggaggcgggcgggcggtgtctttaccgcccgcgcgcgggcattaactccgggctgtggtacctgaccaccctggcttgcggataagcacaacgccatgggagcacagagctgacctcgaggaagctaggctgctgcggcgagatggtgcgggccggcgagaataggcatttcttcccgctcaccagcttgcaaatcggagatttacagtcatatcttgcagaactgacaatatttttgtgccctcataccaagaagttccttatattgctcgacaatcgcccatggttgctagatcaggatacaaaacctgctcatctatggcaattgatggttactaagtcaaggttttcccctttcgccaactctagggctaggagaaggagggatgaaactgatgaaaagcttgtgtactcaacaagctcagtatctgctccccatttacagaataaatcttccagatggtattccttgatcgacgacgctatgcgggaaaagaagcttcaagtaaataagttgaaggatgcccgcatactgaacagggagcttcatcagactttatatggttttatcatttttgaggtagactgggctgatgtgcgtggcatcaattatttgaatgaacttcagacggatacatcaatggttgtggagtctaaaataatgaagagatgggagtttgatagtgtcaaacaagcttcaacattgatcgcttcttggttctctggaaatccttttgaatgtcagctcctacaggattatttgaccaacatctcttctaacggagatatattttatgatgctcaaaatgatttcttaacacctgaatgggatagtgagaatttaccaagtgatagtgatgattctagccatgttcaaatcatcagagagtcatcaggtttcacagactcatcttacactacacctccttgctctggaccttacaagagaagaaaaataacaaaatcagatgatggaagtagttcgactgaagaatcatacacagaaattgtggcctcgccaaaacattcgtcatcttcgtgttcatcatgtgacagtgataatgagaatgctaagccgctattggagcctagcacgtataaggatgtactgatctgcttccgctttgatgatcatgaccttccattcggactgaaagaagtcatactatctgacgtcagactgttgacgctacttgagtatggccttccatcgtgggttatatttcttcagtcatatccggtgttttgcaagatatatcggccatggatgtgccctcttgccagagcattgtatgtcttgatgtcattaatcactgttcttataggattttatgacctctacaagaacgtgcccatgctgaaggcaactgcctcaagattgtttggccctttatttgattggatagaaacatgggaaatgatatcaagacttaagtatcttggaactatgcttttcctgcataattttcagcaggcttttacatggtcccttaagattgtgggtgctgctaagtctgctcttagtgttttgacaaagccaattgcgggaccaattctggaggtttttgaacttacgatgccaatttggaacctttgtgctgagacagtaggatatctgagttcagttgtcatgttatctgtagaagtgtcttggagtgtagttattgatacagtggagatgattgtctggccattttggtttgtcttcagtactatggttagcattgtgaattcaattctgtaccctataatttggctcctcggagagatactagctgcacctttccgactagtcattgggctatcaagttttgtagtggacctttttgttgatattatcaattttctaagggggagctggtcaacactaagtgccttatatcaagttggatctgttcccagatcacctgtgcttacatctgataataacatctgggcctcactgtggaaagatcttttgtatcagattttccgtgcactacggagcattttgtatggttttgttgccttcttttcaacatgtaataggcaccgactcagcatttacaatcacattcaagtgttcctccggcgcatatctcatgtcccagctggtgcacgatttaccgcctaccttgatgggactaggaagtatagcagccagaatcatcataagagaaggaaagccaagacgagataacagtgcagttggcaggtcactgagcaattaacaagctaactcggcgcaaatccgagctcaaaaaaagcaaagaaacaaaacaatgtaagccgaacgaaatatggagagcgaacaatcgataacaagagtttgattggagccttcggagaacataaaaaccaaggaagagtccagtacaggagttgtacattgacgctgaaagttccgttacattagctctaaccagtgaccagcagttcccttgtgtaccaaatacctggcgagcagtggaggaaaacctgcagctgtacatacgcggatcttgtagctgctgtttgttgtaaaatgagtaatagctagctttgtatagtaggcctgtgcatatcctgatatcctcttgtagttgccctccggacagcgattttgcaatgcatgtgtatgtcaagtgttgagttttcttcgcgaagaagtgtcatccttttgtcttactgatctcatttcagcagttatttctatggtcattgtccatgtgcacgccatgtaaacactacgtagtagcttacaatacatgtttaacca

SEQ ID NO: 56099 - DNA, 2771 bp, Zea Mays
gccgcgtggggaaaaagggaggcgggcgggcggtgtctttaccgcccgcgcgcgggcattaactccgggctgtggtacctgaccaccctggcttgcggataagcacaacgccatgggagcacagagctgacctcgaggaagaacttgccgtttctcagctaggctgctgcggcgagatggtgcgggccggcgagaataggcatttcttcccgctcaccagcttgcaaatcggagatttacagtcatatcttgcagaactgacaatatttttgtgccctcataccaagaagttccttatattgctcgacaatcgcccatggttgctagatcaggatacaaaacctgctcatctatggcaattgatggttactaagtcaaggttttcccctttcgccaactctagggctaggagaaggagggatgaaactgatgaaaagcttgtgtactcaacaagctcagtatctgctccccatttacagaataaatcttccagatggtattccttgatcgacgacgctatgcgggaaaagaagcttcaagtaaataagttgaaggatgcccgcatactgaacagggagcttcatcagactttatatggttttatcatttttgaggtagactgggctgatgtgcgtggcatcaattatttgaatgaacttcagacggatacatcaatggttgtggagtctaaaataatgaagagatgggagtttgatagtgtcaaacaagcttcaacattgatcgcttcttggttctctggaaatccttttgaatgtcagctcctacaggattatttgaccaacatctcttctaacggagatatattttatgatgctcaaaatgatttcttaacacctgaatgggatagtgagaatttaccaagtgatagtgatgattctagccatgttcaaatcatcagagagtcatcaggtttcacagactcatcttacactacacctccttgctctggaccttacaagagaagaaaaataacaaaatcagatgatggaagtagttcgactgaagaatcatacacagaaattgtggcctcgccaaaacattcgtcatcttcgtgttcatcatgtgacagtgataatgagaatgctaagccgctattggagcctagcacgtataaggatgtactgatctgcttccgctttgatgatcatgaccttccattcggactgaaagaagtcatactatctgacgtcagactgttgacgctacttgagtatggccttccatcgtgggttatatttcttcagtcatatccggtgttttgcaagatatatcggccatggatgtgccctcttgccagagcattgtatgtcttgatgtcattaatcactgttcttataggattttatgacctctacaagaacgtgcccatgctgaaggcaactgcctcaagattgtttggccctttatttgattggatagaaacatgggaaatgatatcaagacttaagtatcttggaactatgcttttcctgcataattttcagcaggcttttacatggtcccttaagattgtgggtgctgctaagtctgctcttagtgttttgacaaagccaattgcgggaccaattctggaggtttttgaacttacgatgccaatttggaacctttgtgctgagacagtaggatatctgagttcagttgtcatgttatctgtagaagtgtcttggagtgtagttattgatacagtggagatgattgtctggccattttggtttgtcttcagtactatggttagcattgtgaattcaattctgtaccctataatttggctcctcggagagatactagctgcacctttccgactagtcattgggctatcaagttttgtagtggacctttttgttgatattatcaattttctaagggggagctggtcaacactaagtgccttatatcaagttggatctgttcccagatcacctgtgcttacatctgataataacatctgggcctcactgtggaaagatcttttgtatcagattttccgtgcactacggagcattttgtatggttttgttgccttcttttcaacatgtaataggcaccgactcagcatttacaatcacattcaagtgttcctccggcgcatatctcatgtcccagctggtgcacgatttaccgcctaccttgatgggactaggaagtatagcagccagaatcatcataagagaaggaaagccaagacgagataacagtgcagttggcaggtcactgagcaattaacaagctaactcggcgcaaatccgagctcaaaaaaagcaaagaaacaaaacaatgtaagccgaacgaaatatggagagcgaacaatcgataacaagagtttgattggagccttcggagaacataaaaaccaaggaagagtccagtacaggagttgtacattgacgctgaaagttccgttacattagctctaaccagtgaccagcagttcccttgtgtaccaaatacctggcgagcagtggaggaaaacctgcagctgtacatacgcggatcttgtagctgctgtttgttgtaaaatgagtaatagctagctttgtatagtaggcctgtgcatatcctgatatcctcttgtagttgccctccggacagcgattttgcaatgcatgtgtatgtcaagtgttgagttttcttcgcgaagaagtgtcatccttttgtcttactgatctcatttcagcagttatttctatggtcattgtccatgtgcacgccatgtaaacactacgtagtagcttacaatacatgtttaacca

SEQ ID NO: 56100 - DNA, 1949 bp, Zea Mays
gccgagcctctctccctgttttaagagggctagaggacacgacgcctctcccagtagatgtagatgacaaacaagccatctcacctggccccggcggcaacaacaacacgccatggccctagatacctgctcttacgacgactgttgggtgttgcctccgctggattgctgggactgggcctcggagctgctgttccacactctcgaaggcgctggagctgccgccgtcttcccggagacgccaggtgtgcagtgctcgccgtcggaggcgtccagtggctacctgcacgacgccatcgctccagtgagcgcccgtcgcaacaagcggcagcggatggcggcggcgacgacgacgcctccctctcggcgtccggcgaccgtctgcggggaccttcagtgccttcttgcggtaagtgtttgttagtgtgttactgtgttacatacatcctatacaaatggcaatggtatgcataccggccgccggctactagctcctcatgttgaaattgaatcatatacgtagaatatatgcagatacgatacgacacgtactgcaacatatgtgtgtgtagtcgccatgctgttcttcattttgcaagcccatctcactgtccatacggaccataccgccatatcgattcaccaaacaaagcgagaacgagaggcagtagcctcaccgtctcgctaaacgataagcatgcagagaaggccggcccggcagtggccttgtccctcctcttcttttctaacctgtagcgtcgtcgccgcctcttgtccgcgttgttgttcccggcttgcagggcttgcgggattctagcgccgacgccgagggaggagcagatttccgccatgatttgaacaccacgacggccgcggagacggagacacgctgcagctttgtctcaggcgggggcgacggggcaggtgcatcgagcagggaggagcagcagcggggccccagcgcgcaggtgctgctaccaacgccagcggcagcggcgaagggcggagatgaggaggcaaaggcgtccgctgtagtcccccctcgtcgcttccccgccaccgtgcgagccgctgctcccctgcagctgcaaaaggctgccgcggggacggcacacgcggcagcgcgtcgcgacgatcgcccgcgacccgtcgtcgaccgcgaacactccttccgtgcgggtgcgggtgcgggtgcggccgccacgacggcgcccgcctctgcctgccactcgttactgtcaggggaggacgagaagagaggtgtcggagtgctgtacccctttgcagtcgtcaagccgctggggttagacgacggccgcatgacgacgctggacgacgtcaaccagagaatcctcaagagaccggcaagaccagttcggcaccccgttggcccgttcgcgttcggccccgccgtgtcggctcacggcctgagtctgtccggcaaggcagtcgttagcctgaccaagatcaggacgagaggaaacggcaccataaccatcattagaacaagatgattgctgtcataccatcaaccattaccatttcctttctctatttttcctttttttaggttgcgatgcctgctgttaggtataaccatggtagattagtagctacggatgtaaatacaccctcgcgttggcttctgccttctcttatctagtttaataagacgctaaaactccactggatttaaattggacgtacataagctgcagcctcggaactttgtccaacataccagctaccacagcagcgtggtttcataatttcatgaggatgcctgcatccctgagcttggtgtctcatgctgtcatgcactcaacaaaccatcgtgccaggaactgtgtttctacaaaactcaactacttaaatcaaattacactaccatttcgtgcctgtcacattatcaaggcgcaacccaggatgagatacattaacaaccctgt

SEQ ID NO: 56101 - DNA, 1597 bp, Zea Mays
atttgacacagcttttggtgctccgccaaaagaaaaagggccgagcctctctccctgttttaagagggctagaggacacgacgcctctcccagtagatgtagatgacaaacaagccatctcacctggccccggcggcaacaacaacacgccatggccctagatacctgctcttacgacgactgttgggtgttgcctccgctggattgctgggactgggcctcggagctgctgttccacactctcgaaggcgctggagctgccgccgtcttcccggagacgccaggtgtgcagtgctcgccgtcggaggcgtccagtggctacctgcacgacgccatcgctccagtgagcgcccgtcgcaacaagcggcagcggatggcggcggcgacgacgacgcctccctctcggcgtccggcgaccgtctgcggggaccttcagtgccttcttgcgggcttgcgggattctagcgccgacgccgagggaggagcagatttccgccatgatttgaacaccacgacggccgcggagacggagacacgctgcagctttgtctcaggcgggggcgacggggcaggtgcatcgagcagggaggagcagcagcggggccccagcgcgcaggtgctgctaccaacgccagcggcagcggcgaagggcggagatgaggaggcaaaggcgtccgctgtagtcccccctcgtcgcttccccgccaccgtgcgagccgctgctcccctgcagctgcaaaaggctgccgcggggacggcacacgcggcagcgcgtcgcgacgatcgcccgcgacccgtcgtcgaccgcgaacactccttccgtgcgggtgcgggtgcgggtgcggccgccacgacggcgcccgcctctgcctgccactcgttactgtcaggggaggacgagaagagaggtgtcggagtgctgtacccctttgcagtcgtcaagccgctggggttagacgacggccgcatgacgacgctggacgacgtcaaccagagaatcctcaagagaccggcaagaccagttcggcaccccgttggcccgttcgcgttcggccccgccgtgtcggctcacggcctgagtctgtccggcaaggcagtcgttagcctgaccaagatcaggacgagaggaaacggcaccataaccatcattagaacaagatgattgctgtcataccatcaaccattaccatttcctttctctatttttcctttttttaggttgcgatgcctgctgttaggtataaccatggtagattagtagctacggatgtaaatacaccctcgcgttggcttctgccttctcttatctagtttaataagacgctaaaactccactggatttaaattggacgtacataagctgcagcctcggaactttgtccaacataccagctaccacagcagcgtggtttcataatttcatgaggatgcctgcatccctgagcttggtgtctcatgctgtcatgcactcaacaaaccatcgtgccaggaactgtgtttctacaaaactcaactacttaaatcaaattacactaccatttcgtgcctgtcacattatcaaggcgcaacccaggatgagatacattaacaaccctgt

SEQ ID NO: 56102 - DNA, 455 bp, Zea Mays
cacgtacggtacggacgtacccttgcattgcccattcctcgtcggtttctcagaggacgagcttctgtttcaggaacatcttttgagctgtagtgcgatcgagctcttgggtgaagggcgatggcaaagcgtaaccgcgtgaagaagagcatttggagctacctctgcggttgctcgtcccccaagacaaagtgactatttatattcatgcagagaattgcggagttaaaattattctttcgtatatatacgccattagaagctgcatgccgcatggttcatggaattcgcagtacgtagtgagtccttgtacttcgttgcttttaattattggagttgtgtgcatggtcttgttaagtgctatgtagctagctgtatatgggactaaataaaggtcgtgttggtattctctgcgtacgtaaagggagtgtaattaagtgtcgtcatgtgtaaag

SEQ ID NO: 56103 - DNA, 1193 bp, Zea Mays
cttcgactctcccactcctctgtcgcttccgccgacacctgagtcttgtcgctgccgccgggatggccggagtcaccgccaccgggatggccggagttcccgccaccttctcctcagccaccgctcagatcgggggcttcctctcgaagaagccttacgcgccgccgttgtgggccacgcacctctcccccatgccttgccataccttctcgctcggccatttcccaacaccgattcacaagtggaatctgcccaatttgccggaaggaacggaagtgtggatcaagcgagacgatttatcaggcatgcagttgagtggaaacaaggtccggaagctggagttcttgatggcagatgccgtagcacaaggcgcagactgcgttattactgttgggggtatacagagtaaccactgccgtgccacagccgtggctgctaagtatctcaatcttgattgctacctgatactacgtacctccaagcttcttgtggataaggaccctggtttggttggcaatcttcttgtcgagagactagttggggcacacgttgatcttgtgtcaaaagaagaatatggaaaaattggtagtgtggctttagctgacctgctgaaaaaaaggcttctggaagaagggaggaagccgtatgtgattcctgttggtggatcaaactcattgggaacttggggatatattgaggcaataagggagattgagcagcaaattcagcaatcttctgatgttcagtttgatgatattgttgttgcatgtggcagtggtggaaccattgctggccttgctttaggatccagattgagcagcttaaatacaaaagttcatgcattctctgtttgtgatgaccctgaatacttctatgactatgtccaaggcctgattgatggacttaattctggtttcgattcacatgatatagttagcatggaaaatgctaaggggttaggctatgccatgaacacagctgaggagcttaagtttgtcaaagacatagctgcatcaacaggcattgtccttgatccagtctacagtgggaaggcggtttatggtttgctaaaagacatggctggcaatccagccaaatggaaagaatggatcttgaagattctgttccacgcaaagatggcactggttcatctccatgaactccgagagaggaatcaaagctgcagattacag

SEQ ID NO: 56104 - DNA, 1178 bp, Zea Mays
cttcgactctcccactcctctgtcgcttccgccgacacctgagtcttgtcgctgccgccgggatggccggagtcaccgccaccgggatggccggagttcccgccaccttctcctcagccaccgctcagatcgggggcttcctctcgaagaagccttacgcgccgccgttgtgggccacgcacctctcccccatgccttgccataccttctcgctcggccatttcccaacaccgattcacaagtggaatctgcccaatttgccggaaggaacggaagtgtggatcaagcgagacgatttatcaggcatgcagttgagtggaaacaaggtccggaagctggagttcttgatggcagatgccgtagcacaaggcgcagactgcgttattactgttgggggtatacagagtaaccactgccgtgccacagccgtggctgctaagtatctcaatcttgattgctacctgatactacgtacctccaaggaccctggtttggttggcaatcttcttgtcgagagactagttggggcacacgttgatcttgtgtcaaaagaagaatatggaaaaattggtagtgtggctttagctgacctgctgaaaaaaaggcttctggaagaagggaggaagccgtatgtgattcctgttggtggatcaaactcattgggaacttggggatatattgaggcaataagggagattgagcagcaaattcagcaatcttctgatgttcagtttgatgatattgttgttgcatgtggcagtggtggaaccattgctggccttgctttaggatccagattgagcagcttaaatacaaaagttcatgcattctctgtttgtgatgaccctgaatacttctatgactatgtccaaggcctgattgatggacttaattctggtttcgattcacatgatatagttagcatggaaaatgctaaggggttaggctatgccatgaacacagctgaggagcttaagtttgtcaaagacatagctgcatcaacaggcattgtccttgatccagtctacagtgggaaggcggtttatggtttgctaaaagacatggctggcaatccagccaaatggaaagaatggatcttgaagattctgttccacgcaaagatggcactggttcatctccatgaactccgagagaggaatcaaagctgcagattacag

SEQ ID NO: 56105 - DNA, 1184 bp, Zea Mays
cttcgactctcccactcctctgtcgcttccgccgacacctgagtcttgtcgctgccgccgggatggccggagtcaccgccaccgggatggccggagttcccgccaccttctcctcagccaccgctcagatcgggggcttcctctcgaagaagccttacgcgccgccgttgtgggccacgcacctctcccccatgccttgccataccttctcgctcggccatttcccaacaccgattcacaagtggaatctgcccaatttgccggaaggaacggaagtgtggatcaagcgagacgatttatcaggcatgcagttgagtggaaacaaggtccggaagctggagttcttgatggcagatgccgtagcacaaggcgcagactgcgttattactgttgggggtatacagagtaaccactgccgtgccacagccgtggctgctaagtatctcaatcttgattgctacctgatactacgtacctccaaggaccctggtttggttggcaatcttcttgtcgagagactagttggggcacacgttgatcttgtgtcaaaagaagaatatggaaaaattggtagtgtggctttagctgacctgctgaaaaaaaggcttctggaagaagggaggaagccgtatgtgattcctgttggtggatcaaactcattgggaacttggggatatattgaggcaataagggagattgagcagcaaattcagcaatcttctgatgttcagtttgatgatattgttgttgcatgtggcagtggtggaaccattgctggccttgctttaggatccagattgagcagcttaaatacaaaagttcatgcattctctgtttgtgatgaccctgaatacttctatgactatgtccaaggcctgattgatggacttaattctggtttcgattcacatgatatagttagcatggaaaatgctaaggggttaggctatgccatgaacacagctgaggagcttaagtttgtcaaagacatagctgcatcaacaggcattgtccttgatccagtctacagtgggaaggcggtttatggtttgctaaaagacatggctggcaatccagccaaatggaaagaatggatcttgaagattctgttccacgcaaagatggcactgctcgcaggatctccagtgtctccttatcagggttgagcccgtacctcgcctgca

SEQ ID NO: 56106 - DNA, 1426 bp, Zea Mays
ctttgatcacgaacagattttgggttggtttcacgctagattgcaaaccaatcatgcactgaacctttaggcttatagttgggcctgatccggccggttttggcccatataactcgcgacgagccaatgaccgtcacttcgactctcccactcctctgtcgcttccgccgacacctgagtcttgtcgctgccgccgggatggccggagtcaccgccaccgggatggccggagttcccgccaccttctcctcagccaccgctcagatcgggggcttcctctcgaagaagccttacgcgccgccgttgtgggccacgcacctctcccccatgccttgccataccttctcgctcggccatttcccaacaccgattcacaagtggaatctgcccaatttgccggaaggaacggaagtgtggatcaagcgagacgatttatcaggcatgcagttgagtggaaacaaggtccggaagctggagttcttgatggcagatgccgtagcacaaggcgcagactgcgttattactgttgggggtatacagagtaaccactgccgtgccacagccgtggctgctaagtatctcaatcttgattgctacctgatactacgtacctccaagcttcttgtggataaggaccctggtttggttggcaatcttcttgtcgagagactagttggggcacacgttgatcttgtgtcaaaagaagaatatggaaaaattggtagtgtggctttagctgacctgctgaaaaaaaggcttctggaagaagggaggaagccgtatgtgattcctgttggtggatcaaactcattgggaacttggggatatattgaggcaataagggagattgagcagcaaattcagcaatcttctgatgttcagtttgatgatattgttgttgcatgtggcagtggtggaaccattgctggccttgctttaggatccagattgagcagcttaaatacaaaagttcatgcattctctgtttgtgatgaccctgaatacttctatgactatgtccaaggcctgattgatggacttaattctggtttcgattcacatgatatagttagcatggaaaatgctaaggggttaggctatgccatgaacacagctgaggagcttaagtttgtcaaagacatagctgcatcaacaggcattgtccttgatccagtctacagtgggaaggcggtttatggtttgctaaaagacatggctggcaatccagccaaatggaaaggtcgaaaagttctgtttatccacacaggtggtcttcttgggttgtatgataaggctgaccagttgtcatctttggctgggagctggcgcagaatggatcttgaagattctgttccacgcaaagatggcactgctcgcaggatctccagtgtctccttatcagggttgagcccgtacctcgcctgca

SEQ ID NO: 56107 - DNA, 1246 bp, Zea Mays
cttcgactctcccactcctctgtcgcttccgccgacacctgagtcttgtcgctgccgccgggatggccggagtcaccgccaccgggatggccggagttcccgccaccttctcctcagccaccgctcagatcgggggcttcctctcgaagaagccttacgcgccgccgttgtgggccacgcacctctcccccatgccttgccataccttctcgctcggccatttcccaacaccgattcacaagtggaatctgcccaatttgccggaaggaacggaagtgtggatcaagcgagacgatttatcaggcatgcagttgagtggaaacaaggtccggaagctggagttcttgatggcagatgccgtagcacaaggcgcagactgcgttattactgttgggggtatacagagtaaccactgccgtgccacagccgtggctgctaagtatctcaatcttgattgctacctgatactacgtacctccaaggctttagctgacctgctgaaaaaaaggcttctggaagaagggaggaagccgtatgtgattcctgttggtggatcaaactcattgggaacttggggatatattgaggcaataagggagattgagcagcaaattcagcaatcttctgatgttcagtttgatgatattgttgttgcatgtggcagtggtggaaccattgctggccttgctttaggatccagattgagcagcttaaatacaaaagttcatgcattctctgtttgtgatgaccctgaatacttctatgactatgtccaaggcctgattgatggacttaattctggtttcgattcacatgatatagttagcatggaaaatgctaaggggttaggctatgccatgaacacagctgaggagcttaagtttgtcaaagacatagctgcatcaacaggcattgtccttgatccagtctacagtgggaaggcggtttatggtttgctaaaagacatggctggcaatccagccaaatggaaagaatggatcttgaagattctgttccacgcaaagatggcactggtaagatgttctgatcagtacggtccatgtgattccatgatggctcattcttgcaaacattgtatccattacagagttattactcttaaatttgtgcaagaaaatgcagaatagatggttcacattgtatagaacactgatgcaatttaagaataaagcacatctttctgccatttggaaataaatattttttatgtggaggtttgtgtgtc

SEQ ID NO: 56108 - DNA, 1095 bp, Zea Mays
ccgcagtatattgaattcggaattagcccaatccgtgctgctgccgtctgtctttccctatcctcctcccaagaaagcctcgccgcaatagtttggcatccatgggattcttccattgcatctccaccgtcaactccacgcatcccttaacgagcactgaagcccggcaagccccggatcgccgatgaccacttccggcgcgcccaagcgcccaagcttcaagcgctcctcgcccgggaagaagtcgcggctcagaacccgtcgcgtcgccgccggtggccgagagggcgaggccgaggccgaggcggcggggacctcggcgctggcgagggcattgcttcccgcatcggtggggctagacgcggtgccgcctgttgggcgcgcattgccgcgagacttcttcgaggtggatgccctcgacctggccccccgcctcctcggcaagctccttcggcgcgatgaggttgtcctccgcatcaccgaggtcttgaaactattcagcggcgccggggtcaacaaaccgagaaaccgatcctacttacgggaccaggaaaggttggacaagctctgggcctatccactgactggtcgaaccatcctctctacgcgcctggtgggttggaggtactggacgggccagagccggagagcattttggttggtccccgcgttggcatcgagtacgcgtctcccgagcatgtcgcggcgccgtggaggttcgcgattgccggcacgccgtggatcagcgcccccaaaaacacgctacggccacgctactgaccggtgtctgaacaggaaccgttcgagtcccgttccaacccgaattgccatgtgtttgtatttgcttgacacttcggaatgctgcctataactggctcttgtaaatgtatcacagtgtgttcgacaaaaaggcctacgaactctacgagggcgggtgcccgggccgaacattctcaaatgttaaaagcgtggagtgtgtttgaagggctgagaaagatgactagagagaagtaaataagagtcaattaactatttttttcctgaaatagccgttgtcctagaaaactcaaatcaaaacatcgaactgtgtcactc

SEQ ID NO: 56109 - DNA, 1208 bp, Zea Mays
cttagtcgttgacatttctattgccgtttctatgaaagcagccgcagtatattgaattcggaattagcccaatccgtgctgctgccgtctgtctttccctatcctcctcccaagaaagcctcgccgcaatagtttggcatccatgggattcttccattgcatctccaccgtcaactccacgcatcccttaacgagcactgaagcccggcaagccccggatcgccgatgaccacttccggcgcgcccaagcgcccaagcttcaagcgctcctcgcccgggaagaagtcgcggctcagaacccgtcgcgtcgccgccggtggccgagagggcgaggccgaggccgaggcggcggggacctcggcgctggcgagggcattgcttcccgcatcggtggggctagacgcggtgccgcctgttgggcgcgcattgccgcgagacttcttcgaggtggatgccctcgacctggccccccgcctcctcggcaagctccttcggcgcgatgaggttgtcctccgcatcaccgaggtggaggcttataggccaaatgactccgcatgccatggccggttcggcatcacagcgaggacagctccagtggtcttgaaactattcagcggcgccggggtcaacaaaccgagaaaccgatcctacttacgggaccaggaaaggttggacaagctctgggcctatccactgactggtcgaaccatcctctctacgcgcctggtgggttggaggtactggacgggccagagccggagagcattttggttggtccccgcgttggcatcgagtacgcgtctcccgagcatgtcgcggcgccgtggaggttcgcgattgccggcacgccgtggatcagcgcccccaaaaacacgctacggccacgctactgaccggtgtctgaacaggaaccgttcgagtcccgttccaacccgaattgccatgtgtttgtatttgcttgacacttcggaatgctgcctataactggctcttgtaaatgtatcacagtgtgttcgacaaaaaggcctacgaactctacgagggcgggtgcccgggccgaacattctcaaatgttaaaagcgtggagtgtgtttgaagggctgagaaagatgactagagagaagtaaataagagtcaattaactatttttttcctgaaatagccgttgtcctagaaaactcaaatcaaaacatcgaactgtgtcactc

SEQ ID NO: 56110 - DNA, 1483 bp, Zea Mays
gaagatgctatcgtccttagtcgttgacatttctattgccgtttctatgaaagcagccgcagtatattgaattcggaattagcccaatccgtgctgctgccgtctgtctttccctatcctcctcccaagaaagcctcgccgcaatagtttggcatccatgggattcttccattgcatctccaccgtcaactccacgcatcccttaacgagcactgaagcccggcaagccccggatcgccgatgaccacttccggcgcgcccaagcgcccaagcttcaagcgctcctcgcccgggaagaagtcgcggctcagaacccgtcgcgtcgccgccggtggccgagagggcgaggccgaggccgaggcggcggggacctcggcgctggcgagggcattgcttcccgcatcggtggggctagacgcggtgccgcctgttgggcgcgcattgccgcgagacttcttcgaggtggatgccctcgacctggccccccgcctcctcggcaagctccttcggcgcgatgaggttgtcctccgcatcaccgaggtggaggcttataggccaaatgactccgcatgccatggccggttcggcatcacagcgaggacagctccagtgtttggaccgggaggccatgcatatgtgtatctgtgctatggacttcacatgatgctcaatgtggttgccgatatagagggggttggtgctgccgttttgatccggtcatgttctccagttagcgctagaagaggaaaatggaaatctgtagcactagataattatgtgatcaggaggaatataggaggcgttgatcatctttgcccacaaatatccacaacaatgcattctccatgtcgctttcaactcaaggcagaaaagtcttgaaactattcagcggcgccggggtcaacaaaccgagaaaccgatcctacttacgggaccaggaaaggttggacaagctctgggcctatccactgactggtcgaaccatcctctctacgcgcctggtgggttggaggtactggacgggccagagccggagagcattttggttggtccccgcgttggcatcgagtacgcgtctcccgagcatgtcgcggcgccgtggaggttcgcgattgccggcacgccgtggatcagcgcccccaaaaacacgctacggccacgctactgaccggtgtctgaacaggaaccgttcgagtcccgttccaacccgaattgccatgtgtttgtatttgcttgacacttcggaatgctgcctataactggctcttgtaaatgtatcacagtgtgttcgacaaaaaggcctacgaactctacgagggcgggtgcccgggccgaacattctcaaatgttaaaagcgtggagtgtgtttgaagggctgagaaagatgactagagagaagtaaataagagtcaattaactatttttttcctgaaatagccgttgtcctagaaaactcaaatcaaaacatcgaactgtgtcactc

SEQ ID NO: 56111 - DNA, 708 bp, Zea Mays
cgcagtatattgaattcggaattagcccaatccgtgctgctgccgtctgtctttccctatcctcctcccaagaaagcctcgccgcaatagtttggcatccatgggattcttccattgcatctccaccgtcaactccacgcatcccttaacgagcactgaagcccggcaagccccggatcgccgatgaccacttccggcgcgcccaagcgcccaagcttcaagcgctcctcgcccgggaagaagtcgcggctcagaacccgtcgcgtcgccgccggtggccgagagggcgaggccgaggccgaggcggcggggacctcggcgctggcgagggcattgcttcccgcatcggtggggctagacgcggtgccgcctgttgggcgcgcattgccgcgagacttcttcgaggtggatgccctcgacctggccccccgcctcctcggcaagctccttcggcgcgatgaggttgtcctccgcatcaccgaggtggaggcttataggccaaatgactccgcatgccatggccggttcggcatcacagcgaggacagctccagtgtttggaccgggaggccatgcatatgtgtatctgtgctatggacttcacatgatgctcaatgtggttgccgatatagagggggttggtgctgccgttttgatccggtcatgttctccagttagcggatcataagatatagcatagctactgtgt

SEQ ID NO: 56112 - DNA, 1778 bp, Zea Mays
gtcgccgagccgtcctaactcagcgagagggtttcgaattggcgccaagccgccaaccattccccccaatcccgcctgccagccctagggttcctgctacgccatggcgggaaccgccgccgccgctctcatggacatcgacgcagccgcgccgcctcccccgccgcctggtgcggcggccaagggcaaggcgccgctctccgctggcggcagggcagcgccctgggtcgagaagtaccggccccagtccctcgctgacgtcgccgcccaccgcgatatcgtcgacacaattgacaggcttacaaacgagaatagacttccacacttgttgctatatgggccacctggcactgggaaaacatcgacgattctggctgttgcgaggaagctatatgggtctcagtatagcaacatgatcctggagctcaatgcgtcagatgaacgtggcattgatgttgtcaggcagcagatccaggattttgctggggcacgcagcctctcttttggagcaaggccttctgttaagctggttctcttggatgaagcagacgcaatgacaaaggatgcacaatttgcattgagaagagttatcgagaagtatacaaggagcacaaggtttgcactcatatgcaaccatgtcaacaaaatcatccctgcgctacaatcaaggtgcaccaggtttagatttgctccactagatggcagtcatgttagagagcgtcttcaacatataataaaatctgaggggctcagtgtagatgacggtggcttgacagccctagtgcggttaagcaatggtgatatgaggaaggctttgaatatattgcagaagaagctgtctatctttgcacaggaaaccccatgccaaaagatatcgagcagatagctttttggctattaaatgaaccattttcaaccagcttcaaatatatatctgacatgaagatgagaaaagggctggccttggttgatatcatacgggaggttactatgtttgtgttcaaaatacaaatgccatctgatgttcgtgtaaagctaatcaatgacttggctgatattgagtacagactaagctttgcatgcaacgataaactgcagctgggcgcactgatctcaactttcacggacactcgcacggctatggttgctgctgccagctaattccagtaatgtgaaggatctttctgctgctccctctggaatctgaagatgaagcgcagctacattatggggtcaacgtcttgcctgtagttagcaagctgaaaggtttggtgagggttgtcttagatctgtatgtctgctggacgtgatgtggtaactgcctggaacttgggagtactcgtatgactgaacgctgccaggcgttctcatgttatgcgtgtaagattctatccagtagtataaaccctagtgccgttctttgacgaagttacatatttttgcaaatgccacggagatttatggtgttagactatggatgcgtgttttttttttcacgcacttacgaaaacactagatcatcaacaaatcccctttggtcactgagtcctctcatctgtacatcatagtaccattcagtatcatatatactgcatgcaaaaactgaaggtatataacaatcaggctacccatcgagtcaacgatcaaatgcgtggttaggatcagtaaactggaaaagttgatcctgtacctttattttacaggtgaagggaatcgttgctcgtaaccctcgaagaaaacgccgggctattagctactatctcttaacaatgtactac

SEQ ID NO: 56113 - DNA, 1181 bp, Zea Mays
ctacgtacttgcacctccagaggtgaaggctgcagataatagagtgatacaagatcagctgaatgagaagataactgaatgcatggaattgcatgctgaagttactcatctcaaagaacagctgtcccaagctcttgaagctaaggatttggtgtcaaatagcatgatacataataatagagttaaccatgaagttgaacaccttgttgatcaagatgttccaagagagatctcttctgaaccacagcaaaaacagcagtccgttgaaatcaatgagctgaagcaaaaggtgtctgaactcatggaaatcaaagctcaacttgaggatcgcaatcaaaagctactggaggaaagtacatatgcaaaaggattggcttcagctgctggtgtcgaattgaaggcattgtcagaagaagtgaccaaactgatgaaccaaaatgagaagcttgcgaccgagttgtcatcgctgagaagtccaactccagctccacgcagattcaacaatggaccaagaggtactaggagggaaagcatgagtaggcgagaaccagctagcagacgagacacgaatgcaagccatgaaagggaaaaggctctagaggcattgcttatggagaaggagcaaaaggaagcagagctccaaaggaaagtcgaggagtcaaagcagaaggaagccttcctggaaagtgagcttgccaacatgtgggttctagtagcaaaactgaagaagtcccagggttatgaccatgaggatctggaggccaaacatgatggctcgtgacctcttcagtttagatatctatcggcttggcttgcgtgtgggttttctgtatgtaaggttttggtattcgttttttctcttagcatgaattagtgtctcattctgtatattctccgcgtgttaaatatgccagtagtgccttgcctgactgtgcctagagctttcgatggatgctagagcggcattttgggttcttcaggcacataatctggatttgaagaaacagtgagcaagtgtttggaaatctgacgggtttctgatgcccactcaaatatctaacatgtattagcctgcccatcctgctcaggataacaaatgtgaatatgccctgaagtgtgagctacattgtattagaacactttcgttttcaacatcttcaatactgcttattgtatgcctc

SEQ ID NO: 56114 - DNA, 2593 bp, Zea Mays
atcaacttagttttctgagttgaaatggttgctgcatgaacttaatatgactatagagagcagcccttgtggtgagtctaatgaaggggaagctgtcactttctcacagctggttcagagagctcaagggcggaaacaactggagtacggcggaaagaaggatcttatatcaacaaaagcttgcttactcttggaacggtgatatcaaagctgactgatggaaaggctacacatattccatatcgagattcaaaattaacacgactacttcagtcatccctcagtggtcaaggacgtgtttcactgatttgcacattgacaccagcgtcaagtaattctgaagagacccataatacactaaaatttgcccaccgtgcgaagtgcattgagatccaagcatctcaaaacaaaattatagatgagaaatctctaataaagaagtatcaaactgagattcggagattaaaggaagagctagaacagctgaaaatgggtattattactggcacacccttgaaagataccgaggaagataatattatcctttggaagcaaaagctagaggatggtaacgtcaagctgcagtctcggctggaacaagaggaggaagctaaagctgctttgcttgcaaggatccagcgtttaacaaaacttatactggtttctactaaggcgaccccggcttctagattttctccacatcctggaccaagacgaagacattcttttggggaagaggagctggcataccttccgtatagaagacgagatataatgatagacaatgaaagcaatgaattacttcttcctgtcgaagggtttggtgtatcacttgaagattcttcaaaggaagaaaaaaagaataggaagggacttcttaactggttcaaacttcggaaacgtgatggagcttctattctgacaagttcagaaggtgataagtccagtttgactaaatcaaccgctccttcaacacctattggggaaagcgtcaactttcctgctgaaccaagaatatcaaattcattagctggtgagaatgtatcatctgatctgtttagcattggtcatggggaatttccttctggcagcattcacggcgaagaaactctttcggccagtggaaaaacgatggaccatgttgatttgttgagagaacagttgaaaattttgtcaggggaggttgcgtttaatacaagtgctcttaagcgcctcacagaggaagctggaagaagcccaaagaacgagaagattcagatggaaatgaagaagaagaccgatgaaattaaggggaagcagcaacagatagcatctttggagagagagatagctcatgcaacattaggaactcaaggaaaggtcgatacgttagagcattcaccgtcttatcatgaactacttgagcagctcaatgagaaatctttagaacttgaggtgaaggctgcagataatagagtgatacaagatcagctgaatgagaagataactgaatgcatggaattgcatgctgaagttactcatctcaaagaacagctgtcccaagctcttgaagctaaggatttggtgtcaaatagcatgatacataataatagagttaaccatgaagttgaacaccttgttgatcaagatgttccaagagagatctcttctgaaccacagcaaaaacagcagtccgttgaaatcaatgagctgaagcaaaaggtgtctgaactcatggaaatcaaagctcaacttgaggatcgcaatcaaaagctactggaggaaagtacatatgcaaaaggattggcttcagctgctggtgtcgaattgaaggcattgtcagaagaagtgaccaaactgatgaaccaaaatgagaagcttgcgaccgagttgtcatcgctgagaagtccaactccagctccacgcagattcaacaatggaccaagaggtactaggagggaaagcatgagtaggcgagaaccagctagcagacgagacacgaatgcaagccatgaaagggaaaaggctctagaggcattgcttatggagaaggagcaaaaggaagcagagctccaaaggaaagtcgaggagtcaaagcagaaggaagccttcctggaaagtgagcttgccaacatgtgggttctagtagcaaaactgaagaagtcccagggttatgaccatgaggatctggaggccaaacatgatggctcgtgacctcttcagtttagatatctatcggcttggcttgcgtgtgggttttctgtatgtaaggttttggtattcgttttttctcttagcatgaattagtgtctcattctgtatattctccgcgtgttaaatatgccagtagtgccttgcctgactgtgcctagagctttcgatggatgctagagcggcattttgggttcttcaggcacataatctggatttgaagaaacagtgagcaagtgtttggaaatctgacgggtttctgatgcccactcaaatatctaacatgtattagcctgcccatcctgctcaggataacaaatgtgaatatgccctgaagtgtgagctacattgtattagaacactttcgttttcaacatcttcaatactgcttattgtatgcctc

SEQ ID NO: 56115 - DNA, 2626 bp, Zea Mays
gaactgcctattttcgccatcaacttagttttctgagttgaaatggttgctgcatgaacttaatatgactatagagagcagcccttgtggtgagtctaatgaaggggaagctgtcactttctcacagctgaacctcatcgatctggcaggttcagagagctcaagggcggaaacaactggagtacggcggaaagaaggatcttatatcaacaaaagcttgcttactcttggaacggtgatatcaaagctgactgatggaaaggctacacatattccatatcgagattcaaaattaacacgactacttcagtcatccctcagtggtcaaggacgtgtttcactgatttgcacattgacaccagcgtcaagtaattctgaagagacccataatacactaaaatttgcccaccgtgcgaagtgcattgagatccaagcatctcaaaacaaaattatagatgagaaatctctaataaagaagtatcaaactgagattcggagattaaaggaagagctagaacagctgaaaatgggtattattactggcacacccttgaaagataccgaggaagataatattatcctttggaagcaaaagaggatggtaacgtcaagctgcagtctcggctggaacaagaggaggaagctaaagctgctttgcttgcaaggatccagcgtttaacaaaacttatactggtttctactaaggcgaccccggcttctagattttctccacatcctggaccaagacgaagacattcttttggggaagaggagctggcataccttccgtatagaagacgagatataatgatagacaatgaaagcaatgaattacttcttcctgtcgaagggtttggtgtatcacttgaagattcttcaaaggaagaaaaaaagaataggaagggacttcttaactggttcaaacttcggaaacgtgatggagcttctattctgacaagttcagaaggtgataagtccagtttgactaaatcaaccgctccttcaacacctattggggaaagcgtcaactttcctgctgaaccaagaatatcaaattcattagctggtgagaatgtatcatctgatctgtttagcattggtcatggggaatttccttctggcagcattcacggcgaagaaactctttcggccagtggaaaaacgatggaccatgttgatttgttgagagaacagttgaaaattttgtcaggggaggttgcgtttaatacaagtgctcttaagcgcctcacagaggaagctggaagaagcccaaagaacgagaagattcagatggaaatgaagaagaagaccgatgaaattaaggggaagcagcaacagatagcatctttggagagagagatagctcatgcaacattaggaactcaaggaaaggtcgatacgttagagcattcaccgtcttatcatgaactacttgagcagctcaatgagaaatctttagaacttgaggtgaaggctgcagataatagagtgatacaagatcagctgaatgagaagataactgaatgcatggaattgcatgctgaagttactcatctcaaagaacagctgtcccaagctcttgaagctaaggatttggtgtcaaatagcatgatacataataatagagttaaccatgaagttgaacaccttgttgatcaagatgttccaagagagatctcttctgaaccacagcaaaaacagcagtccgttgaaatcaatgagctgaagcaaaaggtgtctgaactcatggaaatcaaagctcaacttgaggatcgcaatcaaaagctactggaggaaagtacatatgcaaaaggattggcttcagctgctggtgtcgaattgaaggcattgtcagaagaagtgaccaaactgatgaaccaaaatgagaagcttgcgaccgagttgtcatcgctgagaagtccaactccagctccacgcagattcaacaatggaccaagaggtactaggagggaaagcatgagtaggcgagaaccagctagcagacgagacacgaatgcaagccatgaaagggaaaaggctctagaggcattgcttatggagaaggagcaaaaggaagcagagctccaaaggaaagtcgaggagtcaaagcagaaggaagccttcctggaaagtgagcttgccaacatgtgggttctagtagcaaaactgaagaagtcccagggttatgaccatgaggatctggaggccaaacatgatggctcgtgacctcttcagtttagatatctatcggcttggcttgcgtgtgggttttctgtatgtaaggttttggtattcgttttttctcttagcatgaattagtgtctcattctgtatattctccgcgtgttaaatatgccagtagtgccttgcctgactgtgcctagagctttcgatggatgctagagcggcattttgggttcttcaggcacataatctggatttgaagaaacagtgagcaagtgtttggaaatctgacgggtttctgatgcccactcaaatatctaacatgtattagcctgcccatcctgctcaggataacaaatgtgaatatgccctgaagtgtgagctacattgtattagaacactttcgttttcaacatcttcaatactgcttattgtatgcctc

SEQ ID NO: 56116 - DNA, 2579 bp, Zea Mays
gtcattaatgttgaagtataagtgaactgcctattttcgccatcaacttagttttctgagttgaaatggttgctgcatgaacttaatatgactatagagagcagcccttgtggtgagtctaatgaaggggaagctgtcactttctcacagctggttcagagagctcaagggcggaaacaactggagtacggcggaaagaaggatcttatatcaacaaaagcttgcttactcttggaacggtgatatcaaagctgactgatggaaaggctacacatattccatatcgagattcaaaattaacacgactacttcagtcatccctcagtggtcaaggacgtgtttcactgatttgcacattgacaccagcgtcaagtaattctgaagagacccataatacactaaaatttgcccaccgtgcgaagtgcattgagatccaagcatctcaaaacaaaattatagatgagaaatctctaataaagaagtatcaaactgagattcggagattaaaggaagagctagaacagctgaaaatgggtattattactggcacacccttgaaagataccgaggaagataatattatcctttggaagcaaaagaggatggtaacgtcaagctgcagtctcggctggaacaagaggaggaagctaaagctgctttgcttgcaaggatccagcgtttaacaaaacttatactggtttctactaaggcgaccccggcttctagattttctccacatcctggaccaagacgaagacattcttttggggaagaggagctggcataccttccgtatagaagacgagatataatgatagacaatgaaagcaatgaattacttcttcctgtcgaagggtttggtgtatcacttgaagattcttcaaaggaagaaaaaaagaataggaagggacttcttaactggttcaaacttcggaaacgtgatggagcttctattctgacaagttcagaaggtgataagtccagtttgactaaatcaaccgctccttcaacacctattggggaaagcgtcaactttcctgctgaaccaagaatatcaaattcattagctggtgagaatgtatcatctgatctgtttagcattggtcatggggaatttccttctggcagcattcacggcgaagaaactctttcggccagtggaaaaacgatggaccatgttgatttgttgagagaacagttgaaaattttgtcaggggaggttgcgtttaatacaagtgctcttaagcgcctcacagaggaagctggaagaagcccaaagaacgagaagattcagatggaaatgaagaagaagaccgatgaaattaaggggaagcagcaacagatagcatctttggagagagagatagctcatgcaacattaggaactcaaggaaaggtcgatacgttagagcattcaccggtgaaggctgcagataatagagtgatacaagatcagctgaatgagaagataactgaatgcatggaattgcatgctgaagttactcatctcaaagaacagctgtcccaagctcttgaagctaaggatttggtgtcaaatagcatgatacataataatagagttaaccatgaagttgaacaccttgttgatcaagatgttccaagagagatctcttctgaaccacagcaaaaacagcagtccgttgaaatcaatgagctgaagcaaaaggtgtctgaactcatggaaatcaaagctcaacttgaggatcgcaatcaaaagctactggaggaaagtacatatgcaaaaggattggcttcagctgctggtgtcgaattgaaggcattgtcagaagaagtgaccaaactgatgaaccaaaatgagaagcttgcgaccgagttgtcatcgctgagaagtccaactccagctccacgcagattcaacaatggaccaagaggtactaggagggaaagcatgagtaggcgagaaccagctagcagacgagacacgaatgcaagccatgaaagggaaaaggctctagaggcattgcttatggagaaggagcaaaaggaagcagagctccaaaggaaagtcgaggagtcaaagcagaaggaagccttcctggaaagtgagcttgccaacatgtgggttctagtagcaaaactgaagaagtcccagggttatgaccatgaggatctggaggccaaacatgatggctcgtgacctcttcagtttagatatctatcggcttggcttgcgtgtgggttttctgtatgtaaggttttggtattcgttttttctcttagcatgaattagtgtctcattctgtatattctccgcgtgttaaatatgccagtagtgccttgcctgactgtgcctagagctttcgatggatgctagagcggcattttgggttcttcaggcacataatctggatttgaagaaacagtgagcaagtgtttggaaatctgacgggtttctgatgcccactcaaatatctaacatgtattagcctgcccatcctgctcaggataacaaatgtgaatatgccctgaagtgtgagctacattgtattagaacactttcgttttcaacatcttcaatactgcttattgtatgcctc

SEQ ID NO: 56117 - DNA, 3486 bp, Zea Mays
gacggaagcaaaaaaggggaagcgacagcccccctcccccgagcgtgtgacccaaccgaaaggggggagaaaagccctaggacaaacccgcgtaaagcggccggatccaatggcgggtgcctcgtgctgctagatctcgctccgtacgggcaatggcgtcgcggccaacgtcgcggcagcggaaggcgggacacgcatcggcggcggcggggccgaagggtctgcaccaccaccagcagctgccgccgcagtcgggctcgccgacgtcgaccgcgaccacgtcctcgtcgcgtctcacgccggagctctcgctcgacgggcccgcgtccccgctgttcgccgggttggacgaggacccggcgcccaaggagaatgtaaccgtcactgtccgcttccgcccgctcagcccgcgggagattcggcagggggaggaggtcgcgtggtatgcggatggtgacacggtcgttcggagtgagcagaaccccagcgtcgcctatgcttacgatcgagtttttgcaccaactactacgacccgacatgtatatgatgttgcagctcaacatgttgttagtggtgccatggagggagtaaatggtacaatatttgcatatggtgttacaagcagtgggaagacacacacgatgcatggagaccaaagatccccagggattatacctttgtctgtcaaagatgcatttagcattatacaagagacaccaaatcgcgagtttctccttcgcgtatcatacttggaaatttataatgaggttgtcaatgatctactaaatcctgctggtcagaatttgcgaattagagaggatcctcagggaacatttgttgaaggtatcaaggaggaagtagtattatctcctgcacatgccctgtctctcattgcagctggcgaagagcataggcatgttgggtctaccaacttcaatctattgagtagcagaagtcataccattttcacattgactatagagagcagcccttgtggtgagtctaatgaaggggaagctgtcactttctcacagctgaacctcatcgatctggcaggttcagagagctcaagggcggaaacaactggagtacggcggaaagaaggatcttatatcaacaaaagcttgcttactcttggaacggtgatatcaaagctgactgatggaaaggctacacatattccatatcgagattcaaaattaacacgactacttcagtcatccctcagtggtcaaggacgtgtttcactgatttgcacattgacaccagcgtcaagtaattctgaagagacccataatacactaaaatttgcccaccgtgcgaagtgcattgagatccaagcatctcaaaacaaaattatagatgagaaatctctaataaagaagtatcaaactgagattcggagattaaaggaagagctagaacagctgaaaatgggtattattactggcacacccttgaaagataccgaggaagataatattatcctttggaagcaaaagctagaggatggtaacgtcaagctgcagtctcggctggaacaagaggaggaagctaaagctgctttgcttgcaaggatccagcgtttaacaaaacttatactggtttctactaaggcgaccccggcttctagattttctccacatcctggaccaagacgaagacattcttttggggaagaggagctggcataccttccgtatagaagacgagatataatgatagacaatgaaagcaatgaattacttcttcctgtcgaagggtttggtgtatcacttgaagattcttcaaaggaagaaaaaaagaataggaagggacttcttaactggttcaaacttcggaaacgtgatggagcttctattctgacaagttcagaaggtgataagtccagtttgactaaatcaaccgctccttcaacacctattggggaaagcgtcaactttcctgctgaaccaagaatatcaaattcattagctggtgagaatgtatcatctgatctgtttagcattggtcatggggaatttccttctggcagcattcacggcgaagaaactctttcggccagtggaaaaacgatggaccatgttgatttgttgagagaacagttgaaaattttgtcaggggaggttgcgtttaatacaagtgctcttaagcgcctcacagaggaagctggaagaagcccaaagaacgagaagattcagatggaaatgaagaagaagaccgatgaaattaaggggaagcagcaacagatagcatctttggagagagagatagctcatgcaacattaggaactcaaggaaaggtcgatacgttagagcattcaccggtgaaggctgcagataatagagtgatacaagatcagctgaatgagaagataactgaatgcatggaattgcatgctgaagttactcatctcaaagaacagctgtcccaagctcttgaagctaaggatttggtgtcaaatagcatgatacataataatagagttaaccatgaagttgaacaccttgttgatcaagatgttccaagagagatctcttctgaaccacagcaaaaacagcagtccgttgaaatcaatgagctgaagcaaaaggtgtctgaactcatggaaatcaaagctcaacttgaggatcgcaatcaaaagctactggaggaaagtacatatgcaaaaggattggcttcagctgctggtgtcgaattgaaggcattgtcagaagaagtgaccaaactgatgaaccaaaatgagaagcttgcgaccgagttgtcatcgctgagaagtccaactccagctccacgcagattcaacaatggaccaagaggtactaggagggaaagcatgagtaggcgagaaccagctagcagacgagacacgaatgcaagccatgaaagggaaaaggctctagaggcattgcttatggagaaggagcaaaaggaagcagagctccaaaggaaagtcgaggagtcaaagcagaaggaagccttcctggaaagtgagcttgccaacatgtgggttctagtagcaaaactgaagaagtcccagggttatgaccatgaggatctggaggccaaacatgatggctcgtgacctcttcagtttagatatctatcggcttggcttgcgtgtgggttttctgtatgtaaggttttggtattcgttttttctcttagcatgaattagtgtctcattctgtatattctccgcgtgttaaatatgccagtagtgccttgcctgactgtgcctagagctttcgatggatgctagagcggcattttgggttcttcaggcacataatctggatttgaagaaacagtgagcaagtgtttggaaatctgacgggtttctgatgcccactcaaatatctaacatgtattagcctgcccatcctgctcaggataacaaatgtgaatatgccctgaagtgtgagctacattgtattagaacactttcgttttcaacatcttcaatactgcttattgtatgcctc

SEQ ID NO: 56118 - DNA, 3309 bp, Zea Mays
atcgcttccgacggaagcaaaaaaggggaagcgacagcccccctcccccgagcgtgtgacccaaccgaaaggggggagaaaagccctaggacaaacccgcgtaaagcggccggatccaatggcgggtgcctcgtgctgctagatctcgctccgtacgggcaatggcgtcgcggccaacgtcgcggcagcggaaggcgggacacgcatcggcggcggcggggccgaagggtctgcaccaccaccagcagctgccgccgcagtcgggctcgccgacgtcgaccgcgaccacgtcctcgtcgcgtctcacgccggagctctcgctcgacgggcccgcgtccccgctgttcgccgggttggacgaggacccggcgcccaaggagaatgtaaccgtcactgtccgcttccgcccgctcagcccgcgggagattcggcagggggaggaggtcgcgtggtatgcggatggtgacacggtcgttcggagtgagcagaaccccagcgtcgcctatgcttacgatcgagtttttgcaccaactactacgacccgacatgtatatgatgttgcagctcaacatgttgttagtggtgccatggagggagtaaatggtacaatatttgcatatggtgttacaagcagtgggaagacacacacgatgcatggagaccaaagatccccagggattatacctttgtctgtcaaagatgcatttagcattatacaagagacaccaaatcgcgagtttctccttcgcgtatcatacttggaaatttataatgaggttgtcaatgatctactaaatcctgctggtcagaatttgcgaattagagaggatcctcagggaacatttgttgaaggtatcaaggaggaagtagtattatctcctgcacatgccctgtctctcattgcagctggcgaagagcataggcatgttgggtctaccaacttcaatctattgagtagcagaagtcataccattttcacattgactatagagagcagcccttgtggtgagtctaatgaaggggaagctgtcactttctcacagctgaacctcatcgatctggcaggttcagagagctcaagggcggaaacaactggagtacggcggaaagaaggatcttatatcaacaaaagcttgcttactcttggaacggtgatatcaaagctgactgatggaaaggctacacatattccatatcgagattcaaaattaacacgactacttcagtcatccctcagtggtcaaggacgtgtttcactgatttgcacattgacaccagcgtcaagtaattctgaagagacccataatacactaaaatttgcccaccgtgcgaagtgcattgagatccaagcatctcaaaacaaaattatagatgagaaatctctaataaagaagtatcaaactgagattcggagattaaaggaagagctagaacagctgaaaatgggtattattactggcacacccttgaaagataccgaggaagataatattatcctttggaagcaaaagctagaggatggtaacgtcaagctgcagtctcggctggaacaagaggaggaagctaaagctgctttgcttgcaaggatccagcgtttaacaaaacttatactggtttctactaaggcgaccccggcttctagattttctccacatcctggaccaagacgaagacattcttttggggaagaggagctggcataccttccgtatagaagacgagatataatgatagacaatgaaagcaatgaattacttcttcctgtcgaagggtttggtgtatcacttgaagattcttcaaaggaagaaaaaaagaataggaagggacttcttaactggttcaaacttcggaaacgtgatggagcttctattctgacaagttcagaaggtgataagtccagtttgactaaatcaaccgctccttcaacacctattggggaaagcgtcaactttcctgctgaaccaagaatatcaaattcattagctggtgagaatgtatcatctgatctgtttagcattggtcatggggaatttccttctggcagcattcacggcgaagaaactctttcggccagtggaaaaacgatggaccatgttgatttgttgagagaacagttgaaaattttgtcaggggaggttgcgtttaatacaagtgctcttaagcgcctcacagaggaagctggaagaagcccaaagaacgagaagattcagatggaaatgaagaagaagaccgatgaaattaaggggaagcagcaacagatagcatctttggagagagagatagctcatgcaacattaggaactcaaggaaaggtcgatacgttagagcattcaccgtcttatcatgaactacttgagcagctcaatgagaaatctttagaacttgagtccgttgaaatcaatgagctgaagcaaaaggtgtctgaactcatggaaatcaaagctcaacttgaggatcgcaatcaaaagctactggaggaaagtacatatgcaaaaggattggcttcagctgctggtgtcgaattgaaggcattgtcagaagaagtgaccaaactgatgaaccaaaatgagaagcttgcgaccgagttgtcatcgctgagaagtccaactccagctccacgcagattcaacaatggaccaagaggtactaggagggaaagcatgagtaggcgagaaccagctagcagacgagacacgaatgcaagccatgaaagggaaaaggctctagaggcattgcttatggagaaggagcaaaaggaagcagagctccaaaggaaagtcgaggagtcaaagcagaaggaagccttcctggaaagtgagcttgccaacatgtgggttctagtagcaaaactgaagaagtcccagggttatgaccatgaggatctggaggccaaacatgatggctcgtgacctcttcagtttagatatctatcggcttggcttgcgtgtgggttttctgtatgtaaggttttggtattcgttttttctcttagcatgaattagtgtctcattctgtatattctccgcgtgttaaatatgccagtagtgccttgcctgactgtgcctagagctttcgatggatgctagagcggcattttgggttcttcaggcacataatctggatttgaagaaacagtgagcaagtgtttggaaatctgacgggtttctgatgcccactcaaatatctaacatgtattagcctgcccatcctgctcaggataacaaatgtgaatatgccctgaagtgtgagctacattgtattagaacactttcgttttcaacatcttcaatactgcttattgtatgcctc

SEQ ID NO: 56119 - DNA, 3595 bp, Zea Mays
ggcgagttggtttcagctttccttttcttccacaacatcttgcagcggcggcaacccccgcgcagcgcatcgcttccgacggaagcaaaaaaggggaagcgacagcccccctcccccgagcgtgtgacccaaccgaaaggggggagaaaagccctaggacaaacccgcgtaaagcggccggatccaatggcgggtgcctcgtgctgctagatctcgctccgtacgggcaatggcgtcgcggccaacgtcgcggcagcggaaggcgggacacgcatcggcggcggcggggccgaagggtctgcaccaccaccagcagctgccgccgcagtcgggctcgccgacgtcgaccgcgaccacgtcctcgtcgcgtctcacgccggagctctcgctcgacgggcccgcgtccccgctgttcgccgggttggacgaggacccggcgcccaaggagaatgtaaccgtcactgtccgcttccgcccgctcagcccgcgggagattcggcagggggaggaggtcgcgtggtatgcggatggtgacacggtcgttcggagtgagcagaaccccagcgtcgcctatgcttacgatcgagtttttgcaccaactactacgacccgacatgtatatgatgttgcagctcaacatgttgttagtggtgccatggagggagtaaatggtacaatatttgcatatggtgttacaagcagtgggaagacacacacgatgcatggagaccaaagatccccagggattatacctttgtctgtcaaagatgcatttagcattatacaagagacaccaaatcgcgagtttctccttcgcgtatcatacttggaaatttataatgaggttgtcaatgatctactaaatcctgctggtcagaatttgcgaattagagaggatcctcagggaacatttgttgaaggtatcaaggaggaagtagtattatctcctgcacatgccctgtctctcattgcagctggcgaagagcataggcatgttgggtctaccaacttcaatctattgagtagcagaagtcataccattttcacattgactatagagagcagcccttgtggtgagtctaatgaaggggaagctgtcactttctcacagctggttcagagagctcaagggcggaaacaactggagtacggcggaaagaaggatcttatatcaacaaaagcttgcttactcttggaacggtgatatcaaagctgactgatggaaaggctacacatattccatatcgagattcaaaattaacacgactacttcagtcatccctcagtggtcaaggacgtgtttcactgatttgcacattgacaccagcgtcaagtaattctgaagagacccataatacactaaaatttgcccaccgtgcgaagtgcattgagatccaagcatctcaaaacaaaattatagatgagaaatctctaataaagaagtatcaaactgagattcggagattaaaggaagagctagaacagctgaaaatgggtattattactggcacacccttgaaagataccgaggaagataatattatcctttggaagcaaaagctagaggatggtaacgtcaagctgcagtctcggctggaacaagaggaggaagctaaagctgctttgcttgcaaggatccagcgtttaacaaaacttatactggtttctactaaggcgaccccggcttctagattttctccacatcctggaccaagacgaagacattcttttggggaagaggagctggcataccttccgtatagaagacgagatataatgatagacaatgaaagcaatgaattacttcttcctgtcgaagggtttggtgtatcacttgaagattcttcaaaggaagaaaaaaagaataggaagggacttcttaactggttcaaacttcggaaacgtgatggagcttctattctgacaagttcagaaggtgataagtccagtttgactaaatcaaccgctccttcaacacctattggggaaagcgtcaactttcctgctgaaccaagaatatcaaattcattagctggtgagaatgtatcatctgatctgtttagcattggtcatggggaatttccttctggcagcattcacggcgaagaaactctttcggccagtggaaaaacgatggaccatgttgatttgttgagagaacagttgaaaattttgtcaggggaggttgcgtttaatacaagtgctcttaagcgcctcacagaggaagctggaagaagcccaaagaacgagaagattcagatggaaatgaagaagaagaccgatgaaattaaggggaagcagcaacagatagcatctttggagagagagatagctcatgcaacattaggaactcaaggaaaggtcgatacgttagagcattcaccgtcttatcatgaactacttgagcagctcaatgagaaatctttagaacttgaggtgaaggctgcagataatagagtgatacaagatcagctgaatgagaagataactgaatgcatggaattgcatgctgaagttactcatctcaaagaacagctgtcccaagctcttgaagctaaggatttggtgtcaaatagcatgatacataataatagagttaaccatgaagttgaacaccttgttgatcaagatgttccaagagagatctcttctgaaccacagcaaaaacagcagtccgttgaaatcaatgagctgaagcaaaaggtgtctgaactcatggaaatcaaagctcaacttgaggatcgcaatcaaaagctactggaggaaagtacatatgcaaaaggattggcttcagctgctggtgtcgaattgaaggcattgtcagaagaagtgaccaaactgatgaaccaaaatgagaagcttgcgaccgagttgtcatcgctgagaagtccaactccagctccacgcagattcaacaatggaccaagaggtactaggagggaaagcatgagtaggcgagaaccagctagcagacgagacacgaatgcaagccatgaaagggaaaaggctctagaggcattgcttatggagaaggagcaaaaggaagcagagctccaaaggaaagtcgaggagtcaaagcagaaggaagccttcctggaaagtgagcttgccaacatgtgggttctagtagcaaaactgaagaagtcccagggttatgaccatgaggatctggaggccaaacatgatggctcgtgacctcttcagtttagatatctatcggcttggcttgcgtgtgggttttctgtatgtaaggttttggtattcgttttttctcttagcatgaattagtgtctcattctgtatattctccgcgtgttaaatatgccagtagtgccttgcctgactgtgcctagagctttcgatggatgctagagcggcattttgggttcttcaggcacataatctggatttgaagaaacagtgagcaagtgtttggaaatctgacgggtttctgatgcccactcaaatatctaacatgtattagcctgcccatcctgctcaggataacaaatgtgaatatgccctgaagtgtgagctacattgtattagaacactttcgttttcaacatcttcaatactgcttattgtatgcctc

SEQ ID NO: 56120 - DNA, 2522 bp, Zea Mays
ttttcttccacaacatcttgcagcggcggcaacccccgcgcagcgcatcgcttccgacggaagcaaaaaaggggaagcgacagcccccctcccccgagcgtgtgacccaaccgaaaggggggagaaaagccctaggacaaacccgcgtaaagcggccggatccaatggcgggtgcctcgtgctgctagatctcgctccgtacgggcaatggcgtcgcggccaacgtcgcggcagcggaaggcgggacacgcatcggcggcggcggggccgaagggtctgcaccaccaccagcagctgccgccgcagtcgggctcgccgacgtcgaccgcgaccacgtcctcgtcgcgtctcacgccggagctctcgctcgacgggcccgcgtccccgctgttcgccgggttggacgaggacccggcgcccaaggagaatgtaaccgtcactgtccgcttccgcccgctcagcccgcgggagattcggcagggggaggaggtcgcgtggtatgcggatggtgacacggtcgttcggagtgagcagaaccccagcgtcgcctatgcttacgatcgagtttttgcaccaactactacgacccgacatgtatatgatgttgcagctcaacatgttgttagtggtgccatggagggagtaaatggtacaatatttgcatatggtgttacaagcagtgggaagacacacacgatgcatggagaccaaagatccccagggattatacctttgtctgtcaaagatgcatttagcattatacaagagacaccaaatcgcgagtttctccttcgcgtatcatacttggaaatttataatgaggttgtcaatgatctactaaatcctgctggtcagaatttgcgaattagagaggatcctcagggaacatttgttgaaggtatcaaggaggaagtagtattatctcctgcacatgccctgtctctcattgcagctggcgaagagcataggcatgttgggtctaccaacttcaatctattgagtagcagaagtcataccattttcacattgactatagagagcagcccttgtggtgagtctaatgaaggggaagctgtcactttctcacagctgaacctcatcgatctggcaggttcagagagctcaagggcggaaacaactggagtacggcggaaagaaggatcttatatcaacaaaagcttgcttactcttggaacggtgatatcaaagctgactgatggaaaggctacacatattccatatcgagattcaaaattaacacgactacttcagtcatccctcagtggtcaaggacgtgtttcactgatttgcacattgacaccagcgtcaagtaattctgaagagacccataatacactaaaatttgcccaccgtgcgaagtgcattgagatccaagcatctcaaaacaaaattatagatgagaaatctctaataaagaagtatcaaactgagattcggagattaaaggaagagctagaacagctgaaaatgggtattattactggcacacccttgaaagataccgaggaagataatattatcctttggaagcaaaagctagaggatggtaacgtcaagctgcagtctcggctggaacaagaggaggaagctaaagctgctttgcttgcaaggatccagcgtttaacaaaacttatactggtttctactaaggcgaccccggcttctagattttctccacatcctggaccaagacgaagacattcttttggggaagaggagctggcataccttccgtatagaagacgagatataatgatagacaatgaaagcaatgaattacttcttcctgtcgaagggtttggtgtatcacttgaagattcttcaaaggaagaaaaaaagaataggaagggacttcttaactggttcaaacttcggaaacgtgatggagcttctattctgacaagttcagaaggtgataagtccagtttgactaaatcaaccgctccttcaacacctattggggaaagcgtcaactttcctgctgaaccaagaatatcaaattcattagctggtgagaatgtatcatctgatctgtttagcattggtcatggggaatttccttctggcagcattcacggcgaagaaactctttcggccagtggaaaaacgatggaccatgttgatttgttgagagaacagttgaaaattttgtcaggggaggttgcgtttaatacaagtgctcttaagcgcctcacagaggaagctggaagaagcccaaagaacgagaagattcagatggaaatgaagaagaagaccgatgaaattaaggggaagcagcaacagatagcatctttggagagagagatagctcatgcaacattaggaactcaaggaaaggtcgatacgttagagcattcaccgtcttatcatgaactacttgagcagctcaatgagaaatctttagaacttgagatcggtgagggattggagagggaattcgatggttggggctgctggtggaggtggtgcgatactgttcatacgtgaacagtactcgcggt

SEQ ID NO: 56121 - DNA, 1242 bp, Zea Mays
cagggcccaggggcacaaccagcagactgcaactgccactgcatgcagctgtacttggtggcgagagggggggagcttttaagcgagcctagtcgtgtctcctctcctctcccctcccctcctccgtgctgctccgcccctcgatcggctggctctactttgcatggtccccggccgggcctcctcttgcgtgctctccgacctcagtcacggcgcccatcacggccccttaaaaccgcatactacacagaaacatataccaccaagcttgctagcttgtcgcctcacaagctacggcgagctactaggcgaagtagaattattcctggggccgcgcggcagctagctcctagctcgcagccggccatggcgaagccgcaggaggtccgcagcgtcgactccttctcgcagctaccgttcatccggccggcgccggcgccgagggacgccaccatccgtctgtttggccgcgagttccccagcgaccacaaccagcagcagcaggacgccgcgtccgactcccccgacgctgccaacaacggcagcacggtcacgtgcgagagcaacggcgcggccaagagcggcgccgcggccgagaggaagttcgagtgccactactgctgccgcaacttcccgacgtcgcaggcgctgggcgggcaccagaacgcgcacaagcgcgagcggcagcacgccaagcgcgcccacctccaggcctccctcgccatgcaccgctacgtgcccggacacatgtacggcctcttcaactactacccccacccccaccccatcggcggcggcgcccgctttgaccaccccgcgccgccgccgccgccgctgcagcactacccgatgtggacgactagcgccagccccgcggggccctacggcggcggcccgggctccatgtcgcagccaatcaacggtagcccggtgcccgcggggctctggagggtgccgccgccccccgcggctactgccatggagaatttcggcgtgtccgcccggcacggcgctagtggtggcacggccttcccggtcgggccgcctggtggggaggcagcagcgtgcaaggacgataaggcggcggtgatgatgagcttgctgtccccctccccctcgctctcgtcgtgctcgtccacgtcgccggagacgaagctagcagaagaagaattactgtacgcagtggagatatatactcttgttttattgttaggcggcatcatgtttgatttgaagaggaag

SEQ ID NO: 56122 - DNA, 691 bp, Zea Mays
atttcacaaaacatataatttttttaccagtcgcttcaaaaaaccactgttcctttctctgttcttcttctcagccatttccacgaacaggtgcactggagttgttgttgcctctctctcacctagcaccgcttctcgatctcgaactgggcacaagataggggatgtagcacaaacaccacatgcaacacggcggcctctggcgtgagctagtgcaagcagccagcagactcgcaagatggctgccaggatgcgaggtagcgaggcgccgggcgacgccgcccacgcgggccggaacgatggcgtggttgtggtcctccatgccgccgcagtgttcaaacttcgcccccacgactggctatggcactgctgcgtgctatagggctattcccatagccacagtgaccagcgatgagaaggacggatagcggatgaacaacgattctctagctttagcgtctccttggttgccggtaaaatttagcgttccttttaccggacattgttggacggctagaggaggccaacatccgttatatttaccggacatgaagctttagcggtccttgttggacacatccttagtagctactaccaaattttcagggttcatagataataatttgtgagtgttcacagggagaatttccattatcgattaaattgtgtttgccatgaagcttcaaagagc

SEQ ID NO: 56123 - DNA, 514 bp, Zea Mays
ctcaaaaccaagcaacgccgcgccgacgcaagactaccagagatgaagaccggcctcgtgacactacagctactcaccatcaccatgtttctcgtgctatcgtcgcatgcagcacggtggccaggactgggccagactacttccaggacacctgctcggcgaggatatcttcgggggcacggtgccagcctagcaagtgcgccgcggactgcaccaggcaattcaggggcggcgtgggcagctgtgaccgctcggggtgtatgtgcgtctacacctgccctgcggtctcgccactggcaatgaacgaatcaatcgcgtgaccctgactatctcgatgcacaagtagtgacggacgggctagtagccgacctgtgacggctttgcgtctgatgaattcatgaaatggatctgagtataacctgctcgttttttttggtctttgactctttgtcatgctgtagcaaggtgaaaataaaaagcaatatataataaaggattcatcaggtgttaggtc

SEQ ID NO: 56124 - DNA, 1194 bp, Zea Mays
aaaactttacggtctatgcatcatccttttttccgagcataaatttatggtgtaactcctttgggaaaaccgttaacgatcatctgaggtcaactttgagttttgataacaagcaacctccatttgcgagtcaaaactttgactacggtcaaacaatagcttgcatttcatacccgtacaatcgttctagatcaggagatgtttgggcagcctatgagtcacgcaccagcactgccactgtgcagttccgttcccaaattgctggtgggggttcatccacaagaattcccttgcctttggaattagcagagaatgaacccatatatgtgaatcccaaacaatatcacgggatacttcgcagaagacagttacgtgccaagctagaggctcagaacaagctagtcagagcccgaaagccttaccttcatgagtctaggcatcttcatgcaatgaagagggcacgaggttccggtggacgattcctcaacactaagcagctccagcagtctcacacagccctcaccaggtccaccaccacaagtggcacaagctcctcaggctcaactcatctgcggcttggtggtggcgcagccgcagctggagatcgatctgtgctggcacccaaaacaatggcctcacaagacagtagcaagaaggccgtttcttcagccctcgccttcactgcgactccaatgctgcgcagagatgacggcttcttgcagcacccaagccatcttttcagtttttctggtcattttgggcaggcaagcgcgcaagctggcgtccataatggaagtcagcatagggttccagttatgagatgaccggtttgcgaaccatagctggtgatccaggcgtctagggtcaacttcgctgtggtgtcttagtctctcaggcaattcatccttggcttaatttctggctttttattagaaggtaccaaaatgtgttccataccgttgtggccacagagcccataaaccagggggtttgatggttggcactcctacccaaactattgttgcagtggtgtttgttagaataaaccttgactattattctgtacaatttgcctttatcttgtactgccaattattgtgtagtggtcacctgtccagtttatggcctcaagactagtctaccctgtttgtcacaacatctgccctgaaaaatcatactgcagctgtactggag

SEQ ID NO: 56125 - DNA, 1431 bp, Zea Mays
aaaaacttgtggaatctgttaggatcttggctgtgttctttgcagttaagcatctccttttgatgtcgggttgtgtgtgctatctcggattgggttgcatgtcccttgggaacacaggttgactagtctttgtggacttggggcgttgttatttggattcctttagaactgcggtggaggatctctaaacatgatggtgcttaaattcgatggcagaaaatcagaaatggcgttcccttgccagggactggtagcttggaaacttggaattgtccttcactattagtcttggtaactcctttgggaaaaccgttaacgatcatctgaggtcaactttgagttttgataacaagcaacctccatttgcgagtcaaaactttgactacggtcaaacaatagcttgcatttcatacccgtacaatcgttctagatcaggagatgtttgggcagcctatgagtcacgcaccagcactgccactgtgttccgttcccaaattgctggtgggggttcatccacaagaattcccttgcctttggaattagcagagaatgaacccatatatgtgaatcccaaacaatatcacgggatacttcgcagaagacagttacgtgccaagctagaggctcagaacaagctagtcagagcccgaaagccttaccttcatgagtctaggcatcttcatgcaatgaagagggcacgaggttccggtggacgattcctcaacactaagcagctccagcagtctcacacagccctcaccaggtccaccaccacaagtggcacaagctcctcaggctcaactcatctgcggcttggtggtggcgcagccgcagctggagatcgatctgtgctggcacccaaaacaatggcctcacaagacagtagcaagaaggccgtttcttcagccctcgccttcactgcgactccaatgctgcgcagagatgacggcttcttgcagcacccaagccatcttttcagtttttctggtcattttgggcaggcaagcgcgcaagctggcgtccataatggaagtcagcatagggttccagttatgagatgaccggtttgcgaaccatagctggtgatccaggcgtctagggtcaacttcgctgtggtgtcttagtctctcaggcaattcatccttggcttaatttctggctttttattagaaggtaccaaaatgtgttccataccgttgtggccacagagcccataaaccagggggtttgatggttggcactcctacccaaactattgttgcagtggtgtttgttagaataaaccttgactattattctgtacaatttgcctttatcttgtactgccaattattgtgtagtggtcacctgtccagtttatggcctcaagactagtctaccctgtttgtcacaacatctgccctgaaaaatcatactgcagctgtactggag

SEQ ID NO: 56126 - DNA, 1180 bp, Zea Mays
gaccagaggaagggacggcggggaggtggcaaggcgcagagagcaggttcgcttggcggacgcaccgagggaggcgtgtgggagccatgcttcttccctcttcgtcttcgtcttccgcttccgcttccaaaggcttgcatttcatacccgtacaatcgttctagatcaggagatgtttgggcagcctatgagtcacgcaccagcactgccactgtgttgcatttaaagcagttccgttcccaaattgctggtgggggttcatccacaagaattcccttgcctttggaattagcagagaatgaacccatatatgtgaatcccaaacaatatcacgggatacttcgcagaagacagttacgtgccaagctagaggctcagaacaagctagtcagagcccgaaagccttaccttcatgagtctaggcatcttcatgcaatgaagagggcacgaggttccggtggacgattcctcaacactaagcagctccagcagtctcacacagccctcaccaggtccaccaccacaagtggcacaagctcctcaggctcaactcatctgcggcttggtggtggcgcagccgcagctggagatcgatctgtgctggcacccaaaacaatggcctcacaagacagtagcaagaaggccgtttcttcagccctcgccttcactgcgactccaatgctgcgcagagatgacggcttcttgcagcacccaagccatcttttcagtttttctggtcattttgggcaggcaagcgcgcaagctggcgtccataatggaagtcagcatagggttccagttatgagatgaccggtttgcgaaccatagctggtgatccaggcgtctagggtcaacttcgctgtggtgtcttagtctctcaggcaattcatccttggcttaatttctggctttttattagaaggtaccaaaatgtgttccataccgttgtggccacagagcccataaaccagggggtttgatggttggcactcctacccaaactattgttgcagtggtgtttgttagaataaaccttgactattattctgtacaatttgcctttatcttgtactgccaattattgtgtagtggtcacctgtccagtttatggcctcaagactagtctaccctgtttgtcacaacatctgccctgaaaaatcatactgcagctgtactggag

SEQ ID NO: 56127 - DNA, 1168 bp, Zea Mays
gaccagaggaagggacggcggggaggtggcaaggcgcagagagcaggttcgcttggcggacgcaccgagggaggcgtgtgggagccatgcttcttccctcttcgtcttcgtcttccgcttccgcttccaaaggcttgcatttcatacccgtacaatcgttctagatcaggagatgtttgggcagcctatgagtcacgcaccagcactgccactgtgcagttccgttcccaaattgctggtgggggttcatccacaagaattcccttgcctttggaattagcagagaatgaacccatatatgtgaatcccaaacaatatcacgggatacttcgcagaagacagttacgtgccaagctagaggctcagaacaagctagtcagagcccgaaagccttaccttcatgagtctaggcatcttcatgcaatgaagagggcacgaggttccggtggacgattcctcaacactaagcagctccagcagtctcacacagccctcaccaggtccaccaccacaagtggcacaagctcctcaggctcaactcatctgcggcttggtggtggcgcagccgcagctggagatcgatctgtgctggcacccaaaacaatggcctcacaagacagtagcaagaaggccgtttcttcagccctcgccttcactgcgactccaatgctgcgcagagatgacggcttcttgcagcacccaagccatcttttcagtttttctggtcattttgggcaggcaagcgcgcaagctggcgtccataatggaagtcagcatagggttccagttatgagatgaccggtttgcgaaccatagctggtgatccaggcgtctagggtcaacttcgctgtggtgtcttagtctctcaggcaattcatccttggcttaatttctggctttttattagaaggtaccaaaatgtgttccataccgttgtggccacagagcccataaaccagggggtttgatggttggcactcctacccaaactattgttgcagtggtgtttgttagaataaaccttgactattattctgtacaatttgcctttatcttgtactgccaattattgtgtagtggtcacctgtccagtttatggcctcaagactagtctaccctgtttgtcacaacatctgccctgaaaaatcatactgcagctgtactggag

SEQ ID NO: 56128 - DNA, 1301 bp, Zea Mays
cagaccagaggaagggacggcggggaggtggcaaggcgcagagagcaggttcgcttggcggacgcaccgagggaggcgtgtgggagccatgcttcttccctcttcgtcttcgtcttccgcttccgcttccaaaggtaactcctttgggaaaaccgttaacgatcatctgaggtcaactttgagttttgataacaagcaacctccatttgcgagtcaaaactttgactacggtcaaacaatagtaagacttttggcttgcatttcatacccgtacaatcgttctagatcaggagatgtttgggcagcctatgagtcacgcaccagcactgccactgtgttgcatttaaagcagttccgttcccaaattgctggtgggggttcatccacaagaattcccttgcctttggaattagcagagaatgaacccatatatgtgaatcccaaacaatatcacgggatacttcgcagaagacagttacgtgccaagctagaggctcagaacaagctagtcagagcccgaaagccttaccttcatgagtctaggcatcttcatgcaatgaagagggcacgaggttccggtggacgattcctcaacactaagcagctccagcagtctcacacagccctcaccaggtccaccaccacaagtggcacaagctcctcaggctcaactcatctgcggcttggtggtggcgcagccgcagctggagatcgatctgtgctggcacccaaaacaatggcctcacaagacagtagcaagaaggccgtttcttcagccctcgccttcactgcgactccaatgctgcgcagagatgacggcttcttgcagcacccaagccatcttttcagtttttctggtcattttgggcaggcaagcgcgcaagctggcgtccataatggaagtcagcatagggttccagttatgagatgaccggtttgcgaaccatagctggtgatccaggcgtctagggtcaacttcgctgtggtgtcttagtctctcaggcaattcatccttggcttaatttctggctttttattagaaggtaccaaaatgtgttccataccgttgtggccacagagcccataaaccagggggtttgatggttggcactcctacccaaactattgttgcagtggtgtttgttagaataaaccttgactattattctgtacaatttgcctttatcttgtactgccaattattgtgtagtggtcacctgtccagtttatggcctcaagactagtctaccctgtttgtcacaacatctgccctgaaaaatcatactgcagctgtactggag

SEQ ID NO: 56129 - DNA, 1152 bp, Zea Mays
gtggggtctccttggtacaagacgagggataaaagaacagcgcaagtggagtgatgcagccgagggggccagaccagaggaagggacggcggggaggtggcaaggcgcagagagcaggttcgcttggcggacgcaccgagggaggcgtgtgggagccatgcttcttccctcttcgtcttcgtcttccgcttccgcttccaaagttccgttcccaaattgctggtgggggttcatccacaagaattcccttgcctttggaattagcagagaatgaacccatatatgtgaatcccaaacaatatcacgggatacttcgcagaagacagttacgtgccaagctagaggctcagaacaagctagtcagagcccgaaagccttaccttcatgagtctaggcatcttcatgcaatgaagagggcacgaggttccggtggacgattcctcaacactaagcagctccagcagtctcacacagccctcaccaggtccaccaccacaagtggcacaagctcctcaggctcaactcatctgcggcttggtggtggcgcagccgcagctggagatcgatctgtgctggcacccaaaacaatggcctcacaagacagtagcaagaaggccgtttcttcagccctcgccttcactgcgactccaatgctgcgcagagatgacggcttcttgcagcacccaagccatcttttcagtttttctggtcattttgggcaggcaagcgcgcaagctggcgtccataatggaagtcagcatagggttccagttatgagatgaccggtttgcgaaccatagctggtgatccaggcgtctagggtcaacttcgctgtggtgtcttagtctctcaggcaattcatccttggcttaatttctggctttttattagaaggtaccaaaatgtgttccataccgttgtggccacagagcccataaaccagggggtttgatggttggcactcctacccaaactattgttgcagtggtgtttgttagaataaaccttgactattattctgtacaatttgcctttatcttgtactgccaattattgtgtagtggtcacctgtccagtttatggcctcaagactagtctaccctgtttgtcacaacatctgccctgaaaaatcatactgcagctgtactggag

SEQ ID NO: 56130 - DNA, 1420 bp, Zea Mays
cctgcccccacttgccatagcaaaaagtggcgcattagatgtggacatacaaatttgatatacaatagagagctgtggggtctccttggtacaagacgagggataaaagaacagcgcaagtggagtgatgcagccgagggggccagaccagaggaagggacggcggggaggtggcaaggcgcagagagcaggttcgcttggcggacgcaccgagggaggcgtgtgggagccatgcttcttccctcttcgtcttcgtcttccgcttccgcttccaaaggtaactcctttgggaaaaccgttaacgatcatctgaggtcaactttgagttttgataacaagcaacctccatttgcgagtcaaaactttgactacggtcaaacaatagcttgcatttcatacccgtacaatcgttctagatcaggagatgtttgggcagcctatgagtcacgcaccagcactgccactgtgcagttccgttcccaaattgctggtgggggttcatccacaagaattcccttgcctttggaattagcagagaatgaacccatatatgtgaatcccaaacaatatcacgggatacttcgcagaagacagttacgtgccaagctagaggctcagaacaagctagtcagagcccgaaagccttaccttcatgagtctaggcatcttcatgcaatgaagagggcacgaggttccggtggacgattcctcaacactaagcagctccagcagtctcacacagccctcaccaggtccaccaccacaagtggcacaagctcctcaggctcaactcatctgcggcttggtggtggcgcagccgcagctggagatcgatctgtgctggcacccaaaacaatggcctcacaagacagtagcaagaaggccgtttcttcagccctcgccttcactgcgactccaatgctgcgcagagatgacggcttcttgcagcacccaagccatcttttcagtttttctggtcattttgggcaggcaagcgcgcaagctggcgtccataatggaagtcagcatagggttccagttatgagatgaccggtttgcgaaccatagctggtgatccaggcgtctagggtcaacttcgctgtggtgtcttagtctctcaggcaattcatccttggcttaatttctggctttttattagaaggtaccaaaatgtgttccataccgttgtggccacagagcccataaaccagggggtttgatggttggcactcctacccaaactattgttgcagtggtgtttgttagaataaaccttgactattattctgtacaatttgcctttatcttgtactgccaattattgtgtagtggtcacctgtccagtttatggcctcaagactagtctaccctgtttgtcacaacatctgccctgaaaaatcatactgcagctgtactggag

SEQ ID NO: 56131 - DNA, 1386 bp, Zea Mays
atccgcaaatgaaatgaagtccttcctagggcgcccccttctcatccttgaaacgtaaggaacgtgtacactaaatcctccaaaggtatcctttctagtaggatagattgtgcccagagaaccagtctcattgaaaggtgctactcgcgggttcattaacagttcatcatgtgcaggcctttttgctggtgaagaattttttacagttgagtcatgagtctcaatgtctgatagctcctctatgtatctttttgttggctttctagttcgcttgtcagtgcattgctcgcctagcagatttccttgtggttcatcattatggatcggcaccctcttggaagaatcttcctggtcctcgctctgatagtaagagctagatggagagtccccttcgtttcctggatatataaccacagaagtagctctaagcccagtcttagctctttcatccatgtctgacatatcatttttggcatccttgccaacaattttgtagtctttaactacacaacctgaacttggaacatcgtaggaattagtcaagcccattgtaatccgtcttttgagccatatcttgtctttgacattagtctgccggccaaacgtggctctaaacgcctcctgaagttctctaatagtaagatcatccaaacagacttctcctcttaatatggaaaaatcaggcatggaactattaactcccgaaacagatggatctgtagatgtgtcgcatacagatcttgagcaggcatcagccttatatttttcagcacagcaagagtcatttaacactgtcgattttgtagtctcagttgaagcattgtcctgtcgagtgacgtttgccccttgttctgtaagcaatttatctgaatgctgactatgaattctaaagtctgagggaggactaagggaatcatccaatgactacaaacaacatacctctaagttggcacccaatttttgtgtgtgtgcttccacagtctccaatttggaagatccatctgcacaatcaggcttcttcagtaacatgcagtcattgttgaaaaactcttccacatggtctgcatcttcaataggaggaagatcaaccttctcgttgtgaaggaaatgttcaaactgcaaaacatcatcctctgtagcaggaacaagtgttccatcaccttcaacctgaacatatttaaagcatttctcaaaagactcgagtaagcatctaagtttttatattaacatgtggccgacaaatcataaaattaactaagaacttacccgaactagctgataaaccacaggatcagaagtgcctttcttttcaaagtcattctcttcacttttattaaccatggtgccatgtgagtcatccatttccatagataagtcaaacgtgat

SEQ ID NO: 56132 - DNA, 1316 bp, Zea Mays
ccgcaaatgaaatgaagtccttcctagggcgcccccttctcatccttgaaacgtaaggaacgtgtacactaaatcctccaaaggtatcctttctagtaggatagattgtgcccagagaaccagtctcattgaaaggtgctactcgcgggttcattaacagttcatcatgtgcaggcctttttgctggtgaagaattttttacagttgagtcatgagtctcaatgtctgatagctcctctatgtatctttttgttggctttctagttcgcttgtcagtgcattgctcgcctagcagatttccttgtggttcatcattatggatcggcaccctcttggaagaatcttcctggtcctcgctctgatagtaagagctagatggagagtccccttcgtttcctggatatataaccacagaagtagctctaagcccagtcttagctctttcatccatgtctgacatatcatttttggcatccttgccaacaattttgtagtctttaactacacaacctgaacttggaacatcgtaggaattagtcaagcccattgtaatccgtcttttgagccatatcttgtctttgacattagtctgccggccaaacgtggctctaaacgcctcctgaagttctctaatagtaagatcatccaaacagacttctcctcttaatatggaaaaatcaggcatggaactattaactcccgaaacagatggatctgtagatgtgtcgcatacagatcttgagcaggcatcagccttatatttttcagcacagcaagagtcatttaacactgtcgattttgtagtctcagttgaagcattgtcctgtcgagtgacgtttgccccttgttctctaagttggcacccaatttttgtgtgtgtgcttccacagtctccaatttggaagatccatctgcacaatcaggcttcttcagtaacatgcagtcattgttgaaaaactcttccacatggtctgcatcttcaataggaggaagatcaaccttctcgttgtgaaggaaatgttcaaactgcaaaacatcatcctctgtagcaggaacaagtgttccatcaccttcaacctgaacatatttaaagcatttctcaaaagactcgagtaagcatctaagtttttatattaacatgtggccgacaaatcataaaattaactaagaacttacccgaactagctgataaaccacaggatcagaagtgcctttcttttcaaagtcattctcttcacttttattaaccatggtgccatgtgagtcatccatttccatagataagtcaaacttcatccaacatttgtgacaatcaa

SEQ ID NO: 56133 - DNA, 1624 bp, Zea Mays
cccttatccgcaaatgaaatgaagtccttcctagggcgcccccttctcatccttgaaacgtaaggaacgtgtacactaaatcctccaaaggtatcctttctagtaggatagattgtgcccagagaaccagtctcattgaaaggtgctactcgcgggttcattaacagttcatcatgtgcaggcctttttgctggtgaagaattttttacagttgagtcatgagtctcaatgtctgatagctcctctatgtatctttttgttggctttctagttcgcttgtcagtgcattgctcgcctagcagatttccttgtggttcatcattatggatcggcaccctcttggaagaatcttcctggtcctcgctctgatagtaagagctagatggagagtccccttcgtttcctggatatataaccacagaagtagctctaagcccagtcttagctctttcatccatgtctgacatatcatttttggcatccttgccaacaattttgtagtctttaactacacaacctgaacttggaacatcgtaggaattagtcaagcccattgtaatccgtcttttgagccatatcttgtctttgacattagtctgccggccaaacgtggctctaaacgcctcctgaagttctctaatagtaagatcatccaaacagacttctcctcttaatatggaaaaatcaggcatggaactattaactcccgaaacagatggatctgtagatgtgtcgcatacagatcttgagcaggcatcagccttatatttttcagcacagcaagagtcatttaacactgtcgattttgtagtctcagttgaagcattgtcctgtcgagtgacgtttgccccttgttctgtaagcaatttatctgaatgctgactatgaattctaaagtctgagggaggactaagggaatcatccaatgactgtaatatgttttcctgtgcaattatgtggatcttcttaaagttgagttgacttgaatatgtacaaaagtagtttcagttaaatttaacataatatatagaaaaaattattcaagcggggcaaattgaactcaaaattctacaaaaaaacactatctagtagcaatgtagcacaaacatattatggcagataagataattacgccgaacaagagacaaacaacatacctctaagttggcacccaatttttgtgtgtgtgcttccacagtctccaatttggaagatccatctgcacaatcaggcttcttcagtaacatgcagtcattgttgaaaaactcttccacatggtctgcatcttcaataggaggaagatcaaccttctcgttgtgaaggaaatgttcaaactgcaaaacatcatcctctgtagcaggaacaagtgttccatcaccttcaacctgaacatatttaaagcatttctcaaaagactcgagtaagcatctaagtttttatattaacatgtggccgacaaatcataaaattaactaagaacttacccgaactagctgataaaccacaggatcagaagtgcctttcttttcaaagtcattctcttcacttttattaaccatggtgccatgtgagtcatccatttccatagataagtcaaacttcatccaacatttgtgacaatcaa

SEQ ID NO: 56134 - DNA, 2500 bp, Zea Mays
cagattcacatggttgaagggggcccgaacgccgcgcttcggagtccgtcttcctctcggcctgcgcagaatcgcaggagacgggtaaaatcccgctgattcgctcggtcctcgcccgtcggctcgctcgaggcaccggctccgacactgcttggcgatttcccccgtgcgacccccggcgatctgagcgcgtgactccgctgcccgccgccgggctccttctccgcgccagcggtcgtcccccctcctcccgcggcagccgtcccctccccgagggtcgacggccgtgccctcctcgagagctctgccgccgttgaaaccacgggctcgtggtaacttgttgtcgtcggagggatccccgatggccgcggaggcagatcagaaagtcgtggtgcacgtgcggtcaacgggcgatgcgccgatcctgaagcaatccaaattcaagatttcaggacgagataagtttctgaaggtcatagagtttcttcgtcgacaactgcatcaggatacactgtttgtctatatcaacagtgcattttcgccaaacccagatgaactggtaatagacttgtataatgtaagattctaacttatatgtacttccaagctctttacctgaggaaaggatatccatacattttttttgaaaggttatctccgtatctatctgtaccactttgttacaacttgcagcatcaaaacttgagtttctttcagtaatttgtttccatttattttcttcacttctatacacaaaatctggggataaaaaaatcggggcctttgtctgatgaagcaaggtttcatccaaaaaaaaatcatagagcatctcccgcttgcaatctgttcactcatgatttaatgattctcataggttttcatctagaaaggtgagccctgacattgtttattctaccattcctgcctgttagattgatgtctattacatctacttagggggtgtttgggaacaaagtttttctgcagtattgaagcaatactgtagtattgagcaatactgtggtattatatactttgaggtgtttggcaactcatctgaaatctctgtatactaaaatgtagtattgtaaatactgcacttgttttgcagttttggaaactttggtctcagccaaagttttttttctgtaaagagagcgccagctgggtcccgctctggctgattggtctcaaccaaagttttttccaaacatcttgatgtattggatactgttgtattcgaaaactgaagcattataaactgtagtaatgtcatgactaaagtatactttagtatttgaaaaactgcattttgaaaaaactgtgttcccaaacagggccttaatatgatttcttggtttcttatactccctccctccatcccaaaacaattgcacatctttgcttcccaagaaggcaattcttttgtttaaaaaaatctgactagatatatagaaaatagtatcaatattttcattgctgagcaattttattatggaagtatattccatgatcaatctagtgatacctaatatacgctataaatattagtacttctttgtatatatttagtcattttaaaaaaagagacttaattccttaaaatgagttgtagactatagagcaagtttcatatggaaataatggccaccctttttttaaagggtatggccacctaaagtgctggcctggattacatttgctacgtccggattcattcagtttgtatggcatacagtcaaagaaggcggctaaccatcttcttacattacactgcagaactttggaattgatgggaagctagtggtaaattatgctttatcggcagcatggggctaagtctgtcttgcagcaaaatgggaaaaaagtactaccattccgcatgacgattgtaaatcacatctagttttagtactaaatcagacactgcaaatatcctatagagcttatgcatagttcaacactcaacctactttgtggttaatattatttttttagtttgatgtgattggacattcctatttgctccaacagtgcacatgaatcaaccagtgctggagaaaacgtcgtcttttgagccaaagcaatttataaagcacaagccgaaacgagaaagctgtttgcctctatttacaagggaattgcggattccattctgtaatgcatcgcaaatactagtttagttcattattgctgcaacaactttcctgtaatgcaccgcaaatactccgtttactctaactttcctcttcctgtctagatttgcatttgctttttaaattgtgtacgcctgacacgtttggaaaacatggcgacagacgtctgcccttatctaagtataacaatattttctggacgtcctgagttacacatgttccagcgtgtagagaacattgtgatggataacgtggttacacctacttcaaataatatttactcatatataccacatcgtccagaagcgtacacgtatatctgcattacacggatcacaaaaaac

SEQ ID NO: 56135 - DNA, 1167 bp, Zea Mays
cagattcacatggttgaagggggcccgaacgccgcgcttcggagtccgtcttcctctcggcctgcgcagaatcgcaggagacgggtaaaatcccgctgattcgctcggtcctcgcccgtcggctcgctcgaggcaccggctccgacactgcttggcgatttcccccgtgcgacccccggcgatctgagcgcgtgactccgctgcccgccgccgggctccttctccgcgccagcggtcgtcccccctcctcccgcggcagccgtcccctccccgagggtcgacggccgtgccctcctcgagggtctaggtaaacttttcgatctattgcgatcccagagctctgccgccgttgaaaccacgggctcgtggtaacttgttgtcgtcggagggatccccgatggccgcggaggcagatcagaaagtcgtggtgcacgtgcggtcaacgggcgatgcgccgatcctgaagcaatccaaattcaagatttcaggacgagataagtttctgaaggtcatagagtttcttcgtcgacaactgcatcaggatacactgtttgtctatatcaacagtgcattttcgccaaacccagatgaactggtaatagacttgtataataactttggaattgatgggaagctagtggtaaattatgctttatcggcagcatggggctaagtctgtcttgcagcaaaatgggaaaaaatgcacatgaatcaaccagtgctggagaaaacgtcgtcttttgagccaaagcaatttataaagcacaagccgaaacgagaaagctgtttgcctctatttacaagggaattgcggattccattctgtaatgcatcgcaaatactagtttagttcattattgctgcaacaactttcctgtaatgcaccgcaaatactccgtttactctaactttcctcttcctgtctagatttgcatttgctttttaaattgtgtacgcctgacacgtttggaaaacatggcgacagacgtctgcccttatctaagtataacaatattttctggacgtcctgagttacacatgttccagcgtgtagagaacattgtgatggataacgtggttacacctacttcaaataatatttactcatatataccacatcgtccagaagcgtacacgtatatctgcattacacggatcacaaaaaac

SEQ ID NO: 56136 - DNA, 1316 bp, Zea Mays
cagattcacatggttgaagggggcccgaacgccgcgcttcggagtccgtcttcctctcggcctgcgcagaatcgcaggagacgggtaaaatcccgctgattcgctcggtcctcgcccgtcggctcgctcgaggcaccggctccgacactgcttggcgatttcccccgtgcgacccccggcgatctgagcgcgtgactccgctgcccgccgccgggctccttctccgcgccagcggtcgtcccccctcctcccgcggcagccgtcccctccccgagggtcgacggccgtgccctcctcgagggtctaggtaaacttttcgatctattgcgatcccagagctctgccgccgttgaaaccacgggctcgtggtaacttgttgtcgtcggagggatccccgatggccgcggaggcagatcagaaagtcgtggtgcacgtgcggtcaacgggcgatgcgccgatcctgaagcaatccaaattcaagatttcaggacgagataagtttctgaaggtcatagagtttcttcgtcgacaactgcatcaggatacactgtttgtctatatcaacagtgcattttcgccaaacccagatgaactgaactttggaattgatgggaagctagtggtaaattatgctttatcggcagcatggggctaagtctgtcttgcagcaaaatgggaaaaaagtactaccattccgcatgacgattgtaaatcacatctagttttagtactaaatcagacactgcaaatatcctatagagcttatgcatagttcaacactcaacctactttgtggttaatattatttttttagtttgatgtgattggacattcctatttgctccaacagtgcacatgaatcaaccagtgctggagaaaacgtcgtcttttgagccaaagcaatttataaagcacaagccgaaacgagaaagctgtttgcctctatttacaagggaattgcggattccattctgtaatgcatcgcaaatactagtttagttcattattgctgcaacaactttcctgtaatgcaccgcaaatactccgtttactctaactttcctcttcctgtctagatttgcatttgctttttaaattgtgtacgcctgacacgtttggaaaacatggcgacagacgtctgcccttatctaagtataacaatattttctggacgtcctgagttacacatgttccagcgtgtagagaacattgtgatggataacgtggttacacctacttcaaataatatttactcatatataccacatcgtccagaagcgtacacgtatatctgcattacacggatcacaaaaaac

SEQ ID NO: 56137 - DNA, 1727 bp, Zea Mays
cagattcacatggttgaagggggcccgaacgccgcgcttcggagtccgtcttcctctcggcctgcgcagaatcgcaggagacgggtaaaatcccgctgattcgctcggtcctcgcccgtcggctcgctcgaggcaccggctccgacactgcttggcgatttcccccgtgcgacccccggcgatctgagcgcgtgactccgctgcccgccgccgggctccttctccgcgccagcggtcgtcccccctcctcccgcggcagccgtcccctccccgagggtcgacggccgtgccctcctcgagggtctaggtaaacttttcgatctattgcgatcccagagctctgccgccgttgaaaccacgggctcgtggtaacttgttgtcgtcggagggatccccgatggccgcggaggcagatcagaaagtcgtggtgcacgtgcggtcaacgggcgatgcgccgatcctgaagcaatccaaattcaagatttcaggacgagataagtttctgaaggtcatagagtttcttcgtcgacaactgcatcaggatacactggtagcaacataattgttggttctgagaatttaatctgtgacattggaattttactgagttgttgtctgtgttgccaacagtttgtctatatcaacagtgcattttcgccaaacccagatgaactggtaatagacttgtataatgtaagattctaacttatatgtacttccaagctctttacctgaggaaaggatatccatacattttttttgaaaggttatctccgtatctatctgtaccactttgttacaacttgcagcatcaaaacttgagtttctttcagtaatttgtttccatttattttcttcacttctatacacaaaatctggggataaaaaaatcggggcctttgtctgatgaagcaaggtttcatccaaaaaaaaatcatagagcatctcccgcttgcaatctgttcactcatgatttaatgattctcataggttttcatctagaaagaactttggaattgatgggaagctagtggtaaattatgctttatcggcagcatggggctaagtctgtcttgcagcaaaatgggaaaaaagtactaccattccgcatgacgattgtaaatcacatctagttttagtactaaatcagacactgcaaatatcctatagagcttatgcatagttcaacactcaacctactttgtggttaatattatttttttagtttgatgtgattggacattcctatttgctccaacagtgcacatgaatcaaccagtgctggagaaaacgtcgtcttttgagccaaagcaatttataaagcacaagccgaaacgagaaagctgtttgcctctatttacaagggaattgcggattccattctgtaatgcatcgcaaatactagtttagttcattattgctgcaacaactttcctgtaatgcaccgcaaatactccgtttactctaactttcctcttcctgtctagatttgcatttgctttttaaattgtgtacgcctgacacgtttggaaaacatggcgacagacgtctgcccttatctaagtataacaatattttctggacgtcctgagttacacatgttccagcgtgtagagaacattgtgatggataacgtggttacacctacttcaaataatatttactcatatataccacatcgtccagaagcgtacacgtatatctgcattacacggatcacaaaaaac

SEQ ID NO: 56138 - DNA, 1298 bp, Zea Mays
cagattcacatggttgaagggggcccgaacgccgcgcttcggagtccgtcttcctctcggcctgcgcagaatcgcaggagacgggtaaaatcccgctgattcgctcggtcctcgcccgtcggctcgctcgaggcaccggctccgacactgcttggcgatttcccccgtgcgacccccggcgatctgagcgcgtgactccgctgcccgccgccgggctccttctccgcgccagcggtcgtcccccctcctcccgcggcagccgtcccctccccgagggtcgacggccgtgccctcctcgagagctctgccgccgttgaaaccacgggctcgtggtaacttgttgtcgtcggagggatccccgatggccgcggaggcagatcagaaagtcgtggtgcacgtgcggtcaacgggcgatgcgccgatcctgaagcaatccaaattcaagatttcaggacgagataagtttctgaaggtcatagagtttcttcgtcgacaactgcatcaggatacactgtttgtctatatcaacagtgcattttcgccaaacccagatgaactggtaatagacttgtataataactttggaattgatgggaagctagtggtaaattatgctttatcggcagcatggggctaagtctgtcttgcagcaaaatgggaaaaaagtactaccattccgcatgacgattgtaaatcacatctagttttagtactaaatcagacactgcaaatatcctatagagcttatgcatagttcaacactcaacctactttgtggttaatattatttttttagtttgatgtgattggacattcctatttgctccaacagtgcacatgaatcaaccagtgctggagaaaacgtcgtcttttgagccaaagcaatttataaagcacaagccgaaacgagaaagctgtttgcctctatttacaagggaattgcggattccattctgtaatgcatcgcaaatactagtttagttcattattgctgcaacaactttcctgtaatgcaccgcaaatactccgtttactctaactttcctcttcctgtctagatttgcatttgctttttaaattgtgtacgcctgacacgtttggaaaacatggcgacagacgtctgcccttatctaagtataacaatattttctggacgtcctgagttacacatgttccagcgtgtagagaacattgtgatggataacgtggttacacctacttcaaataatatttactcatatataccacatcgtccagaagcgtacacgtatatctgcattacacggatcacaaaaaac

SEQ ID NO: 56139 - DNA, 1706 bp, Zea Mays
ctcactcctgtcctctcctctcgaccagctgacctcgctgacggagcacacagccacgccgcagcgccgcgtgggtgtctgtctatagccttgtaggtcgttcgcaggtaggtaaccgtaacctagctagctcgtcgggatgatgatgatgagcggtcgagcggccaccgcggggcggtacccgttcacggcgtcgcagtggcaggagctggagcaccaggcgctcatctacaagtgcctggcgtccggcaagcccatcccgtcctacctcatgccaccgctccgccgcatcctcgactccgccctcgccacgtcgccgtcgctcgccgccttcccgccgcaaccctcgctggggtgggggggctgcttcgggatgggcttcagcaggaagcccgccgacgaggacccggagcccgggcggtgccggcgcacggacggcaagaaggcgctgctccaaggaggcgtacccggactccaagtactgcgagaagcacatgcaccggggcaagaaccgttcaagaaagcctgtggaaatgtccttggccacgccggcgccggcctcctccgccacaagcgccgccgccgccgccacctcctcgtcccaggcgccgtcctaccacagcccggcccccgccgtgccgtaccacgcgccctacggcgccgcgtaccatcacacgcagacgcaggtgacgatgagccccttccacctcctccacctcgagaccacccacccgcacccgccgccgccgccgccgccgccctactactacgcggaccagagggactacgcctacggcaaggaggtcggcgagcgcgccttcttctccgacggcgcgggcgagagggaccggcagcagcaggccgcggggcagtggcagttcaagcagctcgggacgatggaggcgacgaagcagccgtgcaccacgccgctgctcgtccccgccgccgggtacggccacggcgcggcgtcgccgtacggcgtcggtcaggccaaggaagacgaggaggaggaggaaacgcggcggcagcagcagcactgcttcgttcttggcgccgacctgcggctggcggagcggccgtcgggggcacatgacgccgccgcgcagaagccgctccggcatttcatcgacgagtggccgcacgagaaggggagcaataaggcggggtcgtggatgggggggctcgacggcgagacgacgcagctctccatgtctatcccgatggcggccgctgccgacctccccgtcacctcccgctaccgtacgtgatggcggcgcgcactatgagtgattgccagcaagaaatgttttgtggttgctgcgacctcgaggtggcgaggccacatgaaaaaaaaatactggagctggaacacgagtggttctttcctgtgccgttttgctcagggccggtcggcacggtttgaagaagttgggaagagaagtaaaataaacctccttgggagtgttacgtttcctgtaattgcttgcttcctttgctgtacctgtgagacgacgcttagtgctagaagtgagggcctttcctgatctcagctctggtctggatttgccttttcccgctgtcggattcctctgcctgtctgtgatggtttgtctgtgatggtttgtgctcagagcctgcagcgaatactaaaccgcagtaattaatcaccatgcttcacccgacaatacggccattacggggtagct

SEQ ID NO: 56140 - DNA, 1400 bp, Zea Mays
ccattttcccgtcggaaacaaccctggccttaggaggccaggcgattctccgccgcctcgtctcgtcttcgctatgcaccacgtccacgagcgcctccgccgctccaacgctccaacgcttgagcgcctccaacgccactccaacgccacgagcgcctccgccgctccaccgaacaactccaacgccactccagctcttgcagcagtagaactctattgcagccaggtacatttgattctggtttctgccgcacaagatccgctacctcttggacccggacatctacaccgacggcaggatctccgtgcagggcatcgacgccgtgctcttcgcgccggacgacgccaaggccacgcagaccgtcgacccgaacaggaagcctcctaccatcgtcacccacaagaagaagatcaagctccggcgagattggggaggtcattacatcaaaaaaagattggggaggtgtgtagattaatttcacaactgatcgctagcatcaatcaatgccagttcatctattgctcaacctcagtattggccaacgtgaaaacatggaggtgaagtgaagcaagtggtagttgagcatatgctggtggttggttgtcttcatgaacatctctttgatggctgataccattcctgggactgcaagccaacactgtcctttaacccatgacccatgagcaacaatttcttcttaacaacagagcatgatgttagagaaatttggcttcaagcgcaaaattaggttgcttcgtgggagtgatgcatggcctgaacaaatgatatgagcaaatttgacaactgcagttctgttatggtgaatggtgattgtagttcagtttcagctctaacctatgaaaaattgaatggcagttgcactaatctgttggtggaatgattttcccagtaatttcctggacaagcagatcactgagaaccatctaccttatgagaaatgatgccttgtatggttcagtatagttcttgtattgctggtttaaattaattcttgtatggcagttgcactaaactgaatggcagttgcactttgagatattcttctattgttggtttaaaaccatggtgactttcttgtatgcattctgtatgcattcttgtttaaaacctggttgcttatgtatgcattcttgtatgccgtgtatgcatggtgactgttcttgtatgcgtttgtgtatgcaatctgccccaaactgaatgacatacagaaaaatgtcaccagtatgcgttcatgtatgcattcagttttgtactaaactggatggcagttgctccttccaaacgaccaccggttaaattatcctatccgggttttttacccactgaaaaatgaatgtaggataaaacccaccgctgaagttttctcctgtgctaaaat

SEQ ID NO: 56141 - DNA, 1315 bp, Zea Mays
ccattttcccgtcggaaacaaccctggccttaggaggccaggcgattctccgccgcctcgtctcgtcttcgctatgcaccacgtccacgagcgcctccgccgctccaacgctccaacgcttgagcgcctccaacgccactccaacgccacgagcgcctccgccgctccaccgaacaactccaacgccactccagctcttgcagcagtagaactctattgcagccaggtacatttgattctggtttctgccgcacaagatccgctacctcttggacccggacatctacaccgacggcaggatctccgtgcagggcatcgacgccgtgctcttcgcgccggacgacgccaaggccacgcagaccgtcgacccgaacaggaagcctcctaccatcgtcacccacaagaagaagatcaagctccggcgagttcatctattgctcaacctcagtattggccaacgtgaaaacatggaggtgaagtgaagcaagtggtagttgagcatatgctggtggttggttgtcttcatgaacatctctttgatggctgataccattcctgggactgcaagccaacactgtcctttaacccatgacccatgagcaacaatttcttcttaacaacagagcatgatgttagagaaatttggcttcaagcgcaaaattaggttgcttcgtgggagtgatgcatggcctgaacaaatgatatgagcaaatttgacaactgcagttctgttatggtgaatggtgattgtagttcagtttcagctctaacctatgaaaaattgaatggcagttgcactaatctgttggtggaatgattttcccagtaatttcctggacaagcagatcactgagaaccatctaccttatgagaaatgatgccttgtatggttcagtatagttcttgtattgctggtttaaattaattcttgtatggcagttgcactaaactgaatggcagttgcactttgagatattcttctattgttggtttaaaaccatggtgactttcttgtatgcattctgtatgcattcttgtttaaaacctggttgcttatgtatgcattcttgtatgccgtgtatgcatggtgactgttcttgtatgcgtttgtgtatgcaatctgccccaaactgaatgacatacagaaaaatgtcaccagtatgcgttcatgtatgcattcagttttgtactaaactggatggcagttgctccttccaaacgaccaccggttaaattatcctatccgggttttttacccactgaaaaatgaatgtaggataaaacccaccgctgaagttttctcctgtgctaaaat

SEQ ID NO: 56142 - DNA, 1253 bp, Zea Mays
cacattgcgcgggtccacacttgttttatatgattctccaaaaccaacccccacggccgcattgaccaatctgctccgggcaccatggagaggatcagtggcccgcgcctcgctgtcctgctcgctctcgccgtcttcaccgccgtcgccgcagcggccacggacgaggtgcgcgcgcagtccacctacatcatccacctcgccccaggccacccggcgctgtccgcagcgcgcgtcaacggcggcgacgaggcggccctccgccgcctcctcccgcgccgcctgcgcgcgccgaggccgcgcgtgctctactcctaccagcacgctgccacgggcatcgccgcgcggctcacgccccagcaggcggcgcacgccgcggccggggagggcgtcctggccgtgtaccccgaccaggcgcggcagctgcacaccacccacaccccggcgttcctccgcctaacggaggccgccgggctcctcccggctgcgacggggggcgcgtcgtcgtctgccgtcgtcggcgtgctcgacaccgggctctaccccatcggccggtcctcgttcgcggcagcagatgggctcggcccggcgcccgcgtccttctctggtggatgcgtctctgctggctccttcaacgcgtccgcctactgcaacagcaagctcatcggtgccaagttcttctaccaggggtacgaagctgctctcggccaccccatcgatgagaccaaggagtcgaagtcgccgctggacactgagggccatggcacgcacaccgcctccacggcggctggctcgccggtggccggagccgggttcttcgactacgccgaggggcaggccgtgggcatggaccccggcgcgcgcatcgcggcgtacaagatctgctggacatccggatgctacgactccgatatcctcgccgccatggacgaggccgtcgctgacggcgtcgacgtcatctcgctctccgtcggcgccaacggtgctggaaatatggaccggactttttgtcagcacgagaacggcctaaaaacatgagcctaaagcatggctcaacacgaaataatatgggtcaggctagcaaggtccgaagacatgcttggttggtctcaaatcctgatctgtgggacctcagcacgatctgcacgcatgggccaagcttaggtcggcatagtccaatgaagcacatattatttaatttctttaatttagtaagttatgaattttatgtggttgtaatatttagattcttt

SEQ ID NO: 56143 - DNA, 2734 bp, Zea Mays
cacattgcgcgggtccacacttgttttatatgattctccaaaaccaacccccacggccgcattgaccaatctgctccgggcaccatggagaggatcagtggcccgcgcctcgctgtcctgctcgctctcgccgtcttcaccgccgtcgccgcagcggccacggacgaggtgcgcgcgcagtccacctacatcatccacctcgccccaggccacccggcgctgtccgcagcgcgcgtcaacggcggcgacgaggcggccctccgccgcctcctcccgcgccgcctgcgcgcgccgaggccgcgcgtgctctactcctaccagcacgctgccacgggcatcgccgcgcggctcacgccccagcaggcggcgcacgccgcggccggggagggcgtcctggccgtgtaccccgaccaggcgcggcagctgcacaccacccacaccccggcgttcctccgcctaacggaggccgccgggctcctcccggctgcgacggggggcgcgtcgtcgtctgccgtcgtcggcgtgctcgacaccgggctctaccccatcggccggtcctcgttcgcggcagcagatgggctcggcccggcgcccgcgtccttctctggggtacgaagctgctctcggccaccccatcgatgagaccaaggagtcgaagtcgccgctggacactgagggccatggcacgcacaccgcctccacggcggctggctcgccggtggccggagccgggttcttcgactacgccgaggggcaggccgtgggcatggaccccggcgcgcgcatcgcggcgtacaagatctgctggacatccggatgctacgactccgatatcctcgccgccatggacgaggccgtcgctgacggcgtcgacgtcatctcgctctccgtcggcgccaacgggtacgcccccagcttcttcaccgattccatcgccatcggcgctttccacgcggtaagcaagggcatcgtggtctcctgctccgccggcaactccggccccggcgagtacaccgccgtcaacattgcgccgtggatcctgaccgtcggcgcgtccaccatcgaccgcgagttccccgccgatgtagttctcggcgacggccgcgtctttggtggcgtctctctgtatgccggtgaccccctggactcgactcagttgcctctggtgttcgccggggactgtggttcccctctgtgcctaatgggcgagctcgactcgaagaaggtggccggcaagatggtgctctgtctgcgtggtaacaacgctcgtgtcgagaaaggagcagcggtcaagctcgccggtggggtcggaatgatcctcgccaacaccgaggagagcggcgaggagctcatcgccgactcccacctcgtgccggcgactatggtcgggcagaagttcggcgacaagatcaggtactacgtccagacggacccgtcgccaacggcgaccatcgtgttccgcggcacagtcatcggcaagtcgcggtccgcgcctcgagtggcggcgttctcgagccgaggccccaactaccgcgcaccggagatcctcaagcccgacgtcatcgccccgggcgtcaacatactcgcggcgtggaccggcgccgcctcccccaccgacctggacatcgactcgaggcgcgtggaattcaacatcatctccggcacgtccatgtcctgcccgcacgtgagcggcctcgccgcgctgctccgccaggcgcacccggagtggagccccgcggcgatcaagtcggcgctcatgaccacggcgtacaacctggacaactccggggaaaccatcaaggacctcgcgacgggcgtggagtcgacgccgttcgtccgtggcgccggtcacgtcgaccccaacgccgccctcgacccagggctggtgacgcatcggtcgccgactgctcgacgaaattcgctcgccccggcgaccttaactaccctgccttcgccgccgtcttctcctcctaccaagactcggtcacctaccgccgggtggtgcgcaacgtcggcagcaactccagcgcggtgtaccagccgacgatcgccagcccgtacggcgtggatgtcacggtgaccccgagcaagctcgcgttcgacgggaagcagcagagcctgggatacgaaatcaccatcgcagtgtcaggcaacccggtgatcgtggattccagctactcgttcggatccatcacctggagcgacggcgcgcacgacgtcacgagccccattgccgtgacctggccgtccaacggtggagcagcagccatgtagtagactgatgctgttgctactgtctaccgctgtgggaagaaggacagggccatgagcccatgagatccgaaatctccacgcctcctgcctgccataggaataatttcctcgactgaaccacgcaataattcagctgcccctatcgtggttgtggtggaccaatggaccatgcttgcagctctctcttttcatttaggggtaggttggttggagcagcgtatgtgattggctgcttgcaaggccgtgagggtgccatccattatggctcattggcgattggacgtgtatgaacaagtttgtaatgactagaaataatcattgtaccatgttttttctatgctggcgcgtttatagcaccatgctttgtgtatgtcacttgtgtacgcatactaaagagaaaagcatggatatggaacacctgagggcttgttcggttattcccaatacacatggattggat

SEQ ID NO: 56144 - DNA, 1055 bp, Zea Mays
gctatttttagatgagttgatcagctgggataagggtggcggccttgctgacaagaaaagcatctctgagacgctaagagatgcatgccgaaaaagattgttggatgctcttggacaagcaaagttgcgactcgggaatattccgtgcggagacgaggcttctgctacacaccttgaaacagagtgcttcaaaaaatatgtgaaggcgggcaagacgttctacaactcacagatagccgccacagttcggtggctgtcatctgcaacactcagtcagatgcgtgaccgcctcgacactctttatcgaccgaaccaaagatgatggtgcgtcaggctgccccgacattgtcccagagtcacctccagcatctcctgaaatcgtcgtcggcgcaaggtcaggagaaaccagtaacgacaaaccgcagcatatttgtgagttgaagagttcagatgagtctgcaaagggtgctgcatcatcgactgggaacatggtgctccccgccataccgacgttcagagaattcttgagccaaaaaggaagggatcgggcgaagtgctattcaaattctaatgcgacgaaccagccatctggtattcgtaggaagtttagtggtcaccttgataaggaagaagccagcaagaggatgaaatcatgaatatctgtcgggcaacttgattttttttctgccttttcgttgtcactaatcaaacattgcaaatctacgttgtagtgaaacgttcctgaatcagaatctccatgatgattttcttattatatctagtttgtacagtgaaaaggggtgttctacgcttctcgtgcaacatgaaggatctgcctcccaatccctatccaccctctataggttagtcatctcatgtggacacagccagaagggaagcggtaaacttaagcaagtatatacacatgtcggacctataacaccctatttgatcagctcttacaacggtcaactacacctgacgcaccctatttgatccgaggaatccttctcaagctccgcgatcagctgctcaatgtttcttctgtatatagg

SEQ ID NO: 56145 - DNA, 1714 bp, Zea Mays
ctgcttcgatatggcctttggctattggtttgtggatactgctccacaggatgggtattgatagacaagatgtccgtattgtttgccacttcaacttgcctaagtcaatggaatccttctaccaggagtcaggtcgagctggtcgtgatcaacgaccttcaaggagtgttttgtattacggattagatgaccggaggagaatggaattcattttgagaaaccccaaaactaagaaatcacagccgtcttcctcttcaaatgagctttctgagaaggctctagctgacttcagtcagattattgactactgtgaaatttctagctgccggcggaaaaagatcattgagagctttggagagaaagtacaaccaactttatgccaacgctcatgcgatgcttgcaaacacccaaatttagtgttgtctcgtctggaggaactccgtcgtgtgcccaactgtcgctttaataagatctctccagtgtttcaaagctcagttaaagaagcacacttggacacagaattctggaatcgtgaagatgaggcgagcttatcagctgaagacatatctgattctgatgatgggaatgaggtagtgagtaatatagccatttcaaaggttccggcaaaagctggtctggatgcaaaatttaaagcactggagcgtgctgaaaatgcttattaccaaggcaaagggtggcggccttgctgacaagaaaagcatctctgagacgctaagagatgcatgccgaaaaagattgttggatgctcttggacaagcaaagttgcgactcgggaatattccgtgcggagacgaggcttctgctacacaccttgaaacagagtgcttcaaaaaatatgtgaaggcgggcaagacgttctacaactcacagatagccgccacagttcggtggctgtcatctgcaacactcagtcagatgcgtgaccgcctcgacactctttatcgaccgaaccaaagatgatggtgcgtcaggctgccccgacattgtcccagagtcacctccagcatctcctgaaatcgtcgtcggcgcaaggtcaggagaaaccagtaacgacaaaccgcagcatatttgtgagttgaagagttcagatgagtctgcaaagggtgctgcatcatcgactgggaacatggtgctccccgccataccgacgttcagagaattcttgagccaaaaaggaagggatcgggcgaagtgctattcaaattctaatgcgacgaaccagccatctggtattcgtaggaagtttagtggtcaccttgataaggaagaagccagcaagaggatgaaatcatgaatatctgtcgggcaacttgattttttttctgccttttcgttgtcactaatcaaacattgcaaatctacgttgtagtgaaacgttcctgaatcagaatctccatgatgattttcttattatatctagtttgtacagtgaaaaggggtgttctacgcttctcgtgcaacatgaaggatctgcctcccaatccctatccaccctctataggttagtcatctcatgtggacacagccagaagggaagcggtaaacttaagcaagtatatacacatgtcggacctataacaccctatttgatcagctcttacaacggtcaactacacctgacgcaccctatttgatccgaggaatccttctcaagctccgcgatcagctgctcaatgtttcttctgtatatagg

SEQ ID NO: 56146 - DNA, 1799 bp, Zea Mays
gctgattccttgttcacaagtttcaattcttagaactaatgttttttctccatatttcatgtatatttctgcttcgatatggcctttggctattggtttgtggatactgctccacaggatgggtattgatagacaagatgtccgtattgtttgccacttcaacttgcctaagtcaatggaatccttctaccaggagtcaggtcgagctggtcgtgatcaacgaccttcaaggagtgttttgtattacggattagatgaccggaggagaatggaattcattttgagaaaccccaaaactaagaaatcacagccgtcttcctcttcaaatgagctttctgagaaggctctagctgacttcagtcagattattgactactgtgaaatttctagctgccggcggaaaaagatcattgagagctttggagagaaagtacaaccaactttatgccaacgctcatgcgatgcttgcaaacacccaaatttagtgttgtctcgtctggaggaactccgtcgtgtgcccaactgtcgctttaataagatctctccagtgtttcaaagctcagttaaagaagcacacttggacacagaattctggaatcgtgaagatgaggcgagcttatcagctgaagacatatctgattctgatgatgggaatgaggtagtgagtaatatagccatttcaaaggttccggcaaaagctggtctggatgcaaaatttaaagcactggagcgtgctgaaaatgcttattaccaaggcaaaggtcaggcgaagcagcagggtggcggccttgctgacaagaaaagcatctctgagacgctaagagatgcatgccgaaaaagattgttggatgctcttggacaagcaaagttgcgactcgggaatattccgtgcggagacgaggcttctgctacacaccttgaaacagagtgcttcaaaaaatatgtgaaggcgggcaagacgttctacaactcacagatagccgccacagttcggtggctgtcatctgcaacactcagtcagatgcgtgaccgcctcgacactctttatcgaccgaaccaaagatgatggtgcgtcaggctgccccgacattgtcccagagtcacctccagcatctcctgaaatcgtcgtcggcgcaaggtcaggagaaaccagtaacgacaaaccgcagcatatttgtgagttgaagagttcagatgagtctgcaaagggtgctgcatcatcgactgggaacatggtgctccccgccataccgacgttcagagaattcttgagccaaaaaggaagggatcgggcgaagtgctattcaaattctaatgcgacgaaccagccatctggtattcgtaggaagtttagtggtcaccttgataaggaagaagccagcaagaggatgaaatcatgaatatctgtcgggcaacttgattttttttctgccttttcgttgtcactaatcaaacattgcaaatctacgttgtagtgaaacgttcctgaatcagaatctccatgatgattttcttattatatctagtttgtacagtgaaaaggggtgttctacgcttctcgtgcaacatgaaggatctgcctcccaatccctatccaccctctataggttagtcatctcatgtggacacagccagaagggaagcggtaaacttaagcaagtatatacacatgtcggacctataacaccctatttgatcagctcttacaacggtcaactacacctgacgcaccctatttgatccgaggaatccttctcaagctccgcgatcagctgctcaatgtttcttctgtatatagg

SEQ ID NO: 56147 - DNA, 2737 bp, Zea Mays
ctccagggtccaggctctctcccgctcacggcagcgccgtccttcgacacccccctccccgctctagttctggcctgctgaggactggaggtccatccatccggactttgttgatttcttctgttggcattgtggtgttcagctcaaaatgaaaggagtgcttccgattaagggggcatcaggccgtgaaaagaaagcgcctaaggagctcgagagcgtcttgaaccgatatttcgggtattcgggatttcgaggaaaacaactcgaagctatagaagctgttctatcagggagagattgcttttgtttgatgccaactggtggtggaaagtccatgtgctatcagattccagctctggtgaaaacaggcattgttcttgtcatttcacccttgatagaatttacaggagaaccaggttgccagcttgaaaaataaaggggttccagctgaatttctctcttcaacacaggcatctcacactaaacaaaggatacatgaagaccttgatactggtaatccttctttaaagttgctatatgtgactcctgaacttgttgcaacatcaagctttatggcaaagctaaagaagctatacaacagaggtcttcttggtcttgttgcaattgatgaggctcactgtatttcaagttggggccacgatttcagacctagctaccgaaaactttcatcattgaggaagcagttcccagatatccctttgttagctttaactgcaactgctgtaccgaaggtccagaaagatgtggtatcatcattgtgcttgcaaaatccagtaattcttagagcttcatttaatcgacccaatatattctatgaagggtgtctcttgtgctggtatgctgattgaagtcataattagcacttaatgacttcaagttgtagcaagattgttgcattggaattcttctgatgtttctatgtgcatctccataatagcttatcatgctggcctaaatagtaaagtgcgaagttctgttctcgatgactggctttcatcgagaactcaagttgttgttgcaactgtagcatttgggtagggtattgatagacaagatgtccgtattgtttgccacttcaacttgcctaagtcaatggaatccttctaccaggagtcaggtcgagctggtcgtgatcaacgaccttcaaggagtgttttgtattacggattagatgaccggaggagaatggaattcattttgagaaaccccaaaactaagaaatcacagccgtcttcctcttcaaatgagctttctgagaaggctctagctgacttcagtcagattattgactactgtgaaatttctagctgccggcggaaaaagatcattgagagctttggagagaaagtacaaccaactttatgccaacgctcatgcgatgcttgcaaacacccaaatttagtgttgtctcgtctggaggaactccgtcgtgtgcccaactgtcgctttaataagatctctccagtgtttcaaagctcagttaaagaagcacacttggacacagaattctggaatcgtgaagatgaggcgagcttatcagctgaagacatatctgattctgatgatgggaatgaggtagtgagtaatatagccatttcaaaggttccggcaaaagctggtctggatgcaaaatttaaagcactggagcgtgctgaaaatgcttattaccaaggcaaaggtcaggcgaagcagcagggtggcggccttgctgacaagaaaagcatctctgagacgctaagagatgcatgccgaaaaagattgttggatgctcttggacaagcaaagttgcgactcgggaatattccgtgcggagacgaggcttctgctacacaccttgaaacagagtgcttcaaaaaatatgtgaaggcgggcaagacgttctacaactcacagatagccgccacagttcggtggctgtcatctgcaacactcagtcagatgcgtgaccgcctcgacactctttatcgaccgaaccaaagatgatggtgcgtcaggctgccccgacattgtcccagagtcacctccagcatctcctgaaatcgtcgtcggcgcaaggtcaggagaaaccagtaacgacaaaccgcagcatatttgtgagttgaagagttcagatgagtctgcaaagggtgctgcatcatcgactgggaacatggtgctccccgccataccgacgttcagagaattcttgagccaaaaaggaagggatcgggcgaagtgctattcaaattctaatgcgacgaaccagccatctggtattcgtaggaagtttagtggtcaccttgataaggaagaagccagcaagaggatgaaatcatgaatatctgtcgggcaacttgattttttttctgccttttcgttgtcactaatcaaacattgcaaatctacgttgtagtgaaacgttcctgaatcagaatctccatgatgattttcttattatatctagtttgtacagtgaaaaggggtgttctacgcttctcgtgcaacatgaaggatctgcctcccaatccctatccaccctctataggttagtcatctcatgtggacacagccagaagggaagcggtaaacttaagcaagtatatacacatgtcggacctataacaccctatttgatcagctcttacaacggtcaactacacctgacgcaccctatttgatccgaggaatccttctcaagctccgcgatcagctgctcaatgtttcttctgtatatagg

SEQ ID NO: 56148 - DNA, 2772 bp, Zea Mays
ctccagggtccaggctctctcccgctcacggcagcgccgtccttcgacacccccctccccgctctagttctggcctgctgaggactggaggtccatccatccggactttgttgatttcttctgttggcattgtggtgttcagctcaaaatgaaaggagtgcttccgattaagggggcatcaggccgtgaaaagaaagcgcctaaggagctcgagagcgtcttgaaccgatatttcgggtattcgggatttcgaggaaaacaactcgaagctatagaagctgttctatcagggagagattgcttttgtttgatgccaactggtggtggaaagtccatgtgctatcagattccagctctggtgaaaacaggcattgttcttgtcatttcacccttgatagaatttacaggagaaccaggttgccagcttgaaaaataaaggggttccagctgaatttctctcttcaacacaggcatctcacactaaacaaaggatacatgaagaccttgatactggtaatccttctttaaagttgctatatgtgactcctgaacttgttgcaacatcaagctttatggcaaagctaaagaagctatacaacagaggtcttcttggtcttgttgcaattgatgaggctcactgtatttcaagttggggccacgatttcagacctagctaccgaaaactttcatcattgaggaagcagttcccagatatccctttgttagctttaactgcaactgctgtaccgaaggtccagaaagatgtggtatcatcattgtgcttgcaaaatccagtaattcttagagcttcatttaatcgacccaatatattctatgaagttcgttacaaggatcttcttgatgatgtttactctgatatatcaaatttgctgaaatcaagcgggaatgtttgctcaattatatattgccttgaacgggcagcttgtgatgatctaagcatgcatttgtcacagcagggtgtctcttgtgctgcttatcatgctggcctaaatagtaaagtgcgaagttctgttctcgatgactggctttcatcgagaactcaagttgttgttgcaactgtagcatttgggtagggtattgatagacaagatgtccgtattgtttgccacttcaacttgcctaagtcaatggaatccttctaccaggagtcaggtcgagctggtcgtgatcaacgaccttcaaggagtgttttgtattacggattagatgaccggaggagaatggaattcattttgagaaaccccaaaactaagaaatcacagccgtcttcctcttcaaatgagctttctgagaaggctctagctgacttcagtcagattattgactactgtgaaatttctagctgccggcggaaaaagatcattgagagctttggagagaaagtacaaccaactttatgccaacgctcatgcgatgcttgcaaacacccaaatttagtgttgtctcgtctggaggaactccgtcgtgtgcccaactgtcgctttaataagatctctccagtgtttcaaagctcagttaaagaagcacacttggacacagaattctggaatcgtgaagatgaggcgagcttatcagctgaagacatatctgattctgatgatgggaatgaggtagtgagtaatatagccatttcaaaggttccggcaaaagctggtctggatgcaaaatttaaagcactggagcgtgctgaaaatgcttattaccaaggcaaaggtcaggcgaagcagcagggtggcggccttgctgacaagaaaagcatctctgagacgctaagagatgcatgccgaaaaagattgttggatgctcttggacaagcaaagttgcgactcgggaatattccgtgcggagacgaggcttctgctacacaccttgaaacagagtgcttcaaaaaatatgtgaaggcgggcaagacgttctacaactcacagatagccgccacagttcggtggctgtcatctgcaacactcagtcagatgcgtgaccgcctcgacactctttatcgaccgaaccaaagatgatggtgcgtcaggctgccccgacattgtcccagagtcacctccagcatctcctgaaatcgtcgtcggcgcaaggtcaggagaaaccagtaacgacaaaccgcagcatatttgtgagttgaagagttcagatgagtctgcaaagggtgctgcatcatcgactgggaacatggtgctccccgccataccgacgttcagagaattcttgagccaaaaaggaagggatcgggcgaagtgctattcaaattctaatgcgacgaaccagccatctggtattcgtaggaagtttagtggtcaccttgataaggaagaagccagcaagaggatgaaatcatgaatatctgtcgggcaacttgattttttttctgccttttcgttgtcactaatcaaacattgcaaatctacgttgtagtgaaacgttcctgaatcagaatctccatgatgattttcttattatatctagtttgtacagtgaaaaggggtgttctacgcttctcgtgcaacatgaaggatctgcctcccaatccctatccaccctctataggttagtcatctcatgtggacacagccagaagggaagcggtaaacttaagcaagtatatacacatgtcggacctataacaccctatttgatcagctcttacaacggtcaactacacctgacgcaccctatttgatccgaggaatccttctcaagctccgcgatcagctgctcaatgtttcttctgtatatagg

SEQ ID NO: 56149 - DNA, 3089 bp, Zea Mays
ctccagggtccaggctctctcccgctcacggcagcgccgtccttcgacacccccctccccgctctagttctggcctgctgaggactggaggtccatccatccggactttgttgatttcttctgttggtaatgaaacctaatctgctccgactctaagaggagtgagttccgagcaatcacaccgaaatcttccttcatcccctccattgatcccctcacaagtgctttaccttcccgagtggtggcgtcttaatctgatgcacccacgtatggttccgtctgatttcctcttagtcatttccccccctcctttcataacttattgatcagcgcgcgcaagatcgacctcggtcgatgccgtagggattgagacacaatgtgtgggttaggaagcttgttttccaagagatagggattcaactgaatctccacgccgcgctgcagcattgtggtgttcagctcaaaatgaaaggagtgcttccgattaagggggcatcaggccgtgaaaagaaagcgcctaaggagctcgagagcgtcttgaaccgatatttcgggtattcgggatttcgaggaaaacaactcgaagctatagaagctgttctatcagggagagattgcttttgtttgatgccaactggtggtggaaagtccatgtgctatcagattccagctctggtgaaaacaggcattgttcttgtcatttcacccttgatagaatttacaggagaaccaggttgccagcttgaaaaataaaggggttccagctgaatttctctcttcaacacaggcatctcacactaaacaaaggatacatgaagaccttgatactggtaatccttctttaaagttgctatatgtgactcctgaacttgttgcaacatcaagctttatggcaaagctaaagaagctatacaacagaggtcttcttggtcttgttgcaattgatgaggctcactgtatttcaagttggggccacgatttcagacctagctaccgaaaactttcatcattgaggaagcagttcccagatatccctttgttagctttaactgcaactgctgtaccgaaggtccagaaagatgtggtatcatcattgtgcttgcaaaatccagtaattcttagagcttcatttaatcgacccaatatattctatgaagttcgttacaaggatcttcttgatgatgtttactctgatatatcaaatttgctgaaatcaagcgggaatgtttgctcaattatatattgccttgaacgggcagcttgtgatgatctaagcatgcatttgtcacagcagggtgtctcttgtgctgcttatcatgctggcctaaatagtaaagtgcgaagttctgttctcgatgactggctttcatcgagaactcaagttgttgttgcaactgtagcatttgggtagggtattgatagacaagatgtccgtattgtttgccacttcaacttgcctaagtcaatggaatccttctaccaggagtcaggtcgagctggtcgtgatcaacgaccttcaaggagtgttttgtattacggattagatgaccggaggagaatggaattcattttgagaaaccccaaaactaagaaatcacagccgtcttcctcttcaaatgagctttctgagaaggctctagctgacttcagtcagattattgactactgtgaaatttctagctgccggcggaaaaagatcattgagagctttggagagaaagtacaaccaactttatgccaacgctcatgcgatgcttgcaaacacccaaatttagtgttgtctcgtctggaggaactccgtcgtgtgcccaactgtcgctttaataagatctctccagtgtttcaaagctcagttaaagaagcacacttggacacagaattctggaatcgtgaagatgaggcgagcttatcagctgaagacatatctgattctgatgatgggaatgaggtagtgagtaatatagccatttcaaaggttccggcaaaagctggtctggatgcaaaatttaaagcactggagcgtgctgaaaatgcttattaccaaggcaaaggtcaggcgaagcagcagggtggcggccttgctgacaagaaaagcatctctgagacgctaagagatgcatgccgaaaaagattgttggatgctcttggacaagcaaagttgcgactcgggaatattccgtgcggagacgaggcttctgctacacaccttgaaacagagtgcttcaaaaaatatgtgaaggcgggcaagacgttctacaactcacagatagccgccacagttcggtggctgtcatctgcaacactcagtcagatgcgtgaccgcctcgacactctttatcgaccgaaccaaagatgatggtgcgtcaggctgccccgacattgtcccagagtcacctccagcatctcctgaaatcgtcgtcggcgcaaggtcaggagaaaccagtaacgacaaaccgcagcatatttgtgagttgaagagttcagatgagtctgcaaagggtgctgcatcatcgactgggaacatggtgctccccgccataccgacgttcagagaattcttgagccaaaaaggaagggatcgggcgaagtgctattcaaattctaatgcgacgaaccagccatctggtattcgtaggaagtttagtggtcaccttgataaggaagaagccagcaagaggatgaaatcatgaatatctgtcgggcaacttgattttttttctgccttttcgttgtcactaatcaaacattgcaaatctacgttgtagtgaaacgttcctgaatcagaatctccatgatgattttcttattatatctagtttgtacagtgaaaaggggtgttctacgcttctcgtgcaacatgaaggatctgcctcccaatccctatccaccctctataggttagtcatctcatgtggacacagccagaagggaagcggtaaacttaagcaagtatatacacatgtcggacctataacaccctatttgatcagctcttacaacggtcaactacacctgacgcaccctatttgatccgaggaatccttctcaagctccgcgatcagctgctcaatgtttcttctgtatatagg

SEQ ID NO: 56150 - DNA, 3073 bp, Zea Mays
ctccagggtccaggctctctcccgctcacggcagcgccgtccttcgacacccccctccccgctctagttctggcctgctgaggactggaggtccatccatccggactttgttgatttcttctgttggtaatgaaacctaatctgctccgactctaagaggagtgagttccgagcaatcacaccgaaatcttccttcatcccctccattgatcccctcacaagtgctttaccttcccgagtggtggcgtcttaatctgatgcacccacgtatggttccgtctgatttcctcttagtcatttccccccctcctttcataacttattgatcagcgcgcgcaagatcgacctcggtcgatgccgtagggattgagacacaatgtgtgggttaggaagcttgttttccaagagatagggattcaactgaatctccacgccgcgctgcactcaaaatgaaaggagtgcttccgattaagggggcatcaggccgtgaaaagaaagcgcctaaggagctcgagagcgtcttgaaccgatatttcgggtattcgggatttcgaggaaaacaactcgaagctatagaagctgttctatcagggagagattgcttttgtttgatgccaactggtggtggaaagtccatgtgctatcagattccagctctggtgaaaacaggcattgttcttgtcatttcacccttgatagaatttacaggagaaccaggttgccagcttgaaaaataaaggggttccagctgaatttctctcttcaacacaggcatctcacactaaacaaaggatacatgaagaccttgatactggtaatccttctttaaagttgctatatgtgactcctgaacttgttgcaacatcaagctttatggcaaagctaaagaagctatacaacagaggtcttcttggtcttgttgcaattgatgaggctcactgtatttcaagttggggccacgatttcagacctagctaccgaaaactttcatcattgaggaagcagttcccagatatccctttgttagctttaactgcaactgctgtaccgaaggtccagaaagatgtggtatcatcattgtgcttgcaaaatccagtaattcttagagcttcatttaatcgacccaatatattctatgaagttcgttacaaggatcttcttgatgatgtttactctgatatatcaaatttgctgaaatcaagcgggaatgtttgctcaattatatattgccttgaacgggcagcttgtgatgatctaagcatgcatttgtcacagcagggtgtctcttgtgctgcttatcatgctggcctaaatagtaaagtgcgaagttctgttctcgatgactggctttcatcgagaactcaagttgttgttgcaactgtagcatttgggtagggtattgatagacaagatgtccgtattgtttgccacttcaacttgcctaagtcaatggaatccttctaccaggagtcaggtcgagctggtcgtgatcaacgaccttcaaggagtgttttgtattacggattagatgaccggaggagaatggaattcattttgagaaaccccaaaactaagaaatcacagccgtcttcctcttcaaatgagctttctgagaaggctctagctgacttcagtcagattattgactactgtgaaatttctagctgccggcggaaaaagatcattgagagctttggagagaaagtacaaccaactttatgccaacgctcatgcgatgcttgcaaacacccaaatttagtgttgtctcgtctggaggaactccgtcgtgtgcccaactgtcgctttaataagatctctccagtgtttcaaagctcagttaaagaagcacacttggacacagaattctggaatcgtgaagatgaggcgagcttatcagctgaagacatatctgattctgatgatgggaatgaggtagtgagtaatatagccatttcaaaggttccggcaaaagctggtctggatgcaaaatttaaagcactggagcgtgctgaaaatgcttattaccaaggcaaaggtcaggcgaagcagcagggtggcggccttgctgacaagaaaagcatctctgagacgctaagagatgcatgccgaaaaagattgttggatgctcttggacaagcaaagttgcgactcgggaatattccgtgcggagacgaggcttctgctacacaccttgaaacagagtgcttcaaaaaatatgtgaaggcgggcaagacgttctacaactcacagatagccgccacagttcggtggctgtcatctgcaacactcagtcagatgcgtgaccgcctcgacactctttatcgaccgaaccaaagatgatggtgcgtcaggctgccccgacattgtcccagagtcacctccagcatctcctgaaatcgtcgtcggcgcaaggtcaggagaaaccagtaacgacaaaccgcagcatatttgtgagttgaagagttcagatgagtctgcaaagggtgctgcatcatcgactgggaacatggtgctccccgccataccgacgttcagagaattcttgagccaaaaaggaagggatcgggcgaagtgctattcaaattctaatgcgacgaaccagccatctggtattcgtaggaagtttagtggtcaccttgataaggaagaagccagcaagaggatgaaatcatgaatatctgtcgggcaacttgattttttttctgccttttcgttgtcactaatcaaacattgcaaatctacgttgtagtgaaacgttcctgaatcagaatctccatgatgattttcttattatatctagtttgtacagtgaaaaggggtgttctacgcttctcgtgcaacatgaaggatctgcctcccaatccctatccaccctctataggttagtcatctcatgtggacacagccagaagggaagcggtaaacttaagcaagtatatacacatgtcggacctataacaccctatttgatcagctcttacaacggtcaactacacctgacgcaccctatttgatccgaggaatccttctcaagctccgcgatcagctgctcaatgtttcttctgtatatagg

SEQ ID NO: 56151 - DNA, 2771 bp, Zea Mays
ctccagggtccaggctctctcccgctcacggcagcgccgtccttcgacacccccctccccgctctagttctggcctgctgaggactggaggtccatccatccggactttgttgatttcttctgttggcattgtggtgttcagctcaaaatgaaaggagtgcttccgattaagggggcatcaggccgtgaaaagaaagcgcctaaggagctcgagagcgtcttgaaccgatatttcgggtattcgggatttcgaggaaaacaactcgaagctatagaagctgttctatcagggagagattgcttttgtttgatgccaactggtggtggaaagtccatgtgctatcagattccagctctggtgaaaacaggcattgttcttgtcatttcacccttgatagaatttacaggagaaccaggttgccagcttgaaaaataaaggggttccagctgaatttctctcttcaacacaggcatctcacactaaacaaaggatacatgaagaccttgatactggtaatccttctttaaagttgctatatgtgactcctgaacttgttgcaacatcaagctttatggcaaagctaaagaagctatacaacagaggtcttcttggtcttgttgcaattgatgaggctcactgtatttcaagttggggccacgatttcagacctagctaccgaaaactttcatcattgaggaagcagttcccagatatccctttgttagctttaactgcaactgctgtaccgaaggtccagaaagatgtggtatcatcattgtgcttgcaaaatccagtaattcttagagcttcatttaatcgacccaatatattctatgaagttcgttacaaggatcttcttgatgatgtttactctgatatatcaaatttgctgaaatcaagcgggaatgtttgctcaattatatattgccttgaacgggcagcttgtgatgatctaagcatgcatttgtcacagcagggtgtctcttgtgctgcttatcatgctggcctaaatagtaaagtgcgaagttctgttctcgatgactggctttcatcgagaactcaagttgttgttgcaactgtagcatttgggtaggtattgatagacaagatgtccgtattgtttgccacttcaacttgcctaagtcaatggaatccttctaccaggagtcaggtcgagctggtcgtgatcaacgaccttcaaggagtgttttgtattacggattagatgaccggaggagaatggaattcattttgagaaaccccaaaactaagaaatcacagccgtcttcctcttcaaatgagctttctgagaaggctctagctgacttcagtcagattattgactactgtgaaatttctagctgccggcggaaaaagatcattgagagctttggagagaaagtacaaccaactttatgccaacgctcatgcgatgcttgcaaacacccaaatttagtgttgtctcgtctggaggaactccgtcgtgtgcccaactgtcgctttaataagatctctccagtgtttcaaagctcagttaaagaagcacacttggacacagaattctggaatcgtgaagatgaggcgagcttatcagctgaagacatatctgattctgatgatgggaatgaggtagtgagtaatatagccatttcaaaggttccggcaaaagctggtctggatgcaaaatttaaagcactggagcgtgctgaaaatgcttattaccaaggcaaaggtcaggcgaagcagcagggtggcggccttgctgacaagaaaagcatctctgagacgctaagagatgcatgccgaaaaagattgttggatgctcttggacaagcaaagttgcgactcgggaatattccgtgcggagacgaggcttctgctacacaccttgaaacagagtgcttcaaaaaatatgtgaaggcgggcaagacgttctacaactcacagatagccgccacagttcggtggctgtcatctgcaacactcagtcagatgcgtgaccgcctcgacactctttatcgaccgaaccaaagatgatggtgcgtcaggctgccccgacattgtcccagagtcacctccagcatctcctgaaatcgtcgtcggcgcaaggtcaggagaaaccagtaacgacaaaccgcagcatatttgtgagttgaagagttcagatgagtctgcaaagggtgctgcatcatcgactgggaacatggtgctccccgccataccgacgttcagagaattcttgagccaaaaaggaagggatcgggcgaagtgctattcaaattctaatgcgacgaaccagccatctggtattcgtaggaagtttagtggtcaccttgataaggaagaagccagcaagaggatgaaatcatgaatatctgtcgggcaacttgattttttttctgccttttcgttgtcactaatcaaacattgcaaatctacgttgtagtgaaacgttcctgaatcagaatctccatgatgattttcttattatatctagtttgtacagtgaaaaggggtgttctacgcttctcgtgcaacatgaaggatctgcctcccaatccctatccaccctctataggttagtcatctcatgtggacacagccagaagggaagcggtaaacttaagcaagtatatacacatgtcggacctataacaccctatttgatcagctcttacaacggtcaactacacctgacgcaccctatttgatccgaggaatccttctcaagctccgcgatcagctgctcaatgtttcttctgtatatagg

SEQ ID NO: 56152 - DNA, 1565 bp, Zea Mays
ctccagggtccaggctctctcccgctcacggcagcgccgtccttcgacacccccctccccgctctagttctggcctgctgaggactggaggtccatccatccggactttgttgatttcttctgttggcattgtggtgttcagctcaaaatgaaaggagtgcttccgattaagggggcatcaggccgtgaaaagaaagcgcctaaggagctcgagagcgtcttgaaccgatatttcgggtattcgggatttcgaggaaaacaactcgaagctatagaagctgttctatcagggagagattgcttttgtttgatgccaactggtggtggaaagtccatgtgctatcagattccagctctggtgaaaacaggcattgttcttgtcatttcacccttgatagaatttacaggagaaccaggttgccagcttgaaaaataaaggggttccagctgaatttctctcttcaacacaggcatctcacactaaacaaaggatacatgaagaccttgatactggtaatccttctttaaagttgctatatgtgactcctgaacttgttgcaacatcaagctttatggcaaagctaaagaagctatacaacagaggtcttcttggtcttgttgcaattgatgaggctcactgtatttcaagttggggccacgatttcaggtatgcagtgatttatgtgttttgtgagttcttgccatcaatcttaaaagtagcaaagtgttgtttgcatgaaatgcagacctagctaccgaaaactttcatcattgaggaagcagttcccagatatccctttgttagctttaactgcaactgctgtaccgaaggtccagaaagatgtggtatcatcattgtgcttgcaaaatccagtaattcttagagcttcatttaatcgacccaatatattctatgaaggtcaaaagctaccacaaccttggaagaggctttggaaatcttgggctccccctaagtgcaagtttttcttatggttggccattcggaataaatgttggacttcagatagattggagatgagaggtctggaccacccagtgtcttgcctattctgtgatcaagagcaggaaaccatacaacatattttgtgttcatgtgtatttgcaagacagttctggcattccattctatttggattgaatgttggtaatctctctccctcaagagatgagatctcctttgctgattggtggcgaaaaacaagtaagaagatacataaaagcaagagaaagggcatgaacagcatcatcattttaggggcctggtgtttatggatccaccgcaacaaggctgtctttgatggggagaccccttcgctaagctctatcagatgcgtctttcttgatgagattgggtgttggattacggctggtgccaagcatcttcagagctttggattagtgcttgcgcgtaaccttcacagggtctagggagtggtgtgttttttttttgttttgagtaagcctgcttagggctttgtaccttggtccattttggacctttttcttctctaattaaaatgatgcgcagttctcctgcgctttct

SEQ ID NO: 56153 - DNA, 1627 bp, Zea Mays
ctccagggtccaggctctctcccgctcacggcagcgccgtccttcgacacccccctccccgctctagttctggcctgctgaggactggaggtccatccatccggactttgttgatttcttctgttggtaatgaaacctaatctgctccgactctaagaggagtgagttccgagcaatcacaccgaaatcttccttcatcccctccattgatcccctcacaagtgctttaccttcccgagtggtggcgtcttaatctgatgcacccacgcattgtggtgttcagctcaaaatgaaaggagtgcttccgattaagggggcatcaggccgtgaaaagaaagcgcctaaggagctcgagagcgtcttgaaccgatatttcgggtattcgggatttcgaggaaaacaactcgaagctatagaagctgttctatcagggagagattgcttttgtttgatgccaactggtggtggaaagtccatgtgctatcagattccagctctggtgaaaacaggcattgttcttgtcatttcacccttgatagaatttacaggagaaccaggttgccagcttgaaaaataaaggggttccagctgaatttctctcttcaacacaggcatctcacactaaacaaaggatacatgaagaccttgatactggtaatccttctttaaagttgctatatgtgactcctgaacttgttgcaacatcaagctttatggcaaagctaaagaagctatacaacagaggtcttcttggtcttgttgcaattgatgaggctcactgtatttcaagttggggccacgatttcagacctagctaccgaaaactttcatcattgaggaagcagttcccagatatccctttgttagctttaactgcaactgctgtaccgaaggtccagaaagatgtggtatcatcattgtgcttgcaaaatccagtaattcttagagcttcatttaatcgacccaatatattctatgaaggtcaaaagctaccacaaccttggaagaggctttggaaatcttgggctccccctaagtgcaagtttttcttatggttggccattcggaataaatgttggacttcagatagattggagatgagaggtctggaccacccagtgtcttgcctattctgtgatcaagagcaggaaaccatacaacatattttgtgttcatgtgtatttgcaagacagttctggcattccattctatttggattgaatgttggtaatctctctccctcaagagatgagatctcctttgctgattggtggcgaaaaacaagtaagaagatacataaaagcaagagaaagggcatgaacagcatcatcattttaggggcctggtgtttatggatccaccgcaacaaggctgtctttgatggggagaccccttcgctaagctctatcagatgcgtctttcttgatgagattgggtgttggattacggctggtgccaagcatcttcagagctttggattagtgcttgcgcgtaaccttcacagggtctagggagtggtgtgttttttttttgttttgagtaagcctgcttagggctttgtaccttggtccattttggacctttttcttctctaattaaaatgatgcgcagttctcctgcgctttct

SEQ ID NO: 56154 - DNA, 2630 bp, Zea Mays
ctcgtggaggcttcctctccagcgcggagcactccttagttggccgccctcctctcctccgccgccacagcagtcagcagacatcagcagaccgccggccgaccgccccacaggcgacctttccggcagagaatcaacgctcgctggtttgctaaactcattgtctgtcagagatgggacgtccggaaggggtcacgatcggatgacaacacacgtcgagaagatgacaacgacgagcagcgtcaggaacgggacatcagagtagattggttcaagtgatgttggaaagaatgggatcagatagatagatgtaagactggaatgagaagaaggatgacaattaggagaattgaactgatccaactaagagacctaggatagaactagtttgatctatctaaaacattttttttctatacttacatataagagatactaaaaattgagggggggccacggccccctttgccccccacgtggatccgccactgttgccgaggaagaagactgacgaggcgaagtcactgattagagtgttggtggcccttggctttgattgtgatcaaatagaggcaaatggttgaggtttggagatgctggtttgttaggttatggttagcttcttaaacttccaacctctggtgtatgtgtgatgtgaactgaatcacaataatgtctggttgtggtttcattaatgcttacatgtggtgaattggacctgactccatggtctgtgactctgtgttgcagtgaagtctgctatggagaacatttgtaaatgtggggtcaatcagtatgttcaaaaagtctgtaaagaaattatgtttaatctgtaactggttaccattttagttcaatacaatattataatccccatgtgtagtacttaacattttgttggttgccgtcgttgggctaaatcttgcagcctcctcacttggcacagatgtccgcatttgctttccagaaagtatttttgtactcgttgcaggaatgaaacaccatgacttgttattcattgcagtatacaacacttaagcggttaagcccttgtctgatagagtgcttgtaaagataaactgttctgaggagaagagagaagacaactggtggaattttgcatcctacgactgctcagtccatacctcagggcagtgaggtagttgctgttgcagaaggaagggtaagtggagataagatagttgatgtcagcattcaggtatgttctttgcgaacatgtcagatcttaggtgcctgttgttttcaatacagctttatcatatatgggtacatattcccatgtgagcaggcgtagctattcactgattccattagtattttgtatcccttgtcccactttagaattggccgcgccagaaaaagaaaaggttttacttgaaagccatgtgcggtcattttatctcagtttatgagtaagaaaatcacatcttaaacaaacagagtgagctttataccttacctatttgtaatataaccagtctagtctagttatagccatactggtactgcaagatgtagctgtcaaagcacttgtactgcctatttgacccacaaacctacacgtttacttctgttcccatctgaattatttgtatatgtgttgtggtgtcatagttcttaatacaagcaaactttgcctttttgttgggaagaaaagagaacccgcgtgctgacatgcgcatttgctactacttcaggttggagttcaagctgtatattcaaaagtacgctggaactgaggtcggcgttgaatgattccagacatctggttctcaaagaggatgtcaggatggcactatattcatcttagaaaccgatggtgtgaatgaaagacatgaagcctttgaatgatcatgttctaatcaagcagcgtccggctcggcggcatgacgtcgtcgtcgtggccggagacggaggccgggagcagcaggaagaagttcaagggcgtgcgcaagcgcaagtggggcaagtgggtgtcggagatccggctgcccaacagccgcgagcgcatctggctgggctcctacgacgcccccgacaaggccgcgcgcgccttcgacgccgccttcgtgtgcctccgcgggcggggcgccgccggcgcggacctcaacttcccggactcgccgccgccgggccgggccgggggacgcagcagcgacccgcgggaggtgcaggcggccgcgctctcccacgccaaccgcgccgccgtcacggcccagcaggcggccgcggcgctcatcatggacggcgccgacggcggaggctgctcggggccgccgtgggacgactactattactccgtggcgcacgacgcgggcggcggcgtccttggtggtactagcagcggcgcggcggcgtgttaccagcagggcgccacaagctgctgaacctgaaggcgcgggagttaaactggacaatgtgggccgttcaaaggagaaagaggagccagctgggccaaggagaggtacacgtgagcgtaagttgaaccagaggctgttgggcccggagtgggtgaactccatgtaacgtgtgcgtggcctatgggagatgagatgccggcgtgttgcctggctgcataaaggcgtgagtgcatgagagagagggttatg

SEQ ID NO: 56155 - DNA, 1081 bp, Zea Mays
cgccctcctctcctccgccgccacagcagtcagcagacatcagcagaccgccggccgaccgccccacagtatacaacacttaagcggttaagcccttgtctgatagagtgcttgtaaagataaactgttctgaggagaagagagaagacaactggtggaattttgcatcctacgactgctcagtccatacctcagggcagtgaggtagttgctgttgcagaaggaagggtaagtggagataagatagttgatgtcagcattcaggtatgttctttgcgaacatgtcagatcttaggtgcctgttgttttcaatacagctttatcatatatgggtacatattcccatgtgagcaggcgtagctattcactgattccattagtattttgtatcccttgtcccactttagaattggccgcgccagaaaaagaaaaggttttacttgaaagccatgtgcggtcattttatctcagtttatgagtaagaaaatcacatcttaaacaaacagagtgagctttataccttacctatttgtaatataaccagtctagtctagttatagccatactggtactgcaagatgtagctgtcaaagcacttgtactgcctatttgacccacaaacctacacgtttacttctgttcccatctgaattatttgtatatgtgttgtggtgtcatagttcttaatacaagcaaactttgcctttttgttgggaagaaaagagaacccgcgtgctgacatgcgcatttgctactacttcaggttggagttcaagctgtatattcaaaagtacgctggaactgaggtcggcgttgaatgattccagacatctggttctcaaagaggatgtcaggatggcactatattcatcttagaaaccgatggtgtgaatgaaagacatgaagcctttgaatgatcatgttctaatcaaggtcgaggttcaactgtaggcccgccatcttgtttgtgtgggtgggaaaggggttcccttgcggcctaccaatactgtagggtcgtacgtcttgtctgactgtcctctgagaagcaacagtaggcattcaaaaattcggtcgcaggatg

SEQ ID NO: 56156 - DNA, 770 bp, Zea Mays
tccgcgtccggctgcgctacgagcctacggcttccgcagctcgcttccgctgtgctgtcctctgtgctatccactagggttcatctgctcgaggaatggcatcgctggttcgctgcaggtctctggcgcgggggtcggtgccgcagccttcgctgcgaaggggaaggcctccatcggtgcgcacttgcttctctcgacggtgaccgtcggcgaggtccagcctcgtcgccagggccgccaccgtcgttgcccccaagtatacaacacttaagcggttaagcccttgtctgatagagtgcttgtaaagataaactgttctgaggagaagagagaagacaactggtggaattttgcatcctacgactgctcagtccatacctcagggcagtgaggtagttgctgttgcagaaggaagggtaagtggagataagatagttgatgtcagcattcaggttggagttcaagctgtatattcaaaagtacgctggaactgaggtcggcgttgaatgattccagacatctggttctcaaagaggatgtcaggatggcactatattcatcttagaaaccgatggtgtgaatgaaagacatgaagcctttgaatgatcatgttctaatcaaggtcgaggttcaactgtaggcccgccatcttgtttgtgtgggtgggaaaggggttcccttgcggcctaccaatactgtagggtcgtacgtcttgtctgactgtcctctgagaagcaacagtaggcattcaaaaattcggtcgcaggatg

SEQ ID NO: 56157 - DNA, 966 bp, Zea Mays
gtccattttggacgtttaaacgtcgtttaagcatcctaaacacgttttagggtgttttacgcgttctggggacgttttacccatctgtgggcctttcctgggcctttagggtttaggtccagccagcgcgtactcgtggaggcttcctctccagcgcggagcactccttagttggccgccctcctctcctccgccgccacagcagtcagcagacatcagcagaccgccggccgaccgccccacagagatgggacgtccggaaggggtcacgatcggatgacaacacacgtcgagaagatgacaacgacgagcagcgtcaggaacgggacatcagagtagattggttcaagtgatgttggaaagaatgggatcagatagatagatgtaagactggaatgagaagaaggatgacaattaggagaattgaactgatccaactaagagacctaggatagaactagtttgatctatctaaaacattttttttctatacttacatataagagatactaaaaattgagggggggccacggccccctttgccccccacgtggatccgccactgttgccgaggaagaagactgacgaggcgaagtcactgattagagtgttggtggcccttggctttgattgtgatcaaatagaggcaaatggttgaggtttggagatgctggtttgttaggttatggttagcttcttaaacttccaacctctggtgtatgtgtgatgtgaactgaatcacaataatgtctggttgtggtttcattaatgcttacatgtggtgaattggacctgactccatggtctgtgactctgtgttgcagtgaagtctgctatggagaacatttgtaaatgtggggtcaatcagtatgttcaaaaagtctgtaaagaaattatgtttaatctgtaactggttaccattttagttcaatacaatattataatccccatgtgtagtacttaaca

SEQ ID NO: 56158 - DNA, 1022 bp, Zea Mays
attgatgatagcataactatgcaatcttctgaaatcaagggttcaatcgcctgaatttctcgagaagctagatactcttcagaagtcagtatatcaacatggtgcagtggatgaaacagtatcatgggatattataagtgcggcagatatatgggatgataagagtatgaacgttagtgatgattcagaggacggatatgttcttgttaagcaagaggacatagtcgatggtattgcatgcttcatggctgcatacttgctgtcgctgaaacaaactaagtattgatggcacaaaaaattcatgttatgcaggacctgacacccaaccaacttcaacaagctcttagcaagacattttcagctaaaaagaggaaaagcaaactgcagaaggcatgggatggaacgaaagttgtttataatatagcatcatggagcgcgacggctattggtatctaccagaatcctgcgattgtgcaagcagcaactgcagccttctggacatcctgtcgtgtaatatccaagtttctgtgactagtcatggctggacctggacggtgcaaatatgcaaacattgtgtggctgtggcctctccgtttctaaagatcaaccgaagatgaaaaaagttgccaaactccgtggcgtgcttagattatgatgtaaataggctgcaagttcgttgattgatttaacagcgacatcagttactggtgatgagcaatatggggctgttcgacagtatctcacccatataatctaaaggtatgaatggacacaccaccatctatttgccaataccagctgtatccgacaatcaagaaccgatgtacataagccctcccgcgcaacattggtatatcagtgtgattgtaaatatttcgattcatttgaataaattcgctcgcatgtgtttcaccccttcgcaggaatatacaatgctctaattgctatcagaaattcctagcattgttcttaacagatgatacacggcatacgtatttagggcttaatgcccagatccatat

SEQ ID NO: 56159 - DNA, 1595 bp, Zea Mays
ccccaccactcagtagcacgcagcgtgcgggcaacaccacaccaccacccacggccaccaggcagcagcccaccgccgtgtcctagcttcgtaacgacacaaccggccgggttatccctatcgccagcaagccgccaccaaaaacaacacgcccggacggaaaggtccgccacggacacagcgacacgcacgtctccctcccctagtcccctcttcgccgtccgggtcgggtgtttgcgaagcgagacaagccaccggtcgccgcgcgactagggtttggttgcgatggagccggcctcctcgtccgcgcttccttctcctcctccggccgaggcgaggcggacgccgccggaggagctgaagctgcggcggaggacgcttgagacggtgctggagcagtgccagcgcgcgctcgagatgatgcatgaggacggtctggggacggctgcggagggggcaagcttcaaggaggtggaggtggaggaggaggaggaggaggaggagggcagcggcgacagcggcggggtcgagagggcgccgcccccaccgccctcggaggccgactacgaggcggacgagatttgtggcagccatgtatgttacatattgatgatagcataactatgcaatcttctgaaatcaagggttcaatcgcctgaatttctcgagaagctagatactcttcagaagtcagtatatcaacatggtgcagtggatgaaacagtatcatgggatattataagtgcggcagatatatgggatgataagagtatgaacgttagtgatgattcagaggacggatatgttcttgttaagcaagaggacatagtcgatggtattgcatgcttcatggctgcatacttgctgtcgctgaaacaaactaaggacctgacacccaaccaacttcaacaagctcttagcaagacattttcagctaaaaagaggaaaagcaaactgcagaaggcatgggatggaacgaaagttgtttataatatagcatcatggagcgcgacggctattggtatctaccagaatcctgcgattgtgcaagcagcaactgcagccttctggacatcctgtcgtgtaatatccaagtttctgtgactagtcatggctggacctggacggtgcaaatatgcaaacattgtgtggctgtggcctctccgtttctaaagatcaaccgaagatgaaaaaagttgccaaactccgtggcgtgcttagattatgatgtaaataggctgcaagttcgttgattgatttaacagcgacatcagttactggtgatgagcaatatggggctgttcgacagtatctcacccatataatctaaaggtatgaatggacacaccaccatctatttgccaataccagctgtatccgacaatcaagaaccgatgtacataagccctcccgcgcaacattggtatatcagtgtgattgtaaatatttcgattcatttgaataaattcgctcgcatgtgtttcaccccttcgcaggaatatacaatgctctaattgctatcagaaattcctagcattgttcttaacagatgatacacggcatacgtatttagggcttaatgcccagatccatat

SEQ ID NO: 56160 - DNA, 1359 bp, Zea Mays
gcccctgtcgattttctgtgcttgccgtcggtaagccccctatcggccatcgttctcatcacactcttctgcagttctgcttcccacacctcccatggcgcgtcctctcccaaagccctagcgctctagcccccgaatcctgccctcccctcccgccagaagcccgcccgcctaccagccgccactgctcccacctcgcccggagagagtcagtgcgaggccatggaacaccaccacaagccaggcctgcgtgtgcgcctccgcatcaccgccgcgcggcgccgcgcgtggctctccgcctgtctgcgccccccctgccgcaagccgccgcgccgcgaccactcggactccgtccacaaggtcgcgcgccgcgagatcggcggcggccaccgacgcccgccgcggcccgcggcgccctcatcctcctcattctcgtgccctgagaaattccgcaacttccagctccagactgttgtttgtcaggaatctggaaggctattagatgttagtttaacagcaacctgccggctttcatcctggcctaggggaaaaaatcatcaaagagggcatttagaaagaacaagatgatacaaacaatacgaaagagaagatagcaacctgcattcgaaaggtggtctcataggagtgtggacaacatagagaagtacaagatagaaaagaagactacaagacgagttgtaagtgtggcaaagggtaggccgcatgagggtctttacgaacgtttgagtgcgaaggaaggaaagaatgacatatatgggatgactagggttcgtgagaggaagacaagggacttcaccaagttaagtgcactaaagatgaaataaagcacctcttggtgaaggaggatgagtgttgggggccttcgtcctccgaaggtcctcaaaaacatgatttgacaatgttttccaagtggattatgtgaacaggtaccttcggactcagaattacgaacatgaagtgcggtcaggacgaagcctgaaccagacgaaggacgggctgattaccaagctccacgaaggatggtacacagccgaagctgtgcgcagggaagcttcgtcgcgatagcagagaggggaaccgacttaaagatgaaaagactacgtggaccttgtcagatttccataagttattgacaaatgtaatggacataaatgtaattttacgtgggctgcgtcccgcgtctataaatagatgaacagtactcccgtactgttcacgctgacttggcatttgcttttgcgtcacgcttgtactttttatcttctctcaggaccgaaggtacatttgtaatttgaaatcatttctatttttccatgttaataaaatagaaatgattct

SEQ ID NO: 56161 - DNA, 2139 bp, Zea Mays
gcccctgtcgattttctgtgcttgccgtcggtaagccccctatcggccatcgttctcatcacactcttctgcagttctgcttcccacacctcccatggcgcgtcctctcccaaagccctagcgctctagcccccgaatcctgccctcccctcccgccagaagcccgcccgcctaccagccgccactgctcccacctcgcccggagagagtcagtgcgaggccatggaacaccaccacaagccaggcctgcgtgtgcgcctccgcatcaccgccgcgcggcgccgcgcgtggctctccgcctgtctgcgccccccctgccgcaagccgccgcgccgcgaccactcggactccgtccacaaggtcgcgcgccgcgagatcggcggcggccaccgacgcccgccgcggcccgcggcgccctcatcctcctcattctcgtgccctgagaaattccgcaacttccagctccaggtttgtcctcggcgccccccctcccccctcgtagctgtagcaggctgtccgagactctagtcgctacgccggctgagacaggaaactggtagttccgtaacccttacagtctgttaggcatgtcttgctcgatttgatccttgttatgaaatggcgatactcgtgaaaatgttagcataatgtttttaactgaatagctgatagttctgtgaactgaagttgcttgtggcaaggtgtgggtgttgcttgagacaaggtgttccgagagggtatagctctggctagatctgggagtcccaactgtgaggaacattgattcctaatgtcgtaccctagtactgtaatgttaggattgcatgtttttttcttctgaattctacttgcagtttttactatgtactctctccgtttttttatttgtcacgttttagtgtaaagataaactagtgaacgacaaatattcgaggcagtatgtatgcttctgggtttccttgacatggattccgcataacatacctggtatgacaaagtttgcaatgactggacgcatagttgtcaatagtaattggtagggccacaaataacttgatgcacgaattccaaatcacagtctgccattacatgctatcgtcagtttgcatggcaacactttctgaaaatgaacataccttaaaattttgaaatctacgttgctcatttttttacttttcctgttttctcggattcagaacactgggacgttcctaactttgtgtacatttatccatgcaatgtatgaagactgttgtttgtcaggaatctggaaggctattagatgttagtttaacagcaacctgccggctttcatcctggcctaggggaaaaaatcatcaaagagggcatttagaaagaacaagatgatacaaacaatacgaaagagaagatagcaacctgcattcgaaaggtggtctcataggagtgtggacaacatagagaagtacaagatagaaaagaagactacaagacgagttgtaagtgtggcaaagggtaggccgcatgagggtctttacgaacgtttgagtgcgaaggaaggaaagaatgacatatatgggatgactagggttcgtgagaggaagacaagggacttcaccaagttaagtgcactaaagatgaaataaagcacctcttggtgaaggaggatgagtgttgggggccttcgtcctccgaaggtcctcaaaaacatgatttgacaatgttttccaagtggattatgtgaacaggtaccttcggactcagaattacgaacatgaagtgcggtcaggacgaagcctgaaccagacgaaggacgggctgattaccaagctccacgaaggatggtacacagccgaagctgtgcgcagggaagcttcgtcgcgatagcagagaggggaaccgacttaaagatgaaaagactacgtggaccttgtcagatttccataagttattgacaaatgtaatggacataaatgtaattttacgtgggctgcgtcccgcgtctataaatagatgaacagtactcccgtactgttcacgctgacttggcatttgcttttgcgtcacgcttgtactttttatcttctctcaggaccgaaggtacatttgtaatttgaaatcatttctatttttccatgttaataaaatagaaatgattct

SEQ ID NO: 56162 - DNA, 1415 bp, Zea Mays
gcccctgtcgattttctgtgcttgccgtcggtaagccccctatcggccatcgttctcatcacactcttctgcagttctgcttcccacacctcccatggcgcgtcctctcccaaagccctagcgctctagcccccgaatcctgccctcccctcccgccagaagcccgcccgcctaccagccgccactgctcccacctcgcccggagagagtcagtgcgaggccatggaacaccaccacaagccaggcctgcgtgtgcgcctccgcatcaccgccgcgcggcgccgcgcgtggctctccgcctgtctgcgccccccctgccgcaagccgccgcgccgcgaccactcggactccgtccacaaggtcgcgcgccgcgagatcggcggcggccaccgacgcccgccgcggcccgcggcgccctcatcctcctcattctcgtgccctgagaaattccgcaacttccagctccaggaatctggaaggctattagatgttagtttaacagcaacctgccggctttcatcctggcctaggtgaatatttttctccgaaaaccaatttagtccattgttagtaatgttgaaatttttatatcgtcttaaaggggaaaaaatcatcaaagagggcatttagaaagaacaagatgatacaaacaatacgaaagagaagatagcaacctgcattcgaaaggtggtctcataggagtgtggacaacatagagaagtacaagatagaaaagaagactacaagacgagttgtaagtgtggcaaagggtaggccgcatgagggtctttacgaacgtttgagtgcgaaggaaggaaagaatgacatatatgggatgactagggttcgtgagaggaagacaagggacttcaccaagttaagtgcactaaagatgaaataaagcacctcttggtgaaggaggatgagtgttgggggccttcgtcctccgaaggtcctcaaaaacatgatttgacaatgttttccaagtggattatgtgaacaggtaccttcggactcagaattacgaacatgaagtgcggtcaggacgaagcctgaaccagacgaaggacgggctgattaccaagctccacgaaggatggtacacagccgaagctgtgcgcagggaagcttcgtcgcgatagcagagaggggaaccgacttaaagatgaaaagactacgtggaccttgtcagatttccataagttattgacaaatgtaatggacataaatgtaattttacgtgggctgcgtcccgcgtctataaatagatgaacagtactcccgtactgttcacgctgacttggcatttgcttttgcgtcacgcttgtactttttatcttctctcaggaccgaaggtacatttgtaatttgaaatcatttctatttttccatgttaataaaatagaaatgattct

SEQ ID NO: 56163 - DNA, 2121 bp, Zea Mays
gcccctgtcgattttctgtgcttgccgtcggtaagccccctatcggccatcgttctcatcacactcttctgcagttctgcttcccacacctcccatggcgcgtcctctcccaaagccctagcgctctagcccccgaatcctgccctcccctcccgccagaagcccgcccgcctaccagccgccactgctcccacctcgcccggagagagtcagtgcgaggccatggaacaccaccacaagccaggcctgcgtgtgcgcctccgcatcaccgccgcgcggcgccgcgcgtggctctccgcctgtctgcgccccccctgccgcaagccgccgcgccgcgaccactcggactccgtccacaaggtcgcgcgccgcgagatcggcggcggccaccgacgcccgccgcggcccgcggcgccctcatcctcctcattctcgtgccctgagaaattccgcaacttccagctccaggtttgtcctcggcgccccccctcccccctcgtagctgtagcaggctgtccgagactctagtcgctacgccggctgagacaggaaactggtagttccgtaacccttacagtctgttaggcatgtcttgctcgatttgatccttgttatgaaatggcgatactcgtgaaaatgttagcataatgtttttaactgaatagctgatagttctgtgaactgaagttgcttgtggcaaggtgtgggtgttgcttgagacaaggtgttccgagagggtatagctctggctagatctgggagtcccaactgtgaggaacattgattcctaatgtcgtaccctagtactgtaatgttaggattgcatgtttttttcttctgaattctacttgcagtttttactatgtactctctccgtttttttatttgtcacgttttagtgtaaagataaactagtgaacgacaaatattcgaggcagtatgtatgcttctgggtttccttgacatggattccgcataacatacctggtatgacaaagtttgcaatgactggacgcatagttgtcaatagtaattggtagggccacaaataacttgatgcacgaattccaaatcacagtctgccattacatgctatcgtcagtttgcatggcaacactttctgaaaatgaacataccttaaaattttgaaatctacgttgctcatttttttacttttcctgttttctcggattcagaacactgggacgttcctaactttgtgtacatttatccatgcaatgtatgaagactgttgtttgtcaggaatctggaaggctattagatgttagtttaacagcaacctgccggctttcatcctggcctagagggcatttagaaagaacaagatgatacaaacaatacgaaagagaagatagcaacctgcattcgaaaggtggtctcataggagtgtggacaacatagagaagtacaagatagaaaagaagactacaagacgagttgtaagtgtggcaaagggtaggccgcatgagggtctttacgaacgtttgagtgcgaaggaaggaaagaatgacatatatgggatgactagggttcgtgagaggaagacaagggacttcaccaagttaagtgcactaaagatgaaataaagcacctcttggtgaaggaggatgagtgttgggggccttcgtcctccgaaggtcctcaaaaacatgatttgacaatgttttccaagtggattatgtgaacaggtaccttcggactcagaattacgaacatgaagtgcggtcaggacgaagcctgaaccagacgaaggacgggctgattaccaagctccacgaaggatggtacacagccgaagctgtgcgcagggaagcttcgtcgcgatagcagagaggggaaccgacttaaagatgaaaagactacgtggaccttgtcagatttccataagttattgacaaatgtaatggacataaatgtaattttacgtgggctgcgtcccgcgtctataaatagatgaacagtactcccgtactgttcacgctgacttggcatttgcttttgcgtcacgcttgtactttttatcttctctcaggaccgaaggtacatttgtaatttgaaatcatttctatttttccatgttaataaaatagaaatgattct

SEQ ID NO: 56164 - DNA, 946 bp, Zea Mays
gtcgactcgtcgtacactgtgagctgcccctgtcgattttctgtgcttgccgtcgactgttgtttgtcaggaatctggaaggctattagatgttagtttaacagcaacctgccggctttcatcctggcctaggggaaaaaatcatcaaagagggcatttagaaagaacaagatgatacaaacaatacgaaagagaagatagcaacctgcattcgaaaggtggtctcataggagtgtggacaacatagagaagtacaagatagaaaagaagactacaagacgagttgtaagtgtggcaaagggtaggccgcatgagggtctttacgaacgtttgagtgcgaaggaaggaaagaatgacatatatgggatgactagggttcgtgagaggaagacaagggacttcaccaagttaagtgcactaaagatgaaataaagcacctcttggtgaaggaggatgagtgttgggggccttcgtcctccgaaggtcctcaaaaacatgatttgacaatgttttccaagtggattatgtgaacaggtaccttcggactcagaattacgaacatgaagtgcggtcaggacgaagcctgaaccagacgaaggacgggctgattaccaagctccacgaaggatggtacacagccgaagctgtgcgcagggaagcttcgtcgcgatagcagagaggggaaccgacttaaagatgaaaagactacgtggaccttgtcagatttccataagttattgacaaatgtaatggacataaatgtaattttacgtgggctgcgtcccgcgtctataaatagatgaacagtactcccgtactgttcacgctgacttggcatttgcttttgcgtcacgcttgtactttttatcttctctcaggaccgaaggtacatttgtaatttgaaatcatttctatttttccatgttaataaaatagaaatgattct

SEQ ID NO: 56165 - DNA, 1367 bp, Zea Mays
atgagacccaaatatttaacgggcaagtggccatcatggccgtgtttctggagacttcctgcggcgcgtggagagtggaggcagggggagaaggaagcagcagcagcagcagcagcagctccatccgctcgcttccttcccccaccgccagcgtcgcctctccgtgtgcgcgccccgccgggggtggcgtcgctgcacctttgggcagcaggcacctacgtgcggggggagccacacgcctccctctcgcctcttggcatggacgccggcggagagaagtgcggcgacgcggcggcagagggcggagacctctacgcggttctcgggctaaaaaaggagtgctccgaggccgagcttaaggtcgcttaccggaagctcgccaagaaatggcacccggacaaatgctcgtcctccagcagcgtgaagcacatggaggaagccaaggagaagttccaagagatccagggcgcctattccgtactctccgacgccaataaacggctcctctacgatgtgggagtatatgacgatgaggacgacgaggaaagcatgcaggggatgggggacttcatcggtgagatggcccagatgatgagccaggcgcagccgacgaggactgccaaggcccatcagtttcaggggccagccaaaagtagaacatgctcgacctcaccttcatcatcaccgtcccctcctcctaccacagcaaaggatgcagaggtgccatcatgtaatggcttcaataagcggggttcatcagctctggactcagggaagcctccaaagcctgttgaaggtggtgcaggtcagaaccaggctggattctgttttggggtgagcgacacgaaggaaacgccgaagctgccaggtcagaacgccagccggaggaggaacggccggaaacagaagctgtcatccaagcacgatgtttcatctgaagatgaaacggcggccggttcgtagcacaccagcagtttgacccattggcttcggtgatatatcattcgttggcccttggctgtgcctaggggccctagtagctagcagcagcagcagggacggcacatcatgccagctgctgtgatctgaagaggcgtttagctcatcatatgcctcaccttaggcctgtgggggattttccattcaaactcgtcgatgatactacatctttctttctccatctgtgtcgtttgtgttgtaagacagtgacttctgaagtctgatcgtctcggttctttttattaacatctgatatacgttactgcctgtctatagtagttaaagattgtcagcgtatctcaaaagacttaatacctttcgaaggagaagatatgcatcgttggggacgtagctcatatggtagagcg

SEQ ID NO: 56166 - DNA, 1534 bp, Zea Mays
atgagacccaaatatttaacgggcaagtggccatcatggccgtgtttctggagacttcctgcggcgcgtggagagtggaggcagggggagaaggaagcagcagcagcagcagcagcagctccatccgctcgcttccttcccccaccgccagcgtcgcctctccgtgtgcgcgccccgccgggggtggcgtcgctgcacctttgggcagcaggcacctacgtgcggggggagccacacgcctccctctcgcctcttggcatggacgccggcggagagaagtgcggcgacgcggcggcagagggcggagacctctacgcggttctcgggctaaaaaaggagtgctccgaggccgagcttaaggtcgcttaccggaagctcgccaagaaatggcacccggacaaatgctcgtcctccagcagcgtgaagcacatggaggaagccaaggagaagttccaagagatccagggcgcctattccggtctcaatcttccttctctcagcaccctcacacaatacacccgcctcactgctctgttccatccatattcgcaaaccaccccttcacctgtggcaactactgaccaacgacaactgataaactgaacagcagcaaacggaaccgatctagcctgttggtaaactcattgcgtggagcccttgtgctcccatcccattgttcttgtgcagtactctccgacgccaataaacggctcctctacgatgtgggagtatatgacgatgaggacgacgaggaaagcatgcaggggatgggggacttcatcggtgagatggcccatcagtttcaggggccagccaaaagtagaacatgctcgacctcaccttcatcatcaccgtcccctcctcctaccacagcaaaggatgcagaggtgccatcatgtaatggcttcaataagcggggttcatcagctctggactcagggaagcctccaaagcctgttgaaggtggtgcaggtcagaaccaggctggattctgttttggggtgagcgacacgaaggaaacgccgaagctgccaggtcagaacgccagccggaggaggaacggccggaaacagaagctgtcatccaagcacgatgtttcatctgaagatgaaacggcggccggttcgtagcacaccagcagtttgacccattggcttcggtgatatatcattcgttggcccttggctgtgcctaggggccctagtagctagcagcagcagcagggacggcacatcatgccagctgctgtgatctgaagaggcgtttagctcatcatatgcctcaccttaggcctgtgggggattttccattcaaactcgtcgatgatactacatctttctttctccatctgtgtcgtttgtgttgtaagacagtgacttctgaagtctgatcgtctcggttctttttattaacatctgatatacgttactgcctgtctatagtagttaaagattgtcagcgtatctcaaaagacttaatacctttcgaaggagaagatatgcatcgttggggacgtagctcatatggtagagcg

SEQ ID NO: 56167 - DNA, 1092 bp, Zea Mays
cgtccgcgtccgcgctctccaaagtttcgtccaccatttcgctcccgcaagcaccgatttgtttactgctctctccgacgcgcggcggcggagctccctacgacgactgaaccatgtgcggcggcgcgatccttgccaaccttcgcgagccggcgccgcgccggctcacagagcgggacatctggcagcagaaaaagaagctctccaatttatttgttcagcatggcaatatgccatttgttccagcaatgaactctactgcttctgttgatgatcttatcatgaatctgcactctgaccagggaagtaactcctttggctgctcagacttgggctgggagaatgataccaagacaccagacatcacttccattgctcccatttccactattgcggaaggcgacgagtctgcatttgtcgacagcaattcaaacagctcatttgtgcttcctgccctggagaacagtgctgttgatctcactgatgggctgacagatttagaatcctatatgaggtttcttctggatggtggtccaagtgattcagttgatagccttctgaaccttgatggatcgcaggatgttggtagcgacatggacctctggagcttcgacgacatgcccatcgtcggcgatttcttttgaggattttgaagcttggtcataggagtatgtacatagggactaggggaataaagaccgggggagattgggaagcacctgcttggcaccttgggggtagcatttgctcgtgtctagctcagagatgcagaagttgcattctgaaactacttggttatcgacctgttccctattttagctatctctttatgagagccatttatgagactgaaccattttgttttgctttcttttcgttgttacaatatatggtttaacattatgatttatggatatgtgccaaatatggtgctcaacagtggtcaaacatgccttttagatgctcttgtttctcgtattgttgtgtaccttgtgatatttcattcgttgaaattgagttaaactagttatctgctgaaacttttcttgtacaagcaaaagtattcaagatttaatcttattggcatttggc

SEQ ID NO: 56168 - DNA, 1726 bp, Zea Mays
ggaaggtcccttggagaagaggaaagaaaaaggtcccttggagaagaggaaagaaaaataccgacaaaacgagaagtcgaagtaccccagaggcccagacaaaggcatctccaatctcctcgccccccacggacctgaaccgagaaccgttaccgccgccggagaagcgccgctcgctcaggaggacagccatggcgccggagccggaggatgatattatgaacgagaagaatccccgcccgctcgacgaggatgacatcgcgctcctcaaaacctatggactggggccgtattcgactagcattaagaaggtcgagaaggagatcaaggaaatggccaagaaaatcaacgacctctgtgggataaaggagtctgatacagggctggctccacctagccagtgggatttggtttcagataagcagatgatgcaagaagaacaaccgttacaagtagcaagatgtacaaagattataagccctaatacggatgatgccaaatatgttataaatgtaaaacaaattgcaaagtttgtggttggattgggagataaggtctctccaactgatatcgaggaagggatgagggttggtgttgatcgcaacaagtaccagattcaaatccctctcccaccaaaaattgacccaagtgttaccatgatgactgtggaggaaaagccagatgtgacgtacaatgatgtcggtggctgcaaggagcagattgagaagatgcgtgaagttgttgaacttcctatgcttcacccagaaaagtttgtcaagcttggtattgaccctccgaaaggtgtcctttgctatggcccacctggtactggcaagacacttcttgcaagagctgtagcaaaccggactgatgcttgtttcatccgtgtaattggaagtgagctagttcagaagtatgttggagaaggtgctcggatggtcagggaactgttccaggcatgcattgtattctttgatgaagttgatgcaattggtggtgctcgttttgatgatggggttggtggtgacaatgaggtgcagcgtacaatgttggaaatagtaaaccaacttgatgggtttgatgcaagagggaacatcaaagttctcatggccactaataggcctgataccttggatcctgcacttctgcgccctggtcgcttggacagaaaggtggaattcgggctacctgacttggagggccgtacccaaattttcaagatccatacacgtaccatgaactgtgagcgagatattcgtttcgagcttctggcacggctctgccccaactctactggagctgatataaggagcgtttgcacagaagccgggatgtacgccattcgcgcccgcaggaaaacggtgacagaaaaggattttctcgatgctgtcaacaaggtcatcaagggctaccagaagttcagtgcaacacccaagtatatggtgtacaactagtcggcgtgtcttcatgggatctgttgtttctagaaactctggatctttttcatggttgtatcatcatgagattctctatgcaaaggttgttgtttgtttagcaaattggatgccgagtgatttgtgacctgtaccgcatgtttttaagataacaaggttcttcgctcggtggttcactgctgcttgtgtctatgactgatgatgtgcacagggcgcaaagttcattcggaaaactgacgcaatgtaaacatcaggtaacgcaggttgttgtt

SEQ ID NO: 56169 - DNA, 1568 bp, Zea Mays
ggaaggtcccttggagaagaggaaagaaaaaggtcccttggagaagaggaaagaaaaataccgacaaaacgagaagtcgaagtaccccagaggcccagacaaaggcatctccaatctcctcgccccccacggacctgaaccgagaaccgttaccgccgccggagaagcgccgctcgctcaggaggacagccatggcgccggagccggaggatgatattatgaacgagaagaatccccgcccgctcgacgaggatgacatcgcgctcctcaaaacctatggactggggccgtattcgactagcattaagaaggtcgagaaggagatcaaggaaatggccaagaaaatcaacgacctctgtgggataaaggagtctgatacagggctggctccacctagccagtgggatttggtttcagataagcagatgatgcaagaagaacaaccgttacaagtagcaagatgtacaaagattataagccctaatacggatgatgccaaatatgttataaatgtaaaacaaattgcaaagtttgtggttggattgggagataaggtctctccaactgatatcgaggaagggatgagggttggtgttgatcgcaacaagtaccagattcaaatccctctcccaccaaaaattgacccaagtgttaccatgatgactgtggaggaaaagccagatgtgacgtacaatgatgtcggtggctgcaaggagcagattgagaagatgcgtgaagttgttgaacttcctatgcttcacccagaaaagtttgtcaagcttggtattgaccctccgaaaggtgtcctttgctatggcccacctggtactggcaagacacttcttgcaagagctgtagcaaaccggactgatgcttgtttcatccgtgtaattggaagtgagctagttcagaagtatgttggagaaggtgctcggatggtcagggaactgttccagatggcccgctcaaagaaggcatgcattgtattctttgatgaagttgatgcaattggtggtgctcgttttgatgatggggttggtggtgacaatgaggtgcagcgtacaatgttggaaatagtaaaccaacttgatgggtttgatgcaagagggaacatcaaagttctcatggccactaataggagctgatataaggagcgtttgcacagaagccgggatgtacgccattcgcgcccgcaggaaaacggtgacagaaaaggattttctcgatgctgtcaacaaggtcatcaagggctaccagaagttcagtgcaacacccaagtatatggtgtacaactagtcggcgtgtcttcatgggatctgttgtttctagaaactctggatctttttcatggttgtatcatcatgagattctctatgcaaaggttgttgtttgtttagcaaattggatgccgagtgatttgtgacctgtaccgcatgtttttaagataacaaggttcttcgctcggtggttcactgctgcttgtgtctatgactgatgatgtgcacagggcgcaaagttcattcggaaaactgacgcaatgtaaacatcaggtaacgcaggttgttgtt

SEQ ID NO: 56170 - DNA, 1810 bp, Zea Mays
ggaaggtcccttggagaagaggaaagaaaaaggtcccttggagaagaggaaagaaaaataccgacaaaacgagaagtcgaagtaccccagaggcccagacaaaggcatctccaatctcctcgccccccacggacctgaaccgagaaccgttaccgccgccggagaagcgccgctcgctcaggaggacagccatggcgccggagccggaggatgatattatgaacgagaagaatccccgcccgctcgacgaggatgacatcgcgctcctcaaaacctatggactggggccgtattcgactagcattaagaaggtcgagaaggagatcaaggaaatggccaagaaaatcaacgacctctgtgggataaaggagtctgatacagggctggctccacctagccagtgggatttggtttcagataagcagatgatgcaagaagaacaaccgttacaagtagcaagatgtacaaagattataagccctaatacggatgatgccaaatatgttataaatgtaaaacaaattgcaaagtttgtggttggattgggagataaggtctctccaactgatatcgaggaagggatgagggttggtgttgatcgcaacaagtaccagattcaaatccctctcccaccaaaaattgacccaagtgttaccatgatgactgtggaggaaaagccagatgtgacgtacaatgatgtcggtggctgcaaggagcagattgagaagatgcgtgaagttgttgaacttcctatgcttcacccagaaaagtttgtcaagcttggtattgaccctccgaaaggtgtcctttgctatggcccacctggtactggcaagacacttcttgcaagagctgtagcaaaccggactgatgcttgtttcatccgtgtaattggaagtgagctagttcagaagtatgttggagaaggtgctcggatggtcagggaactgttccaggtatatctagggctgtgaatccgtaaaaggttcatccagtttttttcctgcacacatgttaatatttctgaaacaaaatattctattgtagatggcccgctcaaagaaggcatgcattgtattctttgatgaagttgatgcaattggtggtgctcgttttgatgatggggttggtggtgacaatgaggtgcagcgtacaatgttggaaatagtaaaccaacttgatgggtttgatgcaagagggaacatcaaagttctcatggccactaataggcctgataccttggatcctgcacttctgcgccctggtcgcttggacagaaaggtggaattcgggctacctgacttggagggccgtacccaaattttcaagatccatacacgtaccatgaactgtgagcgagatattcgtttcgagcttctggagctgatataaggagcgtttgcacagaagccgggatgtacgccattcgcgcccgcaggaaaacggtgacagaaaaggattttctcgatgctgtcaacaaggtcatcaagggctaccagaagttcagtgcaacacccaagtatatggtgtacaactagtcggcgtgtcttcatgggatctgttgtttctagaaactctggatctttttcatggttgtatcatcatgagattctctatgcaaaggttgttgtttgtttagcaaattggatgccgagtgatttgtgacctgtaccgcatgtttttaagataacaaggttcttcgctcggtggttcactgctgcttgtgtctatgactgatgatgtgcacagggcgcaaagttcattcggaaaactgacgcaatgtaaacatcaggtaacgcaggttgttgtt

SEQ ID NO: 56171 - DNA, 1651 bp, Zea Mays
gggagcaatgttcctcaccaaacaggctcctaaggatttccttcaaatcattgattttgacaaggatacaataatgaaggttcttaatcgagccattgaggttaaggcattgataaagtctggagacaagagcttccaaccgttcaaagggaaaacaatggtcatgatttttgccaagccatcaatgaggacccgtgtttcatttgagacaggattctttttacttggtgggcatgctatttatttgggtccagatgatatccagatgggcaagcgtggcctgtttgacaaggccgcaaagctacaacgcccaagaagattgaaaggggaaaatgcgcagtactcgatctacttatcctgcaagaagcaacttcaatgataagaacaagcttggggaaggcgggtttagtaccgtgtacaagttgtacaggtaagcaacacaactcagtatgcaagggagcgaagcgtagcatcgtctgcgctcttcttccttcgcatcaaggtggatgaattttatagggaaaggtcacagatagaaataaaataccggtgaagaacttgtcccggtgtagtatacaaagactggaccagctgcacaatgagatgcaagtatcggtcaatcttcaacacgagaagcttgtcagactattggggttctgcatgcaccgggacgagatgatgctcgactatgcacatatgaagaacggaagccttgacagactaagcaatgatagtagatattgttgatctgtcaatgatgatgatgaggtggttgtcacagaagaacacaatattgatagaaatggtgtttatgcgaaggcattttcttacttgacaagtgacaatgacattcttgaaagagagcatatttcttacgaacaaggagattctattcaaggcacatcatttcttaaacaagggttcattatagatgatggacaagctgaagttgcccagtgcatggtaacattagagatgcaaaatcttggatcagatggtggatgttatgcttctcaatgcacagagatattgcggtgcaaatacttagaggagatggtggacggagtgatgctgcccactccacaggaacactactgatacgagaacttaaaacaaatggtggacaacatgatgcggtccagtgcatatcaagtctacatgtgcaaaagcttagagaaaatcaaatcaagctttatgggtcctcgtccttcctagaatctattgtagatgacacaagaggtgattttactcactacacaatagactgcaatggcataaagctcagtgcaccacaacattgctaagacaggagtttcaagctgcacgtgatagcatgcaagaggttatggtgagaaattcagttgaagctaccacatccttgacaagtacacaacaagggagacacatgagaactggattattcaatgtgtcaactgtgacaccatttccccggcaattttgatcttgccacgtcaaggtcttctccgagtgagtgaattcacattgatagagattgggcatttcgtggacctagaggacaaatcacatccaaaatttgttgatgtggctcctatcaagtgcaccgtgttcccctcttcaagaatcaagagtttgatgctgccgccaaagagatcaccaaggcattaacaac
